United States Patent Application Publication US 2024/0398993 A1 - sequence listing, part 12

SEQ ID NO: 37330 - protein, 866 aa, Homo sapiens
MNGEQQLDADAGSGMEEVELSWEDYLEETGSTAVPYGSFKHVDTRLQNGFAPGMKLEVAVRTDPETYWVATVITTCEQLLLLRYDGYGEDRRADFWCDIRKADLYPIGWCEQNKKTLEAPEGIRDKVSDWDEFLRQTLIGACSPPVPLLEGLRNGRNPLDLIAPGSRLECQAFQDSLSTWIVTVVENIGGRLKLRYEGLESSDNYEHWLYYLDPFLHHVGWAAQQGYELQPPSAIRHLKNEAEWQEILAKVKEEEEEPLPSYLFKDKQVIGIHTFSVNMKLEAVDPWSPFGISPATVVKVFDEKYFLVEMDDLRPENHARRSFVCHADSPGIFPVQWSLKNGLHISPPPGYPSQDFDWADYLKQCGAEAAPQRCFPPLISEHEFKENMKLEAVNPILPEEVCVATITAVRGSYLWLQLEGSKKPIPECIVSVESMDIFPLGWCETNGHPLSTPRRARVYKQRKIAVVQPEKQVPSSRTVHEGLRNQELNSTESVMINGKYCCPKIYFNHRCFSGPYLNKGRIAELPQCVGPGNCVLVLREVLTLLINAAYKPSRVLRELQLDKDSVWHGCGEVLKAKYKGKSYRATVEIVKTADRVTEFCRQTCIKLECCPNLFGPRMVLDKCSENCSVLTKTKYTHYYGKKKNKRIGRPPGGHSNLACALKKASKRRKRRKNVFVHKKKRSSASVDNTPAGSPQGSGGEDEDDPDEGDDDSLSEGSTSEQQDELQEESEMSEKKSCSSSPTQSEISTSLPPDRQRRKRELRTFSFSDDENKPPSPKEIRIEVAERLHLDSNPLKWSVADVVRFIRSTDCAPLARIFLDQEIDGQALLLLTLPTVQECMDLKLGPAIKLCHHIERIKFAFYEQFAN

SEQ ID NO: 37331 - protein, 823 aa, Homo sapiens
MNGEQQLDADAGSGMEEVELSWEDYLEETGSTAVPYGSFKHVDTRLQNGFAPGMKLEVAVRTDPETYWVATVITTCEQLLLLRYDGYGEDRRADFWCDIRKADLYPIGWCEQNKKTLEAPEGIRDKVSDWDEFLRQTLIGACSPPVPLLEGLRNGRNPLDLIAPGSRLECQAFQDSLSTWIVTVVENIGGRLKLRYEGLESSDNYEHWLYYLDPFLHHVGWAAQQGYELQPPSAIRHLKNEAEWQEILAKVKEEEEEPLPSYLFKDKQVIGIHTFSVNMKLEAVDPWSPFGISPATVVKVFDEKYFLVEMDDLRPENHARRSFVCHADSPGIFPVQWSLKNGLHISPPPGYPSQDFDWADYLKQCGAEAAPQRCFPPLISEHEFKENMKLEAVNPILPEEVCVATITAVRGSYLWLQLEGSKKPIPECIVSVESMDIFPLGWCETNGHPLSTPRRARVYKQRKIAVVQPEKQVPSSRTVHEGLRNQELNSTESVMINGKYCCPKIYFNHRCFSGPYLNKGRIAELPQCVGPGNCVLVLREVLTLLINAAYKPSRVLRELQLDKDSVWHGCGEVLKAKYKGKSYRATVEIVKTADRVTEFCRQTCIKLECCPNLFGPRMVLDKCSENCSVLTKTKYTHYYGKKKNKRIGRPPGGHSNLACALKKASKRRKRRKNVFVHKKKRSSASVDNTPAGSPQGSGGEDEDDPDEGDDDSLSEGSTSEQQDELQEESEMSEKKSCSSSPTQSEISTSLPPDRQRRKRELRTFSFSDDENKPPSPKEIDGQALLLLTLPTVQECMDLKLGPAIKLCHHIERIKFAFYEQFAN

SEQ ID NO: 37332 - protein, 541 aa, Homo sapiens
MADEDGEGIHPSAPHRNGGGGGGGGSGLHCAGNGGGGGGGPRVVRIVKSESGYGFNVRGQVSEGGQLRSINGELYAPLQHVSAVLPGGAADRAGVRKGDRILEVNHVNVEGATHKQVVDLIRAGEKELILTVLSVPPHEADNLDPSDDSLGQSFYDYTEKQAVPISVPRYKHVEQNGEKFVVYNVYMAGRQLCSKRYREFAILHQNLKREFANFTFPRLPGKWPFSLSEQQLDARRRGLEEYLEKVCSIRVIGESDIMQEFLSESDENYNGVSDVELRVALPDGTTVTVRVKKNSTTDQVYQAIAAKVGMDSTTVNYFALFEVISHSFVRKLAPNEFPHKLYIQNYTSAVPGTCLTIRKWLFTTEEEILLNDNDLAVTYFFHQAVDDVKKGYIKAEEKSYQLQKLYEQRKMVMYLNMLRTCEGYNEIIFPHCACDSRRKGHVITAISITHFKLHACTEEGQLENQVIAFEWDEMQRWDTDEEGMAFCFEYARGEKKPRWVKIFTPYFNYMHECFERVFCELKWRKENIFQMARSQQRDVAT

SEQ ID NO: 37333 - protein, 528 aa, Homo sapiens
MADEDGEGIHPSAPHRNGGGGGGGGSGLHCAGNGGGGGGGPRVVRIVKSESGYGFNVRGQVSEGGQLRSINGELYAPLQHVSAVLPGGAADRAGVRKGDRILEVNHVNVEGATHKQVVDLIRAGEKELILTVLSVPPHEADNLDPSDDSLGQSFYDYTEKQAVPISVPRYKHVEQNGEKFVVYNVYMAGRQLCSKRYREFAILHQNLKREFANFTFPRLPGKWPFSLSEQQLDARRRGLEEYLEKVCSIRVIGESDIMQEFLSESDENYNGVSDVELRVALPDGTTVTVRVKKNSTTDQVYQAIAAKVGMDSTTVNYFALFEVISHSFVRKLAPNEFPHKLYIQNYTSAVPGTCLTIRKWLFTTEEEILLNDNDLAVTYFFHQAVDDVKKGYIKAEEKSYQLQKLYEQRKMVMYLNMLRTCEGYNEIIFPHCACDSRRKGHVITAISITHFKLHACTEEGQLENQVIAFEWDEMQRWDTDEEGMAFCFEYARGEKKPRWVKIFTPYFNYMHECFERVFCELKWRKEEY

SEQ ID NO: 37334 - protein, 435 aa, Homo sapiens
MGLSFSLFPLRNHVNVEGATHKQVVDLIRAGEKELILTVLSVPPHEADNLDPSDDSLGQSFYDYTEKQAVPISVPRYKHVEQNGEKFVVYNVYMAGRQLCSKRYREFAILHQNLKREFANFTFPRLPGKWPFSLSEQQLDARRRGLEEYLEKVCSIRVIGESDIMQEFLSESDENYNGVSDVELRVALPDGTTVTVRVKKNSTTDQVYQAIAAKVGMDSTTVNYFALFEVISHSFVRKLAPNEFPHKLYIQNYTSAVPGTCLTIRKWLFTTEEEILLNDNDLAVTYFFHQAVDDVKKGYIKAEEKSYQLQKLYEQRKMVMYLNMLRTCEGYNEIIFPHCACDSRRKGHVITAISITHFKLHACTEEGQLENQVIAFEWDEMQRWDTDEEGMAFCFEYARGEKKPRWVKIFTPYFNYMHECFERVFCELKWRKEEY

SEQ ID NO: 37335 - protein, 520 aa, Homo sapiens
MGKPSSMDTKFKDDLFRKYVQFHESKVDTTTSRQRPGSDECLRVAASTLLSLHKVDPFYRFRLIQFYEVVESSLRSLSSSSLRALHGAFSMLETVGINLFLYPWKKEFRSIKTYTGPFVYYVKSTLLEEDIRAILSCMGYTPELGTAYKLRELVETLQVKMVSFELFLAKVECEQMLEIHSQVKDKGYSELDIVSERKSSAEDVRGCSDALRRRAEGREHLTASMSRVALQKSASERAAKDYYKPRVTKPSRSVDAYDSYWESRKPPLKASLSLRKEPVATDVGDDLKDEIIRPSPSLLTMASSPHGSPDVLPPASPSNGPALLRGTYFSTQDDVDLYTDSEPRATYRRQDALRPDVWLLRNDAHSLYHKRSPPAKESALSKCQSCGLSCSSSLCQRCDSLLTCPPASKPSAFPSKASTHDSLAHGASLREKYPGQTQGLDRLPHLHSKSKPSTTPTSRCGFCNRPGATNTCTQCSKVSCDACLSAYHYDPCYKKSELHKFMPNNQLNYKSTQLSHLVYR

SEQ ID NO: 37336 - protein, 144 aa, Homo sapiens
MACAAARSPADQDRFICIYPAYLNNKKTIAEGRRIPISKAVENPTATEIQDVCSAVGLNVFLEKNKMYSREWNRDVQYRGRVRVQLKQEDGSLCLVQFPSRKSVMLYAAEMIPKLKTRTQKTGGADQSLQQGEGSKKGKGKKKK

SEQ ID NO: 37337 - protein, 110 aa, Homo sapiens
MACAAARSPADQDRFICIYPAYLNNKKTIAEGRRIPISKAVENPTATEIQDVCSAVGLNVFLEKNKMYSREWNRDVQYRGRVRVQLKQEDGSLCLVQFPSHYTLSLTSGS

SEQ ID NO: 37338 - protein, 78 aa, Homo sapiens
MACAAARSPADQDRLLKILQLQRFKMYVQQLDLTYFLRKIKCTLENGIVMSNTEAESGSSSNRKMGASALYSSHHVSQ

SEQ ID NO: 37339 - protein, 748 aa, Homo sapiens
MADSSGQQGKGRRVQPQWSPPAGTQPCRLHLYNSLTRNKEVFIPQDGKKVTWYCCGPTVYDASHMGHARSYISFDILRRVLKDYFKFDVFYCMNITDIDDKIIKRARQNHLFEQYREKRPEAAQLLEDVQAALKPFSVKLNETTDPDKKQMLERIQHAVQLATEPLEKAVQSRLTGEEVNSCVEVLLEEAKDLLSDWLDSTLGCDVTDNSIFSKLPKFWEGDFHRDMEALNVLPPDVLTRVSEYVPEIVNFVQKIVDNGYGYVSNGSVYFDTAKFASSEKHSYGKLVPEAVGDQKALQEGEGDLSISADRLSEKRSPNDFALWKASKPGEPSWPCPWGKGRPGWHIECSAMAGTLLGASMDIHGGGFDLRFPHHDNELAQSEAYFENDCWVRYFLHTGHLTIAGCKMSKSLKNFITIKDALKKHSARQLRLAFLMHSWKDTLDYSSNTMESALQYEKFLNEFFLNVKDILRAPVDITGQFEKWGEEEAELNKNFYDKKTAIHKALCDNVDTRTVMEEMRALVSQCNLYMAARKAVRKRPNQALLENIALYLTHMLKIFGAVEEDSSLGFPVGGPGTSLSLEATVMPYLQVLSEFREGVRKIAREQKVPEILQLSDALRDNILPELGVRFEDHEGLPTVVKLVDRNTLLKEREEKRRVEEEKRKKKEEAARRKQEQEAAKLAKMKIPPSEMFLSETDKYSKFDENGLPTHDMEGKELSKGQAKKLKKLFEAQEKLYKEYLQMAQNGSFQ

SEQ ID NO: 37340 - protein, 726 aa, Homo sapiens
MADSSGQQGKGRRVQPQWSPPAGTQPCRLHLYNSLTRNKEVFIPQDGKKVTWYCCGPTVYDASHMGHARSYISFDILRRVLKDYFKFDVFYCMNITDIDDKIIKRARQNHLFEQYREKRPEAAQLLEDVQAALKPFSVKLNETTDPDKKQMLERIQHAVQLATEPLEKAVQSRLTGEEVNSCVEVLLEEAKDLLSDWLDSTLGCDVTDNSIFSKLPKFWEGDFHRDMEALNVLPPDVLTRVSEYVPEIVNFVQKIVDNGYGYVSNGSVYFDTAKFASSEKHSYGKLVPEAVGDQKALQEGEGDLSISADRLSEKRSPNDFALWKASKPGEPSWPCPWGKGRPGWHIECSAMAGTLLGASMDIHGGGFDLRFPHHDNELAQSEAYFENDCWVRYFLHTGHLTIAGCKMSKSLKNFITIKDALKKHSARQLRLAFLMHSWKDTLDYSSNTMESALQYEKFLNEFFLNVKDILRAPVDITGQFEKWGEEEAELNKNFYDKKTAIHKALCDNVDTRTVMEEMRALVSQCNLYMAARKAVRKRPNQALLENIALYLTHMLKIFGAVEEDSSLGFPVGGPGTSLSLEATVMPYLQVLSEFREGVRKIAREQKVPEILQLSDALRDNILPELGVRFEDHEGLPTVVKLVDRNTLLKEREEKRRVEEEKRKKKEEAARRKQEQEAAKLAKMKIPPSEMFLSETDKYSKFDENVSMVCPHMTWRAKSSAKGKPRS

SEQ ID NO: 37341 - protein, 831 aa, Homo sapiens
MADSSGQQAPDYRSILSISDEAARAQALNEHLSTRSYVQGYSLSQADVDAFRQLSAPPADPQLFHVARWFRHIEALLGSPCGKGQPCRLQASKGRRVQPQWSPPAGTQPCRLHLYNSLTRNKEVFIPQDGKKVTWYCCGPTVYDASHMGHARSYISFDILRRVLKDYFKFDVFYCMNITDIDDKIIKRARQNHLFEQYREKRPEAAQLLEDVQAALKPFSVKLNETTDPDKKQMLERIQHAVQLATEPLEKAVQSRLTGEEVNSCVEVLLEEAKDLLSDWLDSTLGCDVTDNSIFSKLPKFWEGDFHRDMEALNVLPPDVLTRVSEYVPEIVNFVQKIVDNGYGYVSNGSVYFDTAKFASSEKHSYGKLVPEAVGDQKALQEGEGDLSISADRLSEKRSPNDFALWKASKPGEPSWPCPWGKGRPGWHIECSAMAGTLLGASMDIHGGGFDLRFPHHDNELAQSEAYFENDCWVRYFLHTGHLTIAGCKMSKSLKNFITIKDALKKHSARQLRLAFLMHSWKDTLDYSSNTMESALQYEKFLNEFFLNVKDILRAPVDITGQFEKWGEEEAELNKNFYDKKTAIHKALCDNVDTRTVMEEMRALVSQCNLYMAARKAVRKRPNQALLENIALYLTHMLKIFGAVEEDSSLGFPVGGPGTSLSLEATVMPYLQVLSEFREGVRKIAREQKVPEILQLSDALRDNILPELGVRFEDHEGLPTVVKLVDRNTLLKEREEKRRVEEEKRKKKEEAARRKQEQEAAKLAKMKIPPSEMFLSETDKYSKFDENGLPTHDMEGKELSKGQAKKLKKLFEAQEKLYKEYLQMAQNGSFQ

SEQ ID NO: 37342 - protein, 621 aa, Homo sapiens
MIATGGLLRISARKQDPLRPPSQIPKRKRKAKKRRKNDVVVVKGKLKLCSISGLIALCGILVLLVGIAMAVVGYWPKATGTNREGGKQLPPAGSSHRVPTTANSSSSGSKNRSRSHPRAPGGVNSSSAGAPRSTPPARAASPSSSSTSVGFFFRIFSGYLHSDKLKVFGPLIMGIGIFLFICANAVLHENRDKKTKIINLRDLYSTVIDVHSLRAKDLAAAAAAAAAAAASSSSSAPAAAPPGAIPLNGFLSYVQSRGLELKPGGCGGSGDAFGAAAMLAKGSWPPHPAAPSGGRPRGAASPPDLASSPRCPREPPSLAEAVYSVYRERSGVAGSRRAAAATAAAAASSCSSPAPCSPPESWGRQSTASSFVDSSLSAFALLPLQGGRDRGGDAEGASCSWQRPPGERGSQEIPRGELDLSMTNLRGAEGSMRGARREPEEPEGAVAARAARGQGGRLPRTGRYAALRRRSTSGLPDYRAPPSPEPPPSPGSADPDSSPLAKAASPSPPLRLEGSPPTRRDSGSSQSDDPSSSNKGYTPLREAGTSTESVLDAVAGQTRDSAVAAPVLGAEQSSPEGASQEPPTAEQPQPVQRQFTNKEKLIMISRSHAIGVEEELESTGI

SEQ ID NO: 37343 - protein, 152 aa, Homo sapiens
MEDEEVAESWEEAADSGEIDRRLEKKLKITQKESRKSKSPPKVPIVIQDDSLPAGPPPQIRILKRPTSNGVVSSPNSTSRPTLPVKSLAQREAEYAEARKRILGSASPEEEQEKPILDRPTRISQPEDSRQPNNVIRQPLGPDGSQGFKQRR

SEQ ID NO: 37344 - protein, 132 aa, Homo sapiens
MRRSLRAGKRRQTAGKSKSPPKVPIVIQDDSLPAGPPPQIRILKRPTSNGVVSSPNSTSRPTLPVKSLAQREAEYAEARKRILGSASPEEEQEKPILDRPTRISQPEDSRQPNNVIRQPLGPDGSQGFKQRR

SEQ ID NO: 37345 - protein, 134 aa, Homo sapiens
MEDEEVAESWEEAADSGKSKSPPKVPIVIQDDSLPAGPPPQIRILKRPTSNGVVSSPNSTSRPTLPVKSLAQREAEYAEARKRILGSASPEEEQEKPILDRPTRISQPEDSRQPNNVIRQPLGPDGSQGFKQRR

SEQ ID NO: 37346 - protein, 133 aa, Homo sapiens
MRRSLRAGKRRQTAGRKSKSPPKVPIVIQDDSLPAGPPPQIRILKRPTSNGVVSSPNSTSRPTLPVKSLAQREAEYAEARKRILGSASPEEEQEKPILDRPTRISQPEDSRQPNNVIRQPLGPDGSQGFKQRR

SEQ ID NO: 37347 - protein, 151 aa, Homo sapiens
MEDEEVAESWEEAADSGEIDRRLEKKLKITQKERKSKSPPKVPIVIQDDSLPAGPPPQIRILKRPTSNGVVSSPNSTSRPTLPVKSLAQREAEYAEARKRILGSASPEEEQEKPILDRPTRISQPEDSRQPNNVIRQPLGPDGSQGFKQRR

SEQ ID NO: 37348 - protein, 258 aa, Homo sapiens
MTHDKSWRRCSISGSTKCRCGSRIAGPNALGSGGSRSSSSSSRSILSSSILSSSIPSSSSSSSSPSSSHSSSSPSSSHSSSSPSSSSSTSSPSSSSSSSSSSSPSSSNSSSSSSSSSPSSSSSSSSSSPSSSSSSPSSSSSSSSSSPSSSSSSPSSSSSSSSSSSSSPSSSSPSSSGSSPSSSNSSPSSSSSSPSSSSSSPSPRSSSPSSSSSSTSSPSTSSPSSSSPSSSSPSSSCPSAALGRRPQSPQSSHCAPFP

SEQ ID NO: 37349 - protein, 186 aa, Homo sapiens
MDADSDVALDILITNVVCVFRTRCHLNLRKIALEGANVIYKRDVGKVLMKLRKPRITATIWSSGKIICTGATSEEEAKFGARRLARSLQKLGFQVIFTDFKVVNVLAVCNMPFEIRLPEFTKNNRPHASYEPELHPAVCYRIKSLRATLQIFSTGSITVTGPNVKAVATAVEQIYPFVFESRKEIL

SEQ ID NO: 37350 - protein, 114 aa, Homo sapiens
MEKPLFPLVPLHWFGFGYTALVVSGGIVGYVKTGSVPSLAAGLLFGSLAGLGAYQLYQDPRNVWGFLAATSVTFVGVMGMRSYYYGKFMPVGLIAGASLLMAAKVGVRMLMTSD

SEQ ID NO: 37351 - protein, 80 aa, Homo sapiens
MEKPLFPLVPLHWFGFGYTALVVSGGIVGYVKTAATSVTFVGVMGMRSYYYGKFMPVGLIAGASLLMAAKVGVRMLMTSD

SEQ ID NO: 37352 - protein, 348 aa, Homo sapiens
MLTSLTDLCFSPIQVAEIKSLPKSMNETNHSRVTEFVLLGLSSSRELQPFLFLTFSLLYLAILLGNFLIILTVTSDSRLHTPMYFLLANLSFIDVCVASFATPKMIADFLVERKTISFDACLAQIFFVHLFTGSEMVLLVSMAYDRYVAICKPLHYMTVMSRRVCVVLVLISWFVGFIHTTSQLAFTVNLPFCGPNKVDSFFCDLPLVTKLACIDTYVVSLLIVADSGFLSLSSFLLLVVSYTVILVTVRNRSSASMAKARSTLTAHITVVTLFFGPCIFIYVWPFSSYSVDKVLAVFYTIFTLILNPVIYTLRNKEVKAAMSKLKSRYLKPSQVSVVIRNVLFLETK

SEQ ID NO: 37353 - protein, 324 aa, Homo sapiens
MSFFFVDLRPMNRSATHIVTEFILLGFPGCWKIQIFLFSLFLVIYVLTLLGNGAIIYAVRCNPLLHTPMYFLLGNFAFLEIWYVSSTIPNMLVNILSKTKAISFSGCFLQFYFFFSLGTTECLFLAVMAYDRYLAICHPLQYPAIMTVRFCGKLVSFCWLIGFLGYPIPIFYISQLPFCGPNIIDHFLCDMDPLMALSCAPAPITECIFYTQSSLVLFFTSMYILRSYILLLTAVFQVPSAAGRRKAFSTCGSHLVVVSLFYGTVMVMYVSPTYGIPTLLQKILTLVYSVTTPLFNPLIYTLRNKDMKLALRNVLFGMRIRQNS

SEQ ID NO: 37354 - protein, 308 aa, Homo sapiens
MDDENATLLTEFVLTGLTYQSEWKIPLFLAFLVIYLITIMANLGLIAVIWKDSHLHIPMYLFLGSLAFVDAWLSSSVTPKMLISFLAKSMIISVSECKIQFFSFGISGTTECFLLATMAYDRYVAICKPLLYPVIMTNGLCIWLLVLSFIGGFLHALIHEGILFRLTFCNSNIIHHFYCDIIPLLKISCTDPSINFLMLFILSGSIQVFTILTVLVSYTFVLFTILKKKAKDIRKAFSTCGAHLLSVSLYYGPLLFMYVHPASPQADDQDMVESLFYTVIIPFLNPIIYSLRNKQVIDSLTKTLKGNV

SEQ ID NO: 37355 - protein, 315 aa, Homo sapiens
MSITKAWNSSSVTMFILLGFTDHPELQALLFVTFLGIYLTTLAWNLALIFLIRGDTHLHTPMYFFLSNLSFIDICYSSAVAPNMLTDFFWEQKTISFVGCAAQFFFFVGMGLSECLLLTAMAYDRYAAISSPLLYPTIMTQGLCTRMVVGAYVGGFLSSLIQASSIFRLHFCGPNIINHFFCDLPPVLALSCSDTFLSQVVNFLVVVTVGGTSFLQLLISYGYIVSAVLKIPSAEGRWKACNTCASHLMVVTLLFGTALFVYLRPSSSYLLGRDKVVSVFYSLVIPMLNPLIYSLRNKEIKDALWKVLERKKVFS

SEQ ID NO: 37356 - protein, 141 aa, Homo sapiens
MSFSLNFTLPANTTSSPVTGGKETDCGPSLGLAAGIPLLVATALLVALLFTLIHRRRSSIEAMEESDRPCEISEIDDNPKISENPRRSPTHEKNTMGAQEAHIYVKTVAGSEEPVHDRYRPTIEMERRRGLWWLVPRLSLE

SEQ ID NO: 37357 - protein, 131 aa, Homo sapiens
MRMTSSPVTGGKETDCGPSLGLAAGIPLLVATALLVALLFTLIHRRRSSIEAMEESDRPCEISEIDDNPKISENPRRSPTHEKNTMGAQEAHIYVKTVAGSEEPVHDRYRPTIEMERRRGLWWLVPRLSLE

SEQ ID NO: 37358 - protein, 118 aa, Homo sapiens
MDCGPSLGLAAGIPLLVATALLVALLFTLIHRRRSSIEAMEESDRPCEISEIDDNPKISENPRRSPTHEKNTMGAQEAHIYVKTVAGSEEPVHDRYRPTIEMERRRGLWWLVPRLSLE

SEQ ID NO: 37359 - protein, 130 aa, Homo sapiens
MSFSLNFTLPANTDCGPSLGLAAGIPLLVATALLVALLFTLIHRRRSSIEAMEESDRPCEISEIDDNPKISENPRRSPTHEKNTMGAQEAHIYVKTVAGSEEPVHDRYRPTIEMERRRGLWWLVPRLSLE

SEQ ID NO: 37360 - protein, 314 aa, Homo sapiens
MMMVLRNLSMEPTFALLGFTDYPKLQIPLFLVFLLMYVITVVGNLGMIIIIKINPKFHTPMYFFLSHLSFVDFCYSSIVTPKLLENLVMADKSIFYFSCMMQYFLSCTAVVTESFLLAVMAYDRFVAICNPLLYTVAMSQRLCALLVAGSYLWGMFGPLVLLCYALRLNFSGPNVINHFFCEYTALISVSGSDILIPHLLLFSFATFNEMCTLLIILTSYVFIFVTVLKIRSVSGRHKAFSTWASHLTSITIFHGTILFLYCVPNSKNSRQTVKVASVFYTVVNPMLNPLIYSLRNKDVKDAFWKLIHTQVPFH

SEQ ID NO: 37361 - protein, 415 aa, Homo sapiens
MRGANAWAPLCLLLAAATQLSRQQSPERPVFTCGGILTGESGFIGSEGFPGVYPPNSKCTWKITVPEGKVVVLNFRFIDLESDNLCRYDFVDVYNGHANGQRIGRFCGTFRPGALVSSGNKMMVQMISDANTAGNGFMAMFSAAEPNERGDQYCGGLLDRPSGSFKTPNWPDRDYPAGVTCVWHIVAPKNQLIELKFEKFDVERDNYCRYDYVAVFNGGEVNDARRIGKYCGDSPPAPIVSERNELLIQFLSDLSLTADGFIGHYIFRPKKLPTTTEQPVTTTFPVTTGLKPTVALCQQKCRRTGTLEGNYCSSDFVLAGTVITTITRDGSLHATVSIINIYKEGNLAIQQAGKNMSARLTVVCKQCPLLRRGLNYIIMGQVGEDGRGKIMPNSFIMMFKTKNQKLLDALKNKQC

SEQ ID NO: 37362 - protein, 313 aa, Homo sapiens
MSIINTSYVEITTFFLVGMPGLEYAHIWISIPICSMYLIAILGNGTILFIIKTEPSLHEPMYYFLSMLAMSDLGLSLSSLPTVLSIFLFNAPEISSNACFAQEFFIHGFSVLESSVLLIMSFDRFLAIHNPLRYTSILTTVRVAQIGIVFSFKSMLLVLPFPFTLRNLRYCKKNQLSHSYCLHQDVMKLACSDNRIDVIYGFFGALCLMVDFILIAVSYTLILKTVLGIASKKEQLKALNTCVSHICAVIIFYLPIINLAVVHRFARHVSPLINVLMANVLLLVPPLTNPIVYCVKTKQIRVRVVAKLCQRKI

SEQ ID NO: 37363 - protein, 314 aa, Homo sapiens
MEDKNQTVVTEFLLLGLTDHPYQKIVLFFMFLFVYLITLGGNLGMITLIWIDPRLHTPMYFFLRHLSFVDICSSSSVVPKMLCNIFAEKKDITFLGCAAQMWFFGLFEAAECFLLAAMAYDRYVAICKPLLYTLIMSQQVCMQLVVGPYAMALISTMTHTIFTFCLPFCGSNIINHFFCDIFPLLSLACADTWVNKFVLFVLAGAIGVLSGLIIMVSYICILMTILKIQTADGKQKAFFTCFSHLAAVSILYGTLFLIYVRPSSSSSLGIYKVISLFYTVVIPMVNPLIYSLRNKEVKDAFRRKIERKKFIIGR

SEQ ID NO: 37364 - protein, 317 aa, Homo sapiens
MAGRMSTSNHTQFHPSSFLLLGIPGLEDVHIWIGVPFFFVYLVALLGNTALLFVIQTEQSLHEPMYYFLAMLDSIDLGLSTATIPKMLGIFWFNTKEISFGGCLSHMFFIHFFTAMESIVLVAMAFDRYIAICKPLRYTMILTSKIISLIAGIAVLRSLYMVVPLVFLLLRLPFCGHRIIPHTYCEHMGIARLACASIKVNIRFGLGNISLLLLDVILIILSYVRILYAVFCLPSWEARLKALNTCGSHIGVILAFFTPAFFSFLTHRFGHNIPQYIHIILANLYVVVPPALNPVIYGVRTKQIRERVLRIFLKTNH

SEQ ID NO: 37365 - protein, 323 aa, Homo sapiens
MGMEGLLQNSTNFVLTGLITHPAFPGLLFAVVFSIFVVAITANLVMILLIHMDSRLHTPMYFLLSQLSIMDTIYICITVPKMLQDLLSKDKTISFLGCAVQIFYLTLIGGEFFLLGLMAYDRYVAVCNPLRYPLLMNRRVCLFMVVGSWVGGSLDGFMLTPVTMSFPFCRSREINHFFCEIPAVLKLSCTDTSLYETLMYACCVLMLLIPLSVISVSYTHILLTVHRMNSAEGRRKAFATCSSHIMVVSVFYGAAFYTNVLPHSYHTPEKDKVVSAFYTILTPMLNPLIYSLRNKDVAAALRKVLGRCGSSQSIRVATVIRKG

SEQ ID NO: 37366 - protein, 356 aa, Homo sapiens
MAATRSPTRARERERSGAPAAGSDQVHSWMLATSQALDTVWRMAKGFVMLAVSFLVAAICYFRRLHLYSGHKLKWWIGYLQRKFKRNLSVEAEVDLLSYCAREWKGETPRNKLMRKAYEELFWRHHIKCVRQVRRDNYDALRSVLFQIFSQGISFPSWMKEKDIVKLPEKLLFSQGCNWIQQYSFGPEKYTGSNVFGKLRKYVELLKTQWTEFNGIRDYHKRGSMCNTLFSDAILEYKLYEALKFIMLYQVTEVYEQMKTKKVIPSLFRLLFSRETSSDPLSFMMNHLNSVGDTCGLEQIDMFILGYSLEVKIKVFRLFKFNSRDFEVCYPEEPLRDWPEISLLTENDRHYHIPVF

SEQ ID NO: 37367 - protein, 1159 aa, Homo sapiens
MYLSICCCFLLWAPALTLKNLNYSVPEEQGAGTVIGNIGRDARLQPGLPPAERGGGGRSKSGSYRVLENSAPHLLDVDADSGLLYTKQRIDRESLCRHNAKCQLSLEVFANDKEICMIKVEIQDINDNAPSFSSDQIEMDISENAAPGTRFPLTSAHDPDAGENGLRTYLLTRDDHGLFGLDVKSRGDGTKFPELVIQKALDREQQNHHTLVLTALDGGEPPRSATVQINVKVIDSNDNSPVFEAPSYLVELPENAPLGTVVIDLNATDADEGPNGEVLYSFSSYVPDRVRELFSIDPKTGLIRVKGNLDYEENGMLEIDVQARDLGPNPIPAHCKVTVKLIDRNDNAPSIGFVSVRQGALSEAAPPGTVIALVRVTDRDSGKNGQLQCRVLGGGGTGGGGGLGGPGGSVPFKLEENYDNFYTVVTDRPLDRETQDEYNVTIVARDGGSPPLNSTKSFAIKILDENDNPPRFTKGLYVLQVHENNIPGEYLGSVLAQDPDLGQNGTVSYSILPSHIGDVSIYTYVSVNPTNGAIYALRSFNFEQTKAFEFKVLAKDSGAPAHLESNATVRVTVLDVNDNAPVIVLPTLQNDTAELQVPRNAGLGYLVSTVRALDSDFGESGRLTYEIVDGNDDHLFEIDPSSGEIRTLHPFWEDVTPVVELVVKVTDHGKPTLSAVAKLIIRSVSGSLPEGVPRVNGEQHHWDMSLPLIVTLSTISIILLAAMITIAVKCKRENKEIRTYNCRIAEYSHPQLGGGKGKKKKINKNDIMLVQSEVEERNAMNVMNVVSSPSLATSPMYFDYQTRLPLSSPRSEVMYLKPASNNLTVPQGHAGCHTSFTGQGTNASETPATRMSIIQTDNFPAEPNYMGSRQQFVQSSSTFKDPERASLRDSGHGDSDQADSDQDTNKGSCCDMSVREALKMKTTSTKSQPLEQEPEECVNCTDECRVLGHSDRCWMPQFPAANQAENADYRTNLFVPTVEANVETETYETVNPTGKKTFCTFGKDKREHTILIANVKPYLKAKRALSPLLQEVPSASSSPTKACIEPCTSTKGSLDGCEAKPGALAEASSQYLPTDSQYLSPSKQPRDPPFMASDQMARVFADVHSRASRDSSEMGAVLEQLDHPNRDLGRESVDAEEVVREIDKLLQDCRGNDPVAVRK

SEQ ID NO: 37368 - protein, 889 aa, Homo sapiens
MYLSICCCFLLWAPALTLKNLNYSVPEEQGAGTVIGNIGRDARLQPGLPPAERGGGGRSKSGSYRVLENSAPHLLDVDADSGLLYTKQRIDRESLCRHNAKCQLSLEVFANDKEICMIKVEIQDINDNAPSFSSDQIEMDISENAAPGTRFPLTSAHDPDAGENGLRTYLLTRDDHGLFGLDVKSRGDGTKFPELVIQKALDREQQNHHTLVLTALDGGEPPRSATVQINVKVIDSNDNSPVFEAPSYLVELPENAPLGTVVIDLNATDADEGPNGEVLYSFSSYVPDRVRELFSIDPKTGLIRVKGNLDYEENGMLEIDVQARDLGPNPIPAHCKVTVKLIDRNDNAPSIGFVSVRQGALSEAAPPGTVIALVRVTDRDSGKNGQLQCRVLGGGGTGGGGGLGGPGGSVPFKLEENYDNFYTVVTDRPLDRETQDEYNVTIVARDGGSPPLNSTKSFAIKILDENDNPPRFTKGLYVLQVHENNIPGEYLGSVLAQDPDLGQNGTVSYSILPSHIGDVSIYTYVSVNPTNGAIYALRSFNFEQTKAFEFKVLAKDSGAPAHLESNATVRVTVLDVNDNAPVIVLPTLQNDTAELQVPRNAGLGYLVSTVRALDSDFGESGRLTYEIVDGNDDHLFEIDPSSGEIRTLHPFWEDVTPVVELVVKVTDHGKPTLSAVAKLIIRSVSGSLPEGVPRVNGEQHHWDMSLPLIVTLSTISIILLAAMITIAVKCKRENKEIRTYNCRIAEYSHPQLGGGKGKKKKINKNDIMLVQSEVEERNAMNVMNVVSSPSLATSPMYFDYQTRLPLSSPRSEVMYLKPASNNLTVPQGHAGCHTSFTGQGTNASETPATRMSIIQTDNFPAEPNYMGSRQQFVQSISVAPRLRTQKEPA

SEQ ID NO: 37369 - protein, 422 aa, Homo sapiens
MGQAGCKGLCLSLFDYKTEKYVIAKNKKVGLLYRLLQASILAYLVVWVFLIKKGYQDVDTSLQSAVITKVKGVAFTNTSDLGQRIWDVADYVIPAQGENVFFVVTNLIVTPNQRQNVCAENEGIPDGACSKDSDCHAGEAVTAGNGVKTGRCLRRENLARGTCEIFAWCPLETSSRPEEPFLKEAEDFTIFIKNHIRFPKFNFSKSNVMDVKDRSFLKSCHFGPKNHYCPIFRLGSVIRWAGSDFQDIALEGGVIGINIEWNCDLDKAASECHPHYSFSRLDNKLSKSVSSGYNFRFARYYRDAAGVEFRTLMKAYGIRFDVMVNGKGAFFCDLVLIYLIKKREFYRDKKYEEVRGLEDSSQEAEDEASGLGLSEQLTSGPGLLGMPEQQELQEPPEAKRGSSSQKGNGSVCPQLLEPHRST

SEQ ID NO: 37370 - protein, 421 aa, Homo sapiens
MGQAGCKGLCLSLFDYKTEKYVIAKNKKVGLLYRLLQASILAYLVVWVFLIKKGYQDVDTSLQSAVITKVKGVAFTNTSDLGQRIWDVADYVIPAQGENVFFVVTNLIVTPNQRQNVCAENEGIPDGACSKDSDCHAGEAVTAGNGVKTGRCLRRENLARGTCEIFAWCPLETSSRPEEPFLKEAEDFTIFIKNHIRFPKFNFSNNVMDVKDRSFLKSCHFGPKNHYCPIFRLGSVIRWAGSDFQDIALEGGVIGINIEWNCDLDKAASECHPHYSFSRLDNKLSKSVSSGYNFRFARYYRDAAGVEFRTLMKAYGIRFDVMVNGKGAFFCDLVLIYLIKKREFYRDKKYEEVRGLEDSSQEAEDEASGLGLSEQLTSGPGLLGMPEQQELQEPPEAKRGSSSQKGNGSVCPQLLEPHRST

SEQ ID NO: 37371 - protein, 397 aa, Homo sapiens
MGQAGCKGLCLSLFDYKTEKYVIAKNKKVGLLYRLLQASILAYLVVWVFLIKKGYQDVDTSLQSAVITKVKGVAFTNTSDLGQRIWDVADYVIPAQNEGIPDGACSKDSDCHAGEAVTAGNGVKTGRCLRRENLARGTCEIFAWCPLETSSRPEEPFLKEAEDFTIFIKNHIRFPKFNFSNNVMDVKDRSFLKSCHFGPKNHYCPIFRLGSVIRWAGSDFQDIALEGGVIGINIEWNCDLDKAASECHPHYSFSRLDNKLSKSVSSGYNFRFARYYRDAAGVEFRTLMKAYGIRFDVMVNGKGAFFCDLVLIYLIKKREFYRDKKYEEVRGLEDSSQEAEDEASGLGLSEQLTSGPGLLGMPEQQELQEPPEAKRGSSSQKGNGSVCPQLLEPHRST

SEQ ID NO: 37372 - protein, 432 aa, Homo sapiens
MGQAGCKGLCLSLFDYKTEKYVIAKNKKVGLLYRLLQASILAYLVVWVFLIKKGYQDVDTSLQSAVITKVKGVAFTNTSDLGQRIWDVADYVIPAQGENVFFVVTNLIVTPNQRQNVCAENEGIPDGACSKDSDCHAGEAVTAGNGVKTGRCLRRENLARGTCEIFAWCPLETSSRPEEPFLKEAEDFTIFIKNHIRFPKFNFSKSNVMDVKDRSFLKSCHFGPKNHYCPIFRLGSVIRWAGSDFQDIALEGGVIGINIEWNCDLDKAASECHPHYSFSRLDNKLSKSVSSGYNFRFARYYRDAAGVEFRTLMKAYGIRFDVMVNGKGAFFCDLVLIYLIKKREFYRDKKYEEVRGLEDSSQEAEDEASGLGLSEQLTSGPGLLGMPEQQELQEPPEAKRGSSSQKGNGSVCPQLLEPHRLRTPSASPLHQE

SEQ ID NO: 37373 - protein, 398 aa, Homo sapiens
MGQAGCKGLCLSLFDYKTEKYVIAKNKKVGLLYRLLQASILAYLVVWVFLIKKGYQDVDTSLQSAVITKVKGVAFTNTSDLGQRIWDVADYVIPAQNEGIPDGACSKDSDCHAGEAVTAGNGVKTGRCLRRENLARGTCEIFAWCPLETSSRPEEPFLKEAEDFTIFIKNHIRFPKFNFSKSNVMDVKDRSFLKSCHFGPKNHYCPIFRLGSVIRWAGSDFQDIALEGGVIGINIEWNCDLDKAASECHPHYSFSRLDNKLSKSVSSGYNFRFARYYRDAAGVEFRTLMKAYGIRFDVMVNGKGAFFCDLVLIYLIKKREFYRDKKYEEVRGLEDSSQEAEDEASGLGLSEQLTSGPGLLGMPEQQELQEPPEAKRGSSSQKGNGSVCPQLLEPHRST

SEQ ID NO: 37374 - protein, 374 aa, Homo sapiens
MAANVSGAKSCPANFLAAADDKLSGFQGDFLWPILVVEFLVAVASNGLALYRFSIRKQRPWHPAVVFSVQLAVSDLLCALTLPPLAAYLYPPKHWRYGEAACRLERFLFTCNLLGSVIFITCISLNRYLGIVHPFFARSHLRPKHAWAVSAAGWVLAALLAMPTLSFSHLKRPQQGAGNCSVARPEACIKCLGTADHGLAAYRAYSLVLAGLGCGLPLLLTLAAYGALGRAVLRSPGMTVAEKLRVAALVASGVALYASSYVPYHIMRVLNVDARRRWSTRCPSFADIAQATAALELGPYVGYQVMRGLMPLAFCVHPLLYMAAVPSLGCCCRHCPGYRDSWNPEDAKSTGQALPLNATAAPKPSEPQSRELSQ

SEQ ID NO: 37375 - protein, 339 aa, Homo sapiens
MANLDKYTETFKMGSNSTSTAEIYCNVTNVKFQYSLYATTYILIFIPGLLANSAALWVLCRFISKKNKAIIFMINLSVADLAHVLSLPLRIYYYISHHWPFQRALCLLCFYLKYLNMYASICFLTCISLQRCFFLLKPFRARDWKRRYDVGISAAIWIVVGTACLPFPILRSTDLNNNKSCFADLGYKQMNAVALVGMITVAELAGFVIPVIIIAWCTWKTTISLRQPPMAFQGISERQKALRMVFMCAAVFFICFTPYHINFIFYTMVKETIISSCPVVRIALYFHPFCLCLASLCCLLDPILYYFMASEFRDQLSRHGSSVTRSRLMSKESGSSMIG

SEQ ID NO: 37376 - protein, 949 aa, Homo sapiens
MFGFQRRGLGTPRLQLWLLLLEFWEVGSGQLHYSVSEEAKHGTFVGRIAQDLGLELAELVQRLFRVASKTHGDLLEVNLQNGILFVNSRIDREELCGQSAECSIHLEVIVDRPLQVFHVNVEVKDINDNPPVFSLREQKLLIAESKQSDSRFPLEGASDADIEENALLTYRLSKNEYFSLDSPTNGKQIKRLSLILKKSLDREKTPELNLLLTATDGGKPELTGTVRLLVQVLDVNDNDPEFDKSEYKVSLMENAAKETLVLKLNATDRDEGVNGEVTYSLMSIKPNGRHLFTLDQNNGEVRVNGTLDYEENKFYKIEVQATDKGTPPMAGHCTVWVEILDTNDNSPEVAVTSLSLPVREDAQPSTVIALISVSDRDSGVNGQVTCSLTPHVPFKLVSTFKNYYSLVLDSALDRENVWAYELVVTARDGGSPSLWATARVSVEVADVNDNAPAFAQPEYTVFVKENNPPGCHIFTVSARDADAQENALVSYSLVERRLGDRALSSYVSVHAESGKVYALQPLDHEELELLQFQVSARDAGVPPLSSNVTLQVFVLDENDNAPALLATQAGSAGGAVNKLVPRSVGAGHVVAKVRAVDADSGYNAWLSYELQPAAGGSRIPFRVGLYTGEISTTRALDEADSPRHRLLVLVKDHGEPALTATATVLVSLVESGQAPKASSRTLAGAASPEAALVDVNVYLIIAICVVSSLLVLTLLLYTALWWSATPTEGACAPGKPTLVCSRAVGSWSYSQQRRQRVCSEEGPPKTDLMAFSPSLPLGLNKEEEGERQEPGSNHPGQPRQPNPDWRYSASLRAGMHSSVHLEEAGILRAGPGGPDQQWPTVSSATPEPEAGEVSPPVGAGVNSNSWTFKYGPGNPKQSGPGELPDKFIIPGSPAIISIRQEPTNSQIDKSDFITFGKKEETKKKKKKKKGNKTQEKKEKGNSTTDNSDQ

SEQ ID NO: 37377 - protein, 810 aa, Homo sapiens
MFGFQRRGLGTPRLQLWLLLLEFWEVGSGQLHYSVSEEAKHGTFVGRIAQDLGLELAELVQRLFRVASKTHGDLLEVNLQNGILFVNSRIDREELCGQSAECSIHLEVIVDRPLQVFHVNVEVKDINDNPPVFSLREQKLLIAESKQSDSRFPLEGASDADIEENALLTYRLSKNEYFSLDSPTNGKQIKRLSLILKKSLDREKTPELNLLLTATDGGKPELTGTVRLLVQVLDVNDNDPEFDKSEYKVSLMENAAKETLVLKLNATDRDEGVNGEVTYSLMSIKPNGRHLFTLDQNNGEVRVNGTLDYEENKFYKIEVQATDKGTPPMAGHCTVWVEILDTNDNSPEVAVTSLSLPVREDAQPSTVIALISVSDRDSGVNGQVTCSLTPHVPFKLVSTFKNYYSLVLDSALDRENVWAYELVVTARDGGSPSLWATARVSVEVADVNDNAPAFAQPEYTVFVKENNPPGCHIFTVSARDADAQENALVSYSLVERRLGDRALSSYVSVHAESGKVYALQPLDHEELELLQFQVSARDAGVPPLSSNVTLQVFVLDENDNAPALLATQAGSAGGAVNKLVPRSVGAGHVVAKVRAVDADSGYNAWLSYELQPAAGGSRIPFRVGLYTGEISTTRALDEADSPRHRLLVLVKDHGEPALTATATVLVSLVESGQAPKASSRTLAGAASPEAALVDVNVYLIIAICVVSSLLVLTLLLYTALWWSATPTEGACAPGKPTLVCSRAVGSWSYSQQRRQRVCSEEGPPKTDLMAFSPSLPLGLNKEEEGERQEPGSNHPGQVSFLQIPPIRKCM

SEQ ID NO: 37378 - protein, 963 aa, Homo sapiens
MVGCGVAVLCLWVSCGAAAGQLEYSVPEETERGVAVGNLSADLRLPAAAMSSRNFRFLSSHRELYFGVDLPSGNLVVREPADREQLCRAKAACVLTYDLVLEDPLELHKIRIHVLDTNDNSPLFPAGDVQLHIPEFLTPGARFTLPNAQDDDEGSNGILSYSLSPSQHFRLDMGSRVDGSEYPELVLEKALDREQRATHLLVLTARDGGLPARSGDAQVTIIVVDTNDNAPVFERSVYRTKVPETAPNGTVLFRVQALDPDEGSNGEVQYSLSNSTQAELRHRFHVHPKSGEVQVAASLGPPETLLEAYIEARDEGVFGLASTAKLLVEVTDVNDHAPELDFLTLSNPVPEDAAPGTVIALFSVKDEDLDSNGRVICGMSSAGPFQLTASFDNYYSLLIDGPLDREQISEYQVLITASDSGSPPLSTRRTITVSVADVNDNTPNFPQPQQELFVAENNGPGASLGRVFAQDPDLGKNGLVSYELLDVISEGPSASSLLAVESSSGAITAKTSFDFEQLRGFHFQVEGRDGGIPPRSATVTINLFVVDRNDNYPVILFPLPRNGSVPVEIVPRSARTGHLVTKVVAEDADSGSNAWLSYHISRASDSSLFRISANIGELRTARLVLPTDAVKQRVVVVVRDHGDPPLSSSVTLGVLLSNSVPQLLPDFEDVWEPGGQLSAQNLYLVIALACISFLFLGCLLFFVCTKLHQSPGCCAQSCCRSTEDLRYGSKMVSNPCMTSATIDVTTVERLSQTYLYRASLGLGSDNNSLLLRGEYNAADLRNLATGVGLNLPISCIQIRNRKGDHANVNAMPRQPNPDWRYSASLRAGMHSSVHLEEAGILRAGPGGPDQQWPTVSSATPEPEAGEVSPPVGAGVNSNSWTFKYGPGNPKQSGPGELPDKFIIPGSPAIISIRQEPTNSQIDKSDFITFGKKEETKKKKKKKKGNKTQEKKEKGNSTTDNSDQ

SEQ ID NO: 37379 - protein, 818 aa, Homo sapiens
MVGCGVAVLCLWVSCGAAAGQLEYSVPEETERGVAVGNLSADLRLPAAAMSSRNFRFLSSHRELYFGVDLPSGNLVVREPADREQLCRAKAACVLTYDLVLEDPLELHKIRIHVLDTNDNSPLFPAGDVQLHIPEFLTPGARFTLPNAQDDDEGSNGILSYSLSPSQHFRLDMGSRVDGSEYPELVLEKALDREQRATHLLVLTARDGGLPARSGDAQVTIIVVDTNDNAPVFERSVYRTKVPETAPNGTVLFRVQALDPDEGSNGEVQYSLSNSTQAELRHRFHVHPKSGEVQVAASLGPPETLLEAYIEARDEGVFGLASTAKLLVEVTDVNDHAPELDFLTLSNPVPEDAAPGTVIALFSVKDEDLDSNGRVICGMSSAGPFQLTASFDNYYSLLIDGPLDREQISEYQVLITASDSGSPPLSTRRTITVSVADVNDNTPNFPQPQQELFVAENNGPGASLGRVFAQDPDLGKNGLVSYELLDVISEGPSASSLLAVESSSGAITAKTSFDFEQLRGFHFQVEGRDGGIPPRSATVTINLFVVDRNDNYPVILFPLPRNGSVPVEIVPRSARTGHLVTKVVAEDADSGSNAWLSYHISRASDSSLFRISANIGELRTARLVLPTDAVKQRVVVVVRDHGDPPLSSSVTLGVLLSNSVPQLLPDFEDVWEPGGQLSAQNLYLVIALACISFLFLGCLLFFVCTKLHQSPGCCAQSCCRSTEDLRYGSKMVSNPCMTSATIDVTTVERLSQTYLYRASLGLGSDNNSLLLRGEYNAADLRNLATGVGLNLPISCIQIRNRKGDHANVNAMVSKFYGI

SEQ ID NO: 37380 - protein, 1014 aa, Homo sapiens
MAESSDKLYRVEYAKSGRASCKKCSESIPKDSLRMAIMVQSPMFDGKVPHWYHFSCFWKVGHSIRHPDVEVDGFSELRWDDQQKVKKTAEAGGVTGKGQDGIGSKAEKTLGDFAAEYAKSNRSTCKGCMEKIEKGQVRLSKKMVDPEKPQLGMIDRWYHPGCFVKNREELGFRPEYSASQLKGFSLLATEDKEALKKQLPGVKSEGKRKGDEVDGVDEVAKKKSKKEKDKDSKLEKALKAQNDLIWNIKDELKKVCSTNDLKELLIFNKQQVPSGESAILDRVADGMVFGALLPCEECSGQLVFKSDAYYCTGDVTAWTKCMVKTQTPNRKEWVTPKEFREISYLKKLKVKKQDRIFPPETSASVAATPPPSTASAPAAVNSSASADKPLSNMKILTLGKLSRNKDEVKAMIEKLGGKLTGTANKASLCISTKKEVEKMNKKMEEVKEANIRVVSEDFLQDVSASTKSLQELFLAHILSPWGAEVKAEPVEVVAPRGKSGAALSKKSKGQVKEEGINKSEKRMKLTLKGGAAVDPDSGLEHSAHVLEKGGKVFSATLGLVDIVKGTNSYYKLQLLEDDKENRYWIFRSWGRVGTVIGSNKLEQMPSKEDAIEHFMKLYEEKTGNAWHSKNFTKYPKKFYPLEIDYGQDEEAVKKLTVNPGTKSKLPKPVQDLIKMIFDVESMKKAMVEYEIDLQKMPLGKLSKRQIQAAYSILSEVQQAVSQGSSDSQILDLSNRFYTLIPHDFGMKKPPLLNNADSVQAKVEMLDNLLDIEVAYSLLRGGSDDSSKDPIDVNYEKLKTDIKVVDRDSEEAEIIRKYVKNTHATTHNAYDLEVIDIFKIEREGECQRYKPFKQLHNRRLLWHGSRTTNFAGILSQGLRIAPPEAPVTGYMFGKGIYFADMVSKSANYCHTSQGDPIGLILLGEVALGNMYELKHASHISKLPKGKHSVKGLGKTTPDPSANISLDGVDVPLGTGISSGVNDTSLLYNEYIVYDIAQVNLKYLLKLKFNFKTSLW

SEQ ID NO: 37381 - protein, 278 aa, Homo sapiens
MERLVIRMPFSHLSTYSLVWVMAAVVLCTAQVQVVTQDEREQLYTPASLKCSLQNAQEALIVTWQKKKAVSPENMVTFSENHGVVIQPAYKDKINITQLGLQNSTITFWNITLEDEGCYMCLFNTFGFGKISGTACLTVYVQPIVSLHYKFSEDHLNITCSATARPAPMVFWKVPRSGIENSTVTLSHPNGTTSVTSILHIKDPKNQVGKEVICQVLHLGTVTDFKQTVNKGYWFSVPLLLSIVSLVILLVLISILLYWKRHRNQDRGELSQGVQKMT

SEQ ID NO: 37382 - protein, 269 aa, Homo sapiens
MERLVIRMPFSHLSTYSLVWVMAAVVLCTAQVQVVTQDEREQLYTPASLKCSLQNAQEALIVTWQKKKAVSPENMVTFSENHGVVIQPAYKDKINITQLGLQNSTITFWNITLEDEGCYMCLFNTFGFGKISGTACLTVYVQPIVSLHYKFSEDHLNITCSATARPAPMVFWKVPRSGIENSTVTLSHPNGTTSVTSILHIKDPKNQVGKEVICQVLHLGTVTDFKQTVNKGYWFSVPLLLSIVSLVILLVLISILLYWKRHRNQDREP

SEQ ID NO: 37383 - protein, 294 aa, Homo sapiens
MERLTLTRTIGGPLLTATLLGKTTINDYQVIRMPFSHLSTYSLVWVMAAVVLCTAQVQVVTQDEREQLYTPASLKCSLQNAQEALIVTWQKKKAVSPENMVTFSENHGVVIQPAYKDKINITQLGLQNSTITFWNITLEDEGCYMCLFNTFGFGKISGTACLTVYVQPIVSLHYKFSEDHLNITCSATARPAPMVFWKVPRSGIENSTVTLSHPNGTTSVTSILHIKDPKNQVGKEVICQVLHLGTVTDFKQTVNKGYWFSVPLLLSIVSLVILLVLISILLYWKRHRNQDREP

SEQ ID NO: 37384 - protein, 798 aa, Homo sapiens
MEIRGALDLRKRQVLIFLVLLGLSRAGTESAHYSVAEETEIGSFVANLARDLGLGVEELSSREARVVSDDNKKYLHLDLLTGNLLLNEKLDRDELCGSTEPCVLHFQVVLENPLQFFRFELCVKDINDHSPTFLDKEILIKISEGTTVGATFLMESAQDLDVGSNSLQNYTISPNSHFYIKIPDSSDRKIYPELVLDRALDYEQEAELRLTLTAVDGGSPPKSGTTLVLIKVLDINDNAPEFPQSLYEVQVPEDRPLGSWIATISAKDLDAGNYGKISYTFFHASEDIRKTFEINPISGEVNLRSPLDFEVIQSYTINIQATDGGGLSGKCTLLVKVMDINDNPPEVTISSITKRIPENASETLVALFSILDQDSGDNGRMICSIQDNLPFFLKPTFKNFFTLVSEKALDRESQAEYNITITVTDLGTPRLKTEYNITVLLSDVNDNAPTFTQTSYTLFVRENNSPALHIGSVSATDRDSGTNAQVNYSLLPPQDRHLPLASLVSINADNGHLFALRSLDYEALQEFEFRVGATDRGSPALSSEALVRVLVLDANDNSPFVLYPLQNGSAPCTELVPRAAEPGYLVTKVVAVDGDSGQNAWLSYQLLKATEPGLFGVWAHNGEVRTARLLSERDAAKHRLVVLVKDNGEPPRSATATLHVLLVDGFSQPYLPLPEAAPAQAQADSLTVYLVVALASVSSLFLFSVLLFVAVRLCRRSRAASVGRCSVPEGPFPGHLVDVSGTGTLSQSYQYEVCLTGGSGTNEFKFLKPIIPNFQVHDTGRNMGEIENFRNSFGLNIQ

SEQ ID NO: 37385 - protein, 645 aa, Homo sapiens
MESAQDLDVGSNSLQNYTISPNSHFYIKIPDSSDRKIYPELVLDRALDYEQEAELRLTLTAVDGGSPPKSGTTLVLIKVLDINDNAPEFPQSLYEVQVPEDRPLGSWIATISAKDLDAGNYGKISYTFFHASEDIRKTFEINPISGEVNLRSPLDFEVIQSYTINIQATDGGGLSGKCTLLVKVMDINDNPPEVTISSITKRIPENASETLVALFSILDQDSGDNGRMICSIQDNLPFFLKPTFKNFFTLVSEKALDRESQAEYNITITVTDLGTPRLKTEYNITVLLSDVNDNAPTFTQTSYTLFVRENNSPALHIGSVSATDRDSGTNAQVNYSLLPPQDRHLPLASLVSINADNGHLFALRSLDYEALQEFEFRVGATDRGSPALSSEALVRVLVLDANDNSPFVLYPLQNGSAPCTELVPRAAEPGYLVTKVVAVDGDSGQNAWLSYQLLKATEPGLFGVWAHNGEVRTARLLSERDAAKHRLVVLVKDNGEPPRSATATLHVLLVDGFSQPYLPLPEAAPAQAQADSLTVYLVVALASVSSLFLFSVLLFVAVRLCRRSRAASVGRCSVPEGPFPGHLVDVSGTGTLSQSYQYEVCLTGGSGTNEFKFLKPIIPNFQVHDTGRNMGEIENFRNSFGLNIQ

SEQ ID NO: 37386 - protein, 932 aa, Homo sapiens
MAAPTKCQLRGRLVLLCSLLGMLWEARASQIRYSVPEETEKGYIVGNISKDLALEPRELAERRVRIVSRGRTQLFSLNPRSGTLVTAGRIDREELCAQSPRCLVNFKVLVEDRVKLYGIEIEVTDINDSAPKFQAESLEVKINEIAVPGARYPLPEAIDPDVGVNSLQSYQLSPNHHFSLNVQTGDNGAINPELVLERALDREEATAHHLVLTASDGGEPRRSSTVRIHVTVLDTNDNAPVFAQRIYRVKVLENVPPGTWLLTATASDLDEGINGKVAYKFWKINEKQSLLFQLNENTGEISTAKSLDYEECSFYEMEIQAEDGGGLKGWTKVLISVEDVNDNRPEVTITSLFSPVREDAPQGTVILLFNAHDRDSGKNGQVVCSIQENLSFTLENSEEDYYRLLTAQILDREKASEYNITVTATDRGTPPLSTEIHITLQVTDINDNPPAFSQASYSVYLPENNARGTSIFSVIAYDPDSNENSRVIYSLAEDTIQGSPLSTYVSINSDTGVLYALCSFDYEQFRDLQMQVTASDSGSPPLSSNVSLRLFVLDQNDNAPEILYPALPTDGSTGVELAPRSAEPGYLVTKVVAVDRDSGQNAWLSYRLFKASEPGLFSVGLHTGEVRTARALLDRDALKQSLVVAVQDHGQPPLSATVTLTVAIADSIPDILADLGSLQIPADLEASDLTLYLVVAVAVVSCVFLTFVITLLALRLRHWHSSHLLRATSDGLAGVPTSHFVGVDGVRAFLQTYSQEFSLTADSRKSHLIFPQPNYADTLISQQSCEKNEPLCVSVDSKFPIEDTPLVPQAPPNTDWRFSQAQRPGTSGSQNGDDTGTWPNNQFDTEMLQAMILASASEAADGSSTLGGGAGTMGLSARYGPQFTLQHVPDYRQNVYIPGSNATLTNAAGKRDGKAPAGGNGNKKKSGKKEKK

SEQ ID NO: 37387 - protein, 828 aa, Homo sapiens
MAAPTKCQLRGRLVLLCSLLGMLWEARASQIRYSVPEETEKGYIVGNISKDLALEPRELAERRVRIVSRGRTQLFSLNPRSGTLVTAGRIDREELCAQSPRCLVNFKVLVEDRVKLYGIEIEVTDINDSAPKFQAESLEVKINEIAVPGARYPLPEAIDPDVGVNSLQSYQLSPNHHFSLNVQTGDNGAINPELVLERALDREEATAHHLVLTASDGGEPRRSSTVRIHVTVLDTNDNAPVFAQRIYRVKVLENVPPGTWLLTATASDLDEGINGKVAYKFWKINEKQSLLFQLNENTGEISTAKSLDYEECSFYEMEIQAEDGGGLKGWTKVLISVEDVNDNRPEVTITSLFSPVREDAPQGTVILLFNAHDRDSGKNGQVVCSIQENLSFTLENSEEDYYRLLTAQILDREKASEYNITVTATDRGTPPLSTEIHITLQVTDINDNPPAFSQASYSVYLPENNARGTSIFSVIAYDPDSNENSRVIYSLAEDTIQGSPLSTYVSINSDTGVLYALCSFDYEQFRDLQMQVTASDSGSPPLSSNVSLRLFVLDQNDNAPEILYPALPTDGSTGVELAPRSAEPGYLVTKVVAVDRDSGQNAWLSYRLFKASEPGLFSVGLHTGEVRTARALLDRDALKQSLVVAVQDHGQPPLSATVTLTVAIADSIPDILADLGSLQIPADLEASDLTLYLVVAVAVVSCVFLTFVITLLALRLRHWHSSHLLRATSDGLAGVPTSHFVGVDGVRAFLQTYSQEFSLTADSRKSHLIFPQPNYADTLISQQSCEKNEPLCVSVDSKFPIEDTPLVPVSSFFFFLSFLFLFFVLFCF

SEQ ID NO: 37388 - protein, 664 aa, Homo sapiens
MSLQRIVRVSLEHPTSAVCVAGVETLVDIYGSVPEGTEMFEVYGTPGVDIYISPNMERGRERADTRRWRFDATLEIIVVMNSPSNDLNDSHVQISYHSSHEPLPLAYAVLYLTCVDISLDCDLNCEGRQDRNFVDKRQWVWGPSGYGGILLVNCDRDDPSCDVQDNCDQHVHCLQDLEDMSVMVLRTQGPAALFDDHKLVLHTSSYDAKRAQVFHICGPEDVCEAYRHVLGQDKVSYEVPRLHGDEERFFVEGLSFPDAGFTGLISFHVTLLDDSNEDFSASPIFTDTVVFRVAPWIMTPSTLPPLEVYVCRVRNNTCFVDAVAELARKAGCKLTICPQAENRNDRWIQDEMELGYVQAPHKTLPVVFDSPRNGELQDFPYKRILGPDFGYVTREPRDRSVSGLDSFGNLEVSPPVVANGKEYPLGRILIGGNLPGSSGRRVTQVVRDFLHAQKVQPPVELFVDWLAVGHVDEFLSFVPAPDGKGFRMLLASPGACFKLFQEKQKCGHGRALLFQGVVDDEQVKTISINQVLSNKDLINYNKFVQSCIDWNREVLKRELGLAECDIIDIPQLFKTERKKATAFFPDLVNMLVLGKHLGIPKPFGPIINGCCCLEEKVRSLLEPLGLHCTFIDDFTPYHMLHGEVHCGTNVCRKPFSFKWWNMVP

SEQ ID NO: 37389 - protein, 630 aa, Homo sapiens
MDIKGQFWNDDDSEGDNESEEFLYGVQGSCAADLYRHPQLDADIEAVKEIYSENSVSIREYGTIDDVDIDLHINISFLDEEVSTAWKVLRTEPIVLRLRFSLSQYLDGPEPSIEVFQPSNKEGFGLGLQLKKILGMFTSQQWKHLSNDFLKTQQEKRHSWFKASGTIKKFRAGLSIFSPIPKSPSFPIIQDSMLKGKLGVPELRVGRLMNRSISCTMKNPKVEVFGYPPSPQAGLLCPQHVGLPPPARTSPLVSGHCKNIPTLEYGFLVQIMKYAEQRIPTLNEYCVVCDEQHVFQNGSMLKPAVCTRELCVFSFYTLGVMSGAAEEVATGAEVVDLLVAMCRAALESPRKSIIFEPYPSVVDPTDPKTLAFNPKKKNYERLQKALDSVMSIREMTQGSYLEIKKQMDKLDPLAHPLLQWIISSNRSHIVKLPLSRLKFMHTSHQFLLLSSPPAKEARFRTAKKLYGSTFAFHGSHIENWHSILRNGLVNASYTKLQLHGAAYGKGIYLSPISSISFGYSGMGKGQHRMPSKDELVQRYNRMNTIPQTRSIQSRFLQSRNLNCIALCEVITSKDLQKHGNIWVCPVSDHVCTRFFFVYEDGQVGDANINTQDPKIQKEIMRVIGTQVYTN

SEQ ID NO: 37390 - protein, 518 aa, Homo sapiens
MDIKGQFWNDDDSEGDNESEEFLYGVQGSCAADLYRHPQLDADIEAVKEIYSENSVSIREYGTIDDVDIDLHINISFLDEEVSTAWKVLRTEPIVLRLRFSLSQYLDGPEPSIEVFQPSNKEGFGLGLQLKKILGMFTSQQWKHLSNDFLKTQQEKRHSWFKASGTIKKFRAGLSIFSPIPKSPSFPIIQDSMLKGKLGVPELRVGRLMNRSISCTMKNPKVEVFGYPPSPQAGLLCPQHVGLPPPARTSPLVSGHCKNIPTLEYGFLVQIMKYAEQRIPTLNEYCVVCDEQHVFQNGSMLKPAVCTRELCVFSFYTLGVMSGAAEEVATGAEVVDLLVAMCRAALESPRKSIIFEPYPSVVDPTDPKTLAFNPKKKNYERLQKALDSVMSIREMTQGSYLEIKKQMDKLDPLAHPLLQWIISSNRSHIVKLPLSRLKFMHTSHQFLLLSSPPAKEARFRTAKKLYGSTFAFHGSHIENWHSILRNGLVNASYTKLQEWEKDSTGCPPRMSWSRDTTG

SEQ ID NO: 37391 - protein, 388 aa, Homo sapiens
MDIKGQFWNDDDSEGDNESEEFLYGVQGSCAADLYRHPQLDADIEAVKEIYSENSVSIREYGTIDDVDIDLHINISFLDEEVSTAWKVLRTEPIVLRLRFSLSQYLDGPEPSIEVFQPSNKEGFGLGLQLKKILGMFTSQQWKHLSNDFLKTQQEKRHSWFKASGTIKKFRAGLSIFSPIPKSPSFPIIQDSMLKGKLGVPELRVGRLMNRSISCTMKNPKVEVFGYPPSPQAGLLCPQHVGLPPPARTSPLVSGHCKNIPTLEYGFLVQIMKYAEQRIPTLNEYCVVCDEQHVFQNGSMLKPAVCTRELCVFSFYTLGVMSGAAEEVATGAEVVDLLVAMCRAALESPRKSIIFEPYPSVVDPTDPKTLAFMVELDPRTTPHSDGPD

SEQ ID NO: 37392 - protein, 1686 aa, Homo sapiens
MAQISSNSGFKECPSSHPEPTRAKDVDKEEALQMEAEALAKLQKDRQVTDNQRGFELSSSTRKKAQVYNKQDYDLMVFPESDSQKRALDIDVEKLTQAELEKLLLDDSFETKKTPVLPVTPILSPSFSAQLYFRPTIQRGQWPPGLPGPSTYALPSIYPSTYSKQAAFQNGFNPRMPTFPSTEPIYLSLPGQSPYFSYPLTPATPFHPQGSLPIYRPVVSTDMAKLFDKIASTSEFLKNGKARTDLEITDSKVSNLQVSPKSEDISKFDWLDLDPLSKPKVDNVEVLDHEEEKNVSSLLAKDPWDAVLLEERSTANCHLERKVNGKSLSVATVTRSQSLNIRTTQLAKAQGHISQKDPNGTSSLPTGSSLLQEVEVQNEEMAAFCRSITKLKTKFPYTNHRTNPGYLLSPVTAQRNICGENASVKVSIDIEGFQLPVTFTCDVSSTVEIIIMQALCWVHDDLNQVDVGSYVLKVCGQEEVLQNNHCLGSHEHIQNCRKWDTEIRLQLLTFSAMCQNLARTAEDDETPVDLNKHLYQIEKPCKEAMTRHPVEELLDSYHNQVELALQIENQHRAVDQVIKAVRKICSALDGVETLAITESVKKLKRAVNLPRSKTADVTSLFGGEDTSRSSTRGSLNPENPVQVSINQLTAAIYDLLRLHANSGRSPTDCAQSSKSVKEAWTTTEQLQFTIFAAHGISSNWVSNYEKYYLICSLSHNGKDLFKPIQSKKVGTYKNFFYLIKWDELIIFPIQISQLPLESVLHLTLFGILNQSSGSSPDSNKQRKGPEALGKVSLPLFDFKRFLTCGTKLLYLWTSSHTNSVPGTVTKKGYVMERIVLQVDFPSPAFDIIYTTPQVDRSIIQQHNLETLENDIKGKLLDILHKDSSLGLSKEDKAFLWEKRYYCFKHPNCLPKILASAPNWKWVNLAKTYSLLHQWPALYPLIALELLDSKFADQEVRSLAVTWIEAISDDELTDLLPQFVQALKYEIYLNSSLVQFLLSRALGNIQIAHNLYWLLKDALHDVQFSTRYEHVLGALLSVGGKRLREELLKQTKLVQLLGGVAEKVRQASGSARQVVLQRSMERVQSFFQKNKCRLPLKPSLVAKELNIKSCSFFSSNAVPLKVTMVNADPMGEEINVMFKVGEDLRQDMLALQMIKIMDKIWLKEGLDLRMVIFKCLSTGRDRGMVELVPASDTLRKIQVEYGVTGSFKDKPLAEWLRKYNPSEEEYEKASENFIYSCAGCCVATYVLGICDRHNDNIMLRSTGHMFHIDFGKFLGHAQMFGSFKRDRAPFVLTSDMAYVINGGEKPTIRFQLFVDLCCQAYNLIRKQTNLFLNLLSLMIPSGLPELTSIQDLKYVRDALQPQTTDAEATIFFTRLIESSLGSIATKFNFFIHNLAQLRFSGLPSNDEPILSFSPKTYSFRQDGRIKEVSVFTYHKKYNPDKHYIYVVRILREGQIEPSFVFRTFDEFQELHNKLSIIFPLWKLPGFPNRMVLGRTHIKDVAAKRKIELNSYLQSLMNASTDVAECDLVCTFFHPLLRDEKAEGIARSADAGSFSPTPGQIGGAVKLSISYRNGTLFIMVMHIKDLVTEDGADPNPYVKTYLLPDNHKTSKRKTKISRKTRNPTFNEMLVYSGYSKETLRQRELQLSVLSAESLRENFFLGGVTLPLKDFNLSKETVKWYQLTAATYL

SEQ ID NO: 37393 - protein, 483 aa, Homo sapiens
MAQISSNSGFKECPSSHPEPTRAKDVDKEEALQMEAEALAKLQKDRQVTDNQRGFELSSSTRKKAQVYNKQDYDLMVFPESDSQKRALDIDVEKLTQAELEKLLLDDSFETKKTPVLPVTPILSPSFSAQLYFRPTIQRGQWPPGLPGPSTYALPSIYPSTYSKQAAFQNGFNPRMPTFPSTEPIYLSLPGQSPYFSYPLTPATPFHPQGSLPIYRPVVSTDMAKLFDKIASTSEFLKNGKARTDLEITDSKVSNLQVSPKSEDISKFDWLDLDPLSKPKVDNVEVLDHEEEKNVSSLLAKDPWDAVLLEERSTANCHLERKVNGKSLSVATVTRSQSLNIRTTQLAKAQGHISQKDPNGTSSLPTGSSLLQEVEVQNEEMAAFCRSITKLKTKFPYTNHRTNPGYLLSPVTAQRNICGENASVKVSIDIEGFQLPVTFTCDVSSTVEIIIMQALCWVHDDLNQVDVGSYVLKVCGQEEVLQN

SEQ ID NO: 37394 - protein, 665 aa, Homo sapiens
MLRERTVRLQYGSRVEAVYVLGTYLWTDVYSAAPAGAQTFSLKHSEHVWVEVVRDGEAEEVATNGKQRWLLSPSTTLRVTMSQASTEASSDKVTVNYYDEEGSIPIDQAGLFLTAIEISLDVDADRDGVVEKNNPKKASWTWGPEGQGAILLVNCDRETPWLPKEDCRDEKVYSKEDLKDMSQMILRTKGPDRLPAGYEIVLYISMSDSDKVGVFYVENPFFGQRYIHILGRRKLYHVVKYTGGSAELLFFVEGLCFPDEGFSGLVSIHVSLLEYMAQDIPLTPIFTDTVIFRIAPWIMTPNILPPVSVFVCCMKDNYLFLKEVKNLVEKTNCELKVCFQYLNRGDRWIQDEIEFGYIEAPHKGFPVVLDSPRDGNLKDFPVKELLGPDFGYVTREPLFESVTSLDSFGNLEVSPPVTVNGKTYPLGRILIGSSFPLSGGRRMTKVVRDFLKAQQVQAPVELYSDWLTVGHVDEFMSFVPIPGTKKFLLLMASTSACYKLFREKQKDGHGEAIMFKGLGGMSSKRITINKILSNESLVQENLYFQRCLDWNRDILKKELGLTEQDIIDLPALFKMDEDHRARAFFPNMVNMIVLDKDLGIPKPFGPQVEEECCLEMHVRGLLEPLGLECTFIDDISAYHKFLGEVHCGTNVRRKPFTFKWWHMVP

SEQ ID NO: 37395 - protein, 437 aa, Homo sapiens
MLRERTVRLQYGSRVEAVYVLGTYLWTDVYSAAPAGAQTFSLKHSEHVWVEVVRDGEAEEVATNGKQRWLLSPSTTLRVTMSQASTEASSDKVTVNYYDEEGSIPIDQAGLFLTAIEISLDVDADRDGVVEKNNPKKASWTWGPEGQGAILLVNCDRETPWLPKEDCRDEKVYSKEDLKDMSQMILRTKGPDRLPAGYEIVLYISMSDSDKVGVFYVENPFFGQRYIHILGRRKLYHVVKYTGGSAELLFFVEGLCFPDEGFSGLVSIHVSLLEYMAQDIPLTPIFTDTVIFRIAPWIMTPNILPPVSVFVCCMKDNYLFLKEVKNLVEKTNCELKVCFQYLNRGDRWIQDEIEFGYIEAPHKGFPVVLDSPRDGNLKDFPVKELLGPDFGYVTREPLFESVTSLDSFGNLEVSPPVTVNGKTYPLGRILIGSSFPL

SEQ ID NO: 37396 - protein, 347 aa, Homo sapiens
MRVVVIGAGVIGLSTALCIHERYHSVLQPLDIKVYADRFTPLTTTDVAAGLWQPYLSDPNNPQEADWSQQTFDYLLSHVHSPNAENLGLFLISGYNLFHEAIPDPSWKDTVLGFRKLTPRELDMFPDYGYGWFHTSLILEGKNYLQWLTERLTERGVKFFQRKVESFEEVAREGADVIVNCTGVWAGALQRDPLLQPGRGQIMKVDAPWMKHFILTHDPERGIYNSPYIIPGTQTVTLGGIFQLGNWSELNNIQDHNTIWEGCCRLEPTLKNARIIGERTGFRPVRPQIRLEREQLRTGPSNTEVIHNYGHGGYGLTIHWGCALEAAKLFGRILEEKKLSRMPPSHL

SEQ ID NO: 37397 - protein, 923 aa, Homo sapiens
MGSGAGELGRAERLPVLFLFLLSLFCPALCEQIRYRIPEEMPKGSVVGNLATDLGFSVQELPTRKLRVSSEKPYFTVSAESGELLVSSRLDREEICGKKPACALEFEAVAENPLNFYHVNVEIEDINDHTPKFTQNSFELQISESAQPGTRFILEVAEDADIGLNSLQKYKLSLNPSFSLIIKEKQDGSKYPELALEKTLDREQQSYHRLVLTALDGGHPPLSGTTELRIQVTDANDNPPVFNRDVYRVSLRENVPPGTTVLQVSATDQDEGINSEITYSFYRTGQIFSLNSKSGEITTQKKLDFEETKEYSMVVEGRDGGGLVAQCTVEINIQDENDNSPEVTFHSLLEMILENAVPGTLIALIKIHDQDSGENGEVNCQLQGEVPFKIISSSKNSYKLVTDGTLDREQTPEYNVTITATDRGKPPLSSSISVILHIRDVNDNAPVFHQASYLVSVPENNPPGASIAQVCASDLDLGLNGQVSYSIMASDLEPLALASYVSMSAQSGVVFAQRAFDYEQLRTFELTLQARDQGSPALSANVSLRVLVGDRNDNAPRVLYPALGPDGSALFDMVPRAAEPGYLVTKVVAVDADSGHNAWLSYHVLQASEPGLFSLGLRTGEVRTARALGDRDAARQRLLVAVRDGGQPPLSATATLHLVFADSLQEVLPDITDRPVPSDPQAELQFYLVVALALISVLFLLAVILAVALRLRRSSSPAAWSCFQPGLCVKSGPVVPPNYSQGTLPYSYNLCVAHTGKTEFNFLKCSEQLSSGQDILCGDSSGALFPLCNSSESTSHPELQAPPNTDWRFSQAQRPGTSGSQNGDDTGTWPNNQFDTEMLQAMILASASEAADGSSTLGGGAGTMGLSARYGPQFTLQHVPDYRQNVYIPGSNATLTNAAGKRDGKAPAGGNGNKKKSGKKEKK

SEQ ID NO: 37398 - protein, 818 aa, Homo sapiens
MGSGAGELGRAERLPVLFLFLLSLFCPALCEQIRYRIPEEMPKGSVVGNLATDLGFSVQELPTRKLRVSSEKPYFTVSAESGELLVSSRLDREEICGKKPACALEFEAVAENPLNFYHVNVEIEDINDHTPKFTQNSFELQISESAQPGTRFILEVAEDADIGLNSLQKYKLSLNPSFSLIIKEKQDGSKYPELALEKTLDREQQSYHRLVLTALDGGHPPLSGTTELRIQVTDANDNPPVFNRDVYRVSLRENVPPGTTVLQVSATDQDEGINSEITYSFYRTGQIFSLNSKSGEITTQKKLDFEETKEYSMVVEGRDGGGLVAQCTVEINIQDENDNSPEVTFHSLLEMILENAVPGTLIALIKIHDQDSGENGEVNCQLQGEVPFKIISSSKNSYKLVTDGTLDREQTPEYNVTITATDRGKPPLSSSISVILHIRDVNDNAPVFHQASYLVSVPENNPPGASIAQVCASDLDLGLNGQVSYSIMASDLEPLALASYVSMSAQSGVVFAQRAFDYEQLRTFELTLQARDQGSPALSANVSLRVLVGDRNDNAPRVLYPALGPDGSALFDMVPRAAEPGYLVTKVVAVDADSGHNAWLSYHVLQASEPGLFSLGLRTGEVRTARALGDRDAARQRLLVAVRDGGQPPLSATATLHLVFADSLQEVLPDITDRPVPSDPQAELQFYLVVALALISVLFLLAVILAVALRLRRSSSPAAWSCFQPGLCVKSGPVVPPNYSQGTLPYSYNLCVAHTGKTEFNFLKCSEQLSSGQDILCGDSSGALFPLCNSSESTSHPELVSFIYVYSFSLPTQFSVFT

SEQ ID NO: 37399 - protein, 1323 aa, Homo sapiens
MEDGGLTAFEEDQRCLSQSLPLPVSAEGPAAQTTAEPSRSFSSAHRHLSRRNGLSRLCQSRTALSEDRWSSYCLSSLAAQNICTSKLHCPAAPEHTDPSEPRGSVSCCSLLRGLSSGWSSPLLPAPVCNPNKAIFTVDAKTTEILVANDKACGLLGYSSQDLIGQKLTQFFLRSDSDVVEALSEEHMEADGHAAVVFGTVVDIISRSGEKIPVSVWMKRMRQERRLCCVVVLEPVERVSTWVAFQSDGTVTSCDSLFAHLHGYVSGEDVAGQHITDLIPSVQLPPSGQHIPKNLKIQRSVGRARDGTTFPLSLKLKSQPSSEEATTGEAAPVSGYRASVWVFCTISGLITLLPDGTIHGINHSFALTLFGYGKTELLGKNITFLIPGFYSYMDLAYNSSLQLPDLASCLDVGNESGCGERTLDPWQGQDPAEGGQDPRINVVLAGGHVVPRDEIRKLMESQDIFTGTQTELIAGGQLLSCLSPQPAPGVDNVPEGSLPVHGEQALPKDQQITALGREEPVAIESPGQDLLGESRSEPVDVKPFASCEDSEAPVPAEDGGSDAGMCGLCQKAQLERMGVSGPSGSDLWAGAAVAKPQAKGQLAGGSLLMHCPCYGSEWGLWWRSQDLAPSPSGMAGLSFGTPTLDEPWLGVENDREELQTCLIKEQLSQLSLAGALDVPHAELVPTECQAVTAPVSSCDLGGRDLCGGCTGSSSACYALATDLPGGLEAVEAQEVDVNSFSWNLKELFFSDQTDQTSSNCSCATSELRETPSSLAVGSDPDVGSLQEQGSCVLDDRELLLLTGTCVDLGQGRRFRESCVGHDPTEPLEVCLVSSEHYAASDRESPGHVPSTLDAGPEDTCPSAEEPRLNVQVTSTPVIVMRGAAGLQREIQEGAYSGSCYHRDGLRLSIQFEVRRVELQGPTPLFCCWLVKDLLHSQRDSAARTRLFLASLPGSTHSTAAELTGPSLVEVLRARPWFEEPPKAVELEGLAACEGEYSQKYSTMSPLGSGAFGFVWTAVDKEKNKEVVVKFIKKEKVLEDCWIEDPKLGKVTLEIAILSRVEHANIIKVLDIFENQGFFQLVMEKHGSGLDLFAFIDRHPRLDEPLASYIFRQLVSAVGYLRLKDIIHRDIKDENIVIAEDFTIKLIDFGSAAYLERGKLFYTFCGTIEYCAPEVLMGNPYRGPELEMWSLGVTLYTLVFEENPFCELEETVEAAIHPPYLVSKELMSLVSGLLQPVPERRTTLEKLVTDPWVTQPVNLADYTWEEVFRVNKPESGVLSAASLEMGNRSLSDVAQAQELCGGPVPGEAPNGQGCLHPGDPRLLTS

SEQ ID NO: 37400 - protein, 1330 aa, Homo sapiens
MEDGGLTAFEEDQRCLSQSLPLPVSAEGPAAQTTAEPSRSFSSAHRHLSRRNGLSRLCQSRTALSEDRWSSYCLSSLAAQNICTSKLHCPAAPEHTDPSEPRGSVSCCSLLRGLSSGWSSPLLPAPVCNPNKAIFTVDAKTTEILVANDKACGLLGYSSQDLIGQKLTQFFLRSDSDVVEALSEEHMEADGHAAVVFGTVVDIISRSGEKIPVSVWMKRMRQERRLCCVVVLEPVERVSTWVAFQSDGTVTSCDSLFAHLHGYVSGEDVAGQHITDLIPSVQLPPSGQHIPKNLKIQRSVGRARDGTTFPLSLKLKSQPSSEEATTGEAAPVSGYRASVWVFCTISGLITLLPDGTIHGINHSFALTLFGYGKTELLGKNITFLIPGFYSYMDLAYNSSLQLPDLASCLDVGNESGCGERTLDPWQGQDPAEGGQDPRINVVLAGGHVVPRDEIRKLMESQDIFTGTQTELIAGGQLLSCLSPQPAPGVDNVPEGSLPVHGEQALPKDQQITALGREEPVAIESPGQDLLGESRSEPVDVKPFASCEDSEAPVPAEDGGSDAGMCGLCQKAQLERMGVSGPSGSDLWAGAAVAKPQAKGQLAGGSLLMHCPCYGSEWGLWWRSQDLAPSPSGMAGLSFGTPTLDEPWLGVENDREELQTCLIKEQLSQLSLAGALDVPHAELVPTECQAVTAPVSSCDLGGRDLCGGCTGSSSACYALATDLPGGLEAVEAQEVDVNSFSWNLKELFFSDQTDQTSSNCSCATSELRETPSSLAVGSDPDVGSLQEQGSCVLDDRELLLLTGTCVDLGQGRRFRESCVGHDPTEPLEVCLVSSEHYAASDRESPGHVPSTLDAGPEDTCPSAEEPRLNVQVTSTPVIVMRGAAGLQREIQEGAYSGSCYHRDGLRLSIQFEVRRVELQGPTPLFCCWLVKDLLHSQRDSAARTRLFLASLPGSTHSTAAELTGPSLVEVLRARPWFEEPPKAVELEGLAACEGEYSQKYSTMSPLGSGAFGFVWTAVDKEKNKEVVVKFIKKEKVLEDCWIEDPKLGKVTLEIAILSRVEHANIIKVLDIFENQGFFQLVMEKHGSGLDLFAFIDRHPRLDEPLASYIFRQVRAGQSRLVSAVGYLRLKDIIHRDIKDENIVIAEDFTIKLIDFGSAAYLERGKLFYTFCGTIEYCAPEVLMGNPYRGPELEMWSLGVTLYTLVFEENPFCELEETVEAAIHPPYLVSKELMSLVSGLLQPVPERRTTLEKLVTDPWVTQPVNLADYTWEEVFRVNKPESGVLSAASLEMGNRSLSDVAQAQELCGGPVPGEAPNGQGCLHPGDPRLLTS

SEQ ID NO: 37401 - protein, 1143 aa, Homo sapiens
MEDGGLTAFEEDQRCLSQSLPLPVSAEGPAAQTTAEPSRSFSSAHRHLSRRNGLSRLCQSRTALSEDRWSSYCLSSLAAQNICTSKLHCPAAPEHTDPSEPRGSVSCCSLLRGLSSGWSSPLLPAPVCNPNKAIFTVDAKTTEILVANDKACGLLGYSSQDLIGQKLTQFFLRSDSDVVEALSEEHMEADGHAAVVFGTVVDIISRSGEKIPVSVWMKRMRQERRLCCVVVLEPVERVSTWVAFQSDGTVTSCDSLFAHLHGYVSGEDVAGQHITDLIPSVQLPPSGQHIPKNLKIQRSVGRARDGTTFPLSLKLKSQPSSEEATTGEAAPVSGYRASVWVFCTISGLITLLPDGTIHGINHSFALTLFGYGKTELLGKNITFLIPGFYSYMDLAYNSSLQLPDLASCLDVGNESGCGERTLDPWQGQDPAEGGQDPRINVVLAGGHVVPRDEIRKLMESQDIFTGTQTELIAGGQLLSCLSPQPAPGVDNVPEGSLPVHGEQALPKDQQITALGREEPVAIESPGQDLLGESRSEPVDVKPFASCEDSEAPVPAEDGGSDAGMCGLCQKAQLERMGVSGPSGSDLWAGAAVAKPQAKGQLAGGSLLMHCPCYGSEWGLWWRSQDLAPSPSGMAGLSFGTPTLDEPWLGVENDREELQTCLIKEQLSQLSLAGALDVPHAELVPTECQAVTAPVSSCDLGGRDLCGGCTGSSSACYALATDLPGGLEAVEAQEVDVNSFSWNLKELFFSDQTDQTSSNCSCATSELRETPSSLAVGSDPDVGSLQEQGSCVLDDRELLLLTGTCVDLGQGRRFRESCVGHDPTEPLEVCLVSSEHYAASDRESPGHVPSTLDAGPEDTCPSAEEPRLNVQVTSTPVIVMRGAAGLQREIQEGAYSGSCYHRDGLRLSIQFEVRRVELQGPTPLFCCWLVKDLLHSQRDSAARTRLFLASLPGSTHSTAAELTGPSLVEVLRARPWFEEPPKAVELEGLAACEGEYSQKYSTMSPLGSGAFGFVWTAVDKEKNKEVVVKFIKKEKVLEDCWIEDPKLGKVTLEIAILSRVEHANIIKVLDIFENQGFFQLVMEKHGSGLDLFAFIDRHPRLDEPLASYIFRQVRAGQSRVSVNAGLGAWVRWLQRSVIHTRFSL

SEQ ID NO: 37402 - protein, 531 aa, Homo sapiens
MAPTIQTQAQREDGHRPNSHRTLPERSGVVCRVKYCNSLPDIPFDPKFITYPFDQNRFVQYKATSLEKQHKHDLLTEPDLGVTIDLINPDTYRIDPNVLLDPADEKLLEEEIQAPTSSKRSQQHAKVVPWMRKTEYISTEFNRYGISNEKPEVKIGVSVKQQFTEEEIYKDRDSQITAIEKTFEDAQKSISQHYSKPRVTPVEVMPVFPDFKMWINPCAQVIFDSDPAPKDTSGAAALEMMSQAMIRGMMDEEGNQFVAYFLPVEETLKKRKRDQEEEMDYAPDDVYDYKIAREYNWNVKNKASKGYEENYFFIFREGDGVYYNELETRVRLSKRRAKAGVQSGTNALLVVKHRDMNEKELEAQEARKAQLENHEPEEEEEEEMETEEKEAGGSDEEQEKGSSSEKEGSEDEHSGSESEREEGDRDEASDKSGSGEDESSEDEARAARDKEEIFGSDADSEDDADSDDEDRGQAQGGSDNDSDSGSNGGGQRSRSHSRSASPFPSGSEHSAQEDGSEAAASDSSEADSDSD

SEQ ID NO: 37403 - protein, 485 aa, Homo sapiens
MAPTIQTQAQREDGHRSGVVCRVKYCNSLPDIPFDPKFITYPFDQNRFVQYKATSLEKQHKHDLLTEPDLGVTIDLINPDTYRIDPNVLLDPADEKLLEEEIQAPTSSKRSQQHAKVVPWMRKTEYISTEFNRYGISNEKPEVKIGVSVKQQFTEEEIYKDRDSQITAIEKTFEDAQKSMWINPCAQVIFDSDPAPKDTSGAAALEMMSQAMIRGMMDEEGNQFVAYFLPVEETLKKRKRDQEEEMDYAPDDVYDYKIAREYNWNVKNKASKGYEENYFFIFREGDGVYYNELETRVRLSKRRAKAGVQSGTNALLVVKHRDMNEKELEAQEARKAQLENHEPEEEEEEEMETEEKEAGGSVMLILRTMPTLMMRTEDRPKVAVTMIQTAAAMGVASGAGATAAAPVPSPVAASTRPRRMAVKLQLLIPVKLIVTVTESQGIQGWFRHHYCEQQSTFLVVCLHSAQEDGSEAAASDSSEADSDSD

SEQ ID NO: 37404 - protein, 485 aa, Homo sapiens
MAPTIQTQAQREDGHRSGVVCRVKYCNSLPDIPFDPKFITYPFDQNRFVQYKATSLEKQHKHDLLTEPDLGVTIDLINPDTYRIDPNVLLDPADEKLLEEEIQAPTSSKRSQQHAKVVPWMRKTEYISTEFNRYGISNEKPEVKIGVSVKQQFTEEEIYKDRDSQITAIEKTFEDAQKSISQHYSKPRVTPVEVMPVFPDFKMWINPCAQVIFDSDPAPKDTSGAAALEMMSQAMIRGMMDEEGNQFVAYFLPVEETLKKRKRDQEEEMDYAPDDVYDYKIAREYNWNVKNKASKGYEENYFFIFREGDGVYYNELETRVRLSKRRAKAGVQSGTNALLVVKHRDMNEKELEAQEARKAQLENHEPEEEEEEEMETEEKEAGGSVMLILRTMPTLMMRTEDRPKVAVTMIQTAAAMGVASGAGATAAAPVPSPVAASTRPRRMAVKLQLLIPVKLIVTVTESQGIQGWFRHHYCEQQSTFLVVCL

SEQ ID NO: 37405 - protein, 875 aa, Homo sapiens
MERAGPSFGQQRQQQQPQQQKQQQRDQDSVEAWLDDHWDFTFSYFVRKATREMVNAWFAERVHTIPVCKEGIRGHTESCSCPLQQSPRADNSAPGTPTRKISASEFDRPLRPIVVKDSEGTVSFLSDSEKKEQMPLTPPRFDHDEGDQCSRLLELVKDISSHLDVTALCHKIFLHIHGLISADRYSLFLVCEDSSNDKFLISRLFDVAEGSTLEEVSNNCIRLEWNKGIVGHVAALGEPLNIKDAYEDPRFNAEVDQITGYKTQSILCMPIKNHREEVVGVAQAINKKSGNGGTFTEKDEKDFAAYLAFCGIVLHNAQLYETSLLENKRNQVLLDLASLIFEEQQSLEVILKKIAATIISFMQVQKCTIFIVDEDCSDSFSSVFHMECEELEKSSDTLTREHDANKINYMYAQYVKNTMEPLNIPDVSKDKRFPWTTENTGNVNQQCIRSLLCTPIKNGKKNKVIGVCQLVNKMEENTGKVKPFNRNDEQFLEAFVIFCGLGIQNTQMYEAVERAMAKQMVTLEVLSYHASAAEEETRELQSLAAAVVPSAQTLKITDFSFSDFELSDLETALCTIRMFTDLNLVQNFQMKHEVLCRWILSVKKNYRKNVAYHNWRHAFNTAQCMFAALKAGKIQNKLTDLEILALLIAALSHDLDHRGVNNSYIQRSEHPLAQLYCHSIMEHHHFDQCLMILNSPGNQILSGLSIEEYKTTLKIIKQAILATDLALYIKRRGEFFELIRKNQFNLEDPHQKELFLAMLMTACDLSAITKPWPIQQRIAELVATEFFDQGDRERKELNIEPTDLMNREKKNKIPSMQVGFIDAICLQLYEALTHVSEDCFPLLDGCRKNRQKWQALAEQQEKMLINGESGQAKRN

SEQ ID NO: 37406 - protein, 833 aa, Homo sapiens
MLPFGDKTREMVNAWFAERVHTIPVCKEGIRGHTESCSCPLQQSPRADNSAPGTPTRKISASEFDRPLRPIVVKDSEGTVSFLSDSEKKEQMPLTPPRFDHDEGDQCSRLLELVKDISSHLDVTALCHKIFLHIHGLISADRYSLFLVCEDSSNDKFLISRLFDVAEGSTLEEVSNNCIRLEWNKGIVGHVAALGEPLNIKDAYEDPRFNAEVDQITGYKTQSILCMPIKNHREEVVGVAQAINKKSGNGGTFTEKDEKDFAAYLAFCGIVLHNAQLYETSLLENKRNQVLLDLASLIFEEQQSLEVILKKIAATIISFMQVQKCTIFIVDEDCSDSFSSVFHMECEELEKSSDTLTREHDANKINYMYAQYVKNTMEPLNIPDVSKDKRFPWTTENTGNVNQQCIRSLLCTPIKNGKKNKVIGVCQLVNKMEENTGKVKPFNRNDEQFLEAFVIFCGLGIQNTQMYEAVERAMAKQMVTLEVLSYHASAAEEETRELQSLAAAVVPSAQTLKITDFSFSDFELSDLETALCTIRMFTDLNLVQNFQMKHEVLCRWILSVKKNYRKNVAYHNWRHAFNTAQCMFAALKAGKIQNKLTDLEILALLIAALSHDLDHRGVNNSYIQRSEHPLAQLYCHSIMEHHHFDQCLMILNSPGNQILSGLSIEEYKTTLKIIKQAILATDLALYIKRRGEFFELIRKNQFNLEDPHQKELFLAMLMTACDLSAITKPWPIQQRIAELVATEFFDQGDRERKELNIEPTDLMNREKKNKIPSMQVGFIDAICLQLYEALTHVSEDCFPLLDGCRKNRQKWQALAEQQEKMLINGESGQAKRN

SEQ ID NO: 37407 - protein, 95 aa, Homo sapiens
MAAARLCLSLLLLSTCVALLLQPLLGAQGAPLEPVYPGDNATPEQMAQYAADLRRYINMLTRPRYGKRHKEDTLAFSEWGSPHAAVPRELSPLDL

SEQ ID NO: 37408 - protein, 178 aa, Homo sapiens
MAAARLCLSLLLLSTCVALLLQPLLGAQGAPLEPVYPGDNATPEQMAQYAADLRRYINMLTRPRCVPQLGREIPAPGTLGPLHIPGHTLSPAPAPAPSRPALGKTGHLCSTGLDQCALGKMVPTGRYETGGLAPGHSACPCCLFPPRYGKRHKEDTLAFSEWGSPHAAVPRELSPLDL

SEQ ID NO: 37409 - protein, 919 aa, Homo sapiens [sequence omitted]

SEQ ID NO: 37410 - protein, 833 aa, Homo sapiens
MTDTRRRVKVYTLNEDRQWDDRGTGHVSSGYVERLKGMSLLVRAESDGSLLLESKINPNTAYQKQQDTLIVWSEAENYDLALSFQEKAGCDEIWEKICQVQGKDPSVDITQDLVDESEEERFDDMSSPGLELPSCELSRLEEIAELVASSLPSPLRREKLALALENEGYIKKLLELFHVCEDLENIEGLHHLYEIIKGIFLLNRTALFEVMFSEECIMDVIGCLEYDPALSQPRKHREFLTKTAKFKEVIPISDPELKQKIHQTYRVQYIQDMVLPTPSVFEENMLSTLHSFIFFNKVEIVGMLQEDEKFLTDLFAQLTDEATDEEKRQELVNFLKEFCAFSQTLQPQNRDAFFKTLSNMGILPALEVILGMDDTQVRSAATDIFSYLVEYNPSMVREFVMQEAQQNDDVSKKLTEQKITSKDILLINLIIEHMICDTDPELGGAVQLMGLLRTLVDPENMLATANKTEKTEFLGFFYKHCMHVLTAPLLANTTEDKPSKDDFQTAQLLALVLELLTFCVEHHTYHIKNYIINKDILRRVLVLMASKHAFLALCALRFKRKIIGLKDEFYNRYIMKSFLFEPVVKAFLNNGSRYNLMNSAIIEMFEFIRVEDIKSLTAHVIENYWKALEDVDYVQTFKGLKLRFEQQRERQDNPKLDSMRSILRNHRYRRDARTLEDEEEMWFNTDEDDMEDGEAVVSPSDKTKNDDDIMDPISKFMERKKLKESEEKEVLLKTNLSGRQSPSFKLSLSSGTKTNLTSQSSTTNLPGSPGSPGSPGSPGSPGSVPKNTSQTAAITTKGGLVGLVDYPDDDEDDDEDEDKEDTLPLSKKAKFDS

SEQ ID NO: 37411 - protein, 820 aa, Homo sapiens
MTDTRRRVKVYTLNEDRQWDDRGTGHVSSGYVERLKGMSLLVRAESDGSLLLESKINPNTAYQKQQDTLIVWSEAENYDLALSFQEKAGCDEIWEKICQVQGKDPSVDITQDLVDESEEERFDDMSSPGLELPSCELSRLEEIAELVASSLPSPLRREKLALALENEGYIKKLLELFHVCEDLENIEGLHHLYEIIKGIFLLNRTALFEVMFSEECIMDVIGCLEYDPALSQPRKHREFLTKTAKFKEVIPISDPELKQKIHQTYRVQYIQDMVLPTPSVFEENMLSTLHSFIFFNKVEIVGMLQEDEKFLTDLFAQLTDEATDEEKRQELVNFLKEFCAFSQTLQPQNRDAFFKTLSNMGILPALEVILGMDDTQVRSAATDIFSYLVEYNPSMVREFVMQEAQQNDDDILLINLIIEHMICDTDPELGGAVQLMGLLRTLVDPENMLATANKTEKTEFLGFFYKHCMHVLTAPLLANTTEDKPSKDDFQTAQLLALVLELLTFCVEHHTYHIKNYIINKDILRRVLVLMASKHAFLALCALRFKRKIIGLKDEFYNRYIMKSFLFEPVVKAFLNNGSRYNLMNSAIIEMFEFIRVEDIKSLTAHVIENYWKALEDVDYVQTFKGLKLRFEQQRERQDNPKLDSMRSILRNHRYRRDARTLEDEEEMWFNTDEDDMEDGEAVVSPSDKTKNDDDIMDPISKFMERKKLKESEEKEVLLKTNLSGRQSPSFKLSLSSGTKTNLTSQSSTTNLPGSPGSPGSPGSPGSPGSVPKNTSQTAAITTKGGLVGLVDYPDDDEDDDEDEDKEDTLPLSKKAKFDS

SEQ ID NO: 37412 - protein, 594 aa, Homo sapiens
MTDTRRRVKVYTLNEDRQWDDRGTGHVSSGYVERLKGMSLLVRAESDGSLLLESKINPNTAYQKQQEDEKFLTDLFAQLTDEATDEEKRQELVNFLKEFCAFSQTLQPQNRDAFFKTLSNMGILPALEVILGMDDTQVRSAATDIFSYLVEYNPSMVREFVMQEAQQNDDVSKKLTEQKITSKDILLINLIIEHMICDTDPELGGAVQLMGLLRTLVDPENMLATANKTEKTEFLGFFYKHCMHVLTAPLLANTTEDKPSKDDFQTAQLLALVLELLTFCVEHHTYHIKNYIINKDILRRVLVLMASKHAFLALCALRFKRKIIGLKDEFYNRYIMKSFLFEPVVKAFLNNGSRYNLMNSAIIEMFEFIRVEDIKSLTAHVIENYWKALEDVDYVQTFKGLKLRFEQQRERQDNPKLDSMRSILRNHRYRRDARTLEDEEEMWFNTDEDDMEDGEAVVSPSDKTKNDDDIMDPISKFMERKKLKESEEKEVLLKTNLSGRQSPSFKLSLSSGTKTNLTSQSSTTNLPGSPGSPGSPGSPGSPGSVPKNTSQTAAITTKGGLVGLVDYPDDDEDDDEDEDKEDTLPLSKKAKFDS

SEQ ID NO: 37413 - protein, 540 aa, Homo sapiens
MTDTRRRVKVYTLNEDRQWDDRGTGHVSSGYVERLKGMSLLVRAESDGSLLLESKINPNTAYQKQQDTLIVWSEAENYDLALSFQEKAGCDEIWEKICQVQGKDPSVDITQDLVDESEEERFDDMSSPGLELPSCELSRLEEIAELVASSLPSPLRREKLALALENEGYIKKLLELFHVCEDLENIEGLHHLYEIIKGIFLLNRTALFEVMFSEECIMDVIGCLEYDPALSQPRKHREFLTKTAKFKEVIPISDPELKQKIHQTYRVQYIQDMVLPTPSVFEENMLSTLHSFIFFNKVEIVGMLQEDEKFLTDLFAQLTDEATDEEKRQELVNFLKEFCAFSQTLQPQNRDAFFKTLSNMGILPALEVILGMDDTQVRSAATDIFSYLVEYNPSMVREFVMQEAQQNDDDILLINLIIEHMICDTDPELGGAVQLMGLLRTLVDPENMLATANKTEKTEFLGFFYKHCMHVLTAPLLANTTEDKPSKDDFQTAQLLALVLELLTFCVEHHTYHIKNYIINKDILRRVLVLMASKHAFLAL

SEQ ID NO: 37414 - protein, 164 aa, Homo sapiens
MVNSVVFFDITVDGKPLGRISIKLFADKIPKTAENFRALSTGEKGFRYKGSCFHRIIPGFMCQGGDFTRPNGTGDKSIYGEKFDDENLIRKHTGSGILSMANAGPNTNGSQFFICTAKTEWLDGKHVAFGKVKERVNIVEAMEHFGYRNSKTSKKITIADCGQF

SEQ ID NO: 37415 - protein, 393 aa, Homo sapiens [sequence omitted]

SEQ ID NO: 37416 - protein, 341 aa, Homo sapiens
MEEPQSDPSVEPPLSQETFSDLWKLLPENNVLSPLPSQAMDDLMLSPDDIEQWFTEDPGPDEAPRMPEAAPPVAPAPAAPTPAAPAPAPSWPLSSSVPSQKTYQGSYGFRLGFLHSGTAKSVTCTYSPALNKMFCQLAKTCPVQLWVDSTPPPGTRVRAMAIYKQSQHMTEVVRRCPHHERCSDSDGLAPPQHLIRVEGNLRVEYLDDRNTFRHSVVVPYEPPEVGSDCTTIHYNYMCNSSCMGGMNRRPILTIITLEDSSGNLLGRNSFEVRVCACPGRDRRTEEENLRKKGEPHHELPPGSTKRALPNNTSSSPQPKKKPLDGEYFTLQDQTSFQKENC

SEQ ID NO: 37417 - protein, 346 aa, Homo sapiens
MEEPQSDPSVEPPLSQETFSDLWKLLPENNVLSPLPSQAMDDLMLSPDDIEQWFTEDPGPDEAPRMPEAAPPVAPAPAAPTPAAPAPAPSWPLSSSVPSQKTYQGSYGFRLGFLHSGTAKSVTCTYSPALNKMFCQLAKTCPVQLWVDSTPPPGTRVRAMAIYKQSQHMTEVVRRCPHHERCSDSDGLAPPQHLIRVEGNLRVEYLDDRNTFRHSVVVPYEPPEVGSDCTTIHYNYMCNSSCMGGMNRRPILTIITLEDSSGNLLGRNSFEVRVCACPGRDRRTEEENLRKKGEPHHELPPGSTKRALPNNTSSSPQPKKKPLDGEYFTLQMLLDLRWCYFLINSS

SEQ ID NO: 37418 - protein, 354 aa, Homo sapiens
MDDLMLSPDDIEQWFTEDPGPDEAPRMPEAAPPVAPAPAAPTPAAPAPAPSWPLSSSVPSQKTYQGSYGFRLGFLHSGTAKSVTCTYSPALNKMFCQLAKTCPVQLWVDSTPPPGTRVRAMAIYKQSQHMTEVVRRCPHHERCSDSDGLAPPQHLIRVEGNLRVEYLDDRNTFRHSVVVPYEPPEVGSDCTTIHYNYMCNSSCMGGMNRRPILTIITLEDSSGNLLGRNSFEVRVCACPGRDRRTEEENLRKKGEPHHELPPGSTKRALPNNTSSSPQPKKKPLDGEYFTLQIRGRERFEMFRELNEALELKDAQAGKEPGGSRAHSSHLKSKKGQSTSRHKKLMFKTEGPDSD

SEQ ID NO: 37419 - protein, 302 aa, Homo sapiens
MDDLMLSPDDIEQWFTEDPGPDEAPRMPEAAPPVAPAPAAPTPAAPAPAPSWPLSSSVPSQKTYQGSYGFRLGFLHSGTAKSVTCTYSPALNKMFCQLAKTCPVQLWVDSTPPPGTRVRAMAIYKQSQHMTEVVRRCPHHERCSDSDGLAPPQHLIRVEGNLRVEYLDDRNTFRHSVVVPYEPPEVGSDCTTIHYNYMCNSSCMGGMNRRPILTIITLEDSSGNLLGRNSFEVRVCACPGRDRRTEEENLRKKGEPHHELPPGSTKRALPNNTSSSPQPKKKPLDGEYFTLQDQTSFQKENC

SEQ ID NO: 37420 - protein, 307 aa, Homo sapiens
MDDLMLSPDDIEQWFTEDPGPDEAPRMPEAAPPVAPAPAAPTPAAPAPAPSWPLSSSVPSQKTYQGSYGFRLGFLHSGTAKSVTCTYSPALNKMFCQLAKTCPVQLWVDSTPPPGTRVRAMAIYKQSQHMTEVVRRCPHHERCSDSDGLAPPQHLIRVEGNLRVEYLDDRNTFRHSVVVPYEPPEVGSDCTTIHYNYMCNSSCMGGMNRRPILTIITLEDSSGNLLGRNSFEVRVCACPGRDRRTEEENLRKKGEPHHELPPGSTKRALPNNTSSSPQPKKKPLDGEYFTLQMLLDLRWCYFLINSS

SEQ ID NO: 37421 - protein, 261 aa, Homo sapiens
MFCQLAKTCPVQLWVDSTPPPGTRVRAMAIYKQSQHMTEVVRRCPHHERCSDSDGLAPPQHLIRVEGNLRVEYLDDRNTFRHSVVVPYEPPEVGSDCTTIHYNYMCNSSCMGGMNRRPILTIITLEDSSGNLLGRNSFEVRVCACPGRDRRTEEENLRKKGEPHHELPPGSTKRALPNNTSSSPQPKKKPLDGEYFTLQIRGRERFEMFRELNEALELKDAQAGKEPGGSRAHSSHLKSKKGQSTSRHKKLMFKTEGPDSD

SEQ ID NO: 37422 - protein, 209 aa, Homo sapiens
MFCQLAKTCPVQLWVDSTPPPGTRVRAMAIYKQSQHMTEVVRRCPHHERCSDSDGLAPPQHLIRVEGNLRVEYLDDRNTFRHSVVVPYEPPEVGSDCTTIHYNYMCNSSCMGGMNRRPILTIITLEDSSGNLLGRNSFEVRVCACPGRDRRTEEENLRKKGEPHHELPPGSTKRALPNNTSSSPQPKKKPLDGEYFTLQDQTSFQKENC

SEQ ID NO: 37423 - protein, 214 aa, Homo sapiens
MFCQLAKTCPVQLWVDSTPPPGTRVRAMAIYKQSQHMTEVVRRCPHHERCSDSDGLAPPQHLIRVEGNLRVEYLDDRNTFRHSVVVPYEPPEVGSDCTTIHYNYMCNSSCMGGMNRRPILTIITLEDSSGNLLGRNSFEVRVCACPGRDRRTEEENLRKKGEPHHELPPGSTKRALPNNTSSSPQPKKKPLDGEYFTLQMLLDLRWCYFLINSS

SEQ ID NO: 37424 - protein, 576 aa, Homo sapiens
MAQGVLWILLGLLLWSDPGTASLPLLMDSVIQALAELEQKVPAAKTRHTASAWLMSAPNSGPHNRLYHFLLGAWSLNATELDPCPLSPELLGLTKEVARHDVREGKEYGVVLAPDGSTVAVEPLLAGLEAGLQGRRVINLPLDSMAAPWETGDTFPDVVAIAPDVRATSSPGLRDGSPDVTTADIGANTPDATKGCPDVQASLPDAKAKSPPTMVDSLLAVTLAGNLGLTFLRGSQTQSHPDLGTEGCWDQLSAPRTFTLLDPKASLLTMAFLNGALDGVILGDYLSRTPEPRPSLSHLLSQYYGAGVARDPGFRSNFRRQNGAALTSASILAQQVWGTLVLLQRLEPVHLQLQCMSQEQLAQVAANATKEFTEAFLGCPAIHPRCRWGAAPYRGRPKLLQLPLGFLYVHHTYVPAPPCTDFTRCAANMRSMQRYHQDTQGWGDIGYSFVVGSDGYVYEGRGWHWVGAHTLGHNSRGFGVAIVGNYTAALPTEAALRTVRDTLPSCAVRAGLLRPDYALLGHRQLVRTDCPGDALFDLLRTWPHFTATVKPRPARSVSKRSRREPPPRTLPATDLQ

SEQ ID NO: 37425 - protein, 634 aa, Homo sapiens
MAQGVLWILLGLLLWSDPGTASLPLLMDSVIQALAELEQKVPAAKTRHTASAWLMSAPNSGPHNRLYHFLLGAWSLNATELDPCPLSPELLGLTKEVARHDVREGKEYGVVLAPDGSTVAVEPLLAGLEAGLQGRRVINLPLDSMAAPWETGDTFPDVVAIAPDVRATSSPGLRDGSPDVTTADIGANTPDATKGCPDVQASLPDAKAKSPPTMVDSLLAVTLAGNLGLTFLRGSQTQSHPDLGTEGCWDQLSAPRTFTLLDPKASLLTMAFLNGALDGVILGDYLSRTPEPRPSLSHLLSQYYGAGVARDPGFRSNFRRQNGAALTSASILAQQVWGTLVLLQRLEPVHLQLQCMSQEQLAQVAANATKEFTEAFLGCPAIHPRCRWGAAPYRGRPKLLQLPLGFLYVHHTYVPAPPCTDFTRCAANMRSMQRYHQDTQGWGDIGYSFVVGSDGYVYEGRGWHWVGAHTLGHNSRGFGVAIVGNYTAALPTEAALRTVRDTLPSCAVRAGLLRPDYALLGHRQLVRTDCPGDALFDLLRTWPHFTAVSLRSLHYTARRPSVYTSSTRPLPPACNSCARTASARPPTSRRHVYSGNLGPAFAGHSAGNIPDPVTSAYAASAQPQTQPACPFPSS

SEQ ID NO: 37426 - protein, 101 aa, Homo sapiens
MNLERVSNEEKLNLCRKYYLGGFAFLPFLWLVNIFWFFREAFLVPAYTEQSQIKGYVWRSAVGFLFWVIVLTSWITIFQIYRPRWGALGDYLSFTIPLGTP

SEQ ID NO: 37427 - protein, 373 aa, Homo sapiens
MLPWLLVFSALGIQAWGDSSWNKTQAKQVSEGLQYLFENISQLTEKGLPTDVSTTVSRKAWGAEAVGCSIQLTTPVNVLVIHHVPGLECHDQTVCSQRLRELQAHHVHNNSGCDVAYNFLVGDDGRVYEGVGWNIQGVHTQGYNNISLGFAFFGTKKGHSPSPAALSAMENLITYAVQKGHLSSSYVQPLLGKGENCLAPRQKTSLKKACPGVVPRSVWGARETHCPRMTLPAKYGIIIHTAGRTCNISDECRLLVRDIQSFYIDRLKSCDIGYNFLVGQDGAIYEGVGWNVQGSSTPGYDDIALGITFMGTFTGIPPNAAALEAAQDLIQCAMVKGYLTPNYLLVGHSDVARTLSPGQALYNIISTWPHFKH

SEQ ID NO: 37428 - protein, 369 aa, Homo sapiens
MLPWLLVFSALGIQAWGDSSWNKTQAKQVSEGLQYLFENISQLTEKDVSTTVSRKAWGAEAVGCSIQLTTPVNVLVIHHVPGLECHDQTVCSQRLRELQAHHVHNNSGCDVAYNFLVGDDGRVYEGVGWNIQGVHTQGYNNISLGFAFFGTKKGHSPSPAALSAMENLITYAVQKGHLSSSYVQPLLGKGENCLAPRQKTSLKKACPGVVPRSVWGARETHCPRMTLPAKYGIIIHTAGRTCNISDECRLLVRDIQSFYIDRLKSCDIGYNFLVGQDGAIYEGVGWNVQGSSTPGYDDIALGITFMGTFTGIPPNAAALEAAQDLIQCAMVKGYLTPNYLLVGHSDVARTLSPGQALYNIISTWPHFKH

SEQ ID NO: 37429 - protein, 129 aa, Homo sapiens
MAELIQKKLQGEVEKYQQLQKDLSKSMSGRQKLEAQLTENNIVKEELALLDGSNVVFKLLGPVLVKQELGEARATVGKRLDYITAEIKRYESQLRDLERQSEQQRETLAQLQQEFQRAQAAKAGAPGKA

SEQ ID NO: 37430 - protein, 493 aa, Homo sapiens
MAAATGPSFWLGNETLKVPLALFALNRQRLCERLRKNPAVQAGSIVVLQGGEETQRYCTDTGVLFRQESFFHWAFGVTEPGCYGVIDVDTGKSTLFVPRLPASHATWMGKIHSKEHFKEKYAVDDVQYVDEIASVLTSQKPSVLLTLRGVNTDSGSVCREASFDGISKFEVNNTILHPEIVECRVFKTDMELEVLRYTNKISSEAHREVMKAVKVGMKEYELESLFEHYCYSRGGMRHSSYTCICGSGENSAVLHYGHAGAPNDRTIQNGDMCLFDMGGEYYCFASDITCSFPANGKFTADQKAVYEAVLRSSRAVMGAMKPGVWWPDMHRLADRIHLEELAHMGILSGSVDAMVQAHLGAVFMPHGLGHFLGIDVHDVGGYPEGVERIDEPGLRSLRTARHLQPGMVLTVEPGIYFIDHLLDEALADPARASFLNREVLQRFRGFGGVRIEEDVVVTDSGIELLTCVPRTVEEIEACMAGCDKAFTPFSGPK

SEQ ID NO: 37431 - protein, 452 aa, Homo sapiens
MAAATGPSFWLGNETLKVPLALFALNRQRLCERLRKNPAVQAGSIVVLQGGEETQRYCTDTGVLFRQESFFHWAFGVTEPGCYGVIDVDTGKSTLFVPRLPASHATWMGKIHSKEHFKEKYAVDDVQYVDEIASVLTSQKPSVLLTLRGVNTDSGSVCREASFDGISKFEVNNTILHPEIVECLFEHYCYSRGGMRHSSYTCICGSGENSAVLHYGHAGAPNDRTIQNGDMCLFDMGGEYYCFASDITCSFPANGKFTADQKAVYEAVLRSSRAVMGAMKPGVWWPDMHRLADRIHLEELAHMGILSGSVDAMVQAHLGAVFMPHGLGHFLGIDVHDVGGYPEGVERIDEPGLRSLRTARHLQPGMVLTVEPGIYFIDHLLDEALADPARASFLNREVLQRFRGFGGVRIEEDVVVTDSGIELLTCVPRTVEEIEACMAGCDKAFTPFSGPK

SEQ ID NO: 37432 - protein, 429 aa, Homo sapiens
MAAATGPSFWLGNETLKVPLALFALNRQRLCERLRKNPAVQAGSIVVLQGGEETQRYCTDTGVLFRQIASVLTSQKPSVLLTLRGVNTDSGSVCREASFDGISKFEVNNTILHPEIVECRVFKTDMELEVLRYTNKISSEAHREVMKAVKVGMKEYELESLFEHYCYSRGGMRHSSYTCICGSGENSAVLHYGHAGAPNDRTIQNGDMCLFDMGGEYYCFASDITCSFPANGKFTADQKAVYEAVLRSSRAVMGAMKPGVWWPDMHRLADRIHLEELAHMGILSGSVDAMVQAHLGAVFMPHGLGHFLGIDVHDVGGYPEGVERIDEPGLRSLRTARHLQPGMVLTVEPGIYFIDHLLDEALADPARASFLNREVLQRFRGFGGVRIEEDVVVTDSGIELLTCVPRTVEEIEACMAGCDKAFTPFSGPK

SEQ ID NO: 37433 - protein, 388 aa, Homo sapiens
MKWLLLLGLVALSECIMYKVPLIRKKSLRRTLSERGLLKDFLKKHNLNPARKYFPQWKAPTLVDEQPLENYLDMEYFGTIGIGTPAQDFTVVFDTGSSNLWVPSVYCSSLACTNHNRFNPEDSSTYQSTSETVSITYGTGSMTGILGYDTVQVGGISDTNQIFGLSETEPGSFLYYAPFDGILGLAYPSISSSGATPVFDNIWNQGLVSQDLFSVYLSADDQSGSVVIFGGIDSSYYTGSLNWVPVTVEGYWQITVDSITMNGEAIACAEGCQAIVDTGTSLLTGPTSPIANIQSDIGASENSDGDMVVSCSAISSLPDIVFTINGVQYPVPPSAYILQSEGSCISGFQGMNLPTESGELWILGDVFIRQYFTVFDRANNQVGLAPVA

SEQ ID NO: 37434 - protein, 300 aa, Homo sapiens
MDSDSCAAAFHPEEYSPSCKRRRTVEDFNKFCTFVLAYAGYIPYPKEELPLRSSPSPANSTAGTIDSDGWDAGFSDIASSVPLPVSDRCFSHLQPTLLQRAKPSNFLLDRKKTDKLKKKKKRKRRDSDAPGKEGYRGGLLKLEAADPYVETPTSPTLQDIPQAPSDPCSGWDSDTPSSGSCATVSPDQVKEIKTEGKRTIVRQGKQVVFRDEDSTGNDEDIMVDSDDDSWDLVTCFCMKPFAGRPMIECNECHTWIHLSCAKIRKSNVPEVFVCQKCRDSKFDIRRSNRSRTGSRKLFLD

SEQ ID NO: 37435 - protein, 911 aa, Homo sapiens
MAQLFLPLLAALVLAQAPAALADVLEGDSSEDRAFRVRIAGDAPLQGVLGGALTIPCHVHYLRPPPSRRAVLGSPRVKWTFLSRGREAEVLVARGVRVKVNEAYRFRVALPAYPASLTDVSLALSELRPNDSGIYRCEVQHGIDDSSDAVEVKVKGVVFLYREGSARYAFSFSGAQEACARIGAHIATPEQLYAAYLGGYEQCDAGWLSDQTVRYPIQTPREACYGDMDGFPGVRNYGVVDPDDLYDVYCYAEDLNGELFLGDPPEKLTLEEARAYCQERGAEIATTGQLYAAWDGGLDHCSPGWLADGSVRYPIVTPSQRCGGGLPGVKTLFLFPNQTGFPNKHSRFNVYCFRDSAQPSAIPEASNPASNPASDGLEAIVTVTETLEELQLPQEATESESRGAIYSIPIMEDGGGGSSTPEDPAEAPRTLLEFETQSMVPPTGFSEEEGKALEEEEKYEDEEEKEEEEEEEEVEDEALWAWPSELSSPGPEASLPTEPAAQEESLSQAPARAVLQPGASPLPDGESEASRPPRVHGPPTETLPTPRERNLASPSPSTLVEAREVGEATGGPELSGVPRGESEETGSSEGAPSLLPATRAPEGTRELEAPSEDNSGRTAPAGTSVQAQPVLPTDSASRGGVAVVPASGDCVPSPCHNGGTCLEEEEGVRCLCLPGYGGDLCDVGLRFCNPGWDAFQGACYKHFSTRRSWEEAETQCRMYGAHLASISTPEEQDFINNRYREYQWIGLNDRTIEGDFLWSDGVPLLYENWNPGQPDSYFLSGENCVVMVWHDQGQWSDVPCNYHLSYTCKMGLVSCGPPPELPLAQVFGRPRLRYEVDTVLRYRCREGLAQRNLPLIRCQENGRWEAPQISCVPRRPARALHPEEDPEGRQGRLLGRWKALLIPPSSPMPGP

SEQ ID NO: 37436 - protein, 671 aa, Homo sapiens
MAQLFLPLLAALVLAQAPAALADVLEGDSSEDRAFRVRIAGDAPLQGVLGGALTIPCHVHYLRPPPSRRAVLGSPRVKWTFLSRGREAEVLVARGVRVKVNEAYRFRVALPAYPASLTDVSLALSELRPNDSGIYRCEVQHGIDDSSDAVEVKVKGVVFLYREGSARYAFSFSGAQEACARIGAHIATPEQLYAAYLGGYEQCDAGWLSDQTVRYPIQTPREACYGDMDGFPGVRNYGVVDPDDLYDVYCYAEDLNGELFLGDPPEKLTLEEARAYCQERGAEIATTGQLYAAWDGGLDHCSPGWLADGSVRYPIVTPSQRCGGGLPGVKTLFLFPNQTGFPNKHSRFNVYCFRDSAQPSAIPEASNPASNPASDGLEAIVTVTETLEELQLPQEATESESRGAIYSIPIMEDGGGGSSTPEDPAEAPRTLLEFETQSMVPPTGFSEEEGKALEEEEKYEDEEEKEEEEEEEEVEDEALWAWPSELSSPGPEASLPTEPAAQEESLSQAPARAVLQPGASPLPDGESEASRPPRVHGPPTETLPTPRERNLASPSPSTLVEAREVGEATGGPELSGVPRGESEETGSSEGAPSLLPATRAPEGTRELEAPSEDNSGRTAPAGTSVQAQPVLPTDSASRGGVAVVPASGNSAQGSTALSILLLFFPLQLWVT

SEQ ID NO: 37437 - protein, 855 aa, Homo sapiens
MSGESGQPEAGPSHAGLDWPNPERNRAGVPGGVIRRAGSQGPRSWIQKVLEQIMDSPRQCVTPSEVVPVTVLAVQRYLLEDEPRDTVPKPPLYCYDVTISDGVYQEKCYLDPSLNSLVYQNILKVGIQMRISRVSCLYNEKRIGQGILCIDNVHCGETSDSISLETPFRNRAHQEKPERPLRGGKSHYLALWNNEDPYGDIWLTDKQPEEHNFSDTKIISLSHLEMTWTNRRNFPALLVRILHKSKLRYYGKPDKKMIEPYQTFLEVADSSGTVSVIMWNALCPEWYKSLRVGLVLLLQDYSVKKSYPFRIQPVPVDPQIKLISTMEICLNLRDPPTNIIIIPEKQVKPEWRLPKLNHRFTTRSELDDMPENCICDVIGLLVFVGRVQRSKKKENREDFWSYRWIHIADGTSEQPFIVELFSTSQPEIFENIYPMAYFVCTQLKVVRNDNQVPKLLYLTTTNESGVFITGHRGQPYTYDAKVKNFIQWIRTKSDSGEQKNMVIGGYYPYPPVPETFSKYSSSIKVESLLTAISEVRKEIEDLQYREQKRIAIQGIITAIKYIPHSSATESASASETLRNANRPSTSQAARVEIQERNGKRHQDDEPVNSQYFQTTSTNLSLSNKIRILQGPHANPVAVPQPGASVQTKGIKPGMPSIFNRRANINANLQGKARKTISDRWESQLWREKKFGLIDHLHYSRVYPESIPRKFMFEHRKFLSDQYNSQPAKYVPPEGRPPKLDDFKSARSLGHFEVTILGLNHEIAIDVAFLPMYCPEDIRTSQIDTLLTSMNYSCAYPQDTTGNDRLPGPRAVAGDIIKAATELDRVHIVGILDICNLGNNKVEVYLHKIYSPENTS

SEQ ID NO: 37438 - protein, 567 aa, Homo sapiens
MSGESGQPEAGPSHAGLDWPNPERNRAGVPGGVIRRAGSQGPRSWIQKVLEQIMDSPRQCVTPSEVVPVTVLAVQRYLLEDEPRDTVPKPPLYCYDVTISDGVYQEKCYLDPSLNSLVYQNILKVGIQMRISRVSCLYNEKRIGQGILCIDNVHCGETSDSISLETPFRNRAHQEKPERPLRGGKSHYLALWNNEDPYGDIWLTDKQPEEHNFSDTKIISLSHLEMTWTNRRNFPALLVRILHKSKLRYYGKPDKKMIEPYQTFLEVADSSGTVSVIMWNALCPEWYKSLRVGLVLLLQDYSVKKSYPFRIQPVPVDPQIKLISTMEICLNLRDPPTNIIIIPEKQVKPEWRLPKLNHRFTTRSELDDMPENCICDVIGLLVFVGRVQRSKKKENREDFWSYRWIHIADGTSEQPFIVELFSTSQPEIFENIYPMAYFVCTQLKVVRNDNQVPKLLYLTTTNESGVFITGHRGQPYTYDAKVKNFIQWIRTKSDSGEQKNMVIGGYYPYPPVPETFSKYSSSIKGTNVIASPSKYVYILYVWLMLFQLVIFILFFYGSDLKFSNIHR

SEQ ID NO: 37439 - protein, 533 aa, Homo sapiens
MTWTNRRNFPALLVRILHKSKLRYYGKPDKKMIEPYQTFLEVADSSGTVSVIMWNALCPEWYKSLRVGLVLLLQDYSVKKSYPFRIQPVPVDPQIKLISTMEICLNLRDPPTNIIIIPEKQVKPEWRLPKLNHRFTTRSELDDMPENCICDVIGLLVFVGRVQRSKKKENREDFWSYRWIHIADGTSEQPFIVELFSTSQPEIFENIYPMAYFVCTQLKVVRNDNQVPKLLYLTTTNESGVFITGHRGQPYTYDAKNANRPSTSQAARVEIQERNGKRHQDDEPVNSQYFQTTSTNLSLSNKIRILQGPHANPVAVPQPGASVQTKGIKPGMPSIFNRRANINANLQGKARKTISDRWESQLWREKKFGLIDHLHYSRVYPESIPRKFMFEHRKFLSDQYNSQPAKYVPPEGRPPKLDDFKSARSLGHFEVTILGLNHEIAIDVAFLPMYCPEDIRTSQIDTLLTSMNYSCAYPQDTTGNDRLPGPRAVAGDIIKAATELDRVHIVGILDICNLGNNKVEVYLHKIYSPENTS

SEQ ID NO: 37440 - protein, 758 aa, Homo sapiens
MSGESGQPEAGPSHAGLDWPNPERNRAGVPGGVIRRAGSQGPRSWIQKVLEQIMDSPRQCVTPSEVVPVTVLAVQRYLLEDEPRDTVPKPPLYCYDVTISDGVYQEKCYLDPSLNSLVYQNILKVGIQMRISRVSCLYNEKRIGQGILCIDNVHCGETSDSISLETPFRNRAHQEKPERPLRGGKSHYLALWNNEDPYGDIWLTDKQPEEHNFSDTKIISLSHLEMTWTNRRNFPALLVRILHKSKLRYYGKPDKKMIEPYQTFLEVADSSGTVSVIMWNALCPEWYKSLRVGLVLLLQDYSVKKSYPFRIQPVPVDPQIKLISTMEICLNLRDPPTNIIIIPEKQVKPEWRLPKLNHRFTTRSELDDMPENCICDVIGLLVFVGRVQRSKKKENREDFWSYRWIHIADGTSEQPFIVELFSTSQPEIFENIYPMAYFVCTQLKVVRNDNQVPKLLYLTTTNESGVFITGHRGQPYTYDAKNANRPSTSQAARVEIQERNGKRHQDDEPVNSQYFQTTSTNLSLSNKIRILQGPHANPVAVPQPGASVQTKGIKPGMPSIFNRRANINANLQGKARKTISDRWESQLWREKKFGLIDHLHYSRVYPESIPRKFMFEHRKFLSDQYNSQPAKYVPPEGRPPKLDDFKSARSLGHFEVTILGLNHEIAIDVAFLPMYCPEDIRTSQIDTLLTSMNYSCAYPQDTTGNDRLPGPRAVAGDIIKAATELDRVHIVGILDICNLGNNKVEVYLHKIYSPENTS

SEQ ID NO: 37441 - protein, 580 aa, Homo sapiens
MENRALDPGTRDSYGATSHLPNKGALAKVKNNFKDLMSKLTEGQYVLCRWTDGLYYLGKIKRVSSSKQSCLVTFEDNSKYWVLWKDIQHAGVPGEEPKCNICLGKTSGPLNEILICGKCGLGYHQQCHIPIAGSADQPLLTPWFCRRCIFALAVRKGGALKKGAIARTLQAVKMVLSYQPEELEWDSPHRTNQQQCYCYCGGPGEWYLRMLQCYRCRQWFHEACTQCLNEPMMFGDRFYLFFCSVCNQGPEYIERLPLRWVDVVHLALYNLGVQSKKKYFDFEEILAFVNHHWELLQLGKLTSTPVTDRGPHLLNALNSYKSRFLCGKEIKKKKCIFRLRIRVPPNPPGKLLPDKGLLPNENSASSELRKRGKSKPGLLPHEFQQQKRRVYRRKRSKFLLEDAIPSSDFTSAWSTNHHLASIFDFTLDEIQSLKSASSGQTFFSDVDSTDAASTSGSASTSLSYDSRWTVGSRKRKLAAKAYMPLRAKRWAAELDGRCPSDSSAEGASVPERPDEGIDSHTFESISEDDSSLSHLKSSITNYFGAAGRLACGEKYQVLARRVTPEGKVQYLVEWEGTTPY

SEQ ID NO: 37442 - protein, 207 aa, Homo sapiens
MENRALDPGTRDSYGATSHLPNKGALAKVKNNFKDLMSKLTEGQYVLCRWTDGLYYLGKIKRVSSSKQSCLVTFEDNSKYWVLWKDIQHAGVPGEEPKCNICLGKTSGPLNEILICGKCGLGYHQQCHIPIAGSADQPLLTPWFCRRCIFALAVRVSLPSSPVPASPASSSGADQRLPSQSLSSKQKGHTWALETDSASATVLGQDL

SEQ ID NO: 37443 - protein, 130 aa, Homo sapiens
MENRALDPGTRDSYGATSHLPNKGALAKVKNNFKDLMSKLTEGQYVLCRWTDGLYYLGKIKRVSSSKQSCLVTFEDNSKYWVLWKDIQHAGVPGEEPKCNICLGKTSGPLNEILICGKCGLVPHPHSGQC

SEQ ID NO: 37444 - protein, 308 aa, Homo sapiens
MTLNGGGSGAGGSRGGGQERERRRGSTPWGPAPPLHRRSMPVDERDLQAALTPGALTAAAAGTGTQGPRLDWPEDSEDSLSSGGSDSDESVYKVLLLGAPGVGKSALARIFGGVEDGPEAEAAGHTYDRSIVVDGEEASLMVYDIWEQDGGRWLPGHCMAMGDAYVIVYSVTDKGSFEKASELRVQLRRARQTDDVPIILVGNKSDLVRSREVSVDEGRACAVVFDCKFIETSAALHHNVQALFEGVVRQIRLRRDSKEANARRQAGTRRRESLGKKAKRFLGRIVARNSRKMAFRAKSKSCHDLSVL

SEQ ID NO: 37445 - protein, 567 aa, Homo sapiens
MAQPPRLSRSGASSLWDPASPAPTSGPRPRLWEGQDVLARWTDGLLYLGTIKKVDSAREVCLVQFEDDSQFLVLWKDISPAALPGEELLCCVCRSETVVPGNRLVSCEKCRHAYHQDCHVPRAPAPGEGEGTSWVCRQCVFAIATKRGGALKKGPYARAMLGMKLSLPYGLKGLDWDAGHLSNRQQSYCYCGGPGEWNLKMLQCRSCLQWFHEACTQCLSKPLLYGDRFYEFECCVCRGGPEKVRRLQLRWVDVAHLVLYHLSVCCKKKYFDFDREILPFTSENWDSLLLGELSDTPKGERSSRLLSALNSHKDRFISGREIKKRKCLFGLHARMPPPVEPPTGDGALTSFPSGQGPGGGVSRPLGKRRRPEPEPLRRRQKGKVEELGPPSAVRNQPEPQEQRERAHLQRALQASVSPPSPSPNQSYQGSSGYNFRPTDARCLPSSPIRMFASFHPSASTAGTSGDSGPPDRSPLELHIGFPTDIPKSAPHSMTASSSSVSSPSPGLPRRSAPPSPLCRSLSPGTGGGVRGGVGYLSRGDPVRVLARRVRPDGSVQYLVEWGGGGIF

SEQ ID NO: 37446 - protein, 457 aa, Homo sapiens
MAQPPRLSRSGASSLWDPASPAPTSGPRPRLWEGQDVLARWTDGLLYLGTIKKVDSAREVCLVQFEDDSQFLVLWKDISPAALPGEELLCCVCRSETVVPGNRLVSCEKCRHAYHQDCHVPRAPAPGEGEGTSWVCRQCVFAIATKRGGALKKGPYARAMLGMKLSLPYGLKGLDWDAGHLSNRQQSYCYCGGPGEWNLKMLQCRSCLQWFHEACTQCLSKPLLYGDRFYEFECCVCRGGPEKVRRLQLRWVDVAHLVLYHLSVCCKKKYFDFDREILPFTSENWDSLLLGELSDTPKGERSSRLLSALNSHKDRFISGREIKKRKCLFGLHARMPPPVEPPTGDGALTRAGPWGRGLTSPGEAPEAGARAPEEEAEGESGGAGATLSSAQSARAPGAEGAGSSAEGTAAAPSGCLLPSTLLPAPQGPLGTVDPQTGHPWNFTLVSPQTSLKVPPTR

SEQ ID NO: 37447 - protein, 102 aa, Homo sapiens
MLRHKTKRGHASLDCLKVFDGIPPPYDKKKRMVVPAALKVVRLKPTRKFALLGRQAQEVRWKYQAVTATLEEKRKEKAKIHYWKKKQLMRLRKQAEKNVKKN

SEQ ID NO: 37448 - protein, 266 aa, Homo sapiens [sequence omitted]

SEQ ID NO: 37449 - protein, 178 aa, Homo sapiens
MHVNGKVALVTGAAQGIGRAFAEALLLKGAKVALVDWNLEAGVQCKAALDEQFEPQKTLFIQCDVADQQQLRDTFRKVVDHFGRLDILVNNAGVNNEKNWEKTLQINLVSVISGTYLGLDYMSKQNGGEGGIIINMSSLAGLMPVAQQPVYCASKHGIVGFTRSAAPTIDCQWIDNTH

SEQ ID NO: 37450 - protein, 145 aa, Homo sapiens
MSKQNGGEGGIIINMSSLAGLMPVAQQPVYCASKHGIVGFTRSAALAANLMNSGVRLNAICPGFVNTAILESIEKEENMGQYIEYKDHIKDMIKYYGILDPPLIANGLITLIEDDALNGAIMKITTSKGIHFQDYDTTPFQAKTQ

SEQ ID NO: 37451 - protein, 143 aa, Homo sapiens
MHVNGKVALVTGAAQGIGRAFAEALLLKGAKVALVDWNLEAGVQCKAALDEQFEPQKTLFIQCDVADQQQLRDTFRKVVDHFGRLDILVNNAGVNNEKNWEKTLQINLVSVISGTYLGLDYMSKQNGGEGGIIINMSSLAAHH

SEQ ID NO: 37452 - protein, 198 aa, Homo sapiens
MHVNGKVALVTGAAQGIGRAFAEALLLKGAKVALVDWNLEAGVQCKAALDEQFEPQKTLFIQCDVADQQQLRGLMPVAQQPVYCASKHGIVGFTRSAALAANLMNSGVRLNAICPGFVNTAILESIEKEENMGQYIEYKDHIKDMIKYYGILDPPLIANGLITLIEDDALNGAIMKITTSKGIHFQDYDTTPFQAKTQ

SEQ ID NO: 37453 - protein, 368 aa, Homo sapiens
MSLFGTTSGFGTSGTSMFGSATTDNHNPMKDIEVTSSPDDSIGCLSFSPPTLPGNFLIAGSWANDVRCWEVQDSGQTIPKAQQMHTGPVLDVCWSDDGSKVFTASCDKTAKMWDLSSNQAIQIAQHDAPVKTIHWIKAPNYSCVMTGSWDKTLKFWDTRSSNPMMVLQLPERCYCADVIYPMAVVATAERGLIVYQLENQPSEFRRIESPLKHQHRCVAIFKDKQNKPTGFALGSIEGRVAIHYINPPNPAKDNFTFKCHRSNGTNTSAPQDIYAVNGIAFHPVHGTLATVGSDGRFSFWDKDARTKLKTSEQLDQPISACCFNHNGNIFAYASSYDWSKGHEFYNPQKKNYIFLRNAAEELKPRNKK

SEQ ID NO: 37454 - protein, 580 aa, Homo sapiens
MDYPKMDYFLDVESAHRLLDVESAQRFFYSQGAQARRATLLLPPTLMAASSEDDIDRRPIRRVRSKSDTPYLAEARISFNLGAAEEVERLAAMRSDSLVPGTHTPPIRRRSKFANLGRIFKPWKWRKKKSEKFKHTSAALERKISMRQSREELIKRGVLKEIYDKDGELSISNEEDSLENGQSLSSSQLSLPALSEMEPVPMPRDPCSYEVLQPSDIMDGPDPGAPVKLPCLPVKLSPPLPPKKVMICMPVGGPDLSLVSYTAQKSGQQGVAQHHHTVLPSQIQHQLQYGSHGQHLPSTTGSLPMHPSGCRMIDELNKTLAMTMQRLESSEQRVPCSTSYHSSGLHSGDGVTKAGPMGLPEIRQVPTVVIECDDNKENVPHESDYEDSSCLYTREEEEEEEDEDDDSSLYTSSLAMKVCRKDSLAIKLSNRPSKRELEEKNILPRQTDEERLELRQQIGTKLTRRLSQRPTAEELEQRNILKPRNEQEEQEEKREIKRRLTRKLSQRPTVEELRERKILIRFSDYVEVADAQDYDRRADKPWTRLTAADKAAIRKELNEFKSTEMEVHELSRHLTRFHRP

SEQ ID NO: 37455 - protein, 484 aa, Homo sapiens
MDYPKMDYFLDVESAHRLLDVESAQRFFYSQGAQARRATLLLPPTLMAASSEDDIDRRPIRRVRSKSDTPYLAEARISFNLGAAEEVERLAAMRSDSLVPGTHTPPIRRRSKFANLGRIFKPWKWRKKKSEKFKHTSAALERKISMRQSREELIKRGVLKEIYDKDGELSISNEEDSLENGQSLSSSQLSLPALSEMEPVPMPRDPCSYEVLQPSDIMDGPDPGAPVKLPCLPVKLSPPLPPKKVMICMPVGGPDLSLVSYTAQKSGQQGVAQHHHTVLPSQIQHQLQYGSHGQHLPSTTGSLPMHPSGCRMIDELNKTLAMTMQRLESSEQRVPCSTSYHSSGLHSGDGVTKAGPMGLPEIRQVPTVVIECDDNKENVPHESDYEDSSCLYTREEEEEEEDEDDDSSLYTSSLAMKVCRKDSLAIKLSNRPSKRELEEKNILPRQTDEERLELRQQIGTKLTRRLSQRPTAEELEQRNILKRK

SEQ ID NO: 37456 - protein, 1096 aa, Homo sapiens
MATVPVYCVCRLPYDVTRFMIECDACKDWFHGSCVGVEEEEAPDIDIYHCPNCEKTHGKSTLKKKRTWHKHGPGQAPDVKPVQNGSQLFIKELRSRTFPSAEDVVARVPGSQLTLGYMEEHGFTEPILVPKKDGLGLAVPAPTFYVSDVENYVGPERSVDVTDVTKQKDCKMKLKEFVDYYYSTNRKRVLNVTNLEFSDTRMSSFVEPPDIVKKLSWVENYWPDDALLAKPKVTKYCLICVKDSYTDFHIDSGGASAWYHVLKGEKTFYLIRPASANISLYERWRSASNHSEMFFADQVDKCYKCIVKQGQTLFIPSGWIYATLTPVDCLAFAGHFLHSLSVEMQMRAYEVERRLKLGSLTQFPNFETACWYMGKHLLEAFKGSHKSGKQLPPHLVQGAKILNGAFRSWTKKQALAEHEDELPEHFKPSQLIKDLAKEIRLSENASKAVRPEVNTVASSDEVCDGDREKEEPPSPIEATPPQSLLEKVSKKKTPKTVKMPKPSKIPKPPKPPKPPRPPKTLKLKDGGKKKGKKSRESASPTIPNLDLLEAHTKEALTKMEPPKKGKATKSVLSVPNKDVVHMQNDVERLEIREQTKSKSEAKWKYKNSKPDSLLKMEEEQKLEKSPLAGNKDNKFSFSFSNKKLLGSKALRPPTSPGVFGALQNFKEDKPKPVRDEYEYVSDDGELKIDEFPIRRKKNAPKRDLSFLLDKKAVLPTPVTKPKLDSAAYKSDDSSDEGSLHIDTDTKPGRNARVKKESGSSAAGILDLLQASEEVGALEYNPSSQPPASPSTQEAIQGMLSMANLQASDSCLQTTWGAGQAKGSSLAAHGARKNGGGSGKSAGKRLLKRAAKNSVDLDDYEEEQDHLDACFKDSDYVYPSLESDEDNPIFKSRSKKRKGSDDAPYSPTARVGPSVPRQDRPVREGTRVASIETGLAAAAAKLSQQEEQKSKKKKSAKRKLTPNTTSPSTSTSISAGTTSTSTTPASTTPASTTPASTSTASSQASQEGSSPEPPPESHSSSLADHEYTAAGTFTGAQAGRTSQPMAPGVFLTQRRPSASSPNNNTAAKGKRTKKGMATAKQRLGKILKIHRNGKLLL

SEQ ID NO: 37457 - protein, 184 aa, Homo sapiens
MREYKLVVLGSGGVGKSALTVQFVQGIFVEKYDPTIEDSYRKQVEVDAQQCMLEILDTAGTEQFTAMRDLYMKNGQGFALVYSITAQSTFNDLQDLREQILRVKDTDDVPMILVGNKCDLEDERVVGKEQGQNLARQWNNCAFLESSAKSKINVNEIFYDLVRQINRKTPVPGKARKKSSCQLL

SEQ ID NO: 37458 - protein, 137 aa, Homo sapiens
MREYKLVVLGSGGVGKSALTVQFVQGIFVEKYDPTIEDSYRKQVEVDAQQCMLEILDTAGTVPMILVGNKCDLEDERVVGKEQGQNLARQWNNCAFLESSAKSKINVNEIFYDLVRQINRKTPVPGKARKKSSCQLL

SEQ ID NO: 37459 - protein, 165 aa, Homo sapiens
MREYKLVVLGSGGVGKSALTVQFVQGIFVEKYDPTIEDSYRKEQFTAMRDLYMKNGQGFALVYSITAQSTFNDLQDLREQILRVKDTDDVPMILVGNKCDLEDERVVGKEQGQNLARQWNNCAFLESSAKSKINVNEIFYDLVRQINRKTPVPGKARKKSSCQLL

SEQ ID NO: 37460 - protein, 142 aa, Homo sapiens
MREYKLVVLGSGGVGKSALEQFTAMRDLYMKNGQGFALVYSITAQSTFNDLQDLREQILRVKDTDDVPMILVGNKCDLEDERVVGKEQGQNLARQWNNCAFLESSAKSKINVNEIFYDLVRQINRKTPVPGKARKKSSCQLL

SEQ ID NO: 37461 - protein, 2039 aa, Homo sapiens
MDIVDTFNHLIPTEHLDDALFLGSNLENEVCEDFSASQNVLEDSLKNMLSDKDPMLGSASNQFCLPVLDSNDPNFQMPCSTVVGLDDIMDEGVVKESGNDTIDEEELILPNRNLRDKVEENSVRSPRKSPRLMAQEQVRSLRQSTIAKRSNAAPLSNTKKASGKTVSTAKAGVKQPERSQVKEEVCMSLKPEYHKENRRCSRNSGQIEVVPEVSVSSSHSSVSSCLEMKDEDGLDSKHKCNNPGEIDVPSHELNCSLLSETCVTIGEKKNEALMECKAKPVGSPLFKFSDKEEHEQNDSISGKTGETVVEEMIATRKVEQDSKETVKLSHEDDHILEDAGSSDISSDAACTNPNKTENSLVGLPSCVDEVTECNLELKDTMGIADKTENTLERNKIEPLGYCEDAESNRQLESTEFNKSNLEVVDTSTFGPESNILENAICDVPDQNSKQLNAIESTKIESHETANLQDDRNSQSSSVSYLESKSVKSKHTKPVIHSKQNMTTDAPKKIVAAKYEVIHSKTKVNVKSVKRNTDVPESQQNFHRPVKVRKKQIDKEPKIQSCNSGVKSVKNQAHSVLKKTLQDQTLVQIFKPLTHSLSDKSHAHPGCLKEPHHPAQTGHVSHSSQKQCHKPQQQAPAMKTNSHVKEELEHPGVEHFKEEDKLKLKKPEKNLQPRQRRSSKSFSLDEPPLFIPDNIATIRREGSDHSSSFESKYMWTPSKQCGFCKKPHGNRFMVGCGRCDDWFHGDCVGLSLSQAQQMGEEDKEYVCVKCCAEEDKKTEILDPDTLENQATVEFHSGDKTMECEKLGLSKHTTNDRTKYIDDTVKHKVKILKRESGEGRNSSDCRDNEIKKWQLAPLRKMGQPVLPRRSSEEKSEKIPKESTTVTCTGEKASKPGTHEKQEMKKKKVEKGVLNVHPAASASKPSADQIRQSVRHSLKDILMKRLTDSNLKVPEEKAAKVATKIEKELFSFFRDTDAKYKNKYRSLMFNLKDPKNNILFKKVLKGEVTPDHLIRMSPEELASKELAAWRRRENRHTIEMIEKEQREVERRPITKITHKGEIEIESDAPMKEQEAAMEIQEPAANKSLEKPEGSEKQKEEVDSMSKDTTSQHRQHLFDLNCKICIGRMAPPVDDLSPKKVKVVVGVARKHSDNEAESIADALSSTSNILASEFFEEEKQESPKSTFSPAPRPEMPGTVEVESTFLARLNFIWKGFINMPSVAKFVTKAYPVSGSPEYLTEDLPDSIQVGGRISPQTVWDYVEKIKASGTKEICVVRFTPVTEEDQISYTLLFAYFSSRKRYGVAANNMKQVKDMYLIPLGATDKIPHPLVPFDGPGLELHRPNLLLGLIIRQKLKRQHSACASTSHIAETPESAPPIALPPDKKSKIEVSTEEAPEEENDFFNSFTTVLHKQRNKPQQNLQEDLPTAVEPLMEVTKQEPPKPLRFLPGVLIGWENQPTTLELANKPLPVDDILQSLLGTTGQVYDQAQSVMEQNTVKEIPFLNEQTNSKIEKTDNVEVTDGENKEIKVKVDNISESTDKSAEIETSVVGSSSISAGSLTSLSLRGKPPDVSTEAFLTNLSIQSKQEETVESKEKTLKRQLQEDQENNLQDNQTSNSSPCRSNVGKGNIDGNVSCSENLVANTARSPQFINLKRDPRQAAGRSQPVTTSESKDGDSCRNGEKHMLPGLSHNKEHLTEQINVEEKLCSAEKNSCVQQSDNLKVAQNSPSVENIQTSQAEQAKPLQEDILMQNIETVHPFRRGSAVATSHFEVGNTCPSEFPSKSITFTSRSTSPRTSTNFSPMRPQQPNLQHLKSSPPGFPFPGPPNFPPQSMFGFPPHLPPPLLPPPGFGFAQNPMVPWPPVVHLPGQPQRMMGPLSQASRYIGPQNFYQVKDIRRPERRHSDPWGRQDQQQLDRPFNRGKGDRQRFYSDSHHLKRERHEKEWEQESERHRRRDRSQDKDRDRKSREEGHKDKERARLSHGDRGTDGKASRDSRNVDKKPDKPKSEDYEKDKEREKSKHREGEKDRDRYHKDRDHTDRTKSKR

SEQ ID NO: 37462 - protein, 1951 aa, Homo sapiens
MDEGVVKESGNDTIDEEELILPNRNLRDKVEENSVRSPRKSPRLMAQEQVRSLRQSTIAKRSNAAPLSNTKKASGKTVSTAKAGVKQPERSQVKEEVCMSLKPEYHKENRRCSRNSGQIEVVPEVSVSSSHSSVSSCLEMKDEDGLDSKHKCNNPGEIDVPSHELNCSLLSETCVTIGEKKNEALMECKAKPVGSPLFKFSDKEEHEQNDSISGKTGETVVEEMIATRKVEQDSKETVKLSHEDDHILEDAGSSDISSDAACTNPNKTENSLVGLPSCVDEVTECNLELKDTMGIADKTENTLERNKIEPLGYCEDAESNRQLESTEFNKSNLEVVDTSTFGPESNILENAICDVPDQNSKQLNAIESTKIESHETANLQDDRNSQSSSVSYLESKSVKSKHTKPVIHSKQNMTTDAPKKIVAAKYEVIHSKTKVNVKSVKRNTDVPESQQNFHRPVKVRKKQIDKEPKIQSCNSGVKSVKNQAHSVLKKTLQDQTLVQIFKPLTHSLSDKSHAHPGCLKEPHHPAQTGHVSHSSQKQCHKPQQQAPAMKTNSHVKEELEHPGVEHFKEEDKLKLKKPEKNLQPRQRRSSKSFSLDEPPLFIPDNIATIRREGSDHSSSFESKYMWTPSKQCGFCKKPHGNRFMVGCGRCDDWFHGDCVGLSLSQAQQMGEEDKEYVCVKCCAEEDKKTEILDPDTLENQATVEFHSGDKTMECEKLGLSKHTTNDRTKYIDDTVKHKVKILKRESGEGRNSSDCRDNEIKKWQLAPLRKMGQPVLPRRSSEEKSEKIPKESTTVTCTGEKASKPGTHEKQEMKKKKVEKGVLNVHPAASASKPSADQIRQSVRHSLKDILMKRLTDSNLKVPEEKAAKVATKIEKELFSFFRDTDAKYKNKYRSLMFNLKDPKNNILFKKVLKGEVTPDHLIRMSPEELASKELAAWRRRENRHTIEMIEKEQREVERRPITKITHKGEIEIESDAPMKEQEAAMEIQEPAANKSLEKPEGSEKQKEEVDSMSKDTTSQHRQHLFDLNCKICIGRMAPPVDDLSPKKVKVVVGVARKHSDNEAESIADALSSTSNILASEFFEEEKQESPKSTFSPAPRPEMPGTVEVESTFLARLNFIWKGFINMPSVAKFVTKAYPVSGSPEYLTEDLPDSIQVGGRISPQTVWDYVEKIKASGTKEICVVRFTPVTEEDQISYTLLFAYFSSRKRYGVAANNMKQVKDMYLIPLGATDKIPHPLVPFDGPGLELHRPNLLLGLIIRQKLKRQHSACASTSHIAETPESAPPIALPPDKKSKIEVSTEEAPEEENDFFNSFTTVLHKQRNKPQQNLQEDLPTAVEPLMEVTKQEPPKPLRFLPGVLIGWENQPTTLELANKPLPVDDILQSLLGTTGQVYDQAQSVMEQNTVKEIPFLNEQTNSKIEKTDNVEVTDGENKEIKVKVDNISESTDKSAEIETSVVGSSSISAGSLTSLSLRGKPPDVSTEAFLTNLSIQSKQEETVESKEKTLKRQLQEDQENNLQDNQTSNSSPCRSNVGKGNIDGNVSCSENLVANTARSPQFINLKRDPRQAAGRSQPVTTSESKDGDSCRNGEKHMLPGLSHNKEHLTEQINVEEKLCSAEKNSCVQQSDNLKVAQNSPSVENIQTSQAEQAKPLQEDILMQNIETVHPFRRGSAVATSHFEVGNTCPSEFPSKSITFTSRSTSPRTSTNFSPMRPQQPNLQHLKSSPPGFPFPGPPNFPPQSMFGFPPHLPPPLLPPPGFGFAQNPMVPWPPVVHLPGQPQRMMGPLSQASRYIGPQNFYQVKDIRRPERRHSDPWGRQDQQQLDRPFNRGKGDRQRFYSDSHHLKRERHEKEWEQESERHRRRDRSQDKDRDRKSREEGHKDKERARLSHGDRGTDGKASRDSRNVDKKPDKPKSEDYEKDKEREKSKHREGEKDRDRYHKDRDHTDRTKSKR

SEQ ID NO: 37463 - protein, 1821 aa, Homo sapiens
MSCERKGLSELRSELYFLIARFLEDGPCQQAAQVLIREVAEKELLPRRTDWTGKEHPRTYQNLVKYYRHLAPDHLLQICHRLGPLLEQEIPQSVPGVQTLLGAGRQSLLRTNKSCKHVVWKGSALAALHCGRPPESPVNYGSPPSIADTLFSRKLNGKYRLERLVPTAVYQHMKMHKRILGHLSSVYCVTFDRTGRRIFTGSDDCLVKIWATDDGRLLATLRGHAAEISDMAVNYENTMIAAGSCDKMIRVWCLRTCAPLAVLQGHSASITSLQFSPLCSGSKRYLSSTGADGTICFWLWDAGTLKINPRPAKFTERPRPGVQMICSSFSAGGMFLATGSTDHIIRVYFFGSGQPEKISELEFHTDKVDSIQFSNTSNRFVSGSRDGTARIWQFKRREWKSILLDMATRPAGQNLQGIEDKITKMKVTMVAWDRHDNTVITAVNNMTLKVWNSYTGQLIHVLMGHEDEVFVLEPHPFDPRVLFSAGHDGNVIVWDLARGVKIRSYFNMIEGQGHGAVFDCKCSPDGQHFACTDSHGHLLIFGFGSSSKYDKIADQMFFHSDYRPLIRDANNFVLDEQTQQAPHLMPPPFLVDVDGNPHPSRYQRLVPGRENCREEQLIPQMGVTSSGLNQVLSQQANQEISPLDSMIQRLQQEQDLRRSGEAVISNTSRLSRGSISSTSEVHSPPNVGLRRSGQIEGVRQMHSNAPRSEIATERDLVAWSRRVVVPELSAGVASRQEEWRTAKGEEEIKTYRSEEKRKHLTVPKENKIPTVSKNHAHEHFLDLGESKKQQTNQHNYRTRSALEETPRPSEEIENGSSSSDEGEVVAVSGGTSEEEERAWHSDGSSSDYSSDYSDWTADAGINLQPPKKVPKNKTKKAESSSDEEEESEKQKQKQIKKEKKKVNEEKDGPISPKKKKPKERKQKRLAVGELTENGLTLEEWLPSTWITDTIPRRCPFVPQMGDEVYYFRQGHEAYVEMARKNKIYSINPKKQPWHKMELREQELMKIVGIKYEVGLPTLCCLKLAFLDPDTGKLTGGSFTMKYHDMPDVIDFLVLRQQFDDAKYRRWNIGDRFRSVIDDAWWFGTIESQEPLQLEYPDSLFQCYNVCWDNGDTEKMSPWDMELIPNNAVFPEELGTSVPLTDGECRSLIYKPLDGEWGTNPRDEECERIVAGINQLMTLDIASAFVAPVDLQAYPMYCTVVAYPTDLSTIKQRLENRFYRRVSSLMWEVRYIEHNTRTFNEPGSPIVKSAKFVTDLLLHFIKDQTCYNIIPLYNSMKKKVLSDSEDEEKDADVPGTSTRKRKDHQPRRRLRNRAQSYDIQAWKKQCEELLNLIFQCEDSEPFRQPVDLLEYPDYRDIIDTPMDFATVRETLEAGNYESPMELCKDVRLIFSNSKAYTPSKRSRIYSMSLRLSAFFEEHISSVLSDYKSALRFHKRNTITKRRKKRNRSSSVSSSAASSPERKKRILKPQLKSESSTSAFSTPTRSIPPRHNAAQINGKTESSSVVRTRSNRVVVDPVVTEQPSTSSAAKTFITKANASAIPGKTILENSVKHSKALNTLSSPGQSSFSHGTRNNSAKENMEKEKPVKRKMKSSVLPKASTLSKSSAVIEQGDCKNNALVPGTIQVNGHGGQPSKLVKRGPGRKPKVEVNTNSGEIIHKKRGRKPKKLQYAKPEDLEQNNVHPIRDEVLPSSTCNFLSETNNVKEDLLQKKNRGGRKPKRKMKTQKLDADLLVPASVKVLRRSNRKKIDDPIDEEEEFEELKGSEPHMRTRNQGRRTAFYNEDDSEEEQRQLLFEDTSLTFGTSSRGRVRKLTEKAKANLIGW

SEQ ID NO: 37464 - protein, 213 aa, Homo sapiens
MEAIWLYQFRLIVIGDSTVGKSCLIRRFTEGRFAQVSDPTVGVDFFSRLVEIEPGKRIKLQIWDTAGQERFRSITRAYYRNSVGGLLLFDITNRRSFQNVHEWLEETKVHVQPYQIVFVLVGHKCDLDTQRQVTRHEAEKLAAAYGMKYIETSARDAINVEKAFTDLTRDIYELVKRGEITIQEGWEGVKSGFVPNVVHSSEEVVKSERRCLC

SEQ ID NO: 37465 - protein, 341 aa, Homo sapiens
MNIVVEFFVVTFKVLWAFVLAAARWLVRPKEKSVAGQVCLITGAGSGLGRLFALEFARRRALLVLWDINTQSNEETAGMVRHIYRDLEAADAAALQAGNGEEEILPHCNLQVFTYTCDVGKRENVYLTAERVRKEVGEVSVLVNNAGVVSGHHLLECPDELIERTMMVNCHAHFWTTKAFLPTMLEINHGHIVTVASSLGLFSTAGVEDYCASKFGVVGFHESLSHELKAAEKDGIKTTLVCPYLVDTGMFRGCRIRKEIEPFLPPLKPDYCVKQAMKAILTDQPMICTPRLMYIVTFMKSILPFEAVVCMYRFLGADKCMYPFIAQRKQATNNNEAKNGI

SEQ ID NO: 37466 - protein, 253 aa, Homo sapiens
MIENSSWSMTFEERENRRLQEASMRLEQENDDLAHELVTSKIALRNDLDQAEDKADVLNKELLLTKQRLVETEEEKRKQEEETAQLKEVFRKQLEKAEYEIKKTTAIIAEYKQICSQLSTRLEKQQAASKEELEVVKGKMMACKHCSDIFSKEGALKLAATGREDQGIETDDEKDSLKKQLREMELELAQTKLQLVEAKCKIQELEHQRGALMNEIQAAKNSWFSKTLNSIKTATGTQPLQPAPVTQPPKEST

SEQ ID NO: 37467 - protein, 331 aa, Homo sapiens
MSRYLLPLSALGTVAGAAVLLKDYVTGGACPSKATIPGKTVIVTGANTGIGKQTALELARRGGNIILACRDMEKCEAAAKDIRGETLNHHVNARHLDLASLKSIREFAAKIIEEEERVDILINNAGVMRCPHWTTEDGFEMQFGVNHLGHFLLTNLLLDKLKASAPSRIINLSSLAHVAGHIDFDDLNWQTRKYNTKAAYCQSKLAIVLFTKELSRRLQGSGVTVNALHPGVARTELGRHTGIHGSTFSSTTLGPIFWLLVKSPELAAQPSTYLAVAEELADVSGKYFDGLKQKAPAPEAEDEEVARRLWAESARLVGLEAPSVREQPLPR

SEQ ID NO: 37468 - protein, 260 aa, Homo sapiens
MEKCEAAAKDIRGETLNHHVNARHLDLASLKSIREFAAKIIEEEERVDILINNAGVMRCPHWTTEDGFEMQFGVNHLGHFLLTNLLLDKLKASAPSRIINLSSLAHVAGHIDFDDLNWQTRKYNTKAAYCQSKLAIVLFTKELSRRLQGSGVTVNALHPGVARTELGRHTGIHGSTFSSTTLGPIFWLLVKSPELAAQPSTYLAVAEELADVSGKYFDGLKQKAPAPEAEDEEVARRLWAESARLVGLEAPSVREQPLPR

SEQ ID NO: 37469 - protein, 596 aa, Homo sapiens
MSNYSVSLVGPAPWGFRLQGGKDFNMPLTISSLKDGGKAAQANVRIGDVVLSIDGINAQGMTHLEAQNKIKGCTGSLNMTLQRASAAPKPEPVPVQKGEPKEVVKPVPITSPAVSKVTSTNNMAYNKAPRPFGSVSSPKVTSIPSPSSAFTPAHATTSSHASPSPVAAVTPPLFAASGLHANANLSADQSPSALSAGKTAVNVPRQPTVTSVCSETSQELAEGQRRGSQGDSKQQNGPPRKHIVERYTEFYHVPTHSDASKKRLIEDTEDWRPRTGTTQSRSFRILAQITGTEHLKESEADNTKKANNSQEPSPQLASSVASTRSMPESLDSPTSGRPGVTSLTAAAAFKPVGSTGVIKSPSWQRPNQGVPSTGRISNSATYSGSVAPANSALGQTQPSDQDTLVQRAEHIPAGKRTPMCAHCNQVIRGPFLVALGKSWHPEEFNCAHCKNTMAYIGFVEEKGALYCELCYEKFFAPECGRCQRKILGEVISALKQTWHVSCFVCVACGKPIRNNVFHLEDGEPYCETDYYALFGTICHGCEFPIEAGDMFLEALGYTWHDTCFVCSVCCESLEGQTFFSKKDKPLCKKHAHSVNF

SEQ ID NO: 37470 - protein, 234 aa, Homo sapiens
MSNYSVSLVGPAPWGFRLQGGKDFNMPLTISSLKDGGKAAQANVRIGDVVLSIDGINAQGMTHLEAQNKIKGCTGSLNMTLQRASAAPKPEPVPVQKPTVTSVCSETSQELAEGQRRGSQGDSKQQNGKIPPKRPPRKHIVERYTEFYHVPTHSDASKKRLIEDTEDWRPRTGTTQSRSFRILAQITGTEHLKESEADNTKKAKEKIPLHVFSPKYTKLRDWHHEVSARALNVQ

SEQ ID NO: 37471 - protein, 214 aa, Homo sapiens
MSNYSVSLVGPAPWGFRLQGGKDFNMPLTISSLKDGGKAAQANVRIGDVVLSIDGINAQGMTHLEAQNKIKGCTGSLNMTLQRASAAPKPEPVPVQKKTQVTNNPGTVKIPPKRPPRKHIVERYTEFYHVPTHSDASKKRLIEDTEDWRPRTGTTQSRSFRILAQITGTEHLKESEADNTKKAKEKIPLHVFSPKYTKLRDWHHEVSARALNVQ

SEQ ID NO: 37472 - protein, 487 aa, Homo sapiens
MSNYSVSLVGPAPWGFRLQGGKDFNMPLTISSLKDGGKAAQANVRIGDVVLSIDGINAQGMTHLEAQNKIKGCTGSLNMTLQRASAAPKPEPVPVQKPTVTSVCSETSQELAEGQRRGSQGDSKQQNGPPRKHIVERYTEFYHVPTHSDASKKRLIEDTEDWRPRTGTTQSRSFRILAQITGTEHLKESEADNTKKANNSQEPSPQLASSVASTRSMPESLDSPTSGRPGVTSLTAAAAFKPVGSTGVIKSPSWQRPNQGVPSTGRISNSATYSGSVAPANSALGQTQPSDQDTLVQRAEHIPAGKRTPMCAHCNQVIRGPFLVALGKSWHPEEFNCAHCKNTMAYIGFVEEKGALYCELCYEKFFAPECGRCQRKILGEVISALKQTWHVSCFVCVACGKPIRNNVFHLEDGEPYCETDYYALFGTICHGCEFPIEAGDMFLEALGYTWHDTCFVCSVCCESLEGQTFFSKKDKPLCKKHAHSVNF

SEQ ID NO: 37473 - protein, 136 aa, Homo sapiens
MSNYSVSLVGPAPWGFRLQGGKDFNMPLTISSAGVQWRNLGSPQPPSPEFKRFSCLSLPSSWDYRHVPPRLANFVFLVETKFPYVGQAGLELPTSGDLPTSASQSAKITGVSHRAWPTLFYTLLFFATIYPEIILY

SEQ ID NO: 37474 - protein, 625 aa, Homo sapiens
MSNYSVSLVGPAPWGFRLQGGKDFNMPLTISSLKDGGKAAQANVRIGDVVLSIDGINAQGMTHLEAQNKIKGCTGSLNMTLQRASAAPKPEPVPVQKPTVTSVCSETSQELAEGQRRGSQGDSKQQNGKIPPKRPPRKHIVERYTEFYHVPTHSDASKKRLIEDTEDWRPRTGTTQSRSFRILAQITGTEHLKESEADNTKKAKFDSALEDLPKSGPHPPATPQVLTIGSQVATLSKVATTYSSLSSSTGNVEDSFEGFRNFSTFSSPARYSAAVLSSAAATVSAVIATKTRLYTPERYHSLLDALCISPVSKPLAFSYLQSSRKSTGSIHVKKTSNSQEPSPQLASSVASTRSMPESLDSPTSGRPGVTSLTAAAAFKPVGSTGVIKSPSWQRPNQGVPSTGRISNSATYSGSVAPANSALGQTQPSDQDTLVQRAEHIPAGKRTPMCAHCNQVIRGPFLVALGKSWHPEEFNCAHCKNTMAYIGFVEEKGALYCELCYEKFFAPECGRCQRKILGEVISALKQTWHVSCFVCVACGKPIRNNVFHLEDGEPYCETDYYALFGTICHGCEFPIEAGDMFLEALGYTWHDTCFVCSVCCESLEGQTFFSKKDKPLCKKHAHSVNF

SEQ ID NO: 37475 - protein, 483 aa, Homo sapiens
MSNYSVSLVGPAPWGFRLQGGKDFNMPLTISSLKDGGKAAQANVRIGDVVLSIDGINAQGMTHLEAQNKIKGCTGSLNMTLQRASAAPKPEPVPVQKPTVTSVCSETSQELAEGQRRGSQGDSKQQNGKIPPKRPPRKHIVERYTEFYHVPTHSDASKKRLIEDTEDWRPRTGTTQSRSFRILAQITGTEHLKESEADNTKKANNSQEPSPQLASSVASTRSMPESLDSPTSGRPGVTSLTAAAAFKPVGSTGVIKSPSWQRPNQGVPSTGRISNSATYSGSVAPANSALGQTQPSDQDTLVQRAEHIPAGKRTPMCAHCNQVIRGPFLVALGKSWHPEEFNCAHCKNTMAYIGFVEEKGALYCELCYEKFFAPECGRCQRKILGEVISALKQTWHVSCFVCVACGKPIRNNVFHLEDGEPYCETDYYALFGTICHGCEFPIEAGDMFLEALGYTWHDTCFVCSVCCESLEGQTFFSKKDKPL

SEQ ID NO: 37476 - protein, 490 aa, Homo sapiens
MKPKLMYQELKVPAEEPANELPMNEIEAWKAAEKKARWVLLVLILAVVGFGALMTQLFLWEYGDLHLFGPNQRPAPCYDPCEAVLVESIPEGLDFPNASTGNPSTSQAWLGLLAGAHSSLDIASFYWTLTNNDTHTQEPSAQQGEEVLRQLQTLAPKGVNVRIAVSKPSGPQPQADLQALLQSGAQVRMVDMQKLTHGVLHTKFWVVDQTHFYLGSANMDWRSLTQVKELGVVMYNCSCLARDLTKIFEAYWFLGQAGSSIPSTWPRFYDTRYNQETPMEICLNGTPALAYLASAPPPLCPSGRTPDLKALLNVVDNARSFIYVAVMNYLPTLEFSHPHRFWPAIDDGLRRATYERGVKVRLLISCWGHSEPSMRAFLLSLAALRDNHTHSDIQVKLFVVPADEAQARIPYARVNHNKYMVTERATYIGTSNWSGNYFTETAGTSLLVTQNGRGGLRSQLEAIFLRDWDSPYSHDLDTSADSVGNACRLL

SEQ ID NO: 37477 - protein, 270 aa, Homo sapiens
MEKLSAASGYSDVTDSKAMGPLAVGCLTKCSHAFHLLCLLAMYCNGNKGPEHPNPGKPFTARGFPASATFQTTPGPQASRGFQNPETLADIPASPQLLTDGHYMTLPVSPDQLPCDDPMAGSGGAPVLRVGHDHGCHQQPRICNAPLPGPGPYRTEPAKAIKPIDRKSVHQICSGPVVLSLSTAVKELVENSLDAGATNIDLKLKDYGMDLIEVSGNGCGVEEENFEGLMMSPFLPATSRRRLGLDWCLITMGKSSRRPPTPTPEGPQSA

SEQ ID NO: 37478 - protein, 536 aa, Homo sapiens
MEIRQHEWLSASPHEGFEQMRLKSRPKEPSPSLTRVGANFYSSVKQQDYSASVWLRRKDKLEHSQQKCIVIFALVCCFAILVALIFSAVDIMGEDEDGLSEKNCQNKCRIALVENIPEGLNYSENAPFHLSLFQGWMNLLNMAKKSVDIVSSHWDLNHTHPSACQGQRLFEKLLQLTSQNIEIKLVSDVTADSKVLEALKLKGAEVTYMNMTAYNKGRLQSSFWIVDKQHVYIGSAGLDWQSLGQMKELGVIFYNCSCLVLDLQRIFALYSSLKFKSRVPQTWSKRLYGVYDNEKKLQLQLNETKSQAFVSNSPKLFCPKNRSFDIDAIYSVIDDAKQYVYIAVMDYLPISSTSTKRTYWPDLDAKIREALVLRSVRVRLLLSFWKETDPLTFNFISSLKAICTEIANCSLKVKFFDLERENACATKEQKNHTFPRLNRNKYMVTDGAAYIGNFDWVGNDFTQNAGTGLVINQADVRNNRSIIKQLKDVFERDWYSPYAKTLQPTKQPNCSSLFKLKPLSNKTATDDTGGKDPRNV

SEQ ID NO: 37479 - protein, 444 aa, Homo sapiens
MRMDSQKKIAKINVGKRIALVENIPEGLNYSENAPFHLSLFQGWMNLLNMAKKSVDIVSSHWDLNHTHPSACQGQRLFEKLLQLTSQNIEIKLVSDVTADSKVLEALKLKGAEVTYMNMTAYNKGRLQSSFWIVDKQHVYIGSAGLDWQSLGQMKELGVIFYNCSCLVLDLQRIFALYSSLKFKSRVPQTWSKRLYGVYDNEKKLQLQLNETKSQAFVSNSPKLFCPKNRSFDIDAIYSVIDDAKQYVYIAVMDYLPISSTSTKRTYWPDLDAKIREALVLRSVRVRLLLSFWKETDPLTFNFISSLKAICTEIANCSLKVKFFDLERENACATKEQKNHTFPRLNRNKYMVTDGAAYIGNFDWVGNDFTQNAGTGLVINQADVRNNRSIIKQLKDVFERDWYSPYAKTLQPTKQPNCSSLFKLKPLSNKTATDDTGGKDPRNV

SEQ ID NO: 37480 - protein, 328 aa, Homo sapiens
MNMTAYNKGRLQSSFWIVDKQHVYIGSAGLDWQSLGQMKELGVIFYNCSCLVLDLQRIFALYSSLKFKSRVPQTWSKRLYGVYDNEKKLQLQLNETKSQAFVSNSPKLFCPKNRSFDIDAIYSVIDDAKQYVYIAVMDYLPISSTSTKRTYWPDLDAKIREALVLRSVRVRLLLSFWKETDPLTFNFISSLKAICTEIANCSLKVKFFDLERENACATKEQKNHTFPRLNRNKYMVTDGAAYIGNFDWVGNDFTQNAGTGLVINQADVRNNRSIIKQLKDVFERDWYSPYAKTLQPTKQPNCSSLFKLKPLSNKTATDDTGGKDPRNV

SEQ ID NO: 37481 - protein, 474 aa, Homo sapiens
MSQQKCIVIFALVCCFAILVALIFSAVDIMGEDEDGLSEKNCQNKCRIALVENIPEGLNYSENAPFHLSLFQGWMNLLNMAKKSVDIVSSHWDLNHTHPSACQGQRLFEKLLQLTSQNIEIKLVSDVTADSKVLEALKLKGAEVTYMNMTAYNKGRLQSSFWIVDKQHVYIGSAGLDWQSLGQMKELGVIFYNCSCLVLDLQRIFALYSSLKFKSRVPQTWSKRLYGVYDNEKKLQLQLNETKSQAFVSNSPKLFCPKNRSFDIDAIYSVIDDAKQYVYIAVMDYLPISSTSTKRTYWPDLDAKIREALVLRSVRVRLLLSFWKETDPLTFNFISSLKAICTEIANCSLKVKFFDLERENACATKEQKNHTFPRLNRNKYMVTDGAAYIGNFDWVGNDFTQNAGTGLVINQADVRNNRSIIKQLKDVFERDWYSPYAKTLQPTKQPNCSSLFKLKPLSNKTATDDTGGKDPRNV

SEQ ID NO: 37482 - protein, 440 aa, Homo sapiens
MVTMCGGHRPENFLHQVLTEFGEELAGEGKSEVGGGAPRSYLQVASAECWAAAPAVHVGEPVHAGGLHTERGADPVIGLYLVHRGGACQTPTVGNRQTPTLGIHARPRRRATTSLLTLLLAFGKNAVRCALIGPGSLTSRTRPLTEPLGEKERREVFFPPRPERVEHNVESSRWEPRRRGACGSRGGNFPSPRGGSGVASLERAESSSTEPAKAIKPIDRKSVHQICSGPVVPSLSTAVKELVENSLDAGATNIDLKLKDYGVDLIEVSGNGCGVEEENFEGLTLKHHTSKIQEFADLPQVETFGFRGEALSSLCALSDVTISTCHVSAKVGTRLVFDHYGKIIQKTPYPHPRGMTVSVKQLFSTLPVHHKEFQRNIKKKRACFPFAFCRDCQFPEASPAMLPVQPAELTPRSTPPHPCSLEDNVITVFSSVKNGPGSSR

SEQ ID NO: 37483 - protein, 412 aa, Homo sapiens
MVTMCGGHRPENFLHQVLTEFGEELAGEGKSEVGGGAPRSYLQVASAECWAAAPAVHVGEPVHAGGLHTERGADPVIGLYLVHRGGACQTPTVGNRQTPTLGIHARPRRRATTSLLTLLLAFGKNAVRCALIGPGSLTSRTRPLTEPLGEKERREVFFPPRPERVEHNVESSRWEPRRRGACGSRGGNFPSPRGGSGVASLERAESSSTEPAKAIKPIDRKSVHQICSGPVVPSLSTAVKELVENSLDAGATNIDLKLKDYGVDLIEVSGNGCGVEEENFEGLTLKHHTSKIQEFADLPQVETFGFRGEALSSLCALSDVTISTCHVSAKVGTRLVFDHYGKIIQKTPYPHPRGMTVSVKQLFSTLPVHHKEFQRNIKKPPIYSLKHVRGGPELLCKWTHCPEATMLQGSPS

SEQ ID NO: 37484 - protein, 381 aa, Homo sapiens
MVTMCGGHRPENFLHQVLTEFGEELAGEGKSEVGGGAPRSYLQVASAECWAAAPAVHVGEPVHAGGLHTERGADPVIGLYLVHRGGACQTPTVGNRQTPTLGIHARPRRRATTSLLTLLLAFGKNAVRCALIGPGSLTSRTRPLTEPLGEKERREVFFPPRPERVEHNVESSRWEPRRRGACGSRGGNFPSPRGGSGVASLERAESSSTEPAKAIKPIDRKSVHQICSGPVVPSLSTAVKELVENSLDAGATNIDLKLKDYGVDLIEVSGNGCGVEEENFEGLTLKHHTSKIQEFADLPQVETFGFRGEALSSLCALSDVTISTCHVSAKVGTRLVFDHYGKIIQKTPYPHPRGMTVSVKQLFSTLPVHHKEFQRNIKKDS

SEQ ID NO: 37485 - protein, 307 aa, Homo sapiens
MASVLSYESLVHAVAGAVGSVTAMTVFFPLDTARLRLQVDEKRKSKTTHMVLLEIIKEEGLLAPYRGWFPVISSLCCSNFVYFYTFNSLKALWVKGQHSTTGKDLVVGFVAGVVNVLLTTPLWVVNTRLKLQGAKFRNEDIVPTNYKGIIDAFHQIIRDEGISALWNGTFPSLLLVFNPAIQFMFYEGLKRQLLKKRMKLSSLDVFIIGAVAKAIATTVTYPLQTVQSILRFGRHRLNPENRTLGSLRNILYLLHQRVRRFGIMGLYKGLEAKLLQTVLTAALMFLVYEKLTAATFTVMGLKRAHQH

SEQ ID NO: 37486 - protein, 500 aa, Homo sapiens
MRGELWLLVLVLREAARALSPQPGAGHDEGPGSGWAAKGTVRGWNRRARESPGHVSEPDRTQLSQDLGGGTLAMDTLPDNRTRVVEDNHSYYVSRLYGPSEPHSRELWVDVAEANRSQVKIHTILSNTHRQASRVVLSFDFPFYGHPLRQITIATGGFIFMGDVIHRMLTATQYVAPLMANFNPGYSDNSTVVYFDNGTVFVVQWDHVYLQGWEDKGSFTFQAALHHDGRIVFAYKEIPMSVPEISSSQHPVKTGLSDAFMILNPSPDVPESRRRSIFEYHRIELDPSKVTSMSAVEFTPLPTCLQHRSCDACMSSDLTFNCSWCHVLQRCSSGFDRYRQEWMDYGCAQEAEGRMCEDFQDEDHDSASPDTSFSPYDGDLTTTSSSLFIDSLTTEDDTKLNPYAGGDGLQNNLSPKTKGTPVHLGTIVGIVLAVLLVAAIILAGIYINGHPTSNAALFFIERRPHHWPAMKFRSHPDHSTYAEVEPSGHEKEGFMEAEQC

SEQ ID NO: 37487 - protein, 358 aa, Homo sapiens
MRGELWLLVLVLREAARALSPQPGAGHDEGPGSGWAAKGTVRGWNRRARESPGHVSEPDRTQLSQDLGGGTLAMDTLPDNRTRVVEDNHSYYVSRLYGPSEPHSRELWVDVAEANRSQVKIHTILSNTHRQASRVVLSFDFPFYGHPLRQITIATGGFIFMGDVIHRMLTATQYVAPLMANFNPGYSDNSTVVYFDNGTVFVVQWDHVYLQGWEDKGSFTFQAALHHDGRIVFAYKEIPMSVPEISSSQHPVKTGLSDAFMILNPSPDVPESRRRSIFEYHRIELDPSKVTSMSAVEFTPLPTCLQHRSCDACMSSDLTFNCSWCHVLQRSLNNQDENTYVNCLDSQQCHGSSESRRP

SEQ ID NO: 37488 - protein, 337 aa, Homo sapiens
MRGELWLLVLVLREAARALSPQPGAGHDEGPGSGWAAKGTVRGWNRRARESPGHVSEPDRTQLSQDLGGGTLAMDTLPDNRTRVVEDNHSYYVSRLYGPSEPHSRELWVDVAEANRSQVKIHTILSNTHRQASRVVLSFDFPFYGHPLRQITIATGGFIFMGDVIHRMLTATQYVAPLMANFNPGYSDNSTVVYFDNGTVFVVQWDHVYLQGWEDKGSFTFQAALHHDGRIVFAYKEIPMSVPEISSSQHPVKTGLSDAFMILNPSPDVPESRRRSIFEYHRIELDPSKVTSMSAVEFTPLPTCLQHRSCDACMSSDLTFNCSWCHVLQSRDEVSPC

SEQ ID NO: 37489 - protein, 427 aa, Homo sapiens
MDTLPDNRTRVVEDNHSYYVSRLYGPSEPHSRELWVDVAEANRSQVKIHTILSNTHRQASRVVLSFDFPFYGHPLRQITIATGGFIFMGDVIHRMLTATQYVAPLMANFNPGYSDNSTVVYFDNGTVFVVQWDHVYLQGWEDKGSFTFQAALHHDGRIVFAYKEIPMSVPEISSSQHPVKTGLSDAFMILNPSPDVPESRRRSIFEYHRIELDPSKVTSMSAVEFTPLPTCLQHRSCDACMSSDLTFNCSWCHVLQRSLNNQDENTYVNCLDSQQCHGSSESRRPFQDEDHDSASPDTSFSPYDGDLTTTSSSLFIDSLTTEDDTKLNPYAGGDGLQNNLSPKTKGTPVHLGTIVGIVLAVLLVAAIILAGIYINGHPTSNAALFFIERRPHHWPAMKFRSHPDHSTYAEVEPSGHEKEGFMEAEQC

SEQ ID NO: 37490 - protein, 4684 aa, Homo sapiens
MVAGMLMPRDQLRAIYEVLFREGVMVAKKDRRPRSLHPHVPGVTNLQVMRAMASLRARGLVRETFAWCHFYWYLTNEGIAHLRQYLHLPPEIVPASLQRVRRPVAMVMPARRTPHVQAVQGPLGSPPKRGPLPTEEQRVYRRKELEEVSPETPVVPATTQRTLARPGPEPAPATDERDRVQKKTFTKWVNKHLIKAQRHISDLYEDLRDGHNLISLLEVLSGDSLPREKGRMRFHKLQNVQIALDYLRHRQVKLVNIRNDDIADGNPKLTLGLIWTIILHFQISDIQVSGQSEDMTAKEKLLLWSQRMVEGYQGLRCDNFTSSWRDGRLFNAIIHRHKPLLIDMNKVYRQTNLENLDQAFSVAERDLGVTRLLDPEDVDVPQPDEKSIITYVSSLYDAMPRVPDVQDGVRANELQLRWQEYRELVLLLLQWMRHHTAAFEERRFPSSFEEIEILWSQFLKFKEMELPAKEADKNRSKGIYQSLEGAVQAGQLKVPPGYHPLDVEKEWGKLHVAILEREKQLRSEFERLECLQRIVTKLQMEAGLCEEQLNQADALLQSDVRLLAAGKVPQRAGEVERDLDKADSMIRLLFNDVQTLKDGRHPQGEQMYRRVYRLHERLVAIRTEYNLRLKAGVAAPATQVAQVTLQSVQRRPELEDSTLRYLQDLLAWVEENQHRVDGAEWGVDLPSVEAQLGSHRGLHQSIEEFRAKIERARSDEGQLSPATRGAYRDCLGRLDLQYAKLLNSSKARLRSLESLHSFVAAATKELMWLNEKEEEEVGFDWSDRNTNMTAKKESYSALMRELELKEKKIKELQNAGDRLLREDHPARPTVESFQAALQTQWSWMLQLCCCIEAHLKENAAYFQFFSDVREAEGQLQKLQEALRRKYSCDRSATVTRLEDLLQDAQDEKEQLNEYKGHLSGLAKRAKAVVQLKPRHPAHPMRGRLPLLAVCDYKQVEVTVHKGDECQLVGPAQPSHWKVLSSSGSEAAVPSVCFLVPPPNQEAQEAVTRLEAQHQALVTLWHQLHVDMKSLLAWQSLRRDVQLIRSWSLATFRTLKPEEQRQALHSLELHYQAFLRDSQDAGGFGPEDRLMAEREYGSCSHHYQQLLQSLEQGAQEESRCQRCISELKDIRLQLEACETRTVHRLRLPLDKEPARECAQRIAEQQKAQAEVEGLGKGVARLSAEAEKVLALPEPSPAAPTLRSELELTLGKLEQVRSLSAIYLEKLKTISLVIRGTQGAEEVLRAHEEQLKEAQAVPATLPELEATKASLKKLRAQAEAQQPTFDALRDELRGAQEVGERLQQRHGERDVEVERWRERVAQLLERWQAVLAQTDVRQRELEQLGRQLRYYRESADPLGAWLQDARRRQEQIQAMPLADSQAVREQLRQEQALLEEIERHGEKVEECQRFAKQYINAIKDYELQLVTYKAQLEPVASPAKKPKVQSGSESVIQEYVDLRTHYSELTTLTSQYIKFISETLRRMEEEERLAEQQRAEERERLAEVEAALEKQRQLAEAHAQAKAQAEREAKELQQRMQEEVVRREEAAVDAQQQKRSIQEELQQLRQSSEAEIQAKARQAEAAERSRLRIEEEIRVVRLQLEATERQRGGAEGELQALRARAEEAEAQKRQAQEEAERLRRQVQDESQRKRQAEVELASRVKAEAEAAREKQRALQALEELRLQAEEAERRLRQAEVERARQVQVALETAQRSAEAELQSKRASFAEKTAQLERSLQEEHVAVAQLREEAERRAQQQAEAERAREEAERELERWQLKANEALRLRLQAEEVAQQKSLAQAEAEKQKEEAEREARRRGKAEEQAVRQRELAEQELEKQRQLAEGTAQQRLAAEQELIRLRAETEQGEQQRQLLEEELARLQREAAAATQKRQELEAELAKVRAEMEVLLASKARAEEESRSTSEKSKQRLEAEAGRFRELAEEAARLRALAEEAKRQRQLAEEDAARQRAEAERVLAEKLAAIGEATRLKTEAEIALKEKEAENERLRRLAEDEAFQRRRLEEQAAQHKADIEERLAQLRKASDSELERQKGLVEDTLRQRRQVEEEILALKASFEKAAAGKAELELELGRIRSNAEDTLRSKEQAELEAARQRQLAAEEERRRREAEERVQKSLAAEEEAARQRKAALEEVERLKAKVEEARRLRERAEQESARQLQLAQEAAQKRLQAEEKAHAFAVQQKEQELQQTLQQEQSVLDQLRGEAEAARRAAEEAEEARVQAEREAAQSRRQVEEAERLKQSAEEQAQARAQAQAAAEKLRKEAEQEAARRAQAEQAALRQKQAADAEMEKHKKFAEQTLRQKAQVEQELTTLRLQLEETDHQKNLLDEELQRLKAEATEAARQRSQVEEELFSVRVQMEELSKLKARIEAENRALILRDKDNTQRFLQEEAEKMKQVAEEAARLSVAAQEAARLRQLAEEDLAQQRALAEKMLKEKMQAVQEATRLKAEAELLQQQKELAQEQARRLQEDKEQMAQQLAEETQGFQRTLEAERQRQLEMSAEAERLKLRVAEMSRAQARAEEDAQRFRKQAEEIGEKLHRTELATQEKVTLVQTLEIQRQQSDHDAERLREAIAELEREKEKLQQEAKLLQLKSEEMQTVQQEQLLQETQALQQSFLSEKDSLLQRERFIEQEKAKLEQLFQDEVAKAQQLREEQQRQQQQMEQERQRLVASMEEARRRQHEAEEGVRRKQEELQQLEQQRRQQEELLAEENQRLREQLQLLEEQHRAALAHSEEVTASQVAATKTLPNGRDALDGPAAEAEPEHSFDGLRRKVSAQRLQEAGILSAEELQRLAQGHTTVDELARREDVRHYLQGRSSIAGLLLKATNEKLSVYAALQRQLLSPGTALILLEAQAASGFLLDPVRNRRLTVNEAVKEGVVGPELHHKLLSAERAVTGYKDPYTGQQISLFQAMQKGLIVREHGIRLLEAQIATGGVIDPVHSHRVPVDVAYRRGYFDEEMNRVLADPSDDTKGFFDPNTHENLTYLQLLERCVEDPETGLCLLPLTDKAAKGGELVYTDSEARDVFEKATVSAPFGKFQGKTVTIWEIINSEYFTAEQRRDLLRQFRTGRITVEKIIKIIITVVEEQEQKGRLCFEGLRSLVPAAELLESRVIDRELYQQLQRGERSVRDVAEVDTVRRALRGANVIAGVWLEEAGQKLSIYNALKKDLLPSDMAVALLEAQAGTGHIIDPATSARLTVDEAVRAGLVGPEFHEKLLSAEKAVTGYRDPYTGQSVSLFQALKKGLIPREQGLRLLDAQLSTGGIVDPSKSHRVPLDVACARGCLDEETSRALSAPRADAKAYSDPSTGEPATYGELQQRCRPDQLTGLSLLPLSEKAARARQEELYSELQARETFEKTPVEVPVGGFKGRTVTVWELISSEYFTAEQRQELLRQFRTGKVTVEKVIKILITIVEEVETLRQERLSFSGLRAPVPASELLASGVLSRAQFEQLKDGKTTVKDLSELGSVRTLLQGSGCLAGIYLEDTKEKVSIYEAMRRGLLRATTAALLLEAQAATGFLVDPVRNQRLYVHEAVKAGVVGPELHEQLLSAEKAVTGYRDPYSGSTISLFQAMQKGLVLRQHGIRLLEAQIATGGIIDPVHSHRVPVDVAYQRGYFSEEMNRVLADPSDDTKGFFDPNTHENLTYRQLLERCVEDPETGLRLLPLKGAEKAEVVETTQVYTEEETRRAFEETQIDIPGGGSHGGSTMSLWEVMQSDLIPEEQRAQLMADFQAGRVTKERMIIIIIEIIEKTEIIRQQGLASYDYVRRRLTAEDLFEARIISLETYNLLREGTRSLREALEAESAWCYLYGTGSVAGVYLPGSRQTLSIYQALKKGLLSAEVARLLLEAQAATGFLLDPVKGERLTVDEAVRKGLVGPELHDRLLSAERAVTGYRDPYTEQTISLFQAMKKELIPTEEALRLLDAQLATGGIVDPRLGFHLPLEVAYQRGYLNKDTHDQLSEPSEVRSYVDPSTDERLSYTQLLRRCRRDDGTGQLLLPLSDARKLTFRGLRKQITMEELVRSQVMDEATALQLREGLTSIEEVTKNLQKFLEGTSCIAGVFVDATKERLSVYQAMKKGIIRPGTAFELLEAQAATGYVIDPIKGLKLTVEEAVRMGIVGPEFKDKLLSAERAVTGYKDPYSGKLISLFQAMKKGLILKDHGIRLLEAQIATGGIIDPEESHRLPVEVAYKRGLFDEEMNEILTDPSDDTKGFFDPNTEENLTYLQLMERCITDPQTGLCLLPLKEKKRERKTSSKSSVRKRRVVIVDPETGKEMSVYEAYRKGLIDHQTYLELSEQECEWEEITISSSDGVVKSMIIDRRSGRQYDIDDAIAKNLIDRSALDQYRAGTLSITEFADMLSGNAGGFRSRSSSVGSSSSYPISPAVSRTQLASWSDPTEETGPVAGILDTETLEKVSITEAMHRNLVDNITGQRLLEAQACTGGIIDPSTGERFPVTDAVNKGLVDKIMVDRINLAQKAFCGFEDPRTKTKMSAAQALKKGWLYYEAGQRFLEVQYLTGGLIEPDTPGRVPLDEALQRGTVDARTAQKLRDVGAYSKYLTCPKTKLKISYKDALDRSMVEEGTGLRLLEAAAQSTKGYYSPYSVSGSGSTAGSRTGSRTGSRAGSRRGSFDATGSGFSMTFSSSSYSSSGYGRRYASGSSASLGGPESAVA

SEQ ID NO: 37491 - protein, 4574 aa, Homo sapiens
MSGEDAEVRAVSEDVSNGSSGSPSPGDTLPWNLGKTQRSRRSGGGAGSNGSVLDPAERAVIRIADERDRVQKKTFTKWVNKHLIKAQRHISDLYEDLRDGHNLISLLEVLSGDSLPREKGRMRFHKLQNVQIALDYLRHRQVKLVNIRNDDIADGNPKLTLGLIWTIILHFQISDIQVSGQSEDMTAKEKLLLWSQRMVEGYQGLRCDNFTSSWRDGRLFNAIIHRHKPLLIDMNKVYRQTNLENLDQAFSVAERDLGVTRLLDPEDVDVPQPDEKSIITYVSSLYDAMPRVPDVQDGVRANELQLRWQEYRELVLLLLQWMRHHTAAFEERRFPSSFEEIEILWSQFLKFKEMELPAKEADKNRSKGIYQSLEGAVQAGQLKVPPGYHPLDVEKEWGKLHVAILEREKQLRSEFERLECLQRIVTKLQMEAGLCEEQLNQADALLQSDVRLLAAGKVPQRAGEVERDLDKADSMIRLLFNDVQTLKDGRHPQGEQMYRRVYRLHERLVAIRTEYNLRLKAGVAAPATQVAQVTLQSVQRRPELEDSTLRYLQDLLAWVEENQHRVDGAEWGVDLPSVEAQLGSHRGLHQSIEEFRAKIERARSDEGQLSPATRGAYRDCLGRLDLQYAKLLNSSKARLRSLESLHSFVAAATKELMWLNEKEEEEVGFDWSDRNTNMTAKKESYSALMRELELKEKKIKELQNAGDRLLREDHPARPTVESFQAALQTQWSWMLQLCCCIEAHLKENAAYFQFFSDVREAEGQLQKLQEALRRKYSCDRSATVTRLEDLLQDAQDEKEQLNEYKGHLSGLAKRAKAVVQLKPRHPAHPMRGRLPLLAVCDYKQVEVTVHKGDECQLVGPAQPSHWKVLSSSGSEAAVPSVCFLVPPPNQEAQEAVTRLEAQHQALVTLWHQLHVDMKSLLAWQSLRRDVQLIRSWSLATFRTLKPEEQRQALHSLELHYQAFLRDSQDAGGFGPEDRLMAEREYGSCSHHYQQLLQSLEQGAQEESRCQRCISELKDIRLQLEACETRTVHRLRLPLDKEPARECAQRIAEQQKAQAEVEGLGKGVARLSAEAEKVLALPEPSPAAPTLRSELELTLGKLEQVRSLSAIYLEKLKTISLVIRGTQGAEEVLRAHEEQLKEAQAVPATLPELEATKASLKKLRAQAEAQQPTFDALRDELRGAQEVGERLQQRHGERDVEVERWRERVAQLLERWQAVLAQTDVRQRELEQLGRQLRYYRESADPLGAWLQDARRRQEQIQAMPLADSQAVREQLRQEQALLEEIERHGEKVEECQRFAKQYINAIKDYELQLVTYKAQLEPVASPAKKPKVQSGSESVIQEYVDLRTHYSELTTLTSQYIKFISETLRRMEEEERLAEQQRAEERERLAEVEAALEKQRQLAEAHAQAKAQAEREAKELQQRMQEEVVRREEAAVDAQQQKRSIQEELQQLRQSSEAEIQAKARQAEAAERSRLRIEEEIRVVRLQLEATERQRGGAEGELQALRARAEEAEAQKRQAQEEAERLRRQVQDESQRKRQAEVELASRVKAEAEAAREKQRALQALEELRLQAEEAERRLRQAEVERARQVQVALETAQRSAEAELQSKRASFAEKTAQLERSLQEEHVAVAQLREEAERRAQQQAEAERAREEAERELERWQLKANEALRLRLQAEEVAQQKSLAQAEAEKQKEEAEREARRRGKAEEQAVRQRELAEQELEKQRQLAEGTAQQRLAAEQELIRLRAETEQGEQQRQLLEEELARLQREAAAATQKRQELEAELAKVRAEMEVLLASKARAEEESRSTSEKSKQRLEAEAGRFRELAEEAARLRALAEEAKRQRQLAEEDAARQRAEAERVLAEKLAAIGEATRLKTEAEIALKEKEAENERLRRLAEDEAFQRRRLEEQAAQHKADIEERLAQLRKASDSELERQKGLVEDTLRQRRQVEEEILALKASFEKAAAGKAELELELGRIRSNAEDTLRSKEQAELEAARQRQLAAEEERRRREAEERVQKSLAAEEEAARQRKAALEEVERLKAKVEEARRLRERAEQESARQLQLAQEAAQKRLQAEEKAHAFAVQQKEQELQQTLQQEQSVLDQLRGEAEAARRAAEEAEEARVQAEREAAQSRRQVEEAERLKQSAEEQAQARAQAQAAAEKLRKEAEQEAARRAQAEQAALRQKQAADAEMEKHKKFAEQTLRQKAQVEQELTTLRLQLEETDHQKNLLDEELQRLKAEATEAARQRSQVEEELFSVRVQMEELSKLKARIEAENRALILRDKDNTQRFLQEEAEKMKQVAEEAARLSVAAQEAARLRQLAEEDLAQQRALAEKMLKEKMQAVQEATRLKAEAELLQQQKELAQEQARRLQEDKEQMAQQLAEETQGFQRTLEAERQRQLEMSAEAERLKLRVAEMSRAQARAEEDAQRFRKQAEEIGEKLHRTELATQEKVTLVQTLEIQRQQSDHDAERLREAIAELEREKEKLQQEAKLLQLKSEEMQTVQQEQLLQETQALQQSFLSEKDSLLQRERFIEQEKAKLEQLFQDEVAKAQQLREEQQRQQQQMEQERQRLVASMEEARRRQHEAEEGVRRKQEELQQLEQQRRQQEELLAEENQRLREQLQLLEEQHRAALAHSEEVTASQVAATKTLPNGRDALDGPAAEAEPEHSFDGLRRKVSAQRLQEAGILSAEELQRLAQGHTTVDELARREDVRHYLQGRSSIAGLLLKATNEKLSVYAALQRQLLSPGTALILLEAQAASGFLLDPVRNRRLTVNEAVKEGVVGPELHHKLLSAERAVTGYKDPYTGQQISLFQAMQKGLIVREHGIRLLEAQIATGGVIDPVHSHRVPVDVAYRRGYFDEEMNRVLADPSDDTKGFFDPNTHENLTYLQLLERCVEDPETGLCLLPLTDKAAKGGELVYTDSEARDVFEKATVSAPFGKFQGKTVTIWEIINSEYFTAEQRRDLLRQFRTGRITVEKIIKIIITVVEEQEQKGRLCFEGLRSLVPAAELLESRVIDRELYQQLQRGERSVRDVAEVDTVRRALRGANVIAGVWLEEAGQKLSIYNALKKDLLPSDMAVALLEAQAGTGHIIDPATSARLTVDEAVRAGLVGPEFHEKLLSAEKAVTGYRDPYTGQSVSLFQALKKGLIPREQGLRLLDAQLSTGGIVDPSKSHRVPLDVACARGCLDEETSRALSAPRADAKAYSDPSTGEPATYGELQQRCRPDQLTGLSLLPLSEKAARARQEELYSELQARETFEKTPVEVPVGGFKGRTVTVWELISSEYFTAEQRQELLRQFRTGKVTVEKVIKILITIVEEVETLRQERLSFSGLRAPVPASELLASGVLSRAQFEQLKDGKTTVKDLSELGSVRTLLQGSGCLAGIYLEDTKEKVSIYEAMRRGLLRATTAALLLEAQAATGFLVDPVRNQRLYVHEAVKAGVVGPELHEQLLSAEKAVTGYRDPYSGSTISLFQAMQKGLVLRQHGIRLLEAQIATGGIIDPVHSHRVPVDVAYQRGYFSEEMNRVLADPSDDTKGFFDPNTHENLTYRQLLERCVEDPETGLRLLPLKGAEKAEVVETTQVYTEEETRRAFEETQIDIPGGGSHGGSTMSLWEVMQSDLIPEEQRAQLMADFQAGRVTKERMIIIIIEIIEKTEIIRQQGLASYDYVRRRLTAEDLFEARIISLETYNLLREGTRSLREALEAESAWCYLYGTGSVAGVYLPGSRQTLSIYQALKKGLLSAEVARLLLEAQAATGFLLDPVKGERLTVDEAVRKGLVGPELHDRLLSAERAVTGYRDPYTEQTISLFQAMKKELIPTEEALRLLDAQLATGGIVDPRLGFHLPLEVAYQRGYLNKDTHDQLSEPSEVRSYVDPSTDERLSYTQLLRRCRRDDGTGQLLLPLSDARKLTFRGLRKQITMEELVRSQVMDEATALQLREGLTSIEEVTKNLQKFLEGTSCIAGVFVDATKERLSVYQAMKKGIIRPGTAFELLEAQAATGYVIDPIKGLKLTVEEAVRMGIVGPEFKDKLLSAERAVTGYKDPYSGKLISLFQAMKKGLILKDHGIRLLEAQIATGGIIDPEESHRLPVEVAYKRGLFDEEMNEILTDPSDDTKGFFDPNTEENLTYLQLMERCITDPQTGLCLLPLKEKKRERKTSSKSSVRKRRVVIVDPETGKEMSVYEAYRKGLIDHQTYLELSEQECEWEEITISSSDGVVKSMIIDRRSGRQYDIDDAIAKNLIDRSALDQYRAGTLSITEFADMLSGNAGGFRSRSSSVGSSSSYPISPAVSRTQLASWSDPTEETGPVAGILDTETLEKVSITEAMHRNLVDNITGQRLLEAQACTGGIIDPSTGERFPVTDAVNKGLVDKIMVDRINLAQKAFCGFEDPRTKTKMSAAQALKKGWLYYEAGQRFLEVQYLTGGLIEPDTPGRVPLDEALQRGTVDARTAQKLRDVGAYSKYLTCPKTKLKISYKDALDRSMVEEGTGLRLLEAAAQSTKGYYSPYSVSGSGSTAGSRTGSRTGSRAGSRRGSFDATGSGFSMTFSSSSYSSSGYGRRYASGSSASLGGPESAVA

SEQ ID NO: 37492 - protein, 4570 aa, Homo sapiens
MSGEDAEVRAVSEDVSNGSSGSPSPGDTLPWNLGKTQRSRRSGGGAGSNGSVLDPAERAVIRIADERDRVQKKTFTKWVNKHLIKAQRHISDLYEDLRDGHNLISLLEVLSGDSLPREKGRMRFHKLQNVQIALDYLRHRQVKLVNIRNDDIADGNPKLTLGLIWTIILHFQISDIQVSGQSEDMTAKEKLLLWSQRMVEGYQGLRCDNFTSSWRDGRLFNAIIHRHKPLLIDMNKVYRQTNLENLDQAFSVAERDLGVTRLLDPEDVDVPQPDEKSIITYVSSLYDAMPRVPDVQDGELQLRWQEYRELVLLLLQWMRHHTAAFEERRFPSSFEEIEILWSQFLKFKEMELPAKEADKNRSKGIYQSLEGAVQAGQLKVPPGYHPLDVEKEWGKLHVAILEREKQLRSEFERLECLQRIVTKLQMEAGLCEEQLNQADALLQSDVRLLAAGKVPQRAGEVERDLDKADSMIRLLFNDVQTLKDGRHPQGEQMYRRVYRLHERLVAIRTEYNLRLKAGVAAPATQVAQVTLQSVQRRPELEDSTLRYLQDLLAWVEENQHRVDGAEWGVDLPSVEAQLGSHRGLHQSIEEFRAKIERARSDEGQLSPATRGAYRDCLGRLDLQYAKLLNSSKARLRSLESLHSFVAAATKELMWLNEKEEEEVGFDWSDRNTNMTAKKESYSALMRELELKEKKIKELQNAGDRLLREDHPARPTVESFQAALQTQWSWMLQLCCCIEAHLKENAAYFQFFSDVREAEGQLQKLQEALRRKYSCDRSATVTRLEDLLQDAQDEKEQLNEYKGHLSGLAKRAKAVVQLKPRHPAHPMRGRLPLLAVCDYKQVEVTVHKGDECQLVGPAQPSHWKVLSSSGSEAAVPSVCFLVPPPNQEAQEAVTRLEAQHQALVTLWHQLHVDMKSLLAWQSLRRDVQLIRSWSLATFRTLKPEEQRQALHSLELHYQAFLRDSQDAGGFGPEDRLMAEREYGSCSHHYQQLLQSLEQGAQEESRCQRCISELKDIRLQLEACETRTVHRLRLPLDKEPARECAQRIAEQQKAQAEVEGLGKGVARLSAEAEKVLALPEPSPAAPTLRSELELTLGKLEQVRSLSAIYLEKLKTISLVIRGTQGAEEVLRAHEEQLKEAQAVPATLPELEATKASLKKLRAQAEAQQPTFDALRDELRGAQEVGERLQQRHGERDVEVERWRERVAQLLERWQAVLAQTDVRQRELEQLGRQLRYYRESADPLGAWLQDARRRQEQIQAMPLADSQAVREQLRQEQALLEEIERHGEKVEECQRFAKQYINAIKDYELQLVTYKAQLEPVASPAKKPKVQSGSESVIQEYVDLRTHYSELTTLTSQYIKFISETLRRMEEEERLAEQQRAEERERLAEVEAALEKQRQLAEAHAQAKAQAEREAKELQQRMQEEVVRREEAAVDAQQQKRSIQEELQQLRQSSEAEIQAKARQAEAAERSRLRIEEEIRVVRLQLEATERQRGGAEGELQALRARAEEAEAQKRQAQEEAERLRRQVQDESQRKRQAEVELASRVKAEAEAAREKQRALQALEELRLQAEEAERRLRQAEVERARQVQVALETAQRSAEAELQSKRASFAEKTAQLERSLQEEHVAVAQLREEAERRAQQQAEAERAREEAERELERWQLKANEALRLRLQAEEVAQQKSLAQAEAEKQKEEAEREARRRGKAEEQAVRQRELAEQELEKQRQLAEGTAQQRLAAEQELIRLRAETEQGEQQRQLLEEELARLQREAAAATQKRQELEAELAKVRAEMEVLLASKARAEEESRSTSEKSKQRLEAEAGRFRELAEEAARLRALAEEAKRQRQLAEEDAARQRAEAERVLAEKLAAIGEATRLKTEAEIALKEKEAENERLRRLAEDEAFQRRRLEEQAAQHKADIEERLAQLRKASDSELERQKGLVEDTLRQRRQVEEEILALKASFEKAAAGKAELELELGRIRSNAEDTLRSKEQAELEAARQRQLAAEEERRRREAEERVQKSLAAEEEAARQRKAALEEVERLKAKVEEARRLRERAEQESARQLQLAQEAAQKRLQAEEKAHAFAVQQKEQELQQTLQQEQSVLDQLRGEAEAARRAAEEAEEARVQAEREAAQSRRQVEEAERLKQSAEEQAQARAQAQAAAEKLRKEAEQEAARRAQAEQAALRQKQAADAEMEKHKKFAEQTLRQKAQVEQELTTLRLQLEETDHQKNLLDEELQRLKAEATEAARQRSQVEEELFSVRVQMEELSKLKARIEAENRALILRDKDNTQRFLQEEAEKMKQVAEEAARLSVAAQEAARLRQLAEEDLAQQRALAEKMLKEKMQAVQEATRLKAEAELLQQQKELAQEQARRLQEDKEQMAQQLAEETQGFQRTLEAERQRQLEMSAEAERLKLRVAEMSRAQARAEEDAQRFRKQAEEIGEKLHRTELATQEKVTLVQTLEIQRQQSDHDAERLREAIAELEREKEKLQQEAKLLQLKSEEMQTVQQEQLLQETQALQQSFLSEKDSLLQRERFIEQEKAKLEQLFQDEVAKAQQLREEQQRQQQQMEQERQRLVASMEEARRRQHEAEEGVRRKQEELQQLEQQRRQQEELLAEENQRLREQLQLLEEQHRAALAHSEEVTASQVAATKTLPNGRDALDGPAAEAEPEHSFDGLRRKVSAQRLQEAGILSAEELQRLAQGHTTVDELARREDVRHYLQGRSSIAGLLLKATNEKLSVYAALQRQLLSPGTALILLEAQAASGFLLDPVRNRRLTVNEAVKEGVVGPELHHKLLSAERAVTGYKDPYTGQQISLFQAMQKGLIVREHGIRLLEAQIATGGVIDPVHSHRVPVDVAYRRGYFDEEMNRVLADPSDDTKGFFDPNTHENLTYLQLLERCVEDPETGLCLLPLTDKAAKGGELVYTDSEARDVFEKATVSAPFGKFQGKTVTIWEIINSEYFTAEQRRDLLRQFRTGRITVEKIIKIIITVVEEQEQKGRLCFEGLRSLVPAAELLESRVIDRELYQQLQRGERSVRDVAEVDTVRRALRGANVIAGVWLEEAGQKLSIYNALKKDLLPSDMAVALLEAQAGTGHIIDPATSARLTVDEAVRAGLVGPEFHEKLLSAEKAVTGYRDPYTGQSVSLFQALKKGLIPREQGLRLLDAQLSTGGIVDPSKSHRVPLDVACARGCLDEETSRALSAPRADAKAYSDPSTGEPATYGELQQRCRPDQLTGLSLLPLSEKAARARQEELYSELQARETFEKTPVEVPVGGFKGRTVTVWELISSEYFTAEQRQELLRQFRTGKVTVEKVIKILITIVEEVETLRQERLSFSGLRAPVPASELLASGVLSRAQFEQLKDGKTTVKDLSELGSVRTLLQGSGCLAGIYLEDTKEKVSIYEAMRRGLLRATTAALLLEAQAATGFLVDPVRNQRLYVHEAVKAGVVGPELHEQLLSAEKAVTGYRDPYSGSTISLFQAMQKGLVLRQHGIRLLEAQIATGGIIDPVHSHRVPVDVAYQRGYFSEEMNRVLADPSDDTKGFFDPNTHENLTYRQLLERCVEDPETGLRLLPLKGAEKAEVVETTQVYTEEETRRAFEETQIDIPGGGSHGGSTMSLWEVMQSDLIPEEQRAQLMADFQAGRVTKERMIIIIIEIIEKTEIIRQQGLASYDYVRRRLTAEDLFEARIISLETYNLLREGTRSLREALEAESAWCYLYGTGSVAGVYLPGSRQTLSIYQALKKGLLSAEVARLLLEAQAATGFLLDPVKGERLTVDEAVRKGLVGPELHDRLLSAERAVTGYRDPYTEQTISLFQAMKKELIPTEEALRLLDAQLATGGIVDPRLGFHLPLEVAYQRGYLNKDTHDQLSEPSEVRSYVDPSTDERLSYTQLLRRCRRDDGTGQLLLPLSDARKLTFRGLRKQITMEELVRSQVMDEATALQLREGLTSIEEVTKNLQKFLEGTSCIAGVFVDATKERLSVYQAMKKGIIRPGTAFELLEAQAATGYVIDPIKGLKLTVEEAVRMGIVGPEFKDKLLSAERAVTGYKDPYSGKLISLFQAMKKGLILKDHGIRLLEAQIATGGIIDPEESHRLPVEVAYKRGLFDEEMNEILTDPSDDTKGFFDPNTEENLTYLQLMERCITDPQTGLCLLPLKEKKRERKTSSKSSVRKRRVVIVDPETGKEMSVYEAYRKGLIDHQTYLELSEQECEWEEITISSSDGVVKSMIIDRRSGRQYDIDDAIAKNLIDRSALDQYRAGTLSITEFADMLSGNAGGFRSRSSSVGSSSSYPISPAVSRTQLASWSDPTEETGPVAGILDTETLEKVSITEAMHRNLVDNITGQRLLEAQACTGGIIDPSTGERFPVTDAVNKGLVDKIMVDRINLAQKAFCGFEDPRTKTKMSAAQALKKGWLYYEAGQRFLEVQYLTGGLIEPDTPGRVPLDEALQRGTVDARTAQKLRDVGAYSKYLTCPKTKLKISYKDALDRSMVEEGTGLRLLEAAAQSTKGYYSPYSVSGSGSTAGSRTGSRTGSRAGSRRGSFDATGSGFSMTFSSSSYSSSGYGRRYASGSSASLGGPESAVA

SEQ ID NO: 37493 - protein, 4547 aa, Homo sapiens
MSQHQLRVPQPEGLGRKRTSSEDNLYLAVLRASEGKKDERDRVQKKTFTKWVNKHLIKAQRHISDLYEDLRDGHNLISLLEVLSGDSLPREKGRMRFHKLQNVQIALDYLRHRQVKLVNIRNDDIADGNPKLTLGLIWTIILHFQISDIQVSGQSEDMTAKEKLLLWSQRMVEGYQGLRCDNFTSSWRDGRLFNAIIHRHKPLLIDMNKVYRQTNLENLDQAFSVAERDLGVTRLLDPEDVDVPQPDEKSIITYVSSLYDAMPRVPDVQDGVRANELQLRWQEYRELVLLLLQWMRHHTAAFEERRFPSSFEEIEILWSQFLKFKEMELPAKEADKNRSKGIYQSLEGAVQAGQLKVPPGYHPLDVEKEWGKLHVAILEREKQLRSEFERLECLQRIVTKLQMEAGLCEEQLNQADALLQSDVRLLAAGKVPQRAGEVERDLDKADSMIRLLFNDVQTLKDGRHPQGEQMYRRVYRLHERLVAIRTEYNLRLKAGVAAPATQVAQVTLQSVQRRPELEDSTLRYLQDLLAWVEENQHRVDGAEWGVDLPSVEAQLGSHRGLHQSIEEFRAKIERARSDEGQLSPATRGAYRDCLGRLDLQYAKLLNSSKARLRSLESLHSFVAAATKELMWLNEKEEEEVGFDWSDRNTNMTAKKESYSALMRELELKEKKIKELQNAGDRLLREDHPARPTVESFQAALQTQWSWMLQLCCCIEAHLKENAAYFQFFSDVREAEGQLQKLQEALRRKYSCDRSATVTRLEDLLQDAQDEKEQLNEYKGHLSGLAKRAKAVVQLKPRHPAHPMRGRLPLLAVCDYKQVEVTVHKGDECQLVGPAQPSHWKVLSSSGSEAAVPSVCFLVPPPNQEAQEAVTRLEAQHQALVTLWHQLHVDMKSLLAWQSLRRDVQLIRSWSLATFRTLKPEEQRQALHSLELHYQAFLRDSQDAGGFGPEDRLMAEREYGSCSHHYQQLLQSLEQGAQEESRCQRCISELKDIRLQLEACETRTVHRLRLPLDKEPARECAQRIAEQQKAQAEVEGLGKGVARLSAEAEKVLALPEPSPAAPTLRSELELTLGKLEQVRSLSAIYLEKLKTISLVIRGTQGAEEVLRAHEEQLKEAQAVPATLPELEATKASLKKLRAQAEAQQPTFDALRDELRGAQEVGERLQQRHGERDVEVERWRERVAQLLERWQAVLAQTDVRQRELEQLGRQLRYYRESADPLGAWLQDARRRQEQIQAMPLADSQAVREQLRQEQALLEEIERHGEKVEECQRFAKQYINAIKDYELQLVTYKAQLEPVASPAKKPKVQSGSESVIQEYVDLRTHYSELTTLTSQYIKFISETLRRMEEEERLAEQQRAEERERLAEVEAALEKQRQLAEAHAQAKAQAEREAKELQQRMQEEVVRREEAAVDAQQQKRSIQEELQQLRQSSEAEIQAKARQAEAAERSRLRIEEEIRVVRLQLEATERQRGGAEGELQALRARAEEAEAQKRQAQEEAERLRRQVQDESQRKRQAEVELASRVKAEAEAAREKQRALQALEELRLQAEEAERRLRQAEVERARQVQVALETAQRSAEAELQSKRASFAEKTAQLERSLQEEHVAVAQLREEAERRAQQQAEAERAREEAERELERWQLKANEALRLRLQAEEVAQQKSLAQAEAEKQKEEAEREARRRGKAEEQAVRQRELAEQELEKQRQLAEGTAQQRLAAEQELIRLRAETEQGEQQRQLLEEELARLQREAAAATQKRQELEAELAKVRAEMEVLLASKARAEEESRSTSEKSKQRLEAEAGRFRELAEEAARLRALAEEAKRQRQLAEEDAARQRAEAERVLAEKLAAIGEATRLKTEAEIALKEKEAENERLRRLAEDEAFQRRRLEEQAAQHKADIEERLAQLRKASDSELERQKGLVEDTLRQRRQVEEEILALKASFEKAAAGKAELELELGRIRSNAEDTLRSKEQAELEAARQRQLAAEEERRRREAEERVQKSLAAEEEAARQRKAALEEVERLKAKVEEARRLRERAEQESARQLQLAQEAAQKRLQAEEKAHAFAVQQKEQELQQTLQQEQSVLDQLRGEAEAARRAAEEAEEARVQAEREAAQSRRQVEEAERLKQSAEEQAQARAQAQAAAEKLRKEAEQEAARRAQAEQAALRQKQAADAEMEKHKKFAEQTLRQKAQVEQELTTLRLQLEETDHQKNLLDEELQRLKAEATEAARQRSQVEEELFSVRVQMEELSKLKARIEAENRALILRDKDNTQRFLQEEAEKMKQVAEEAARLSVAAQEAARLRQLAEEDLAQQRALAEKMLKEKMQAVQEATRLKAEAELLQQQKELAQEQARRLQEDKEQMAQQLAEETQGFQRTLEAERQRQLEMSAEAERLKLRVAEMSRAQARAEEDAQRFRKQAEEIGEKLHRTELATQEKVTLVQTLEIQRQQSDHDAERLREAIAELEREKEKLQQEAKLLQLKSEEMQTVQQEQLLQETQALQQSFLSEKDSLLQRERFIEQEKAKLEQLFQDEVAKAQQLREEQQRQQQQMEQERQRLVASMEEARRRQHEAEEGVRRKQEELQQLEQQRRQQEELLAEENQRLREQLQLLEEQHRAALAHSEEVTASQVAATKTLPNGRDALDGPAAEAEPEHSFDGLRRKVSAQRLQEAGILSAEELQRLAQGHTTVDELARREDVRHYLQGRSSIAGLLLKATNEKLSVYAALQRQLLSPGTALILLEAQAASGFLLDPVRNRRLTVNEAVKEGVVGPELHHKLLSAERAVTGYKDPYTGQQISLFQAMQKGLIVREHGIRLLEAQIATGGVIDPVHSHRVPVDVAYRRGYFDEEMNRVLADPSDDTKGFFDPNTHENLTYLQLLERCVEDPETGLCLLPLTDKAAKGGELVYTDSEARDVFEKATVSAPFGKFQGKTVTIWEIINSEYFTAEQRRDLLRQFRTGRITVEKIIKIIITVVEEQEQKGRLCFEGLRSLVPAAELLESRVIDRELYQQLQRGERSVRDVAEVDTVRRALRGANVIAGVWLEEAGQKLSIYNALKKDLLPSDMAVALLEAQAGTGHIIDPATSARLTVDEAVRAGLVGPEFHEKLLSAEKAVTGYRDPYTGQSVSLFQALKKGLIPREQGLRLLDAQLSTGGIVDPSKSHRVPLDVACARGCLDEETSRALSAPRADAKAYSDPSTGEPATYGELQQRCRPDQLTGLSLLPLSEKAARARQEELYSELQARETFEKTPVEVPVGGFKGRTVTVWELISSEYFTAEQRQELLRQFRTGKVTVEKVIKILITIVEEVETLRQERLSFSGLRAPVPASELLASGVLSRAQFEQLKDGKTTVKDLSELGSVRTLLQGSGCLAGIYLEDTKEKVSIYEAMRRGLLRATTAALLLEAQAATGFLVDPVRNQRLYVHEAVKAGVVGPELHEQLLSAEKAVTGYRDPYSGSTISLFQAMQKGLVLRQHGIRLLEAQIATGGIIDPVHSHRVPVDVAYQRGYFSEEMNRVLADPSDDTKGFFDPNTHENLTYRQLLERCVEDPETGLRLLPLKGAEKAEVVETTQVYTEEETRRAFEETQIDIPGGGSHGGSTMSLWEVMQSDLIPEEQRAQLMADFQAGRVTKERMIIIIIEIIEKTEIIRQQGLASYDYVRRRLTAEDLFEARIISLETYNLLREGTRSLREALEAESAWCYLYGTGSVAGVYLPGSRQTLSIYQALKKGLLSAEVARLLLEAQAATGFLLDPVKGERLTVDEAVRKGLVGPELHDRLLSAERAVTGYRDPYTEQTISLFQAMKKELIPTEEALRLLDAQLATGGIVDPRLGFHLPLEVAYQRGYLNKDTHDQLSEPSEVRSYVDPSTDERLSYTQLLRRCRRDDGTGQLLLPLSDARKLTFRGLRKQITMEELVRSQVMDEATALQLREGLTSIEEVTKNLQKFLEGTSCIAGVFVDATKERLSVYQAMKKGIIRPGTAFELLEAQAATGYVIDPIKGLKLTVEEAVRMGIVGPEFKDKLLSAERAVTGYKDPYSGKLISLFQAMKKGLILKDHGIRLLEAQIATGGIIDPEESHRLPVEVAYKRGLFDEEMNEILTDPSDDTKGFFDPNTEENLTYLQLMERCITDPQTGLCLLPLKEKKRERKTSSKSSVRKRRVVIVDPETGKEMSVYEAYRKGLIDHQTYLELSEQECEWEEITISSSDGVVKSMIIDRRSGRQYDIDDAIAKNLIDRSALDQYRAGTLSITEFADMLSGNAGGFRSRSSSVGSSSSYPISPAVSRTQLASWSDPTEETGPVAGILDTETLEKVSITEAMHRNLVDNITGQRLLEAQACTGGIIDPSTGERFPVTDAVNKGLVDKIMVDRINLAQKAFCGFEDPRTKTKMSAAQALKKGWLYYEAGQRFLEVQYLTGGLIEPDTPGRVPLDEALQRGTVDARTAQKLRDVGAYSKYLTCPKTKLKISYKDALDRSMVEEGTGLRLLEAAAQSTKGYYSPYSVSGSGSTAGSRTGSRTGSRAGSRRGSFDATGSGFSMTFSSSSYSSSGYGRRYASGSSASLGGPESAVA

SEQ ID NO: 37494 - protein, 4547 aa, Homo sapiens
MEPSGSLFPSLVVVGHVVTLAAVWHWRRGRRWAQDEQDERDRVQKKTFTKWVNKHLIKAQRHISDLYEDLRDGHNLISLLEVLSGDSLPREKGRMRFHKLQNVQIALDYLRHRQVKLVNIRNDDIADGNPKLTLGLIWTIILHFQISDIQVSGQSEDMTAKEKLLLWSQRMVEGYQGLRCDNFTSSWRDGRLFNAIIHRHKPLLIDMNKVYRQTNLENLDQAFSVAERDLGVTRLLDPEDVDVPQPDEKSIITYVSSLYDAMPRVPDVQDGVRANELQLRWQEYRELVLLLLQWMRHHTAAFEERRFPSSFEEIEILWSQFLKFKEMELPAKEADKNRSKGIYQSLEGAVQAGQLKVPPGYHPLDVEKEWGKLHVAILEREKQLRSEFERLECLQRIVTKLQMEAGLCEEQLNQADALLQSDVRLLAAGKVPQRAGEVERDLDKADSMIRLLFNDVQTLKDGRHPQGEQMYRRVYRLHERLVAIRTEYNLRLKAGVAAPATQVAQVTLQSVQRRPELEDSTLRYLQDLLAWVEENQHRVDGAEWGVDLPSVEAQLGSHRGLHQSIEEFRAKIERARSDEGQLSPATRGAYRDCLGRLDLQYAKLLNSSKARLRSLESLHSFVAAATKELMWLNEKEEEEVGFDWSDRNTNMTAKKESYSALMRELELKEKKIKELQNAGDRLLREDHPARPTVESFQAALQTQWSWMLQLCCCIEAHLKENAAYFQFFSDVREAEGQLQKLQEALRRKYSCDRSATVTRLEDLLQDAQDEKEQLNEYKGHLSGLAKRAKAVVQLKPRHPAHPMRGRLPLLAVCDYKQVEVTVHKGDECQLVGPAQPSHWKVLSSSGSEAAVPSVCFLVPPPNQEAQEAVTRLEAQHQALVTLWHQLHVDMKSLLAWQSLRRDVQLIRSWSLATFRTLKPEEQRQALHSLELHYQAFLRDSQDAGGFGPEDRLMAEREYGSCSHHYQQLLQSLEQGAQEESRCQRCISELKDIRLQLEACETRTVHRLRLPLDKEPARECAQRIAEQQKAQAEVEGLGKGVARLSAEAEKVLALPEPSPAAPTLRSELELTLGKLEQVRSLSAIYLEKLKTISLVIRGTQGAEEVLRAHEEQLKEAQAVPATLPELEATKASLKKLRAQAEAQQPTFDALRDELRGAQEVGERLQQRHGERDVEVERWRERVAQLLERWQAVLAQTDVRQRELEQLGRQLRYYRESADPLGAWLQDARRRQEQIQAMPLADSQAVREQLRQEQALLEEIERHGEKVEECQRFAKQYINAIKDYELQLVTYKAQLEPVASPAKKPKVQSGSESVIQEYVDLRTHYSELTTLTSQYIKFISETLRRMEEEERLAEQQRAEERERLAEVEAALEKQRQLAEAHAQAKAQAEREAKELQQRMQEEVVRREEAAVDAQQQKRSIQEELQQLRQSSEAEIQAKARQAEAAERSRLRIEEEIRVVRLQLEATERQRGGAEGELQALRARAEEAEAQKRQAQEEAERLRRQVQDESQRKRQAEVELASRVKAEAEAAREKQRALQALEELRLQAEEAERRLRQAEVERARQVQVALETAQRSAEAELQSKRASFAEKTAQLERSLQEEHVAVAQLREEAERRAQQQAEAERAREEAERELERWQLKANEALRLRLQAEEVAQQKSLAQAEAEKQKEEAEREARRRGKAEEQAVRQRELAEQELEKQRQLAEGTAQQRLAAEQELIRLRAETEQGEQQRQLLEEELARLQREAAAATQKRQELEAELAKVRAEMEVLLASKARAEEESRSTSEKSKQRLEAEAGRFRELAEEAARLRALAEEAKRQRQLAEEDAARQRAEAERVLAEKLAAIGEATRLKTEAEIALKEKEAENERLRRLAEDEAFQRRRLEEQAAQHKADIEERLAQLRKASDSELERQKGLVEDTLRQRRQVEEEILALKASFEKAAAGKAELELELGRIRSNAEDTLRSKEQAELEAARQRQLAAEEERRRREAEERVQKSLAAEEEAARQRKAALEEVERLKAKVEEARRLRERAEQESARQLQLAQEAAQKRLQAEEKAHAFAVQQKEQELQQTLQQEQSVLDQLRGEAEAARRAAEEAEEARVQAEREAAQSRRQVEEAERLKQSAEEQAQARAQAQAAAEKLRKEAEQEAARRAQAEQAALRQKQAADAEMEKHKKFAEQTLRQKAQVEQELTTLRLQLEETDHQKNLLDEELQRLKAEATEAARQRSQVEEELFSVRVQMEELSKLKARIEAENRALILRDKDNTQRFLQEEAEKMKQVAEEAARLSVAAQEAARLRQLAEEDLAQQRALAEKMLKEKMQAVQEATRLKAEAELLQQQKELAQEQARRLQEDKEQMAQQLAEETQGFQRTLEAERQRQLEMSAEAERLKLRVAEMSRAQARAEEDAQRFRKQAEEIGEKLHRTELATQEKVTLVQTLEIQRQQSDHDAERLREAIAELEREKEKLQQEAKLLQLKSEEMQTVQQEQLLQETQALQQSFLSEKDSLLQRERFIEQEKAKLEQLFQDEVAKAQQLREEQQRQQQQMEQERQRLVASMEEARRRQHEAEEGVRRKQEELQQLEQQRRQQEELLAEENQRLREQLQLLEEQHRAALAHSEEVTASQVAATKTLPNGRDALDGPAAEAEPEHSFDGLRRKVSAQRLQEAGILSAEELQRLAQGHTTVDELARREDVRHYLQGRSSIAGLLLKATNEKLSVYAALQRQLLSPGTALILLEAQAASGFLLDPVRNRRLTVNEAVKEGVVGPELHHKLLSAERAVTGYKDPYTGQQISLFQAMQKGLIVREHGIRLLEAQIATGGVIDPVHSHRVPVDVAYRRGYFDEEMNRVLADPSDDTKGFFDPNTHENLTYLQLLERCVEDPETGLCLLPLTDKAAKGGELVYTDSEARDVFEKATVSAPFGKFQGKTVTIWEIINSEYFTAEQRRDLLRQFRTGRITVEKIIKIIITVVEEQEQKGRLCFEGLRSLVPAAELLESRVIDRELYQQLQRGERSVRDVAEVDTVRRALRGANVIAGVWLEEAGQKLSIYNALKKDLLPSDMAVALLEAQAGTGHIIDPATSARLTVDEAVRAGLVGPEFHEKLLSAEKAVTGYRDPYTGQSVSLFQALKKGLIPREQGLRLLDAQLSTGGIVDPSKSHRVPLDVACARGCLDEETSRALSAPRADAKAYSDPSTGEPATYGELQQRCRPDQLTGLSLLPLSEKAARARQEELYSELQARETFEKTPVEVPVGGFKGRTVTVWELISSEYFTAEQRQELLRQFRTGKVTVEKVIKILITIVEEVETLRQERLSFSGLRAPVPASELLASGVLSRAQFEQLKDGKTTVKDLSELGSVRTLLQGSGCLAGIYLEDTKEKVSIYEAMRRGLLRATTAALLLEAQAATGFLVDPVRNQRLYVHEAVKAGVVGPELHEQLLSAEKAVTGYRDPYSGSTISLFQAMQKGLVLRQHGIRLLEAQIATGGIIDPVHSHRVPVDVAYQRGYFSEEMNRVLADPSDDTKGFFDPNTHENLTYRQLLERCVEDPETGLRLLPLKGAEKAEVVETTQVYTEEETRRAFEETQIDIPGGGSHGGSTMSLWEVMQSDLIPEEQRAQLMADFQAGRVTKERMIIIIIEIIEKTEIIRQQGLASYDYVRRRLTAEDLFEARIISLETYNLLREGTRSLREALEAESAWCYLYGTGSVAGVYLPGSRQTLSIYQALKKGLLSAEVARLLLEAQAATGFLLDPVKGERLTVDEAVRKGLVGPELHDRLLSAERAVTGYRDPYTEQTISLFQAMKKELIPTEEALRLLDAQLATGGIVDPRLGFHLPLEVAYQRGYLNKDTHDQLSEPSEVRSYVDPSTDERLSYTQLLRRCRRDDGTGQLLLPLSDARKLTFRGLRKQITMEELVRSQVMDEATALQLREGLTSIEEVTKNLQKFLEGTSCIAGVFVDATKERLSVYQAMKKGIIRPGTAFELLEAQAATGYVIDPIKGLKLTVEEAVRMGIVGPEFKDKLLSAERAVTGYKDPYSGKLISLFQAMKKGLILKDHGIRLLEAQIATGGIIDPEESHRLPVEVAYKRGLFDEEMNEILTDPSDDTKGFFDPNTEENLTYLQLMERCITDPQTGLCLLPLKEKKRERKTSSKSSVRKRRVVIVDPETGKEMSVYEAYRKGLIDHQTYLELSEQECEWEEITISSSDGVVKSMIIDRRSGRQYDIDDAIAKNLIDRSALDQYRAGTLSITEFADMLSGNAGGFRSRSSSVGSSSSYPISPAVSRTQLASWSDPTEETGPVAGILDTETLEKVSITEAMHRNLVDNITGQRLLEAQACTGGIIDPSTGERFPVTDAVNKGLVDKIMVDRINLAQKAFCGFEDPRTKTKMSAAQALKKGWLYYEAGQRFLEVQYLTGGLIEPDTPGRVPLDEALQRGTVDARTAQKLRDVGAYSKYLTCPKTKLKISYKDALDRSMVEEGTGLRLLEAAAQSTKGYYSPYSVSGSGSTAGSRTGSRTGSRAGSRRGSFDATGSGFSMTFSSSSYSSSGYGRRYASGSSASLGGPESAVA

SEQ ID NO: 37495 - protein, 4551 aa, Homo sapiens
MSGAGGAFASPREVLLERPCWLDGGCEPARRGYLYQQLCCVDERDRVQKKTFTKWVNKHLIKAQRHISDLYEDLRDGHNLISLLEVLSGDSLPREKGRMRFHKLQNVQIALDYLRHRQVKLVNIRNDDIADGNPKLTLGLIWTIILHFQISDIQVSGQSEDMTAKEKLLLWSQRMVEGYQGLRCDNFTSSWRDGRLFNAIIHRHKPLLIDMNKVYRQTNLENLDQAFSVAERDLGVTRLLDPEDVDVPQPDEKSIITYVSSLYDAMPRVPDVQDGVRANELQLRWQEYRELVLLLLQWMRHHTAAFEERRFPSSFEEIEILWSQFLKFKEMELPAKEADKNRSKGIYQSLEGAVQAGQLKVPPGYHPLDVEKEWGKLHVAILEREKQLRSEFERLECLQRIVTKLQMEAGLCEEQLNQADALLQSDVRLLAAGKVPQRAGEVERDLDKADSMIRLLFNDVQTLKDGRHPQGEQMYRRVYRLHERLVAIRTEYNLRLKAGVAAPATQVAQVTLQSVQRRPELEDSTLRYLQDLLAWVEENQHRVDGAEWGVDLPSVEAQLGSHRGLHQSIEEFRAKIERARSDEGQLSPATRGAYRDCLGRLDLQYAKLLNSSKARLRSLESLHSFVAAATKELMWLNEKEEEEVGFDWSDRNTNMTAKKESYSALMRELELKEKKIKELQNAGDRLLREDHPARPTVESFQAALQTQWSWMLQLCCCIEAHLKENAAYFQFFSDVREAEGQLQKLQEALRRKYSCDRSATVTRLEDLLQDAQDEKEQLNEYKGHLSGLAKRAKAVVQLKPRHPAHPMRGRLPLLAVCDYKQVEVTVHKGDECQLVGPAQPSHWKVLSSSGSEAAVPSVCFLVPPPNQEAQEAVTRLEAQHQALVTLWHQLHVDMKSLLAWQSLRRDVQLIRSWSLATFRTLKPEEQRQALHSLELHYQAFLRDSQDAGGFGPEDRLMAEREYGSCSHHYQQLLQSLEQGAQEESRCQRCISELKDIRLQLEACETRTVHRLRLPLDKEPARECAQRIAEQQKAQAEVEGLGKGVARLSAEAEKVLALPEPSPAAPTLRSELELTLGKLEQVRSLSAIYLEKLKTISLVIRGTQGAEEVLRAHEEQLKEAQAVPATLPELEATKASLKKLRAQAEAQQPTFDALRDELRGAQEVGERLQQRHGERDVEVERWRERVAQLLERWQAVLAQTDVRQRELEQLGRQLRYYRESADPLGAWLQDARRRQEQIQAMPLADSQAVREQLRQEQALLEEIERHGEKVEECQRFAKQYINAIKDYELQLVTYKAQLEPVASPAKKPKVQSGSESVIQEYVDLRTHYSELTTLTSQYIKFISETLRRMEEEERLAEQQRAEERERLAEVEAALEKQRQLAEAHAQAKAQAEREAKELQQRMQEEVVRREEAAVDAQQQKRSIQEELQQLRQSSEAEIQAKARQAEAAERSRLRIEEEIRVVRLQLEATERQRGGAEGELQALRARAEEAEAQKRQAQEEAERLRRQVQDESQRKRQAEVELASRVKAEAEAAREKQRALQALEELRLQAEEAERRLRQAEVERARQVQVALETAQRSAEAELQSKRASFAEKTAQLERSLQEEHVAVAQLREEAERRAQQQAEAERAREEAERELERWQLKANEALRLRLQAEEVAQQKSLAQAEAEKQKEEAEREARRRGKAEEQAVRQRELAEQELEKQRQLAEGTAQQRLAAEQELIRLRAETEQGEQQRQLLEEELARLQREAAAATQKRQELEAELAKVRAEMEVLLASKARAEEESRSTSEKSKQRLEAEAGRFRELAEEAARLRALAEEAKRQRQLAEEDAARQRAEAERVLAEKLAAIGEATRLKTEAEIALKEKEAENERLRRLAEDEAFQRRRLEEQAAQHKADIEERLAQLRKASDSELERQKGLVEDTLRQRRQVEEEILALKASFEKAAAGKAELELELGRIRSNAEDTLRSKEQAELEAARQRQLAAEEERRRREAEERVQKSLAAEEEAARQRKAALEEVERLKAKVEEARRLRERAEQESARQLQLAQEAAQKRLQAEEKAHAFAVQQKEQELQQTLQQEQSVLDQLRGEAEAARRAAEEAEEARVQAEREAAQSRRQVEEAERLKQSAEEQAQARAQAQAAAEKLRKEAEQEAARRAQAEQAALRQKQAADAEMEKHKKFAEQTLRQKAQVEQELTTLRLQLEETDHQKNLLDEELQRLKAEATEAARQRSQVEEELFSVRVQMEELSKLKARIEAENRALILRDKDNTQRFLQEEAEKMKQVAEEAARLSVAAQEAARLRQLAEEDLAQQRALAEKMLKEKMQAVQEATRLKAEAELLQQQKELAQEQARRLQEDKEQMAQQLAEETQGFQRTLEAERQRQLEMSAEAERLKLRVAEMSRAQARAEEDAQRFRKQAEEIGEKLHRTELATQEKVTLVQTLEIQRQQSDHDAERLREAIAELEREKEKLQQEAKLLQLKSEEMQTVQQEQLLQETQALQQSFLSEKDSLLQRERFIEQEKAKLEQLFQDEVAKAQQLREEQQRQQQQMEQERQRLVASMEEARRRQHEAEEGVRRKQEELQQLEQQRRQQEELLAEENQRLREQLQLLEEQHRAALAHSEEVTASQVAATKTLPNGRDALDGPAAEAEPEHSFDGLRRKVSAQRLQEAGILSAEELQRLAQGHTTVDELARREDVRHYLQGRSSIAGLLLKATNEKLSVYAALQRQLLSPGTALILLEAQAASGFLLDPVRNRRLTVNEAVKEGVVGPELHHKLLSAERAVTGYKDPYTGQQISLFQAMQKGLIVREHGIRLLEAQIATGGVIDPVHSHRVPVDVAYRRGYFDEEMNRVLADPSDDTKGFFDPNTHENLTYLQLLERCVEDPETGLCLLPLTDKAAKGGELVYTDSEARDVFEKATVSAPFGKFQGKTVTIWEIINSEYFTAEQRRDLLRQFRTGRITVEKIIKIIITVVEEQEQKGRLCFEGLRSLVPAAELLESRVIDRELYQQLQRGERSVRDVAEVDTVRRALRGANVIAGVWLEEAGQKLSIYNALKKDLLPSDMAVALLEAQAGTGHIIDPATSARLTVDEAVRAGLVGPEFHEKLLSAEKAVTGYRDPYTGQSVSLFQALKKGLIPREQGLRLLDAQLSTGGIVDPSKSHRVPLDVACARGCLDEETSRALSAPRADAKAYSDPSTGEPATYGELQQRCRPDQLTGLSLLPLSEKAARARQEELYSELQARETFEKTPVEVPVGGFKGRTVTVWELISSEYFTAEQRQELLRQFRTGKVTVEKVIKILITIVEEVETLRQERLSFSGLRAPVPASELLASGVLSRAQFEQLKDGKTTVKDLSELGSVRTLLQGSGCLAGIYLEDTKEKVSIYEAMRRGLLRATTAALLLEAQAATGFLVDPVRNQRLYVHEAVKAGVVGPELHEQLLSAEKAVTGYRDPYSGSTISLFQAMQKGLVLRQHGIRLLEAQIATGGIIDPVHSHRVPVDVAYQRGYFSEEMNRVLADPSDDTKGFFDPNTHENLTYRQLLERCVEDPETGLRLLPLKGAEKAEVVETTQVYTEEETRRAFEETQIDIPGGGSHGGSTMSLWEVMQSDLIPEEQRAQLMADFQAGRVTKERMIIIIIEIIEKTEIIRQQGLASYDYVRRRLTAEDLFEARIISLETYNLLREGTRSLREALEAESAWCYLYGTGSVAGVYLPGSRQTLSIYQALKKGLLSAEVARLLLEAQAATGFLLDPVKGERLTVDEAVRKGLVGPELHDRLLSAERAVTGYRDPYTEQTISLFQAMKKELIPTEEALRLLDAQLATGGIVDPRLGFHLPLEVAYQRGYLNKDTHDQLSEPSEVRSYVDPSTDERLSYTQLLRRCRRDDGTGQLLLPLSDARKLTFRGLRKQITMEELVRSQVMDEATALQLREGLTSIEEVTKNLQKFLEGTSCIAGVFVDATKERLSVYQAMKKGIIRPGTAFELLEAQAATGYVIDPIKGLKLTVEEAVRMGIVGPEFKDKLLSAERAVTGYKDPYSGKLISLFQAMKKGLILKDHGIRLLEAQIATGGIIDPEESHRLPVEVAYKRGLFDEEMNEILTDPSDDTKGFFDPNTEENLTYLQLMERCITDPQTGLCLLPLKEKKRERKTSSKSSVRKRRVVIVDPETGKEMSVYEAYRKGLIDHQTYLELSEQECEWEEITISSSDGVVKSMIIDRRSGRQYDIDDAIAKNLIDRSALDQYRAGTLSITEFADMLSGNAGGFRSRSSSVGSSSSYPISPAVSRTQLASWSDPTEETGPVAGILDTETLEKVSITEAMHRNLVDNITGQRLLEAQACTGGIIDPSTGERFPVTDAVNKGLVDKIMVDRINLAQKAFCGFEDPRTKTKMSAAQALKKGWLYYEAGQRFLEVQYLTGGLIEPDTPGRVPLDEALQRGTVDARTAQKLRDVGAYSKYLTCPKTKLKISYKDALDRSMVEEGTGLRLLEAAAQSTKGYYSPYSVSGSGSTAGSRTGSRTGSRAGSRRGSFDATGSGFSMTFSSSSYSSSGYGRRYASGSSASLGGPESAVA

SEQ ID NO: 37496 - protein, 4515 aa, Homo sapiens
MKIVPDERDRVQKKTFTKWVNKHLIKAQRHISDLYEDLRDGHNLISLLEVLSGDSLPREKGRMRFHKLQNVQIALDYLRHRQVKLVNIRNDDIADGNPKLTLGLIWTIILHFQISDIQVSGQSEDMTAKEKLLLWSQRMVEGYQGLRCDNFTSSWRDGRLFNAIIHRHKPLLIDMNKVYRQTNLENLDQAFSVAERDLGVTRLLDPEDVDVPQPDEKSIITYVSSLYDAMPRVPDVQDGVRANELQLRWQEYRELVLLLLQWMRHHTAAFEERRFPSSFEEIEILWSQFLKFKEMELPAKEADKNRSKGIYQSLEGAVQAGQLKVPPGYHPLDVEKEWGKLHVAILEREKQLRSEFERLECLQRIVTKLQMEAGLCEEQLNQADALLQSDVRLLAAGKVPQRAGEVERDLDKADSMIRLLFNDVQTLKDGRHPQGEQMYRRVYRLHERLVAIRTEYNLRLKAGVAAPATQVAQVTLQSVQRRPELEDSTLRYLQDLLAWVEENQHRVDGAEWGVDLPSVEAQLGSHRGLHQSIEEFRAKIERARSDEGQLSPATRGAYRDCLGRLDLQYAKLLNSSKARLRSLESLHSFVAAATKELMWLNEKEEEEVGFDWSDRNTNMTAKKESYSALMRELELKEKKIKELQNAGDRLLREDHPARPTVESFQAALQTQWSWMLQLCCCIEAHLKENAAYFQFFSDVREAEGQLQKLQEALRRKYSCDRSATVTRLEDLLQDAQDEKEQLNEYKGHLSGLAKRAKAVVQLKPRHPAHPMRGRLPLLAVCDYKQVEVTVHKGDECQLVGPAQPSHWKVLSSSGSEAAVPSVCFLVPPPNQEAQEAVTRLEAQHQALVTLWHQLHVDMKSLLAWQSLRRDVQLIRSWSLATFRTLKPEEQRQALHSLELHYQAFLRDSQDAGGFGPEDRLMAEREYGSCSHHYQQLLQSLEQGAQEESRCQRCISELKDIRLQLEACETRTVHRLRLPLDKEPARECAQRIAEQQKAQAEVEGLGKGVARLSAEAEKVLALPEPSPAAPTLRSELELTLGKLEQVRSLSAIYLEKLKTISLVIRGTQGAEEVLRAHEEQLKEAQAVPATLPELEATKASLKKLRAQAEAQQPTFDALRDELRGAQEVGERLQQRHGERDVEVERWRERVAQLLERWQAVLAQTDVRQRELEQLGRQLRYYRESADPLGAWLQDARRRQEQIQAMPLADSQAVREQLRQEQALLEEIERHGEKVEECQRFAKQYINAIKDYELQLVTYKAQLEPVASPAKKPKVQSGSESVIQEYVDLRTHYSELTTLTSQYIKFISETLRRMEEEERLAEQQRAEERERLAEVEAALEKQRQLAEAHAQAKAQAEREAKELQQRMQEEVVRREEAAVDAQQQKRSIQEELQQLRQSSEAEIQAKARQAEAAERSRLRIEEEIRVVRLQLEATERQRGGAEGELQALRARAEEAEAQKRQAQEEAERLRRQVQDESQRKRQAEVELASRVKAEAEAAREKQRALQALEELRLQAEEAERRLRQAEVERARQVQVALETAQRSAEAELQSKRASFAEKTAQLERSLQEEHVAVAQLREEAERRAQQQAEAERAREEAERELERWQLKANEALRLRLQAEEVAQQKSLAQAEAEKQKEEAEREARRRGKAEEQAVRQRELAEQELEKQRQLAEGTAQQRLAAEQELIRLRAETEQGEQQRQLLEEELARLQREAAAATQKRQELEAELAKVRAEMEVLLASKARAEEESRSTSEKSKQRLEAEAGRFRELAEEAARLRALAEEAKRQRQLAEEDAARQRAEAERVLAEKLAAIGEATRLKTEAEIALKEKEAENERLRRLAEDEAFQRRRLEEQAAQHKADIEERLAQLRKASDSELERQKGLVEDTLRQRRQVEEEILALKASFEKAAAGKAELELELGRIRSNAEDTLRSKEQAELEAARQRQLAAEEERRRREAEERVQKSLAAEEEAARQRKAALEEVERLKAKVEEARRLRERAEQESARQLQLAQEAAQKRLQAEEKAHAFAVQQKEQELQQTLQQEQSVLDQLRGEAEAARRAAEEAEEARVQAEREAAQSRRQVEEAERLKQSAEEQAQARAQAQAAAEKLRKEAEQEAARRAQAEQAALRQKQAADAEMEKHKKFAEQTLRQKAQVEQELTTLRLQLEETDHQKNLLDEELQRLKAEATEAARQRSQVEEELFSVRVQMEELSKLKARIEAENRALILRDKDNTQRFLQEEAEKMKQVAEEAARLSVAAQEAARLRQLAEEDLAQQRALAEKMLKEKMQAVQEATRLKAEAELLQQQKELAQEQARRLQEDKEQMAQQLAEETQGFQRTLEAERQRQLEMSAEAERLKLRVAEMSRAQARAEEDAQRFRKQAEEIGEKLHRTELATQEKVTLVQTLEIQRQQSDHDAERLREAIAELEREKEKLQQEAKLLQLKSEEMQTVQQEQLLQETQALQQSFLSEKDSLLQRERFIEQEKAKLEQLFQDEVAKAQQLREEQQRQQQQMEQERQRLVASMEEARRRQHEAEEGVRRKQEELQQLEQQRRQQEELLAEENQRLREQLQLLEEQHRAALAHSEEVTASQVAATKTLPNGRDALDGPAAEAEPEHSFDGLRRKVSAQRLQEAGILSAEELQRLAQGHTTVDELARREDVRHYLQGRSSIAGLLLKATNEKLSVYAALQRQLLSPGTALILLEAQAASGFLLDPVRNRRLTVNEAVKEGVVGPELHHKLLSAERAVTGYKDPYTGQQISLFQAMQKGLIVREHGIRLLEAQIATGGVIDPVHSHRVPVDVAYRRGYFDEEMNRVLADPSDDTKGFFDPNTHENLTYLQLLERCVEDPETGLCLLPLTDKAAKGGELVYTDSEARDVFEKATVSAPFGKFQGKTVTIWEIINSEYFTAEQRRDLLRQFRTGRITVEKIIKIIITVVEEQEQKGRLCFEGLRSLVPAAELLESRVIDRELYQQLQRGERSVRDVAEVDTVRRALRGANVIAGVWLEEAGQKLSIYNALKKDLLPSDMAVALLEAQAGTGHIIDPATSARLTVDEAVRAGLVGPEFHEKLLSAEKAVTGYRDPYTGQSVSLFQALKKGLIPREQGLRLLDAQLSTGGIVDPSKSHRVPLDVACARGCLDEETSRALSAPRADAKAYSDPSTGEPATYGELQQRCRPDQLTGLSLLPLSEKAARARQEELYSELQARETFEKTPVEVPVGGFKGRTVTVWELISSEYFTAEQRQELLRQFRTGKVTVEKVIKILITIVEEVETLRQERLSFSGLRAPVPASELLASGVLSRAQFEQLKDGKTTVKDLSELGSVRTLLQGSGCLAGIYLEDTKEKVSIYEAMRRGLLRATTAALLLEAQAATGFLVDPVRNQRLYVHEAVKAGVVGPELHEQLLSAEKAVTGYRDPYSGSTISLFQAMQKGLVLRQHGIRLLEAQIATGGIIDPVHSHRVPVDVAYQRGYFSEEMNRVLADPSDDTKGFFDPNTHENLTYRQLLERCVEDPETGLRLLPLKGAEKAEVVETTQVYTEEETRRAFEETQIDIPGGGSHGGSTMSLWEVMQSDLIPEEQRAQLMADFQAGRVTKERMIIIIIEIIEKTEIIRQQGLASYDYVRRRLTAEDLFEARIISLETYNLLREGTRSLREALEAESAWCYLYGTGSVAGVYLPGSRQTLSIYQALKKGLLSAEVARLLLEAQAATGFLLDPVKGERLTVDEAVRKGLVGPELHDRLLSAERAVTGYRDPYTEQTISLFQAMKKELIPTEEALRLLDAQLATGGIVDPRLGFHLPLEVAYQRGYLNKDTHDQLSEPSEVRSYVDPSTDERLSYTQLLRRCRRDDGTGQLLLPLSDARKLTFRGLRKQITMEELVRSQVMDEATALQLREGLTSIEEVTKNLQKFLEGTSCIAGVFVDATKERLSVYQAMKKGIIRPGTAFELLEAQAATGYVIDPIKGLKLTVEEAVRMGIVGPEFKDKLLSAERAVTGYKDPYSGKLISLFQAMKKGLILKDHGIRLLEAQIATGGIIDPEESHRLPVEVAYKRGLFDEEMNEILTDPSDDTKGFFDPNTEENLTYLQLMERCITDPQTGLCLLPLKEKKRERKTSSKSSVRKRRVVIVDPETGKEMSVYEAYRKGLIDHQTYLELSEQECEWEEITISSSDGVVKSMIIDRRSGRQYDIDDAIAKNLIDRSALDQYRAGTLSITEFADMLSGNAGGFRSRSSSVGSSSSYPISPAVSRTQLASWSDPTEETGPVAGILDTETLEKVSITEAMHRNLVDNITGQRLLEAQACTGGIIDPSTGERFPVTDAVNKGLVDKIMVDRINLAQKAFCGFEDPRTKTKMSAAQALKKGWLYYEAGQRFLEVQYLTGGLIEPDTPGRVPLDEALQRGTVDARTAQKLRDVGAYSKYLTCPKTKLKISYKDALDRSMVEEGTGLRLLEAAAQSTKGYYSPYSVSGSGSTAGSRTGSRTGSRAGSRRGSFDATGSGFSMTFSSSSYSSSGYGRRYASGSSASLGGPESAVA

SEQ ID NO: 37497 - protein, 4525 aa, Homo sapiens
MDPSRAIQNEISSLKDERDRVQKKTFTKWVNKHLIKAQRHISDLYEDLRDGHNLISLLEVLSGDSLPREKGRMRFHKLQNVQIALDYLRHRQVKLVNIRNDDIADGNPKLTLGLIWTIILHFQISDIQVSGQSEDMTAKEKLLLWSQRMVEGYQGLRCDNFTSSWRDGRLFNAIIHRHKPLLIDMNKVYRQTNLENLDQAFSVAERDLGVTRLLDPEDVDVPQPDEKSIITYVSSLYDAMPRVPDVQDGVRANELQLRWQEYRELVLLLLQWMRHHTAAFEERRFPSSFEEIEILWSQFLKFKEMELPAKEADKNRSKGIYQSLEGAVQAGQLKVPPGYHPLDVEKEWGKLHVAILEREKQLRSEFERLECLQRIVTKLQMEAGLCEEQLNQADALLQSDVRLLAAGKVPQRAGEVERDLDKADSMIRLLFNDVQTLKDGRHPQGEQMYRRVYRLHERLVAIRTEYNLRLKAGVAAPATQVAQVTLQSVQRRPELEDSTLRYLQDLLAWVEENQHRVDGAEWGVDLPSVEAQLGSHRGLHQSIEEFRAKIERARSDEGQLSPATRGAYRDCLGRLDLQYAKLLNSSKARLRSLESLHSFVAAATKELMWLNEKEEEEVGFDWSDRNTNMTAKKESYSALMRELELKEKKIKELQNAGDRLLREDHPARPTVESFQAALQTQWSWMLQLCCCIEAHLKENAAYFQFFSDVREAEGQLQKLQEALRRKYSCDRSATVTRLEDLLQDAQDEKEQLNEYKGHLSGLAKRAKAVVQLKPRHPAHPMRGRLPLLAVCDYKQVEVTVHKGDECQLVGPAQPSHWKVLSSSGSEAAVPSVCFLVPPPNQEAQEAVTRLEAQHQALVTLWHQLHVDMKSLLAWQSLRRDVQLIRSWSLATFRTLKPEEQRQALHSLELHYQAFLRDSQDAGGFGPEDRLMAEREYGSCSHHYQQLLQSLEQGAQEESRCQRCISELKDIRLQLEACETRTVHRLRLPLDKEPARECAQRIAEQQKAQAEVEGLGKGVARLSAEAEKVLALPEPSPAAPTLRSELELTLGKLEQVRSLSAIYLEKLKTISLVIRGTQGAEEVLRAHEEQLKEAQAVPATLPELEATKASLKKLRAQAEAQQPTFDALRDELRGAQEVGERLQQRHGERDVEVERWRERVAQLLERWQAVLAQTDVRQRELEQLGRQLRYYRESADPLGAWLQDARRRQEQIQAMPLADSQAVREQLRQEQALLEEIERHGEKVEECQRFAKQYINAIKDYELQLVTYKAQLEPVASPAKKPKVQSGSESVIQEYVDLRTHYSELTTLTSQYIKFISETLRRMEEEERLAEQQRAEERERLAEVEAALEKQRQLAEAHAQAKAQAEREAKELQQRMQEEVVRREEAAVDAQQQKRSIQEELQQLRQSSEAEIQAKARQAEAAERSRLRIEEEIRVVRLQLEATERQRGGAEGELQALRARAEEAEAQKRQAQEEAERLRRQVQDESQRKRQAEVELASRVKAEAEAAREKQRALQALEELRLQAEEAERRLRQAEVERARQVQVALETAQRSAEAELQSKRASFAEKTAQLERSLQEEHVAVAQLREEAERRAQQQAEAERAREEAERELERWQLKANEALRLRLQAEEVAQQKSLAQAEAEKQKEEAEREARRRGKAEEQAVRQRELAEQELEKQRQLAEGTAQQRLAAEQELIRLRAETEQGEQQRQLLEEELARLQREAAAATQKRQELEAELAKVRAEMEVLLASKARAEEESRSTSEKSKQRLEAEAGRFRELAEEAARLRALAEEAKRQRQLAEEDAARQRAEAERVLAEKLAAIGEATRLKTEAEIALKEKEAENERLRRLAEDEAFQRRRLEEQAAQHKADIEERLAQLRKASDSELERQKGLVEDTLRQRRQVEEEILALKASFEKAAAGKAELELELGRIRSNAEDTLRSKEQAELEAARQRQLAAEEERRRREAEERVQKSLAAEEEAARQRKAALEEVERLKAKVEEARRLRERAEQESARQLQLAQEAAQKRLQAEEKAHAFAVQQKEQELQQTLQQEQSVLDQLRGEAEAARRAAEEAEEARVQAEREAAQSRRQVEEAERLKQSAEEQAQARAQAQAAAEKLRKEAEQEAARRAQAEQAALRQKQAADAEMEKHKKFAEQTLRQKAQVEQELTTLRLQLEETDHQKNLLDEELQRLKAEATEAARQRSQVEEELFSVRVQMEELSKLKARIEAENRALILRDKDNTQRFLQEEAEKMKQVAEEAARLSVAAQEAARLRQLAEEDLAQQRALAEKMLKEKMQAVQEATRLKAEAELLQQQKELAQEQARRLQEDKEQMAQQLAEETQGFQRTLEAERQRQLEMSAEAERLKLRVAEMSRAQARAEEDAQRFRKQAEEIGEKLHRTELATQEKVTLVQTLEIQRQQSDHDAERLREAIAELEREKEKLQQEAKLLQLKSEEMQTVQQEQLLQETQALQQSFLSEKDSLLQRERFIEQEKAKLEQLFQDEVAKAQQLREEQQRQQQQMEQERQRLVASMEEARRRQHEAEEGVRRKQEELQQLEQQRRQQEELLAEENQRLREQLQLLEEQHRAALAHSEEVTASQVAATKTLPNGRDALDGPAAEAEPEHSFDGLRRKVSAQRLQEAGILSAEELQRLAQGHTTVDELARREDVRHYLQGRSSIAGLLLKATNEKLSVYAALQRQLLSPGTALILLEAQAASGFLLDPVRNRRLTVNEAVKEGVVGPELHHKLLSAERAVTGYKDPYTGQQISLFQAMQKGLIVREHGIRLLEAQIATGGVIDPVHSHRVPVDVAYRRGYFDEEMNRVLADPSDDTKGFFDPNTHENLTYLQLLERCVEDPETGLCLLPLTDKAAKGGELVYTDSEARDVFEKATVSAPFGKFQGKTVTIWEIINSEYFTAEQRRDLLRQFRTGRITVEKIIKIIITVVEEQEQKGRLCFEGLRSLVPAAELLESRVIDRELYQQLQRGERSVRDVAEVDTVRRALRGANVIAGVWLEEAGQKLSIYNALKKDLLPSDMAVALLEAQAGTGHIIDPATSARLTVDEAVRAGLVGPEFHEKLLSAEKAVTGYRDPYTGQSVSLFQALKKGLIPREQGLRLLDAQLSTGGIVDPSKSHRVPLDVACARGCLDEETSRALSAPRADAKAYSDPSTGEPATYGELQQRCRPDQLTGLSLLPLSEKAARARQEELYSELQARETFEKTPVEVPVGGFKGRTVTVWELISSEYFTAEQRQELLRQFRTGKVTVEKVIKILITIVEEVETLRQERLSFSGLRAPVPASELLASGVLSRAQFEQLKDGKTTVKDLSELGSVRTLLQGSGCLAGIYLEDTKEKVSIYEAMRRGLLRATTAALLLEAQAATGFLVDPVRNQRLYVHEAVKAGVVGPELHEQLLSAEKAVTGYRDPYSGSTISLFQAMQKGLVLRQHGIRLLEAQIATGGIIDPVHSHRVPVDVAYQRGYFSEEMNRVLADPSDDTKGFFDPNTHENLTYRQLLERCVEDPETGLRLLPLKGAEKAEVVETTQVYTEEETRRAFEETQIDIPGGGSHGGSTMSLWEVMQSDLIPEEQRAQLMADFQAGRVTKERMIIIIIEIIEKTEIIRQQGLASYDYVRRRLTAEDLFEARIISLETYNLLREGTRSLREALEAESAWCYLYGTGSVAGVYLPGSRQTLSIYQALKKGLLSAEVARLLLEAQAATGFLLDPVKGERLTVDEAVRKGLVGPELHDRLLSAERAVTGYRDPYTEQTISLFQAMKKELIPTEEALRLLDAQLATGGIVDPRLGFHLPLEVAYQRGYLNKDTHDQLSEPSEVRSYVDPSTDERLSYTQLLRRCRRDDGTGQLLLPLSDARKLTFRGLRKQITMEELVRSQVMDEATALQLREGLTSIEEVTKNLQKFLEGTSCIAGVFVDATKERLSVYQAMKKGIIRPGTAFELLEAQAATGYVIDPIKGLKLTVEEAVRMGIVGPEFKDKLLSAERAVTGYKDPYSGKLISLFQAMKKGLILKDHGIRLLEAQIATGGIIDPEESHRLPVEVAYKRGLFDEEMNEILTDPSDDTKGFFDPNTEENLTYLQLMERCITDPQTGLCLLPLKEKKRERKTSSKSSVRKRRVVIVDPETGKEMSVYEAYRKGLIDHQTYLELSEQECEWEEITISSSDGVVKSMIIDRRSGRQYDIDDAIAKNLIDRSALDQYRAGTLSITEFADMLSGNAGGFRSRSSSVGSSSSYPISPAVSRTQLASWSDPTEETGPVAGILDTETLEKVSITEAMHRNLVDNITGQRLLEAQACTGGIIDPSTGERFPVTDAVNKGLVDKIMVDRINLAQKAFCGFEDPRTKTKMSAAQALKKGWLYYEAGQRFLEVQYLTGGLIEPDTPGRVPLDEALQRGTVDARTAQKLRDVGAYSKYLTCPKTKLKISYKDALDRSMVEEGTGLRLLEAAAQSTKGYYSPYSVSGSGSTAGSRTGSRTGSRAGSRRGSFDATGSGFSMTFSSSSYSSSGYGRRYASGSSASLGGPESAVA

SEQ ID NO: 37498 - protein, 4533 aa, Homo sapiens
MAGPLPDEQDFIQAYEEVREKYKDERDRVQKKTFTKWVNKHLIKAQRHISDLYEDLRDGHNLISLLEVLSGDSLPREKGRMRFHKLQNVQIALDYLRHRQVKLVNIRNDDIADGNPKLTLGLIWTIILHFQISDIQVSGQSEDMTAKEKLLLWSQRMVEGYQGLRCDNFTSSWRDGRLFNAIIHRHKPLLIDMNKVYRQTNLENLDQAFSVAERDLGVTRLLDPEDVDVPQPDEKSIITYVSSLYDAMPRVPDVQDGVRANELQLRWQEYRELVLLLLQWMRHHTAAFEERRFPSSFEEIEILWSQFLKFKEMELPAKEADKNRSKGIYQSLEGAVQAGQLKVPPGYHPLDVEKEWGKLHVAILEREKQLRSEFERLECLQRIVTKLQMEAGLCEEQLNQADALLQSDVRLLAAGKVPQRAGEVERDLDKADSMIRLLFNDVQTLKDGRHPQGEQMYRRVYRLHERLVAIRTEYNLRLKAGVAAPATQVAQVTLQSVQRRPELEDSTLRYLQDLLAWVEENQHRVDGAEWGVDLPSVEAQLGSHRGLHQSIEEFRAKIERARSDEGQLSPATRGAYRDCLGRLDLQYAKLLNSSKARLRSLESLHSFVAAATKELMWLNEKEEEEVGFDWSDRNTNMTAKKESYSALMRELELKEKKIKELQNAGDRLLREDHPARPTVESFQAALQTQWSWMLQLCCCIEAHLKENAAYFQFFSDVREAEGQLQKLQEALRRKYSCDRSATVTRLEDLLQDAQDEKEQLNEYKGHLSGLAKRAKAVVQLKPRHPAHPMRGRLPLLAVCDYKQVEVTVHKGDECQLVGPAQPSHWKVLSSSGSEAAVPSVCFLVPPPNQEAQEAVTRLEAQHQALVTLWHQLHVDMKSLLAWQSLRRDVQLIRSWSLATFRTLKPEEQRQALHSLELHYQAFLRDSQDAGGFGPEDRLMAEREYGSCSHHYQQLLQSLEQGAQEESRCQRCISELKDIRLQLEACETRTVHRLRLPLDKEPARECAQRIAEQQKAQAEVEGLGKGVARLSAEAEKVLALPEPSPAAPTLRSELELTLGKLEQVRSLSAIYLEKLKTISLVIRGTQGAEEVLRAHEEQLKEAQAVPATLPELEATKASLKKLRAQAEAQQPTFDALRDELRGAQEVGERLQQRHGERDVEVERWRERVAQLLERWQAVLAQTDVRQRELEQLGRQLRYYRESADPLGAWLQDARRRQEQIQAMPLADSQAVREQLRQEQALLEEIERHGEKVEECQRFAKQYINAIKDYELQLVTYKAQLEPVASPAKKPKVQSGSESVIQEYVDLRTHYSELTTLTSQYIKFISETLRRMEEEERLAEQQRAEERERLAEVEAALEKQRQLAEAHAQAKAQAEREAKELQQRMQEEVVRREEAAVDAQQQKRSIQEELQQLRQSSEAEIQAKARQAEAAERSRLRIEEEIRVVRLQLEATERQRGGAEGELQALRARAEEAEAQKRQAQEEAERLRRQVQDESQRKRQAEVELASRVKAEAEAAREKQRALQALEELRLQAEEAERRLRQAEVERARQVQVALETAQRSAEAELQSKRASFAEKTAQLERSLQEEHVAVAQLREEAERRAQQQAEAERAREEAERELERWQLKANEALRLRLQAEEVAQQKSLAQAEAEKQKEEAEREARRRGKAEEQAVRQRELAEQELEKQRQLAEGTAQQRLAAEQELIRLRAETEQGEQQRQLLEEELARLQREAAAATQKRQELEAELAKVRAEMEVLLASKARAEEESRSTSEKSKQRLEAEAGRFRELAEEAARLRALAEEAKRQRQLAEEDAARQRAEAERVLAEKLAAIGEATRLKTEAEIALKEKEAENERLRRLAEDEAFQRRRLEEQAAQHKADIEERLAQLRKASDSELERQKGLVEDTLRQRRQVEEEILALKASFEKAAAGKAELELELGRIRSNAEDTLRSKEQAELEAARQRQLAAEEERRRREAEERVQKSLAAEEEAARQRKAALEEVERLKAKVEEARRLRERAEQESARQLQLAQEAAQKRLQAEEKAHAFAVQQKEQELQQTLQQEQSVLDQLRGEAEAARRAAEEAEEARVQAEREAAQSRRQVEEAERLKQSAEEQAQARAQAQAAAEKLRKEAEQEAARRAQAEQAALRQKQAADAEMEKHKKFAEQTLRQKAQVEQELTTLRLQLEETDHQKNLLDEELQRLKAEATEAARQRSQVEEELFSVRVQMEELSKLKARIEAENRALILRDKDNTQRFLQEEAEKMKQVAEEAARLSVAAQEAARLRQLAEEDLAQQRALAEKMLKEKMQAVQEATRLKAEAELLQQQKELAQEQARRLQEDKEQMAQQLAEETQGFQRTLEAERQRQLEMSAEAERLKLRVAEMSRAQARAEEDAQRFRKQAEEIGEKLHRTELATQEKVTLVQTLEIQRQQSDHDAERLREAIAELEREKEKLQQEAKLLQLKSEEMQTVQQEQLLQETQALQQSFLSEKDSLLQRERFIEQEKAKLEQLFQDEVAKAQQLREEQQRQQQQMEQERQRLVASMEEARRRQHEAEEGVRRKQEELQQLEQQRRQQEELLAEENQRLREQLQLLEEQHRAALAHSEEVTASQVAATKTLPNGRDALDGPAAEAEPEHSFDGLRRKVSAQRLQEAGILSAEELQRLAQGHTTVDELARREDVRHYLQGRSSIAGLLLKATNEKLSVYAALQRQLLSPGTALILLEAQAASGFLLDPVRNRRLTVNEAVKEGVVGPELHHKLLSAERAVTGYKDPYTGQQISLFQAMQKGLIVREHGIRLLEAQIATGGVIDPVHSHRVPVDVAYRRGYFDEEMNRVLADPSDDTKGFFDPNTHENLTYLQLLERCVEDPETGLCLLPLTDKAAKGGELVYTDSEARDVFEKATVSAPFGKFQGKTVTIWEIINSEYFTAEQRRDLLRQFRTGRITVEKIIKIIITVVEEQEQKGRLCFEGLRSLVPAAELLESRVIDRELYQQLQRGERSVRDVAEVDTVRRALRGANVIAGVWLEEAGQKLSIYNALKKDLLPSDMAVALLEAQAGTGHIIDPATSARLTVDEAVRAGLVGPEFHEKLLSAEKAVTGYRDPYTGQSVSLFQALKKGLIPREQGLRLLDAQLSTGGIVDPSKSHRVPLDVACARGCLDEETSRALSAPRADAKAYSDPSTGEPATYGELQQRCRPDQLTGLSLLPLSEKAARARQEELYSELQARETFEKTPVEVPVGGFKGRTVTVWELISSEYFTAEQRQELLRQFRTGKVTVEKVIKILITIVEEVETLRQERLSFSGLRAPVPASELLASGVLSRAQFEQLKDGKTTVKDLSELGSVRTLLQGSGCLAGIYLEDTKEKVSIYEAMRRGLLRATTAALLLEAQAATGFLVDPVRNQRLYVHEAVKAGVVGPELHEQLLSAEKAVTGYRDPYSGSTISLFQAMQKGLVLRQHGIRLLEAQIATGGIIDPVHSHRVPVDVAYQRGYFSEEMNRVLADPSDDTKGFFDPNTHENLTYRQLLERCVEDPETGLRLLPLKGAEKAEVVETTQVYTEEETRRAFEETQIDIPGGGSHGGSTMSLWEVMQSDLIPEEQRAQLMADFQAGRVTKERMIIIIIEIIEKTEIIRQQGLASYDYVRRRLTAEDLFEARIISLETYNLLREGTRSLREALEAESAWCYLYGTGSVAGVYLPGSRQTLSIYQALKKGLLSAEVARLLLEAQAATGFLLDPVKGERLTVDEAVRKGLVGPELHDRLLSAERAVTGYRDPYTEQTISLFQAMKKELIPTEEALRLLDAQLATGGIVDPRLGFHLPLEVAYQRGYLNKDTHDQLSEPSEVRSYVDPSTDERLSYTQLLRRCRRDDGTGQLLLPLSDARKLTFRGLRKQITMEELVRSQVMDEATALQLREGLTSIEEVTKNLQKFLEGTSCIAGVFVDATKERLSVYQAMKKGIIRPGTAFELLEAQAATGYVIDPIKGLKLTVEEAVRMGIVGPEFKDKLLSAERAVTGYKDPYSGKLISLFQAMKKGLILKDHGIRLLEAQIATGGIIDPEESHRLPVEVAYKRGLFDEEMNEILTDPSDDTKGFFDPNTEENLTYLQLMERCITDPQTGLCLLPLKEKKRERKTSSKSSVRKRRVVIVDPETGKEMSVYEAYRKGLIDHQTYLELSEQECEWEEITISSSDGVVKSMIIDRRSGRQYDIDDAIAKNLIDRSALDQYRAGTLSITEFADMLSGNAGGFRSRSSSVGSSSSYPISPAVSRTQLASWSDPTEETGPVAGILDTETLEKVSITEAMHRNLVDNITGQRLLEAQACTGGIIDPSTGERFPVTDAVNKGLVDKIMVDRINLAQKAFCGFEDPRTKTKMSAAQALKKGWLYYEAGQRFLEVQYLTGGLIEPDTPGRVPLDEALQRGTVDARTAQKLRDVGAYSKYLTCPKTKLKISYKDALDRSMVEEGTGLRLLEAAAQSTKGYYSPYSVSGSGSTAGSRTGSRTGSRAGSRRGSFDATGSGFSMTFSSSSYSSSGYGRRYASGSSASLGGPESAVA

SEQ ID NO: 37499 - protein, 1216 aa, Homo sapiens
MAGAQPGVHALQLKPVCVSDSLKKGTKFVKWDDDSTIVTPIILRTDPQGFFFYWTDQNKETELLDLSLVKDARCGRHAKAPKDPKLRELLDVGNIGRLEQRMITVVYGPDLVNISHLNLVAFQEEVAKEWTNEVFSLATNLLAQNMSRDAFLEKAYTKLKLQVTPEGRIPLKNIYRLFSADRKRVETALEACSLPSSRNDSIPQEDFTPEVYRVFLNNLCPRPEIDNIFSEFGAKSKPYLTVDQMMDFINLKQRDPRLNEILYPPLKQEQVQVLIEKYEPNNSLARKGQISVDGFMRYLSGEENGVVSPEKLDLNEDMSQPLSHYFINSSHNTYLTAGQLAGNSSVEMYRQVLLSGCRCVELDCWKGRTAEEEPVITHGFTMTTEISFKEVIEAIAECAFKTSPFPILLSFENHVDSPKQQAKMAEYCRLIFGDALLMEPLEKYPLESGVPLPSPMDLMYKILVKNKKKSHKSSEGSGKKKLSEQASNTYSDSSSMFEPSSPGAGEADTESDDDDDDDDCKKSSMDEGTAGSEAMATEEMSNLVNYIQPVKFESFEISKKRNKSFEMSSFVETKGLEQLTKSPVEFVEYNKMQLSRIYPKGTRVDSSNYMPQLFWNAGCQMVALNFQTMDLAMQINMGMYEYNGKSGYRLKPEFMRRPDKHFDPFTEGIVDGIVANTLSVKIISGQFLSDKKVGTYVEVDMFGLPVDTRRKAFKTKTSQGNAVNPVWEEEPIVFKKVVLPTLACLRIAVYEEGGKFIGHRILPVQAIRPGYHYICLRNERNQPLTLPAVFVYIEVKDYVPDTYADVIEALSNPIRYVNLMEQRAKQLAALTLEDEEEVKKEADPGETPSEAPSEARTTPAENGVNHTTTLTPKPPSQALHSQPAPGSVKAPAKTEDLIQSVLTEVEAQTIEELKQQKSFVKLQKKHYKEMKDLVKRHHKKTTDLIKEHTTKYNEIQNDYLRRRAALEKSAKKDSKKKSEPSSPDHGSSTIEQDLAALDAEMTQKLIDLKDKQQQQLLNLRQEQYYSEKYQKREHIKLLIQKLTDVAEECQNNQLKKLKEICEKEKKELKKKMDKKRQEKITEAKSKDKSQMEEEKTEMIRSYIQEVVQYIKRLEEAQSKRQEKLVEKHKEIRQQILDEKPKLQVELEQEYQDKFKRLPLEILEFVQEAMKGKISEDSNHGSAPLSLSSDPGKVNHKTPSSEELGGDIPGKEFDTPL

SEQ ID NO: 37500 - protein, 1173 aa, Homo sapiens
MAGAQPGVHALQLKPVCVSDSLKKGTKFVKWDDDSTIVTPIILRTDPQGFFFYWTDQNKETELLDLSLVKDARCGRHAKAPKDPKLRELLDVGNIGRLEQRMITVVYGPDLVNISHLNLVAFQEEVAKEWTNEVFSLATNLLAQNMSRDAFLEKAYTKLKLQVTPEGRIPLKNIYRLFSADRKRVETALEACSLPSSRNDSIPQEDFTPEVYRVFLNNLCPRPEIDNIFSEFGAKSKPYLTVDQMMDFINLKQRDPRLNEILYPPLKQEQVQVLIEKYEPNNSLARKGQISVDGFMRYLSGEENGVVSPEKLDLNEDMSQPLSHYFINSSHNTYLTAGQLAGNSSVEMYRQVLLSGCRCVELDCWKGRTAEEEPVITHGFTMTTEISFKEVIEAIAECAFKTSPFPILLSFENHVDSPKQQAKMAEYCRLIFGDALLMEPLEKYPLESGVPLPSPMDLMYKILVKNKKKSHKSSEGSGKKKLSEQASNTYSDSSSMFEPSSPGAGEADTESDDDDDDDDCKKSSMDEGTAGSEAMATEEMSNLVNYIQPVKFESFEISKKRNKSFEMSSFVETKGLEQLTKSPVEFVEYNKMQLSRIYPKGTRVDSSNYMPQLFWNAGCQMVALNFQTMDLAMQINMGMYEYNGKSGYRLKPEFMRRPDKHFDPFTEGIVDGIVANTLSVKIISGQFLSDKKVGTYVEVDMFGLPVDTRRKAFKTKTSQGNAVNPVWEEEPIVFKKVVLPTLACLRIAVYEEGGKFIGHRILPVQAIRPGYHYICLRNERNQPLTLPAVFVYIEVKDYVPDTYADVIEALSNPIRYVNLMEQRAKQLAALTLEDEEEVKKEADPGETPSEAPSEARTTPAENGVNHTTTLTPKPPSQALHSQPAPGSVKAPAKTEDLIQSVLTEVEAQTIEELKQQKSFVKLQKKHYKEMKDLVKRHHKKTTDLIKEHTTKYNEIQNDYLRRRAALEKSAKKDSKKKSEPSSPDHGSSTIEQDLAALDAEMTQKLIDLKDKQQQQLLNLRQEQYYSEKYQKREHIKLLIQKLTDVAEECQNNQLKKLKEICEKEKKELKKKMDKKRQEKITEAKSKDKSQMEEEKTEMIRSYIQEVVQYIKRLEEAQSKRQEKLVEKHKEIRQQILDEKPKGEGSSSFLSETCHEDPSVSPNFTPPNPQALKW

SEQ ID NO: 37501 - protein, 634 aa, Homo sapiens
MSLVPATNYIYTPLNQLKGGTIVNVYGVVKFFKPPYLSKGTDYCSVVTIVDQTNVKLTCLLFSGNYEALPIIYKNGDIVRFHRLKIQVYKKETQGITSSGFASLTFEGTLGAPIIPRTSSKYFNFTTEDHKMVEALRVWASTHMSPSWTLLKLCDVQPMQYFDLTCQLLGKAEVDGASFLLKVWDGTRTPFPSWRVLIQDLVLEGDLSHIHRLQNLTIDILVYDNHVHVARSLKVGSFLRIYSLHTKLQSMNSENQTMLSLEFHLHGGTSYGRGIRVLPESNSDVDQLKKDLESANLTANQHSDVICQSEPDDSFPSSGSVSLYEVERCQQLSATILTDHQYLERTPLCAILKQKAPQQYRIRAKLRSYKPRRLFQSVKLHCPKCHLLQEVPHEGDLDIIFQDGATKTPDVKLQNTSLYDSKIWTTKNQKGRKVAVHFVKNNGILPLSNECLLLIEGGTLSEICKLSNKFNSVIPVRSGHEDLELLDLSAPFLIQGTIHHYGCKQCSSLRSIQNLNSLVDKTSWIPSSVAEALGIVPLQYVFVMTFTLDDGTGVLEAYLMDSDKFFQIPASEVLMDDDLQKSVDMIMDMFCPPGIKIDAYPWLECFIKSYNVTNGTDNQICYQIFDTTVAEDVI

SEQ ID NO: 37502 - protein, 538 aa, Homo sapiens
MSLVPATNYIYTPLNQLKGGTIVNVYGVVKFFKPPYLSKGTDYCSVVTIVDQTNVKLTCLLFSGNYEALPIIYKNGDIVRFHRLKIQVYKKETQGITSSGFASLTFEGTLGAPIIPRTSSKYFNFTTEDHKMVEALRVWASTHMSPSWTLLKLCDVQPMQYFDLTCQLLGKAEVDGASFLLKVWDGTRTPFPSWRVLIQDLVLEGDLSHIHRLQNLTIDILVYDNHVHVARSLKVGSFLRIYSLHTKLQSMNSENQTMLSLEFHLHGGTSYGRGIRVLPESNSDVDQLKKDLESANLTANQHSDVICQSEPDDSFPSSGSVSLYEVERCQQLSATILTDHQYLERTPLCAILKQKAPQQYRIRAKLRSYKPRRLFQSVKLHCPKCHLLQEVPHEGDLDIIFQDGATKTPDVKLQNTSLYDSKIWTTKNQKGRKVAVHFVKNNGILPLSNECLLLIEGGTLSEICKLSNKFNSVIPVRSGHEDLELLDLSAPFLIQGTIHHYGCKQCSSLRSIQNLNSLVDKTSWIPSSVAEDVNSVLV

SEQ ID NO: 37503 - protein, 629 aa, Homo sapiens
MENSTTTISREELEELQEAFNKIDIDNSGYVSDYELQDLFKEASLPLPGYKVREIVEKILSVADSNKDGKISFEEFVSLMQELKSKDISKTFRKIINKREGITAIGGTSTISSEGTQHSYSEEEKVAFVNWINKALENDPDCKHLIPMNPNDDSLFKSLADGILLCKMINLSEPDTIDERAINKKKLTPFTISENLNLALNSASAIGCTVVNIGASDLKEGKPHLVLGLLWQIIKVGLFADIEISRNEALIALLNEGEELEELMKLSPEELLLRWVNYHLTNAGWHTISNFSQDIKDSRAYFHLLNQIAPKGGEDGPAIAIDLSGINETNDLKRAGLMLQEADKLGCKQFVTPADVVSGNPKLNLAFVANLFNTYPCLHKPNNNDIDMNLLEGESKEERTFRNWMNSLGVNPYINHLYSDLADALVIFQLYEMIRVPVNWSHVNKPPYPALGGNMKKIENCNYAVELGKNKAKFSLVGIAGQDLNEGNSTLTLALVWQLMRRYTLNVLSDLGEGEKVNDEIIIKWVNQTLKSANKKTSISSFKDKSISTSLPVLDLIDAIAPNAVRQEMIRRENLSDEDKLNNAKYAISVARKIGARIYALPDDLVEVKPKMVMTVFACLMGKGLNRIK

SEQ ID NO: 37504 - protein, 797 aa, Homo sapiens
MQDGNFLLSALQPEAGVCSLALPSDLQLDRRGAEGPEAERLRAARVQEQVRARLLQLGQQPRHNGAAEPEPEAETARGTSRGQYHTLQAGFSSRSQGLSGDKTSGFRPIAKPAYSPASWSSRSAVDLSCSRRLSSAHNGGSAFGAAGYGGAQPTPPMPTRPVSFHERGGVGSRADYDTLSLRSLRLGPGGLDDRYSLVSEQLEPAATSTYRAFAYERQASSSSSRAGGLDWPEATEVSPSRTIRAPAVRTLQRFQSSHRSRGVGGAVPGAVLEPVARAPSVRSLSLSLADSGHLPDVHGFNSYGSHRTLQRLSSGFDDIDLPSAVKYLMASDPNLQVLGAAYIQHKCYSDAAAKKQARSLQAVPRLVKLFNHANQEVQRHATGAMRNLIYDNADNKLALVEENGIFELLRTLREQDDELRKNVTGILWNLSSSDHLKDRLARDTLEQLTDLVLSPLSGAGGPPLIQQNASEAEIFYNATGFLRNLSSASQATRQKMRECHGLVDALVTSINHALDAGKCEDKSVENAVCVLRNLSYRLYDEMPPSALQRLEGRGRRDLAGAPPGEVVGCFTPQSRRLRELPLAADALTFAEVSKDPKGLEWLWSPQIVGLYNRLLQRCELNRHTTEAAAGALQNITAGDRRWAGVLSRLALEQERILNPLLDRVRTADHHQLRSLTGLIRNLSRNARNKDEMSTKVVSHLIEKLPGSVGEKSPPAEVLVNIIAVLNNLVVASPIAARDLLYFDGLRKLIFIKKKRDSPDSEKSSRAASSLLANLWQYNKLHRDFRAKGYRKEDFLGP

SEQ ID NO: 37505 - protein, 812 aa, Homo sapiens
MESWTPRPSAVASGMSWEAGGIRTTSRPEAGVCSLALPSDLQLDRRGAEGPEAERLRAARVQEQVRARLLQLGQQPRHNGAAEPEPEAETARGTSRGQYHTLQAGFSSRSQGLSGDKTSGFRPIAKPAYSPASWSSRSAVDLSCSRRLSSAHNGGSAFGAAGYGGAQPTPPMPTRPVSFHERGGVGSRADYDTLSLRSLRLGPGGLDDRYSLVSEQLEPAATSTYRAFAYERQASSSSSRAGGLDWPEATEVSPSRTIRAPAVRTLQRFQSSHRSRGVGGAVPGAVLEPVARAPSVRSLSLSLADSGHLPDVHGFNSYGSHRTLQRLSSGFDDIDLPSAVKYLMASDPNLQVLGAAYIQHKCYSDAAAKKQARSLQAVPRLVKLFNHANQEVQRHATGAMRNLIYDNADNKLALVEENGIFELLRTLREQDDELRKNVTGILWNLSSSDHLKDRLARDTLEQLTDLVLSPLSGAGGPPLIQQNASEAEIFYNATGFLRNLSSASQATRQKMRECHGLVDALVTSINHALDAGKCEDKSVENAVCVLRNLSYRLYDEMPPSALQRLEGRGRRDLAGAPPGEVVGCFTPQSRRLRELPLAADALTFAEVSKDPKGLEWLWSPQIVGLYNRLLQRCELNRHTTEAAAGALQNITAGDRRWAGVLSRLALEQERILNPLLDRVRTADHHQLRSLTGLIRNLSRNARNKDEMSTKVVSHLIEKLPGSVGEKSPPAEVLVNIIAVLNNLVVASPIAARDLLYFDGLRKLIFIKKKRDSPDSEKSSRAASSLLANLWQYNKLHRDFRAKGYRKEDFLGP

SEQ ID NO: 37506 - protein, 323 aa, Homo sapiens
MGGQVSASNSFSRLHCRNANEDWMSALCPRLWDVPLHHLSIPGSHDTMTYCLNKKSPISHEESRLLQLLNKALPCITRPVVLKWSVTQALDVTEQLDAGVRYLDLRIAHMLEGSEKNLHFVHMVYTTALVEDTLTEISEWLERHPREVVILACRNFEGLSEDLHEYLVACIKNIFGDMLCPRGEVPTLRQLWSRGQQVIVSYEDESSLRRHHELWPGVPYWWGNRVKTEALIRYLETMKSCGRPGGLFVAGINLTENLQYVLAHPSESLEKMTLPNLPRLSAWVREQCPGPGSRCTNIIAGDFIGADGFVSDVIALNQKLLWC

SEQ ID NO: 37507 - protein, 296 aa, Homo sapiens
MARCERLRGAALRDVLGRAQGVLFDCDGVLWNGERAVPGAPELLERLARAGKAALFVSNNSRRARPELALRFARLGFGGLRAEQLFSSALCAARLLRQRLPGPPDAPGAVFVLGGEGLRAELRAAGLRLAGDPSAGDGAAPRVRAVLVGYDEHFSFAKLREACAHLRDPECLLVATDRDPWHPLSDGSRTPGTGSLAAAVETASGRQALVVGKPSPYMFECITENFSIDPARTLMVGDRLETDILFGHRCGMTTVLTLTGVSRLEEAQAYLAAGQHDLVPHYYVESIADLTEGLED

SEQ ID NO: 37508 - protein, 1074 aa, Homo sapiens
MSLKNEPRVNTSALQKIAADMSNIIENLDTRELHFEGEEVDYDVSPSDPKIQEVYIPFSAIYNTQGFKEPNIQTYLSGCPIKAQVLEVERFTSTTRVPSINLYTIELTHGEFKWQVKRKFKHFQEFHRELLKYKAFIRIPIPTRRHTFRRQNVREEPREMPSLPRSSENMIREEQFLGRRKQLEDYLTKILKMPMYRNYHATTEFLDISQLSFIHDLGPKGIEGMIMKRSGGHRIPGLNCCGQGRACYRWSKRWLIVKDSFLLYMKPDSGAIAFVLLVDKEFKIKVGKKETETKYGIRIDNLSRTLILKCNSYRHARWWGGAIEEFIQKHGTNFLKDHRFGSYAAIQENALAKWYVNAKGYFEDVANAMEEANEEIFITDWWLSPEIFLKRPVVEGNRWRLDCILKRKAQQGVRIFIMLYKEVELALGINSEYTKRTLMRLHPNIKVMRHPDHVSSTVYLWAHHEKLVIIDQSVAFVGGIDLAYGRWDDNEHRLTDVGSVKRVTSGPSLGSLPPAAMESMESLRLKDKNEPVQNLPIQKSIDDVDSKLKGIGKPRKFSKFSLYKQLHRHHLHDADSISSIDSTSSYFNHYRSHHNLIHGLKPHFKLFHPSSESEQGLTRPHADTGSIRSLQTGVGELHGETRFWHGKDYCNFVFKDWVQLDKPFADFIDRYSTPRMPWHDIASAVHGKAARDVARHFIQRWNFTKIMKSKYRSLSYPFLLPKSQTTAHELRYQVPGSVHANVQLLRSAADWSAGIKYHEESIHAAYVHVIENSRHYIYIENQFFISCADDKVVFNKIGDAIAQRILKAHRENQKYRVYVVIPLLPGFEGDISTGGGNALQAIMHFNYRTMCRGENSILGQLKAELGNQWINYISFCGLRTHAELEGNLVTELIYVHSKLLIADDNTVIIGSANINDRSMLGKRDSEMAVIVQDTETVPSVMDGKEYQAGRFARGLRLQCFRVVLGYLDDPSEDIQDPVSDKFFKEVWVSTAARNATIYDKVFRCLPNDEVHNLIQLRDFINKPVLAKEDPIRAEEELKKIRGFLVQFPFYFLSEESLLPSVGTKEAIVPMEVWT

SEQ ID NO: 37509 - protein, 1036 aa, Homo sapiens
MSLKNEPRVNTSALQKIAADMSNIIENLDTRELHFEGEEVDYDVSPSDPKIQEVYIPFSAIYNTQGFKEPNIQTYLSGCPIKAQVLEVERFTSTTRVPSINLYTIELTHGEFKWQVKRKFKHFQEFHRELLKYKAFIRIPIPTRRHTFRRQNVREEPREMPSLPRSSENMIREEQFLGRRKQLEDYLTKILKMPMYRNYHATTEFLDISQLSFIHDLGPKGIEGMIMKRSGGHRIPGLNCCGQGRACYRWSKRWLIVKDSFLLYMKPDSGAIAFVLLVDKEFKIKVGKKETETKYGIRIDNLSRTLILKCNSYRHARWWGGAIEEFIQKHGTNFLKDHRFGSYAAIQENALAKWYVNAKGYFEDVANAMEEANEEIFITDWWLSPEIFLKRPVVEGNRWRLDCILKRKAQQGVRIFIMLYKEVELALGINSEYTKRTLMRLHPNIKVMRHPDHVSSTVYLWAHHEKLVIIDQSVAFVGGIDLAYGRWDDNEHRLTDVGSVKRVTSGPSLGSLPPAAMESMESLRLKDKNEPVQNLPIQKSIDDVDSKLKGIGKPRKFSKFSLYKQLHRHHLHDADSISSIDSTSNTGSIRSLQTGVGELHGETRFWHGKDYCNFVFKDWVQLDKPFADFIDRYSTPRMPWHDIASAVHGKAARDVARHFIQRWNFTKIMKSKYRSLSYPFLLPKSQTTAHELRYQVPGSVHANVQLLRSAADWSAGIKYHEESIHAAYVHVIENSRHYIYIENQFFISCADDKVVFNKIGDAIAQRILKAHRENQKYRVYVVIPLLPGFEGDISTGGGNALQAIMHFNYRTMCRGENSILGQLKAELGNQWINYISFCGLRTHAELEGNLVTELIYVHSKLLIADDNTVIIGSANINDRSMLGKRDSEMAVIVQDTETVPSVMDGKEYQAGRFARGLRLQCFRVVLGYLDDPSEDIQDPVSDKFFKEVWVSTAARNATIYDKVFRCLPNDEVHNLIQLRDFINKPVLAKEDPIRAEEELKKIRGFLVQFPFYFLSEESLLPSVGTKEAIVPMEVWT

SEQ ID NO: 37510 - protein, 597 aa, Homo sapiens
MSLKNEPRVNTSALQKIAADMSNIIENLDTRELHFEGEEVDYDVSPSDPKIQEVYIPFSAIYNTQGFKEPNIQTYLSGCPIKAQVLEVERFTSTTRVPSINLYTIELTHGEFKWQVKRKFKHFQEFHRELLKYKAFIRIPIPTRRHTFRRQNVREEPREMPSLPRSSENMIREEQFLGRRKQLEDYLTKILKMPMYRNYHATTEFLDISQLSFIHDLGPKGIEGMIMKRSGGHRIPGLNCCGQGRACYRWSKRWLIVKDSFLLYMKPDSGAIAFVLLVDKEFKIKVGKKETETKYGIRIDNLSRTLILKCNSYRHARWWGGAIEEFIQKHGTNFLKDHRFGSYAAIQENALAKWYVNAKGYFEDVANAMEEANEEIFITDWWLSPEIFLKRPVVEGNRWRLDCILKRKAQQGVRIFIMLYKEVELALGINSEYTKRTLMRLHPNIKVMRHPDHVSSTVYLWAHHEKLVIIDQSVAFVGGIDLAYGRWDDNEHRLTDVGSVKRVTSGPSLGSLPIPGPSVVYRQVWESCMGKPDSGMERTTAISSSKTGFNLINLLLISLTGTPRPGCPGMTLPLQSTGRRLVMWHVTSSSAGTSQKL

SEQ ID NO: 37511 - protein, 971 aa, Homo sapiens
MSLKNEPRVNTSALQKIAADMSNIIENLDTRELHFEGEEVDYDVSPSDPKIQEVYIPFSAIYNTQGFKEPNIQTYLSGCPIKAQVLEVERFTSTTRVPSINLYTIELTHGEFKWQVKRKFKHFQEFHRELLKYKAFIRIPIPTRRHTFRRQNVREEPREMPSLPRSSENMIREEQFLGRRKQLEDYLTKILKMPMYRNYHATTEFLDISQLSFIHDLGPKGIEGMIMKRSGGHRIPGLNCCGQGRACYRWSKRWLIVKDSFLLYMKPDSGAIAFVLLVDKEFKIKVGKKETETKYGIRIDNLSRTLILKCNSYRHARWWGGAIEEFIQKHGTNFLKDHRFGSYAAIQENALAKWYVNAKGYFEDVANAMEEANEEIFITDWWLSPEIFLKRPVVEGNRWRLDCILKRKAQQGVRIFIMLYKEVELALGINSEYTKRTLMRLHPNIKVMRHPDHVSSTVYLWAHHEKLVIIDQSVAFVGGIDLAYGRWDDNEHRLTDVGSVKRVTSGPSLGSLPPAAMESMESLRLKDKNEPVQNLPIQKSIDDVDSKLKGIGKPRKFSKFSLYKQLHRHHLHDADSISSIDSTSSYFNHYRSHHNLIHGLKPHFKLFHPSSESEQGLTRPHADTGSIRSLQTGVGELHGETRFWHGKDYCNFVFKDWVQLDKPFADFIDRYSTPRMPWHDIASAVHGKAARDVARHFIQRWNFTKIMKSKYRSLSYPFLLPKSQTTAHELRYQVPGSVHANVQLLRSAADWSAGIKYHEESIHAAYVHVIENSRHYIYIENQFFISCADDKVVFNKIGDAIAQRILKAHRENQKYRVYVVIPLLPGFEGDISTGGGNALQAIMHFNYRTMCRGENSILGQLKAELGNQWINYISFCGLRTHAELEGNLVTELIYVHSKLLIADDNTVIIGSANINDRSMLGKRDSEMAVIVQDTETVPSVMDGKEYQAGRFARGLRLQCFRSKMTPGVEDP

SEQ ID NO: 37512 - protein, 227 aa, Homo sapiens
MAWKSGGASHSELIHNLRKNGIIKTDKVFEVMLATDRSHYAKCNPYMDSPQSIGFQATISAPHMHAYALELLFDQLHEGAKALDVGSGSGILTACFARMVGCTGKVIGIDHIKELVDDSVNNVRKDDPTLLSSGRVQLVVGDGRMGYAEEAPYDAIHVGAAAPVVPQALIDQLKPGGRLILPVGPAGGNQMLEQYDKLQDGSIKMKPLMGVIYVPLTDKEKQWSRWK

SEQ ID NO: 37513 - protein, 228 aa, Homo sapiens
MAWKSGGASHSELIHNLRKNGIIKTDKVFEVMLATDRSHYAKCNPYMDSPQSIGFQATISAPHMHAYALELLFDQLHEGAKALDVGSGSGILTACFARMVGCTGKVIGIDHIKELVDDSVNNVRKDDPTLLSSGRVQLVVGDGRMGYAEEAPYDAIHVGAAAPVVPQALIDQLKPGGRLILPVGPAGGNQMLEQYDKLQDGSIKMKPLMGVIYVPLTDKEKQWSRDEL

SEQ ID NO: 37514 - protein, 1375 aa, Homo sapiens
MEAPLQTGMMGTSSHGLATNSSGAKVAERDGFQDVLAPGEGSAGRICGAQPVPFVPQVLGVMIGAGVAVVVTAVLILLVVRRLRVPKTPAPDGPRYRFRKRDKVLFYGRKIMRKVSQSTSSLVDTSVSATSRPRMRKKLKMLNIAKKILRIQKETPTLQRKEPPPAVLEADLTEGDLANSHLPSEVLYMLKNVRVLGHFEKPLFLELCRHMVFQRLGQGDYVFRPGQPDASIYVVQDGLLELCLPGPDGKECVVKEVVPGDSVNSLLSILDVITGHQHPQRTVSARAARDSTVLRLPVEAFSAVFTKYPESLVRVVQIIMVRLQRVTFLALHNYLGLTNELFSHEIQPLRLFPSPGLPTRTSPVRGSKRMVSTSATDEPRETPGRPPDPTGAPLPGPTGDPVKPTSLETPSAPLLSRCVSMPGDISGLQGGPRSDFDMAYERGRISVSLQEEASGGSLAAPARTPTQEPREQPAGACEYSYCEDESATGGCPFGPYQGRQTSSIFEAAKQELAKLMRIEDPSLLNSRVLLHHAKAGTIIARQGDQDVSLHFVLWGCLHVYQRMIDKAEDVCLFVAQPGELVGQLAVLTGEPLIFTLRAQRDCTFLRISKSDFYEIMRAQPSVVLSAAHTVAARMSPFVRQMDFAIDWTAVEAGRALYRQGDRSDCTYIVLNGRLRSVIQRGSGKKELVGEYGRGDLIGVVEALTRQPRATTVHAVRDTELAKLPEGTLGHIKRRYPQVVTRLIHLLSQKILGNLQQLQGPFPAGSGLGVPPHSELTNPASNLATVAILPVCAEVPMVAFTLELQHALQAIGPTLLLNSDIIRARLGASALDSIQEFRLSGWLAQQEDAHRIVLYQTDASLTPWTVRCLRQADCILIVGLGDQEPTLGQLEQMLENTAVRALKQLVLLHREEGAGPTRTVEWLNMRSWCSGHLHLRCPRRLFSRRSPAKLHELYEKVFSRRADRHSDFSRLARVLTGNTIALVLGGGGARGCSHIGVLKALEEAGVPVDLVGGTSIGSFIGALYAEERSASRTKQRAREWAKSMTSVLEPVLDLTYPVTSMFTGSAFNRSIHRVFQDKQIEDLWLPYFNVTTDITASAMRVHKDGSLWRYVRASMTLSGYLPPLCDPKDGHLLMDGGYINNLPADIARSMGAKTVIAIDVGSQDETDLSTYGDSLSGWWLLWKRLNPWADKVKVPDMAEIQSRLAYVSCVRQLEVVKSSSYCEYLRPPIDCFKTMDFGKFDQIYDVGYQYGKAVFGGWSRGNVIEKMLTDRRSTDLNESRRADVLAFPSSGFTDLAEIVSRIEPPTSYVSDGCADGEESDCLTEYEEDAGPDCSRDEGGSPEGASPSTASEMEEEKSILRQRRCLPQEPPGSATDA

SEQ ID NO: 37515 - protein, 1327 aa, Homo sapiens
MEAPLQTGMVLGVMIGAGVAVVVTAVLILLVVRRLRVPKTPAPDGPRYRFRKRDKVLFYGRKIMRKVSQSTSSLVDTSVSATSRPRMRKKLKMLNIAKKILRIQKETPTLQRKEPPPAVLEADLTEGDLANSHLPSEVLYMLKNVRVLGHFEKPLFLELCRHMVFQRLGQGDYVFRPGQPDASIYVVQDGLLELCLPGPDGKECVVKEVVPGDSVNSLLSILDVITGHQHPQRTVSARAARDSTVLRLPVEAFSAVFTKYPESLVRVVQIIMVRLQRVTFLALHNYLGLTNELFSHEIQPLRLFPSPGLPTRTSPVRGSKRMVSTSATDEPRETPGRPPDPTGAPLPGPTGDPVKPTSLETPSAPLLSRCVSMPGDISGLQGGPRSDFDMAYERGRISVSLQEEASGGSLAAPARTPTQEPREQPAGACEYSYCEDESATGGCPFGPYQGRQTSSIFEAAKQELAKLMRIEDPSLLNSRVLLHHAKAGTIIARQGDQDVSLHFVLWGCLHVYQRMIDKAEDVCLFVAQPGELVGQLAVLTGEPLIFTLRAQRDCTFLRISKSDFYEIMRAQPSVVLSAAHTVAARMSPFVRQMDFAIDWTAVEAGRALYRQGDRSDCTYIVLNGRLRSVIQRGSGKKELVGEYGRGDLIGVVEALTRQPRATTVHAVRDTELAKLPEGTLGHIKRRYPQVVTRLIHLLSQKILGNLQQLQGPFPAGSGLGVPPHSELTNPASNLATVAILPVCAEVPMVAFTLELQHALQAIGPTLLLNSDIIRARLGASALDSIQEFRLSGWLAQQEDAHRIVLYQTDASLTPWTVRCLRQADCILIVGLGDQEPTLGQLEQMLENTAVRALKQLVLLHREEGAGPTRTVEWLNMRSWCSGHLHLRCPRRLFSRRSPAKLHELYEKVFSRRADRHSDFSRLARVLTGNTIALVLGGGGARGCSHIGVLKALEEAGVPVDLVGGTSIGSFIGALYAEERSASRTKQRAREWAKSMTSVLEPVLDLTYPVTSMFTGSAFNRSIHRVFQDKQIEDLWLPYFNVTTDITASAMRVHKDGSLWRYVRASMTLSGYLPPLCDPKDGHLLMDGGYINNLPADIARSMGAKTVIAIDVGSQDETDLSTYGDSLSGWWLLWKRLNPWADKVKVPDMAEIQSRLAYVSCVRQLEVVKSSSYCEYLRPPIDCFKTMDFGKFDQIYDVGYQYGKAVFGGWSRGNVIEKMLTDRRSTDLNESRRADVLAFPSSGFTDLAEIVSRIEPPTSYVSDGCADGEESDCLTEYEEDAGPDCSRDEGGSPEGASPSTASEMEEEKSILRQRRCLPQEPPGSATDA

SEQ ID NO: 37516 - protein, 1374 aa, Homo sapiens
MEAPLQTGMMGTSSHGLATNSSGAKVAERDGFQDVLAPGEGSAGRICGAQPVPFVPQVLGVMIGAGVAVVVTAVLILLVVRRLRVPKTPAPDGPRYRFRKRDKVLFYGRKIMRKVSQSTSSLVDTSVSATSRPRMRKKLKMLNIAKKILRIQKETPTLQRKEPPPAVLEADLTEGDLANSHLPSEVLYMLKNVRVLGHFEKPLFLELCRHMVFQRLGQGDYVFRPGQPDASIYVVQDGLLELCLPGPDGKECVVKEVVPGDSVNSLLSILDVITGHQHPQRTVSARAARDSTVLRLPVEAFSAVFTKYPESLVRVVQIIMVRLQRVTFLALHNYLGLTNELFSHEIQPLRLFPSPGLPTRTSPVRGSKRMVSTSATDEPRETPGRPPDPTGAPLPGPTGDPVKPTSLETPSAPLLSRCVSMPGDISGLQGGPRSDFDMAYERGRISVSLQEEASGGSLAAPARTPTQEPREQPAGACEYSYCEDESATGGCPFGPYQGRQTSSIFEAAKQELAKLMRIEDPSLLNSRVLLHHAKAGTIIARQGDQDVSLHFVLWGCLHVYQRMIDKAEDVCLFVAQPGELVGQLAVLTGEPLIFTLRAQRDCTFLRISKSDFYEIMRAQPSVVLSAAHTVAARMSPFVRQMDFAIDWTAVEAGRALYRQGDRSDCTYIVLNGRLRSVIQRGSGKKELVGEYGRGDLIGVVEALTRQPRATTVHAVRDTELAKLPEGTLGHIKRRYPQVVTRLIHLLSQKILGNLQQLQGPFPGSGLGVPPHSELTNPASNLATVAILPVCAEVPMVAFTLELQHALQAIGPTLLLNSDIIRARLGASALDSIQEFRLSGWLAQQEDAHRIVLYQTDASLTPWTVRCLRQADCILIVGLGDQEPTLGQLEQMLENTAVRALKQLVLLHREEGAGPTRTVEWLNMRSWCSGHLHLRCPRRLFSRRSPAKLHELYEKVFSRRADRHSDFSRLARVLTGNTIALVLGGGGARGCSHIGVLKALEEAGVPVDLVGGTSIGSFIGALYAEERSASRTKQRAREWAKSMTSVLEPVLDLTYPVTSMFTGSAFNRSIHRVFQDKQIEDLWLPYFNVTTDITASAMRVHKDGSLWRYVRASMTLSGYLPPLCDPKDGHLLMDGGYINNLPADIARSMGAKTVIAIDVGSQDETDLSTYGDSLSGWWLLWKRLNPWADKVKVPDMAEIQSRLAYVSCVRQLEVVKSSSYCEYLRPPIDCFKTMDFGKFDQIYDVGYQYGKAVFGGWSRGNVIEKMLTDRRSTDLNESRRADVLAFPSSGFTDLAEIVSRIEPPTSYVSDGCADGEESDCLTEYEEDAGPDCSRDEGGSPEGASPSTASEMEEEKSILRQRRCLPQEPPGSATDA

SEQ ID NO: 37517 - protein, 1300 aa, Homo sapiens
MEAPLQTGMVLGVMIGAGVAVVVTAVLILLVVRRLRVPKTPAPDGPRYRFRKRDKVLFYGRKIMRKVSQSTSSLVDTSVSATSRPRMRKKLKMLNIAKKILRIQKETPTLQRKEPPPAVLEADLTEGDLANSHLPSEVLYMLKNVRVLGHFEKPLFLELCRHMVFQRLGQGDYVFRPGQPDASIYVVQDGLLELCLPGPDGKECVVKEVVPGDSVNSLLSILDVITGHQHPQRTVSARAARDSTVLRLPVEAFSAVFTKYPESLVRVVQIIMVRLQRVTFLALHNYLGLTNELFSHEIQPLRLFPSPGLPTRTSPVRGSKRMVSTSATDEPRETPGRPPDPTGAPLPGPTGDPVKPTSLETPSAPLLSRCVSMPGDISGLQGGPRSDFDMAYERGRISVSLQEEASGGSLAAPARTPTQEPREQPAGACEYSYCEDESATGGCPFGPYQGRQTSSIFEAAKQELAKLMRIEDVSLHFVLWGCLHVYQRMIDKAEDVCLFVAQPGELVGQLAVLTGEPLIFTLRAQRDCTFLRISKSDFYEIMRAQPSVVLSAAHTVAARMSPFVRQMDFAIDWTAVEAGRALYRQGDRSDCTYIVLNGRLRSVIQRGSGKKELVGEYGRGDLIGVVEALTRQPRATTVHAVRDTELAKLPEGTLGHIKRRYPQVVTRLIHLLSQKILGNLQQLQGPFPGSGLGVPPHSELTNPASNLATVAILPVCAEVPMVAFTLELQHALQAIGPTLLLNSDIIRARLGASALDSIQEFRLSGWLAQQEDAHRIVLYQTDASLTPWTVRCLRQADCILIVGLGDQEPTLGQLEQMLENTAVRALKQLVLLHREEGAGPTRTVEWLNMRSWCSGHLHLRCPRRLFSRRSPAKLHELYEKVFSRRADRHSDFSRLARVLTGNTIALVLGGGGARGCSHIGVLKALEEAGVPVDLVGGTSIGSFIGALYAEERSASRTKQRAREWAKSMTSVLEPVLDLTYPVTSMFTGSAFNRSIHRVFQDKQIEDLWLPYFNVTTDITASAMRVHKDGSLWRYVRASMTLSGYLPPLCDPKDGHLLMDGGYINNLPADIARSMGAKTVIAIDVGSQDETDLSTYGDSLSGWWLLWKRLNPWADKVKVPDMAEIQSRLAYVSCVRQLEVVKSSSYCEYLRPPIDCFKTMDFGKFDQIYDVGYQYGKAVFGGWSRGNVIEKMLTDRRSTDLNESRRADVLAFPSSGFTDLAEIVSRIEPPTSYVSDGCADGEESDCLTEYEEDAGPDCSRDEGGSPEGASPSTASEMEEEKSILRQRRCLPQEPPGSATDA

SEQ ID NO: 37518 - protein, 1447 aa, Homo sapiens
MFRAGEASKRPLPGPSPPRVRSVEVARGRAGYGFTLSGQAPCVLSCVMRGSPADFVGLRAGDQILAVNEINVKKASHEDVVKLIGKCSGVLHMVIAEGVGRFESCSSDEEGGLYEGKGWLKPKLDSKALGINRAERVVEEMQSGGIFNMIFENPSLCASNSEPLKLKQRSLSESAATRFDVGHESINNPNPNMLSKEEISKVIHDDSVFSIGLESHDDFALDASILNVAMIVGYLGSIELPSTSSNLESDSLQAIRGCMRRLRAEQKIHSLVTMKIMHDCVQLSTDKAGVVAEYPAEKLAFSAVCPDDRRFFGLVTMQTNDDGSLAQEEEGALRTSCHVFMVDPDLFNHKIHQGIARRFGFECTADPDTNGCLEFPASSLPVLQFISVLYRDMGELIEGMRARAFLDGDADAHQNNSTSSNSDSGIGNFHQEEKSNRVLVVDLGGSSSRHGPGGSAWDGVGGRGAQPWGAPWTGPFCPDPEGSPPFEAAHQTDRFWDLNKHLGPASPVEVPPASLRSSVPPSKRGTVGAGCGFNQRWLPVHVLREWQCGHTSDQDSYTDSTDGWSSINCGTLPPPMSKIPADRYRVEGSFAQPPLNAPKREWSRKAFGMQSIFGPHRNVRKTKEDKKGSKFGRGTGLTQPSQRTSARRSFGRSKRFSITRSLDDLESATVSDGELTGADLKDCVSNNSLSSNASLPSVQSCRRLRERRVASWAVSFERLLQDPVGVRYFSDFLRKEFSEENILFWQACEYFNHVPAHDKKELSYRAREIFSKFLCSKATTPVNIDSQAQLADDVLRAPHPDMFKEQQLQIFNLMKFDSYTRFLKSPLYQECILAEVEGRALPDSQQVPSSPASKHSLGSDHSSVSTPKKLSGKSKSGRSLNEELGDEDSEKKRKGAFFSWSRTRSTGRSQKKREHGDHADDALHANGGLCRRESQGSVSSAGSLDLSEACRTLAPEKDKATKHCCIHLPDGTSCVVAVKAGFSIKDILSGLCERHGINGAAADLFLVGGDKPLVLHQDSSILESRDLRLEKRTLFRLDLVPINRSVGLKAKPTKPVTEVLRPVVARYGLDLSGLLVRLSGEKEPLDLGAPISSLDGQRVVLEEKDPSRGKASADKQKGVPVKQNTAVNSSSRNHSATGEERTLGKSNSIKIKGENGKNARDPRLSKREESIAKIGKKKYQKINLDEAEEFFELISKAQSNRADDQRGLLRKEDLVLPEFLRLPPGSTELTLPTPAAVAKGFSKRSATGNGRESASQPGEQWEPVQESSDSPSTSPGSASSPPGPPGTTPPGQKSPSGPFCTPQSPVSLAQEGTAQIWKRQSQEVEAGGIQTVEDEHVAELTLMGEGDISSPNSTLLPPPSTPQEVPGPSRPGSGTHGSRDLPVNRIIDVDLVTGSAPGRDGGIAGAQAGPGRSQASGGPPTSDLPGLGPVPGEPAKPKTSAHHATFV

SEQ ID NO: 37519 - protein, 789 aa, Homo sapiens
MSLSLFFQSATVSDGELTGADLKDCVSNNSLSSNASLPSVQSCRRLRERRVASWAVSFERLLQDPVGVRYFSDFLRKEFSEENILFWQACEYFNHVPAHDKKELSYRAREIFSKFLCSKATTPVNIDSQAQLADDVLRAPHPDMFKEQQLQIFNLMKFDSYTRFLKSPLYQECILAEVEGRALPDSQQVPSSPASKHSLGSDHSSVSTPKKLSGKSKSGRSLNEELGDEDSEKKRKGAFFSWSRTRSTGRSQKKREHGDHADDALHANGGLCRRESQGSVSSAGSLDLSEACRTLAPEKDKATKHCCIHLPDGTSCVVAVKAGFSIKDILSGLCERHGINGAAADLFLVGGDKPLVLHQDSSILESRDLRLEKRTLFRLDLVPINRSVGLKAKPTKPVTEVLRPVVARYGLDLSGLLVRLSGEKEPLDLGAPISSLDGQRVVLEEKDPSRGKASADKQKGVPVKQNTAVNSSSRNHSATGEERTLGKSNSIKIKGENGKNARDPRLSKREESIAKIGKKKYQKINLDEAEEFFELISKAQSNRADDQRGLLRKEDLVLPEFLRLPPGSTELTLPTPAAVAKGFSKRSATGNGRESASQPGEQWEPVQESSDSPSTSPGSASSPPGPPGTTPPGQKSPSGPFCTPQSPVSLAQEGTAQIWKRQSQEVEAGGIQTVEDEHVAELTLMGEGDISSPNSTLLPPPSTPQEVPGPSRPGSGTHGSRDLPVNRIIDVDLVTGSAPGRDGGIAGAQAGPGRSQASGGPPTSDLPGLGPVPGEPAKPKTSAHHATFV

SEQ ID NO: 37520 - protein, 799 aa, Homo sapiens
MNLGKELSNETHVSNDQQSATVSDGELTGADLKDCVSNNSLSSNASLPSVQSCRRLRERRVASWAVSFERLLQDPVGVRYFSDFLRKEFSEENILFWQACEYFNHVPAHDKKELSYRAREIFSKFLCSKATTPVNIDSQAQLADDVLRAPHPDMFKEQQLQIFNLMKFDSYTRFLKSPLYQECILAEVEGRALPDSQQVPSSPASKHSLGSDHSSVSTPKKLSGKSKSGRSLNEELGDEDSEKKRKGAFFSWSRTRSTGRSQKKREHGDHADDALHANGGLCRRESQGSVSSAGSLDLSEACRTLAPEKDKATKHCCIHLPDGTSCVVAVKAGFSIKDILSGLCERHGINGAAADLFLVGGDKPLVLHQDSSILESRDLRLEKRTLFRLDLVPINRSVGLKAKPTKPVTEVLRPVVARYGLDLSGLLVRLSGEKEPLDLGAPISSLDGQRVVLEEKDPSRGKASADKQKGVPVKQNTAVNSSSRNHSATGEERTLGKSNSIKIKGENGKNARDPRLSKREESIAKIGKKKYQKINLDEAEEFFELISKAQSNRADDQRGLLRKEDLVLPEFLRLPPGSTELTLPTPAAVAKGFSKRSATGNGRESASQPGEQWEPVQESSDSPSTSPGSASSPPGPPGTTPPGQKSPSGPFCTPQSPVSLAQEGTAQIWKRQSQEVEAGGIQTVEDEHVAELTLMGEGDISSPNSTLLPPPSTPQEVPGPSRPGSGTHGSRDLPVNRIIDVDLVTGSAPGRDGGIAGAQAGPGRSQASGGPPTSDLPGLGPVPGEPAKPKTSAHHATFV

SEQ ID NO: 37521 - protein, 1376 aa, Homo sapiens
MFRAGEASKRPLPGPSPPRVRSVEVARGRAGYGFTLSGQAPCVLSCVMRGSPADFVGLRAGDQILAVNEINVKKASHEDVVKLIGKCSGVLHMVIAEGVGRFESCSSDEEGGLYEGKGWLKPKLDSKALGINRAERVVEEMQSGGIFNMIFENPSLCASNSEPLKLKQRSLSESAATRFDVGHESINNPNPNMLSKEEISKVIHDDSVFSIGLESHDDFALDASILNVAMIVGYLGSIELPSTSSNLESDSLQAIRGCMRRLRAEQKIHSLVTMKIMHDCVQLSTDKAGVVAEYPAEKLAFSAVCPDDRRFFGLVTMQTNDDGSLAQEEEGALRTSCHVFMVDPDLFNHKIHQGIARRFGFECTADPDTNGCLEFPASSLPVLQFISVLYRDMGELIEGMRARAFLDGDADAHQNNSTSSNSDSGIGNFHQEEKSNRVLVVDLGGSSSRHGPGGSAWDGVGGRGAQPWGAPWTGPFCPDPEGSPPFEAAHQTDRFWDLNKHLGPASPVEVPPASLRSSVPPSKRGTVGAGCGFNQRWLPVHVLREWQCGHTSDQDSYTDSTDGWSSINCGTLPPPMSKIPADRYRVEGSFAQPPLNAPKREWSRKAFGMQSIFGPHRNVRKTKEDKKGSKFGRGTGLTQPSQRTSARRSFGRSKRFSITRSLDDLESATVSDGELTGADLKDCVSNNSLSSNASLPSVQSCRRLRERRVASWAVSFERLLQDPVGVRYFSDFLRKEFSEENILFWQACEYFNHVPAHDKKELSYRAREIFSKFLCSKATTPVNIDSQAQLADDVLRAPHPDMFKEQQLQIFNLMKFDSYTRFLKSPLYQECILAEVEGRALPDSQQVPSSPASKHSLGSDHSSVSTPKKLSGKSKSGRSLNEELGDEDSEKKRKGAFFSWSRTRSTGRSQKKREHGDHADDALHANGGLCRRESQGSVSSAGSLDLSEACRTLAPEKDKATKHCCIHLPDGTSCVVAVKAGFSIKDILSGLCERHGINGAAADLFLVGGDKPLVLHQDSSILESRDLRLEKRTLFRLDLVPINRSVGLKAKPTKPVTEVLRPVVARYGLDLSGLLVRLSGEKEPLDLGAPISSLDGQRVVLEEKDPSRGKASADKQKGVPVKQNTAVNSSSRNHSATGEERTLGKSNSIKIKGENGKNARDPRLSKREESIAKIGKKKYQKINLDEAEEFFELISKAQSNRADDQRGLLRKEDLVLPEFLRLPPGSTELTLPTPAAVAKGFSKRSATGNGRESASQPGEQWEPVQESSDSPSTSPGSASSPPGPPGTTPPGQKSPSGPFCTPQSPVSLAQEGTAQIWKRQSQEVEAGGIQTVEDEHVAELTLMGEGDISSPNSTLLPPPSTPQEVPGPSRPGTSRF

SEQ ID NO: 37522 - protein, 1157 aa, Homo sapiens
MFRAGEASKRPLPGPSPPRVRSVEVARGRAGYGFTLSGQAPCVLSCVMRGSPADFVGLRAGDQILAVNEINVKKASHEDVVKLIGKCSGVLHMVIAEGVGRFESCSSDEEGGLYEGKGWLKPKLDSKALGINRAERVVEEMQSGGIFNMIFENPSLCASNSEPLKLKQRSLSESAATRFDVGHESINNPNPNMLSKEEISKVIHDDSVFSIGLESHDDFALDASILNVAMIVGYLGSIELPSTSSNLESDSLQAIRGCMRRLRAEQKIHSLVTMKIMHDCVQLSTDKAGVVAEYPAEKLAFSAVCPDDRRFFGLVTMQTNDDGSLAQEEEGALRTSCHVFMVDPDLFNHKIHQGIARRFGFECTADPDTNGCLEFPASSLPVLQFISVLYRDMGELIEGMRARAFLDGDADAHQNNSTSSNSDSGIGNFHQEEKSNRVLVVDLGGSSSRHGPGGSAWDGVGGRGAQPWGAPWTGPFCPDPEGSPPFEAAHQTDRFWDLNKHLGPASPVEVPPASLRSSVPPSKRGTVGAGCGFNQRWLPVHVLREWQCGHTSDQDSYTDSTDGWSSINCGTLPPPMSKIPADRYRVEGSFAQPPLNAPKREWSRKAFGMQSIFGPHRNVRKTKEDKKGSKFGRGTGLTQPSQRTSARRSFGRSKRFSITRSLDDLESATVSDGELTGADLKDCVSNNSLSSNASLPSVQSCRRLRERRVASWAVSFERLLQDPVGVRYFSDFLRKEFSEENILFWQACEYFNHVPAHDKKELSYRAREIFSKFLCSKATTPVNIDSQAQLADDVLRAPHPDMFKEQQLQIFNLMKFDSYTRFLKSPLYQECILAEVEGRALPDSQQVPSSPASKHSLGSDHSSVSTPKKLSGKSKSGRSLNEELGDEDSEKKRKGAFFSWSRTRSTGRSQKKREHGDHADDALHANGGLCRRESQGSVSSAGSLDLSEACRTLAPEKDKATKHCCIHLPDGTSCVVAVKAGFSIKDILSGLCERHGINGAAADLFLVGGDKPLVLHQDSSILESRDLRLEKRTLFRLDLVPINRSVGLKAKPTKPVTEVLRPVVARYGLDLSGLLVRLSGEKEPLDLGAPISSLDGQRVVLEEKDPSRGKASADKQKGVPVKQNTAVNSSSRNHSATSFLSLFPKLRATEQMTNVGC

SEQ ID NO: 37523 - protein, 555 aa, Homo sapiens
MKKHDFAENLPSSLLIIILVIFTLSGSKFGRGTGLTQPSQRTSARRSFGRSKRFSITRSLDDLESATVSDGELTGADLKDCVSNNSLSSNASLPSVQSCRRLRERRVASWAVSFERLLQDPVGVRYFSDFLRKEFSEENILFWQACEYFNHVPAHDKKELSYRAREIFSKFLCSKATTPVNIDSQAQLADDVLRAPHPDMFKEQQLQIFNLMKFDSYTRFLKSPLYQECILAEVEGRALPDSQQVPSSPASKHSLGSDHSSVSTPKKLSGKSKSGRSLNEELGDEDSEKKRKGAFFSWSRTRSTGRSQKKREHGDHADDALHANGGLCRRESQGSVSSAGSLDLSEACRTLAPEKDKATKHCCIHLPDGTSCVVAVKAGFSIKDILSGLCERHGINGAAADLFLVGGDKPLVLHQDSSILESRDLRLEKRTLFRLDLVPINRSVGLKAKPTKPVTEVLRPVVARYGLDLSGLLVRLSGEKEPLDLGAPISSLDGQRVVLEEKDPSRGKASADKQKGVPVKQNTAVNSSSRNHSATSFLSLFPKLRATEQMTNVGC

SEQ ID NO: 37524 - protein, 499 aa, Homo sapiens
MSLSLFFQSATVSDGELTGADLKDCVSNNSLSSNASLPSVQSCRRLRERRVASWAVSFERLLQDPVGVRYFSDFLRKEFSEENILFWQACEYFNHVPAHDKKELSYRAREIFSKFLCSKATTPVNIDSQAQLADDVLRAPHPDMFKEQQLQIFNLMKFDSYTRFLKSPLYQECILAEVEGRALPDSQQVPSSPASKHSLGSDHSSVSTPKKLSGKSKSGRSLNEELGDEDSEKKRKGAFFSWSRTRSTGRSQKKREHGDHADDALHANGGLCRRESQGSVSSAGSLDLSEACRTLAPEKDKATKHCCIHLPDGTSCVVAVKAGFSIKDILSGLCERHGINGAAADLFLVGGDKPLVLHQDSSILESRDLRLEKRTLFRLDLVPINRSVGLKAKPTKPVTEVLRPVVARYGLDLSGLLVRLSGEKEPLDLGAPISSLDGQRVVLEEKDPSRGKASADKQKGVPVKQNTAVNSSSRNHSATSFLSLFPKLRATEQMTNVGC

SEQ ID NO: 37525 - protein, 256 aa, Homo sapiens
MAHRPPSPALASVLLALLLSGAARAAEIVGGHEAQPHSRPYMASLQMRGNPGSHFCGGTLIHPSFVLTAAHCLRDIPQRLVNVVLGAHNVRTQEPTQQHFSVAQVFLNNYDAENKLNDVLLIQLSSPANLSASVATVQLPQQDQPVPHGTQCLAMGWGRVGAHDPPAQVLQELNVTVVTFFCRPHNICTFVPRRKAGICFGDSGGPLICDGIIQGIDSFVIWGCATRLFPDFFTRVALYVDWIRSTLRRVEAKGRP

SEQ ID NO: 37526 - protein, 1411 aa, Homo sapiens
MSAPVGPRGRLAPIPAASQPPLQPEMPDLSHLTEEERKIILAVMDRQKKKVKEEHKPQLTQWFPFSGITELVNNVLQPQQKQQNEKEPQTKLHQQFEMYKEQVKKMGEESQQQQEQKGDAPTCGICHKTKFADGCGHNCSYCQTKFCARCGGRVSLRSNKVMWVCNLCRKQQEILTKSGAWFYNSGSNTPQQPDQKVLRGLRNEEAPQEKKPKLHEQTQFQGPSGDLSVPAVEKSRSHGLTRQHSIKNGSGVKHHIASDIASDRKRSPSVSRDQNRRYDQREEREEYSQYATSDTAMPRSPSDYADRRSQHEPQFYEDSDHLSYRDSNRRSHRHSKEYIVDDEDVESRDEYERQRREEEYQSRYRSDPNLARYPVKPQPYEEQMRIHAEVSRARHERRHSDVSLANADLEDSRISMLRMDRPSRQRSISERRAAMENQRSYSMERTREAQGPSSYAQRTTNHSPPTPRRSPLPIDRPDLRRTDSLRKQHHLDPSSAVRKTKREKMETMLRNDSLSSDQSESVRPPPPKPHKSKKGGKMRQISLSSSEEELASTPEYTSCDDVEIESESVSEKGDSQKGKRKTSEQAVLSDSNTRSERQKEMMYFGGHSLEEDLEWSEPQIKDSGVDTCSSTTLNEEHSHSDKHPVTWQPSKDGDRLIGRILLNKRLKDGSVPRDSGAMLGLKVVGGKMTESGRLCAFITKVKKGSLADTVGHLRPGDEVLEWNGRLLQGATFEEVYNIILESKPEPQVELVVSRPIGDIPRIPDSTHAQLESSSSSFESQKMDRPSISVTSPMSPGMLRDVPQFLSGQLSIKLWFDKVGHQLIVTILGAKDLPSREDGRPRNPYVKIYFLPDRSDKNKRRTKTVKKTLEPKWNQTFIYSPVHRREFRERMLEITLWDQARVREEESEFLGEILIELETALLDDEPHWYKLQTHDVSSLPLPHPSPYMPRRQLHGESPTRRLQRSKRISDSEVSDYDCDDGIGVVSDYRHDGRDLQSSTLSVPEQVMSSNHCSPSGSPHRVDVIGRTRSWSPSVPPPQSRNVEQGLRGTRTMTGHYNTISRMDRHRVMDDHYSPDRDRDCEAADRQPYHRSRSTEQRPLLERTTTRSRSTERPDTNLMRSMPSLMTGRSAPPSPALSRSHPRTGSVQTSPSSTPVAGRRGRQLPQLPPKGTLDRKAGGKKLRSTVQRSTETGLAVEMRNWMTRQASRESTDGSMNSYSSEGNLIFPGVRLASDSQFSDFLDGLGPAQLVGRQTLATPAMGDIQVGMMDKKGQLEVEIIRARGLVVKPGSKTLPAPYVKVYLLDNGVCIAKKKTKVARKTLEPLYQQLLSFEESPQGKVLQIIVWGDYGRMDHKSFMGVAQILLDELELSNMVIGWFKLFPPSSLVDPTLAPLTRRASQSSLESSTGPSYSRS

SEQ ID NO: 37527 - protein, 1188 aa, Homo sapiens
MQFETLRQVCNSVLSHFHGVFSSPPNILQNELFGQTLNNARKRSPSVSRDQNRRYDQREEREEYSQYATSDTAMPRSPSDYADRRSQHEPQFYEDSDHLSYRDSNRRSHRHSKEYIVDDEDVESRDEYERQRREEEYQSRYRSDPNLARYPVKPQPYEEQMRIHAEVSRARHERRHSDVSLANADLEDSRISMLRMDRPSRQRSISERRAAMENQRSYSMERTREAQGPSSYAQRTTNHSPPTPRRSPLPIDRPDLRRTDSLRKQHHLDPSSAVRKTKREKMETMLRNDSLSSDQSESVRPPPPKPHKSKKGGKMRQISLSSSEEELASTPEYTSCDDVEIESESVSEKGDSQKGKRKTSEQAVLSDSNTRSERQKEMMYFGGHSLEEDLEWSEPQIKDSGVDTCSSTTLNEEHSHSDKHPVTWQPSKDGDRLIGRILLNKRLKDGSVPRDSGAMLGLKVVGGKMTESGRLCAFITKVKKGSLADTVGHLRPGDEVLEWNGRLLQGATFEEVYNIILESKPEPQVELVVSRPIGDIPRIPDSTHAQLESSSSSFESQKMDRPSISVTSPMSPGMLRDVPQFLSGQLSIKLWFDKVGHQLIVTILGAKDLPSREDGRPRNPYVKIYFLPDRSDKNKRRTKTVKKTLEPKWNQTFIYSPVHRREFRERMLEITLWDQARVREEESEFLGEILIELETALLDDEPHWYKLQTHDVSSLPLPHPSPYMPRRQLHGESPTRRLQRSKRISDSEVSDYDCDDGIGVVSDYRHDGRDLQSSTLSVPEQVMSSNHCSPSGSPHRVDVIGRTRSWSPSVPPPQSRNVEQGLRGTRTMTGHYNTISRMDRHRVMDDHYSPDRDRDCEAADRQPYHRSRSTEQRPLLERTTTRSRSTERPDTNLMRSMPSLMTGRSAPPSPALSRSHPRTGSVQTSPSSTPVAGRRGRQLPQLPPKGTLDRKAGGKKLRSTVQRSTETGLAVEMRNWMTRQASRESTDGSMNSYSSEGNLIFPGVRLASDSQFSDFLDGLGPAQLVGRQTLATPAMGDIQVGMMDKKGQLEVEIIRARGLVVKPGSKTLPAPYVKVYLLDNGVCIAKKKTKVARKTLEPLYQQLLSFEESPQGKVLQIIVWGDYGRMDHKSFMGVAQILLDELELSNMVIGWFKLFPPSSLVDPTLAPLTRRASQSSLESSTGPSYSRS

SEQ ID NO: 37528 - protein, 1038 aa, Homo sapiens
MSAPVGPRGRLAPIPAASQPPLQPEMPDLSHLTEEERKIILAVMDRQKKKVKEEHKPQLTQWFPFSGITELVNNVLQPQQKQQNEKEPQTKLHQQFEMYKEQVKKMGEESQQQQEQKGDAPTCGICHKTKFADGCGHNCSYCQTKFCARCGGRVSLRSNKVMWVCNLCRKQQEILTKSGAWFYNSGSNTPQQPDQKVLRGLRNEEAPQEKKPKLHEQTQFQGPSGDLSVPAVEKSRSHGLTRQHSIKNGSGVKHHIASDIASDRKRSPSVSRDQNRRYDQREEREEYSQYATSDTAMPRSPSDYADRRSQHEPQFYEDSDHLSYRDSNRRSHRHSKEYIVDDEDVESRDEYERQRREEEYQSRYRSDPNLARYPVKPQPYEEQMRIHAEVSRARHERRHSDVSLANADLEDSRISMLRMDRPSRQRSISERRAAMENQRSYSMERTREAQGPSSYAQRTTNHSPPTPRRSPLPIDRPDLRRTDSLRKQHHLDPSSAVRKTKREKMETMLRNDSLSSDQSESVRPPPPKPHKSKKGGKMRQISLSSSEEELASTPEYTSCDDVEIESESVSEKGDSQKGKRKTSEQAVLSDSNTRSERQKEMMYFGGHSLEEDLEWSEPQIKDSGVDTCSSTTLNEEHSHSDKHPVTWQPSKDGDRLIGRILLNKRLKDGSVPRDSGAMLGLKVVGGKMTESGRLCAFITKVKKGSLADTVGHLRPGDEVLEWNGRLLQGATFEEVYNIILESKPEPQVELVVSRPIGDIPRIPDSTHAQLESSSSSFESQKMDRPSISVTSPMSPGMLRDVPQFLSGQLSIKLWFDKVGHQLIVTILGAKDLPSREDGRPRNPYVKIYFLPDRSDKNKRRTKTVKKTLEPKWNQTFIYSPVHRREFRERMLEITLWDQARVREEESEFLGEILIELETALLDDEPHWYKLQTHDVSSLPLPHPSPYMPRRQLHGESPTRRLQRSKRISDSEVSDYDCDDGIGVVSDYRHDGRDLQSSTLSVPEQVMSSNHCSPSGSPHRVDVIGRTRSWSPSVPPPQR

SEQ ID NO: 37529 - protein, 1163 aa, Homo sapiens
MQFETLRQVCNSVLSHFHGVFSSPPNILQNELFGQTLNNARKRSPSVSRDQNRRYDQREEREEYSQYATSDTAMPRSPSDYADRRSQHEPQFYEDSDHLSYRDSNRRSHRHSKEYIVDDEDVESRDEYERQRREEEYQSRYRSDPNLARYPVKPQPYEEQMRIHAEVSRARHERRHSDVSLANADLEDSRISMLRMDRPSRQRSISERRAAMENQRSYSMERTREAQGPSSYAQRTTNHSPPTPRRSPLPIDRPDLRRTDSLRKQHHLDPSSAVRKTKREKMETMLRNDSLSSDQSESVRPPPPKPHKSKKGGKMRQISLSSSEEELASTPEYTSCDDVEIESESVSEKGDMDYNWLDHTSWHSSEASPMSLHPVTWQPSKDGDRLIGRILLNKRLKDGSVPRDSGAMLGLKVVGGKMTESGRLCAFITKVKKGSLADTVGHLRPGDEVLEWNGRLLQGATFEEVYNIILESKPEPQVELVVSRPIGDIPRIPDSTHAQLESSSSSFESQKMDRPSISVTSPMSPGMLRDVPQFLSGQLSIKLWFDKVGHQLIVTILGAKDLPSREDGRPRNPYVKIYFLPDRSDKNKRRTKTVKKTLEPKWNQTFIYSPVHRREFRERMLEITLWDQARVREEESEFLGEILIELETALLDDEPHWYKLQTHDVSSLPLPHPSPYMPRRQLHGESPTRRLQRSKRISDSEVSDYDCDDGIGVVSDYRHDGRDLQSSTLSVPEQVMSSNHCSPSGSPHRVDVIGRTRSWSPSVPPPQSRNVEQGLRGTRTMTGHYNTISRMDRHRVMDDHYSPDRDSHFLTLPRSRYSQTIDHHHRDGRDCEAADRQPYHRSRSTEQRPLLERTTTRSRSTERPDTNLMRSMPSLMTGRSAPPSPALSRSHPRTGSVQTSPSSTPVAGRRGRQLPQLPPKGTLDRKAGGKKLRSTVQRSTETGLAVEMRNWMTRQASRESTDGSMNSYSSEGNLIFPGVRLASDSQFSDFLDGLGPAQLVGRQTLATPAMGDIQVGMMDKKGQLEVEIIRARGLVVKPGSKTLPAPYVKVYLLDNGVCIAKKKTKVARKTLEPLYQQLLSFEESPQGKVLQIIVWGDYGRMDHKSFMGVAQILLDELELSNMVIGWFKLFPPSSLVDPTLAPLTRRASQSSLESSTGPSYSRS

SEQ ID NO: 37530 - protein, 801 aa, Homo sapiens
MSAPVGPRGRLAPIPAASQPPLQPEMPDLSHLTEEERKIILAVMDRQKKKVKEEHKPQLTQWFPFSGITELVNNVLQPQQKQQNEKEPQTKLHQQFEMYKEQVKKMGEESQQQQEQKGDAPTCGICHKTKFADGCGHNCSYCQTKFCARCGGRVSLRSNKVMWVCNLCRKQQEILTKSGAWFYNSGSNTPQQPDQKVLRGLRNEEAPQEKKPKLHEQTQFQGPSGDLSVPAVEKSRSHGLTRQHSIKNGSGVKHHIASDIASDRKRSPSVSRDQNRRYDQREEREEYSQYATSDTAMPRSPSDYADRRSQHEPQFYEDSDHLSYRDSNRRSHRHSKEYIVDDEDVESRDEYERQRREEEYQSRYRSDPNLARYPVKPQPYEEQMRIHAEVSRARHERRHSDVSLANADLEDSRISMLRMDRPSRQRSISERRAAMENQRSYSMERTREAQGPSSYAQRTTNHSPPTPRRSPLPIDRPDLRRTDSLRKQHHLDPSSAVRKTKREKMETMLRNDSLSSDQSESVRPPPPKPHKSKKGGKMRQISLSSSEEELASTPEYTSCDDVEIESESVSEKGDSQKGKRKTSEQAVLSDSNTRSERQKEMMYFGGHSLEEDLEWSEPQIKDSGVDTCSSTTLNEEHSHSDKHPVTWQPSKDGDRLIGRILLNKRLKDGSVPRDSGAMLGLKVVGGKMTESGRLCAFITKVKKGSLADTVGHLRPGDEVLEWNGRLLQGATFEEVYNIILESKPEPQVELVVSRPIGDIPRIPDSTHAQLESSKFYLCWKKTLFIIAFIRDQMKYLTSNVK

SEQ ID NO: 37531 - protein, 824 aa, Homo sapiens
MSAPVGPRGRLAPIPAASQPPLQPEMPDLSHLTEEERKIILAVMDRQKKKVKEEHKPQLTQWFPFSGITELVNNVLQPQQKQQNEKEPQTKLHQQFEMYKEQVKKMGEESQQQQEQKGDAPTCGICHKTKFADGCGHNCSYCQTKFCARCGGRVSLRSNKVMWVCNLCRKQQEILTKSGAWFYNSGSNTPQQPDQKVLRGLRNEEAPQEKKPKLHEQTQFQGPSGDLSVPAVEKSRSHGLTRQHSIKNGSGVKHHIASDIASDRKRSPSVSRDQNRRYDQREEREEYSQYATSDTAMPRSPSDYADRRSQHEPQFYEDSDHLSYRDSNRRSHRHSKEYIVDDEDVESRDEYERQRREEEYQSRYRSDPNLARYPVKPQPYEEQMRIHAEVSRARHERRHSDVSLANADLEDSRISMLRMDRPSRQRSISERRAAMENQRSYSMERTREAQGPSSYAQRTTNHSPPTPRRSPLPIDRPDLRRTDSLRKQHHLDPSSAVRKTKREKMETMLRNDSLSSDQSESVRPPPPKPHKSKKGGKMRQISLSSSEEELASTPEYTSCDDVEIESESVSEKGDSQKGKRKTSEQAVLSDSNTRSERQKEMMYFGGHSLEEDLEWSEPQIKDSGVDTCSSTTLNEEHSHSDKHPVTWQPSKDGDRLIGRILLNKRLKDGSVPRDSGAMLGLKVVGGKMTESGRLCAFITKVKKGSLADTVGHLRPGDEVLEWNGRLLQGATFEEVYNIILESKPEPQVELVVSRPIGDIPRIPDSTHAQLESSSSSFESQKMDRPSISVTSPMSPGMLRDVPQFLSGQLSVCSHYVYSSFWNIK

SEQ ID NO: 37532 - protein, 285 aa, Homo sapiens
MGRQGLGGASAAGRSMQRSQSRSSLSASFEALAGYFPCMNSLEEEEGEAGGKKLRSTVQRSTETGLAVEMRNWMTRQASRESTDGSMNSYSSEGNLIFPGVRLASDSQFSDFLDGLGPAQLVGRQTLATPAMGDIQVGMMDKKGQLEVEIIRARGLVVKPGSKTLPAPYVKVYLLDNGVCIAKKKTKVARKTLEPLYQQLLSFEESPQGKVLQIIVWGDYGRMDHKSFMGVAQILLDELELSNMVIGWFKLFPPSSLVDPTLAPLTRRASQSSLESSTGPSYSRS

SEQ ID NO: 37533 - protein, 1349 aa, Homo sapiens
MSAPVGPRGRLAPIPAASQPPLQPEMPDLSHLTEEERKIILAVMDRQKKEEEKEQSVLKKLHQQFEMYKEQVKKMGEESQQQQEQKGDAPTCGICHKTKFADGCGHNCSYCQTKFCARCGGRVSLRSNKVMWVCNLCRKQQEILTKSGAWFYNSGSNTPQQPDQKVLRGLRNEEAPQEKKPKLHEQTQFQGPSGDLSVPAVEKSRSHGLTRQHSIKNGSGVKHHIASDIASDRKRSPSVSRDQNRRYDQREEREEYSQYATSDTAMPRSPSDYADRRSQHEPQFYEDSDHLSYRDSNRRSHRHSKEYIVDDEDVESRDEYERQRREEEYQSRYRSDPNLARYPVKPQPYEEQMRIHAEVSRARHERRHSDVSLANADLEDSRISMLRMDRPSRQRSISERRAAMENQRSYSMERTREAQGPSSYAQRTTNHSPPTPRRSPLPIDRPDLRRTDSLRKQHHLDPSSAVRKTKREKMETMLRNDSLSSDQSESVRPPPPKPHKSKKGGKMRQISLSSSEEELASTPEYTSCDDVEIESESVSEKGDMDYNWLDHTSWHSSEASPMSLHPVTWQPSKDGDRLIGRILLNKRLKDGSVPRDSGAMLGLKVVGGKMTESGRLCAFITKVKKGSLADTVGHLRPGDEVLEWNGRLLQGATFEEVYNIILESKPEPQVELVVSRPIGDIPRIPDSTHAQLESSSSSFESQKMDRPSISVTSPMSPGMLRDVPQFLSGQLSSQSLSRRTTPFVPRVQIKLWFDKVGHQLIVTILGAKDLPSREDGRPRNPYVKIYFLPDRSDKNKRRTKTVKKTLEPKWNQTFIYSPVHRREFRERMLEITLWDQARVREEESEFLGEILIELETALLDDEPHWYKLQTHDVSSLPLPHPSPYMPRRQLHGESPTRRLQRSKRISDSEVSDYDCDDGIGVVSDYRHDGRDLQSSTLSVPEQVMSSNHCSPSGSPHRVDVIGRTRSWSPSVPPPQSRNVEQGLRGTRTMTGHYNTISRMDRHRVMDDHYSPDRDRDCEAADRQPYHRSRSTEQRPLLERTTTRSRSTERPDTNLMRSMPSLMTGRSAPPSPALSRSHPRTGSVQTSPSSTPVAGRRGRQLPQLPPKGTLDRKAGGKKLRSTVQRSTETGLAVEMRNWMTRQASRESTDGSMNSYSSEGNLIFPGVRLASDSQFSDFLDGLGPAQLVGRQTLATPAMGDIQVGMMDKKGQLEVEIIRARGLVVKPGSKTLPAPYVKVYLLDNGVCIAKKKTKVARKTLEPLYQQLLSFEESPQGKVLQIIVWGDYGRMDHKSFMGVAQILLDELELSNMVIGWFKLFPPSSLVDPTLAPLTRRASQSSLESSTGPSYSRS

SEQ ID NO: 37534 - protein, 418 aa, Homo sapiens
MEEIGILVEKAQDEIPALSVSRPQTGLSFLGPEPEDLEDLYSRYKKLQQELEFLEVQEEYIKDEQKNLKKEFLHAQEEVKRIQSIPLVIGQFLEAVDQNTAIVGSTTGSNYYVRILSTIDRELLKPNASVALHKHSNALVDVLPPEADSSIMMLTSDQKPDVMYADIGGMDIQKQEVREAVELPLTHFELYKQIGIDPPRGVLMYGPPGCGKTMLAKAVAHHTTAAFIRVVGSEFVQKYLGEGPRMVRDVFRLAKENAPAIIFIDEIDAIATKRFDAQTGADREVQRILLELLNQMDGFDQNVNVKVIMATNRADTLDPALLRPGRLDRKIEFPLPDRRQKRLIFSTITSKMNLSEEVDLEDYVARPDKISGADINSICQESGMLAVRENRYIVLAKDFEKAYKTVIKKDEQEHEFYK

SEQ ID NO: 37535 - protein, 387 aa, Homo sapiens
MEEIGILVEKAQDEIPALSVSRPQTGLSFLGPEPEDLEDLYSRYKEEVKRIQSIPLVIGQFLEAVDQNTAIVGSTTGSNYYVRILSTIDRELLKPNASVALHKHSNALVDVLPPEADSSIMMLTSDQKPDVMYADIGGMDIQKQEVREAVELPLTHFELYKQIGIDPPRGVLMYGPPGCGKTMLAKAVAHHTTAAFIRVVGSEFVQKYLGEGPRMVRDVFRLAKENAPAIIFIDEIDAIATKRFDAQTGADREVQRILLELLNQMDGFDQNVNVKVIMATNRADTLDPALLRPGRLDRKIEFPLPDRRQKRLIFSTITSKMNLSEEVDLEDYVARPDKISGADINSICQESGMLAVRENRYIVLAKDFEKAYKTVIKKDEQEHEFYK

SEQ ID NO: 37536 - protein, 255 aa, Homo sapiens
MSSIGTGYDLSASTFSPDGRVFQVEYAMKAVENSSTAIGIRCKDGVVFGVEKLVLSKLYEEGSNKRLFNVDRHVGMAVAGLLADARSLADIAREEASNFRSNFGYNIPLKHLADRVAMYVHAYTLYSAVRPFGCSFMLGSYSVNDGAQLYMIDPSGVSYGYWGCAIGKARQAAKTEIEKLQMKEMTCRDIVKEVAKIIYIVHDEVKDKAFELELSWVGELTNGRHEIVPKDIREEAEKYAKESLKEEDESDDDNM

SEQ ID NO: 37537 - protein, 248 aa, Homo sapiens
MSSIGTGYDLSASTFSPDGRVFQVEYAMKAVENSSTAIGIRCKDGVVFGVEKLVLSKLYEEGSNKRLFNVDRHVGMAVAGLLADARSLADIAREEASNFRSNFGYNIPLKHLADRVAMYVHAYTLYSAVRPFGCSVNDGAQLYMIDPSGVSYGYWGCAIGKARQAAKTEIEKLQMKEMTCRDIVKEVAKIIYIVHDEVKDKAFELELSWVGELTNGRHEIVPKDIREEAEKYAKESLKEEDESDDDNM

SEQ ID NO: 37538 - protein, 216 aa, Homo sapiens
MLRLSERNMKVLLAAALIAGSVFFLLLPGPSAADEKKKGPKVTVKVYFDLRIGDEDVGRVIFGLFGKTVPKTVDNFVALATGEKGFGYKNSKFHRVIKDFMIQGGDFTRGDGTGGKSIYGERFPDENFKLKHYGPGWVSMANAGKDTNGSQFFITTVKTAWLDGKHVVFGKVLEGMEVVRKVESTKTDSRDKPLKDVIIADCGKIEVEKPFAIAKE

SEQ ID NO: 37539 - protein, 152 aa, Homo sapiens
MTCTDQKSHSQRALGTQTPALQGPQLLNTDPSSEETRPPHVNPDRLCHMEPANHFWHAGDLQAMISKEFHLAATQDDCRKGRTQEDILVPSSHPELFASVLPMAPEEAARLQQPQPLPPPSGIHLSASRTLAPTLLYSSPPSHSPFGLSSLI

SEQ ID NO: 37540 - protein, 101 aa, Homo sapiens
MASRRHAGDLQAMISKEFHLAATQDDCRKGRTQEDILVPSSHPELFASVLPMAPEEAARLQQPQPLPPPSGIHLSASRTLAPTLLYSSPPSHSPFGLSSLI

SEQ ID NO: 37541 - protein, 613 aa, Homo sapiens
MATIPDWKLQLLARRRQEEASVRGREKAERERLSQMPAWKRGLLERRRAKLGLSPGEPSPVLGTVEAGPPDPDESAVLLEAIGPVHQNRFIRQERQQQQQQQQRSEELLAERKPGPLEARERRPSPGEMRDQSPKGRESREERLSPRETRERRLGIGGAQELSLRPLEARDWRQSPGEVGDRSSRLSEAWKWRLSPGETPERSLRLAESREQSPRRKEVESRLSPGESAYQKLGLTEAHKWRPDSRESQEQSLVQLEATEWRLRSGEERQDYSEECGRKEEWPVPGVAPKETAELSETLTREAQGNSSAGVEAAEQRPVEDGERGMKPTEGWKWTLNSGKAREWTPRDIEAQTQKPEPPESAEKLLESPGVEAGEGEAEKEEAGAQGRPLRALQNCCSVPSPLPPEDAGTGGLRQQEEEAVELQPPPPAPLSPPPPAPTAPQPPGDPLMSRLFYGVKAGPGVGAPRRSGHTFTVNPRRSVPPATPATPTSPATVDAAVPGAGKKRYPTAEEILVLGGYLRLSRSCLAKGSPERHHKQLKISFSETALETTYQYPSESSVLEELGPEPEVPSAPNPPAAQPDDEEDEEELLLLQPELQGGLRTKALIVDESCRR

SEQ ID NO: 37542 - protein, 377 aa, Homo sapiens
MATIPDWKLQLLARRRQEEASVRGREKAERERLSQMPAWKRGLLERRRAKLGLSPGEPSPVLGTVEAGPPDPDESAVLLEAIGPVHQNRFIRQERQQQQQQQQRSEELLAERKPGPLEARERRPSPGEMRDQSPKGRESREERLSPRETRERRLGIGGAQELSLRPLEARDWRQSPGEVGDRSSRLSEAWKWRLSPGETPERSLRLAESREQSPRRKEVESRLSPGESAYQKLGLTEAHKWRPDSRESQEQSLVQLEATEWRLRSGEERQDYSEECGRKEEWPVPGVAPKETAELSETLTREAQGNSSAGVEAAEQRPVEDGERGMKPTEGWKWTLIMSLAGKGNQHLVTCFPHPVSGGRANCPISTLIQSPWCGWG

SEQ ID NO: 37543 - protein, 362 aa, Homo sapiens
MKPTEGWKWTLNSGKAREWTPRDIEAQTQKPEPPESAEKLLESPGVEAGEGEAEKEEAGAQGRPLRALQNCCSVPSPLPPEDAGTGGLRQQEEEAVELQPPPPAPLSPPPPAPTAPQPPGDPLMSRLFYGVKAGPGVGAPRRSGHTFTVNPRRSVPPATPATPTSPATVDAAVPGAGKKRYPTAEEILVLGGYLRLSRSCLAKGSPERHHKQLKISFSETALETTYQYPSESSVLERRRAKLGLSPGEPSPVLGTVEAGPPDPDESAVLLEAIGPVHQNRFIRQERQQQQQQQQRSEELLAERKPGPLEARERRPSPGEMRDQSPKGRESREEDEEELLLLQPELQGGLRTKALIVDESCRR

SEQ ID NO: 37544 - protein, 165 aa, Homo sapiens
MSRLFYGVKAGPGVGAPRRSGHTFTVNPRRSVPPATPATPTSPATVDAAVPGAGKKRYPTAEEILVLGGYLRLSRSCLAKGSPERHHKQLKISFSETALETTYQYPSESSVLEELGPEPEVPSAPNPPAAQPDDEEDEEELLLLQPELQGGLRTKALIVDESCRR

SEQ ID NO: 37545 - protein, 214 aa, Homo sapiens
MRPGGFLGAGQRLSRAMSRCVLEPRPPGKRWMVAGLGNPGLPGTRHSVGMAVLGQLARRLGVAESWTRDRHCAADLALAPLGDAQLVLLRPRRLMNANGRSVARAAELFGLTAEEVYLVHDELDKPLGRLALKLGGSARGHNGVRSCISCLNSNAMPRLRVGIGRPAHPEAVQAHVLGCFSPAEQELLPLLLDRATDLILDHIRERSQGPSLGP

SEQ ID NO: 37546 - protein, 534 aa, Homo sapiens
MKQEGSARRRGADKAKPPPGGGEQEPPPPPAPQDVEMKEEAATGGGSTGEADGKTAAAAAEHSQRELDTVTLEDIKEHVKQLEKAVSGKEPRFVLRALRMLPSTSRRLNHYVLYKAVQGFFTSNNATRDFLLPFLEEPMDTEADLQFRPRTGKAASTPLLPEVEAYLQLLVVIFMMNSKRYKEAQKISDDLMQKISTQNRRALDLVAAKCYYYHARVYEFLDKLDVVRSFLHARLRTATLRHDADGQATLLNLLLRNYLHYSLYDQAEKLVSKSVFPEQANNNEWARYLYYTGRIKAIQLEYSEARRTMTNALRKAPQHTAVGFKQTVHKLLIVVELLLGEIPDRLQFRQPSLKRSLMPYFLLTQAVRTGNLAKFNQVLDQFGEKFQADGTYTLIIRLRHNVIKTGVRMISLSYSRISLADIAQKLQLDSPEDAEFIVAKAIRDGVIEASINHEKGYVQSKEMIDIYSTREPQLAFHQRISFCLDIHNMSVKAMRFPPKSYNKDLESAEERREREQQDLEFAKEMAEDDDDSFP

SEQ ID NO: 37547 - protein, 356 aa, Homo sapiens
MDTEADLQFRPRTGKAASTPLLPEVEAYLQLLVVIFMMNSKRYKEAQKISDDLMQKISTQNRRALDLVAAKCYYYHARVYEFLDKLDVVRSFLHARLRTATLRHDADGQATLLNLLLRNYLHYSLYDQAEKLVSKSVFPEQANNNEWARYLYYTGRIKAIQLEYSEARRTMTNALRKAPQHTAVGFKQTVHKLLIVVELLLGEIPDRLQFRQPSLKRSLMPYFLLTQAVRTGNLAKFNQVLDQFGEKFQADGTYTLIIRLRHNVIKTGVRMISLSYSRISLADIAQKLQLDSPEDAEFIVAKAIRDGVIEASINHEKGYVQSKEMIDIYSTREPQLAFHQRISFCLDIHNMSVKGW

SEQ ID NO: 37548 - protein, 91 aa, Homo sapiens
MGLEDEQKMLTESGDPEEEEEEEEELVDPLTTVREQCEQLEKCVKARERLELCDERVSSRSHTEEDCTEELFDFLHARDHCVAHKLFNNLK

SEQ ID NO: 37549 - protein, 417 aa, Homo sapiens
MARAMAAAWPLLLVALLVLSWPPPGTGDVVVQAPTQVPGFLGDSVTLPCYLQVPNMEVTHVSQLTWARHGESGSMAVFHQTQGPSYSESKRLEFVAARLGAELRNASLRMFGLRVEDEGNYTCLFVTFPQGSRSVDIWLRVLAKPQNTAEVQKVQLTGEPVPMARCVSTGGRPPAQITWHSDLGGMPNTSQVPGFLSGTVTVTSLWILVPSSQVDGKNVTCKVEHESFEKPQLLTVNLTVYYPPEVSISGYDNNWYLGQNEATLTCDARSNPEPTGYNWSTTMGPLPPFAVAQGAQLLIRPVDKPINTTLICNVTNALGARQAELTVQVKEGPPSEHSGISRNAIIFLVLGILVFLILLGIGIYFYWSKCSREVLWHCHLCPSSTEHASASANGHVSYSAVSRENSSSQDPQTEGTR

SEQ ID NO: 37550 - protein, 372 aa, Homo sapiens
MARAMAAAWPLLLVALLVLSWPPPGTGDVVVQAPTQVPGFLGDSVTLPCYLQVPNMEVTHVSQLTWARHGESGSMAVFHQTQGPSYSESKRLEFVAARLGAELRNASLRMFGLRVEDEGNYTCLFVTFPQGSRSVDIWLRVLAKPQNTAEVQKVQLTGEPVPMARCVSTGGRPPAQITWHSDLGGMPNTSQVPGFLSGTVTVTSLWILVPSSQVDGKNVTCKVEHESFEKPQLLTVNLTVYYPPEVSISGYDNNWYLGQNEATLTCDARSNPEPTGYNWSTTMGPLPPFAVAQGAQLLIRPVDKPINTTLICNVTNALGARQAELTVQVKEGPPSEHSGTEHASASANGHVSYSAVSRENSSSQDPQTEGTR

SEQ ID NO: 37551 - protein, 364 aa, Homo sapiens
MARAMAAAWPLLLVALLVLSWPPPGTGDVVVQAPTQVPGFLGDSVTLPCYLQVPNMEVTHVSQLTWARHGESGSMAVFHQTQGPSYSESKRLEFVAARLGAELRNASLRMFGLRVEDEGNYTCLFVTFPQGSRSVDIWLRVLAKPQNTAEVQKVQLTGEPVPMARCVSTGGRPPAQITWHSDLGGMPNTSQVPGFLSGTVTVTSLWILVPSSQVDGKNVTCKVEHESFEKPQLLTVNLTVYYPPEVSISGYDNNWYLGQNEATLTCDARSNPEPTGYNWSTTMGPLPPFAVAQGAQLLIRPVDKPINTTLICNVTNALGARQAELTVQVKGTEHASASANGHVSYSAVSRENSSSQDPQTEGTR

SEQ ID NO: 37552 - protein, 392 aa, Homo sapiens
MARAMAAAWPLLLVALLVLSWPPPGTGDVVVQAPTQVPGFLGDSVTLPCYLQVPNMEVTHVSQLTWARHGESGSMAVFHQTQGPSYSESKRLEFVAARLGAELRNASLRMFGLRVEDEGNYTCLFVTFPQGSRSVDIWLRVLAKPQNTAEVQKVQLTGEPVPMARCVSTGGRPPAQITWHSDLGGMPNTSQVPGFLSGTVTVTSLWILVPSSQVDGKNVTCKVEHESFEKPQLLTVNLTVYYPPEVSISGYDNNWYLGQNEATLTCDARSNPEPTGYNWSTTMGPLPPFAVAQGAQLLIRPVDKPINTTLICNVTNALGARQAELTVQVKEGPPSEHSGISRNAIIFLVLGILVFLILLGIGIYFYWSKCSREVLWHCHLCPSSEHHQSCRN

SEQ ID NO: 37553 - protein, 591 aa, Homo sapiens
MKYILVTGGVISGIGKGIIASSVGTILKSCGLHVTSIKIDPYINIDAGTFSPYEHGEVFVLDDGGEVDLDLGNYERFLDIRLTKDNNLTTGKIYQYVINKERKGDYLGKTVQVVPHITDAIQEWVMRQALIPVDEDGLEPQVCVIELGGTVGDIESMPFIEAFRQFQFKVKRENFCNIHVSLVPQPSSTGEQKTKPTQNSVRELRGLGLSPDLVVCRCSNPLDTSVKEKISMFCHVEPEQVICVHDVSSIYRVPLLLEEQGVVDYFLRRLDLPIERQPRKMLMKWKEMADRYDRLLETCSIALVGKYTKFSDSYASVIKALEHSALAINHKLEIKYIDSADLEPITSQEEPVRYHEAWQKLCSAHGVLVPGGFGVRGTEGKIQAIAWARNQKKPFLGVCLGMQLAVVEFSRNVLGWQDANSTEFDPTTSHPVVVDMPEHNPGQMGGTMRLGKRRTLFQTKNSVMRKLYGDADYLEERHRHRFEVNPVWKKCLEEQGLKFVGQDVEGERMEIVELEDHPFFVGVQYHPEFLSRPIKPSPPYFGLLLASVGRLSHYLQKGCRLSPRDTYSDRSGSSSPDSEITELKFPSINHD

SEQ ID NO: 37554 - protein, 360 aa, Homo sapiens
MFCHVEPEQVICVHDVSSIYRVPLLLEEQGVVDYFLRRLDLPIERQPRKMLMKWKEMADRYDRLLETCSIALVGKYTKFSDSYASVIKALEHSALAINHKLEIKYIDSADLEPITSQEEPVRYHEAWQKLCSAHGVLVPGGFGVRGTEGKIQAIAWARNQKKPFLGVCLGMQLAVVEFSRNVLGWQDANSTEFDPTTSHPVVVDMPEHNPGQMGGTMRLGKRRTLFQTKNSVMRKLYGDADYLEERHRHRFEVNPVWKKCLEEQGLKFVGQDVEGERMEIVELEDHPFFVGVQYHPEFLSRPIKPSPPYFGLLLASVGRLSHYLQKGCRLSPRDTYSDRSGSSSPDSEITELKFPSINHD

SEQ ID NO: 37555 - protein, 592 aa, Homo sapiens
MSDSGSYGQSGGEQQSYSTYGNPGSQGYGQASQSYSGYGQTTDSSYGQNYSGYSSYGQSQSGYSQSYGGYENQKQSSYSQQPYNNQGQQQNMESSGSQGGRAPSYDQPDYGQQDSYDQQSGYDQHQGSYDEQSNYDQQHDSYSQNQQSYHSQRENYSHHTQDDRRDVSRYGEDNRGYGGSQGGGRGRGGYDKDGRGPMTGSSGGDRGGFKNFGGHRDYGPRTDADSESDNSDNNTIFVQGLGEGVSTDQVGEFFKQIGIIKTNKKTGKPMINLYTDKDTGKPKGEATVSFDDPPSAKAAIDWFDGKEFHGNIIKVSFATRRPEFMRGGGSGGGRRGRGGYRGRGGFQGRGGDPKSGDWVCPNPSCGNMNFARRNSCNQCNEPRPEDSRPSGGDFRGRGYGGERGYRGRGGRGGDRGGYGGDRSGGGYGGDRSSGGGYSGDRSGGGYGGDRSGGGYGGDRGGGYGGDRGGGYGGDRGGGYGGDRGGYGGDRGGGYGGDRGGYGGDRGGYGGDRGGYGGDRGGYGGDRSRGGYGGDRGGGSGYGGDRSGGYGGDRSGGGYGGDRGGGYGGDRGGYGGKMGGRNDYRNDQRNRPY

SEQ ID NO: 37556 - protein, 589 aa, Homo sapiens
MSDSGSYGQSGGEQQSYSTYGNPGSQGYGQASQSYSGYGQTTDSSYGQNYSGYSSYGQSYSQSYGGYENQKQSSYSQQPYNNQGQQQNMESSGSQGGRAPSYDQPDYGQQDSYDQQSGYDQHQGSYDEQSNYDQQHDSYSQNQQSYHSQRENYSHHTQDDRRDVSRYGEDNRGYGGSQGGGRGRGGYDKDGRGPMTGSSGGDRGGFKNFGGHRDYGPRTDADSESDNSDNNTIFVQGLGEGVSTDQVGEFFKQIGIIKTNKKTGKPMINLYTDKDTGKPKGEATVSFDDPPSAKAAIDWFDGKEFHGNIIKVSFATRRPEFMRGGGSGGGRRGRGGYRGRGGFQGRGGDPKSGDWVCPNPSCGNMNFARRNSCNQCNEPRPEDSRPSGGDFRGRGYGGERGYRGRGGRGGDRGGYGGDRSGGGYGGDRSSGGGYSGDRSGGGYGGDRSGGGYGGDRGGGYGGDRGGGYGGDRGGGYGGDRGGYGGDRGGGYGGDRGGYGGDRGGYGGDRGGYGGDRGGYGGDRSRGGYGGDRGGGSGYGGDRSGGYGGDRSGGGYGGDRGGGYGGDRGGYGGKMGGRNDYRNDQRNRPY

SEQ ID NO: 37557 - protein, 404 aa, Homo sapiens
MAAGTAVGAWVLVLSLWGAVVGAQNITARIGEPLVLKCKGAPKKPPQRLEWKLNTGRTEAWKVLSPQGGGPWDSVARVLPNGSLFLPAVGIQDEGIFRCQAMNRNGKETKSNYRVRVYQIPGKPEIVDSASELTAGVPNKVGTCVSEGSYPAGTLSWHLDGKPLVPNEKGVSVKEQTRRHPETGLFTLQSELMVTPARGGDPRPTFSCSFSPGLPRHRALRTAPIQPRVWEPVPLEEVQLVVEPEGGAVAPGGTVTLTCEVPAQPSPQIHWMKDGVPLPLPPSPVLILPEIGPQDQGTYSCVATHSSHGPQESRAVSISIIEPGEEGPTAGSVGGSGLGTLALALGILGGLGTAALLIGVILWQRRQRRGEERKAPENQEEEEERAELNQSEEPEAGESSTGGP

SEQ ID NO: 37558 - protein, 342 aa, Homo sapiens
MAAGTAVGAWVLVLSLWGAVVGAQNITARIGEPLVLKCKGAPKKPPQRLEWKLGGGPWDSVARVLPNGSLFLPAVGIQDEGIFRCQAMNRNGKETKSNYRVRVYQIPGKPEIVDSASELTAGVPNKVGTCVSEGSYPAGTLSWHLDGKPLVPNEKGVSVKEQTRRHPETGLFTLQSELMVTPARGGDPRPTFSCSFSPGLPRHRALRTAPIQPRVWEPVPLEEVQLVVEPEGGAVAPGGTVTLTCEVPAQPSPQIHWMKDVSDLERGAGRTRRGGANCRLCGRIRAGNSSPGPGDPGRPGDSRPAHWGHLVAKAATPRRGEEGPRKPGGRGGACRTESVGGT

SEQ ID NO: 37559 - protein, 347 aa, Homo sapiens
MAAGTAVGAWVLVLSLWGAVVGAQNITARIGEPLVLKCKGAPKKPPQRLEWKLNTGRTEAWKVLSPQGGGPWDSVARVLPNGSLFLPAVGIQDEGIFRCQAMNRNGKETKSNYRVRVYQIPGKPEIVDSASELTAGVPNKVGTCVSEGSYPAGTLSWHLDGKPLVPNEKGVSVKEQTRRHPETGLFTLQSELMVTPARGGDPRPTFSCSFSPGLPRHRALRTAPIQPRVWEPVPLEEVQLVVEPEGGAVAPGGTVTLTCEVPAQPSPQIHWMKDGVPLPLPPSPVLILPEIGPQDQGTYSCVATHSSHGPQESRAVSISIIEPGEEGPTAGEGFDKVREAEDSPQHM

SEQ ID NO: 37560 - protein, 363 aa, Homo sapiens
MAAGTAVGAWVLVLSLWGAVVGAQNITARIGEPLVLKCKGAPKKPPQRLEWKLNTGRTEAWKVLSPQGGGPWDSVARVLPNGSLFLPAVGIQDEGIFRCQAMNRNGKETKSNYRVRVYQIPGKPEIVDSASELTAGVPNKVVEESRRSRKRPCEQEVGTCVSEGSYPAGTLSWHLDGKPLVPNEKGVSVKEQTRRHPETGLFTLQSELMVTPARGGDPRPTFSCSFSPGLPRHRALRTAPIQPRVWEPVPLEEVQLVVEPEGGAVAPGGTVTLTCEVPAQPSPQIHWMKDGVPLPLPPSPVLILPEIGPQDQGTYSCVATHSSHGPQESRAVSISIIEPGEEGPTAGEGFDKVREAEDSPQHM

SEQ ID NO: 37561 - protein, 121 aa, Homo sapiens
MAAGTAVGAWVLVLSLWGAVVGAQNITARIGEPLVLKCKGAPKKPPQRLEWKLNTGRTEAWKVLSPQGGGPWDSVARVLPNGSLFLPAVGIQDEGIFRCQAMNRNGKETKSNWWWSQKVEQ

SEQ ID NO: 37562 - protein, 420 aa, Homo sapiens
MAAGTAVGAWVLVLSLWGAVVGAQNITARIGEPLVLKCKGAPKKPPQRLEWKLNTGRTEAWKVLSPQGGGPWDSVARVLPNGSLFLPAVGIQDEGIFRCQAMNRNGKETKSNYRVRVYQIPGKPEIVDSASELTAGVPNKVVEESRRSRKRPCEQEVGTCVSEGSYPAGTLSWHLDGKPLVPNEKGVSVKEQTRRHPETGLFTLQSELMVTPARGGDPRPTFSCSFSPGLPRHRALRTAPIQPRVWEPVPLEEVQLVVEPEGGAVAPGGTVTLTCEVPAQPSPQIHWMKDGVPLPLPPSPVLILPEIGPQDQGTYSCVATHSSHGPQESRAVSISIIEPGEEGPTAGSVGGSGLGTLALALGILGGLGTAALLIGVILWQRRQRRGEERKAPENQEEEEERAELNQSEEPEAGESSTGGP

SEQ ID NO: 37563 - protein, 390 aa, Homo sapiens
MAAGTAVGAWVLVLSLWGAVVGAQNITARIGEPLVLKCKGAPKKPPQRLEWKLGGGPWDSVARVLPNGSLFLPAVGIQDEGIFRCQAMNRNGKETKSNYRVRVYQIPGKPEIVDSASELTAGVPNKVGTCVSEGSYPAGTLSWHLDGKPLVPNEKGVSVKEQTRRHPETGLFTLQSELMVTPARGGDPRPTFSCSFSPGLPRHRALRTAPIQPRVWEPVPLEEVQLVVEPEGGAVAPGGTVTLTCEVPAQPSPQIHWMKDGVPLPLPPSPVLILPEIGPQDQGTYSCVATHSSHGPQESRAVSISIIEPGEEGPTAGSVGGSGLGTLALALGILGGLGTAALLIGVILWQRRQRRGEERKAPENQEEEEERAELNQSEEPEAGESSTGGP

SEQ ID NO: 37564 - protein, 325 aa, Homo sapiens
MAAGTAVGAWVLVLSLWGAVVGAQNITARIGEPLVLKCKGAPKKPPQRLEWKLNTGRTEAWKVLSPQGGGPWDSVARVLPNGSLFLPAVGIQDEGIFRCQAMNRNGKETKSNYRVRVYQIPGKPEIVDSASELTAGVPNKVGTCVSEGSYPAGTLSWHLDGKPLVPNEKGVSVKEQTRRHPETGLFTLQSELMVTPARGGDPRPTFSCSFSPGLPRHRALRTAPIQPRVWEPVPLEEVQLVVEPEGGAVAPGGTVTLTCEVPAQPSPQIHWMKDNQARRGQLQVRGLIKSGKQKIAPNTCDWGDGQQERNGRPQKTRRKRRSVQN

SEQ ID NO: 37565 - protein, 355 aa, Homo sapiens
MAAGTAVGAWVLVLSLWGAVVGAQNITARIGEPLVLKCKGAPKKPPQRLEWKLNTGRTEAWKVLSPQGGGPWDSVARVLPNGSLFLPAVGIQDEGIFRCQAMNRNGKETKSNYRVRVYQIPGKPEIVDSASELTAGVPNKVGTCVSEGSYPAGTLSWHLDGKPLVPNEKGVSVKEQTRRHPETGLFTLQSELMVTPARGGDPRPTFSCSFSPGLPRHRALRTAPIQPRVWEPVPLEEVQLVVEPEGGAVAPGGTVTLTCEVPAQPSPQIHWMKDGLRTREPTAVWPPIPATGPRKAVLSASASSNQARRGQLQVRGLIKSGKQKIAPNTCDWGDGQQERNGRPQKTRRKRRSVQN

SEQ ID NO: 37566 - protein, 386 aa, Homo sapiens
MAAGTAVGAWVLVLSLWGAVVGAQNITARIGEPLVLKCKGAPKKPPQRLEWKLNTGRTEAWKVLSPQGGGPWDSVARVLPNGSLFLPAVGIQDEGIFRCQAMNRNGKETKSNYRVRVYQIPGKPEIVDSASELTAGVPNKVGTCVSEGSYPAGTLSWHLDGKPLVPNEKGVSVKEQTRRHPETGLFTLQSELMVTPARGGDPRPTFSCSFSPGLPRHRALRTAPIQPRVWEPVPLEEVQLVVEPEGGAVAPGGTVTLTCEVPAQPSPQIHWMKDGVPLPLPPSPVLILPEIGPQDQGTYSCVATHSSHGPQESRAVSISIIEPGEEGPTAGSVGGSGLGTLALALGILGGLGTAALLIGVILWQRRQRRGEERPQKTRRKRRSVQN

SEQ ID NO: 37567 - protein, 105 aa, Homo sapiens
MNPSEMQRKAPPRRRRHRNRAPLTHKMNKMVTSEEQMKLPSTKKAEPPTWAQLKKLTQLATKYLENTKVTQTPESMLLAALMIVSMVSAGVLNSSEETATIENGP

SEQ ID NO: 37568 - protein, 455 aa, Homo sapiens
MTTSGHACPVPAVNGHMTHYPATPYPLLFPPVIGGLSLPPLHGLHGHPPPSGCSTPSPATIETQSTSSEELVPSPPSPLPPPRVYKPCFVCQDKSSGYHYGVSACEGCKGFFRRSIQKNMIYTCHRDKNCVINKVTRNRCQYCRLQKCFEVGMSKESVRNDRNKKKKETSKQECTESYEMTAELDDLTEKIRKAHQETFPSLCQLGKYTTNSSADHRVRLDLGLWDKFSELATKCIIKIVEFAKRLPGFTGLTIADQITLLKAACLDILILRICTRYTPEQDTMTFSDGLTLNRTQMHNAGFGPLTDLVFTFANQLLPLEMDDTETGLLSAICLICGDRQDLEEPTKVDKLQEPLLEALKIYIRKRRPSKPHMFPKILMKITDLRSISAKGAERVITLKMEIPGSMPPLIQEMLENSEGHEPLTPSSSGNTAEHSPSISPSSVENSGVSQSPLVQ

SEQ ID NO: 37569 - protein, 448 aa, Homo sapiens
MFDCMDVLSVSPGQILDFYTASPSSCMLQEKALKACFSGLTQTEWQHRHTAQSIETQSTSSEELVPSPPSPLPPPRVYKPCFVCQDKSSGYHYGVSACEGCKGFFRRSIQKNMIYTCHRDKNCVINKVTRNRCQYCRLQKCFEVGMSKESVRNDRNKKKKETSKQECTESYEMTAELDDLTEKIRKAHQETFPSLCQLGKYTTNSSADHRVRLDLGLWDKFSELATKCIIKIVEFAKRLPGFTGLTIADQITLLKAACLDILILRICTRYTPEQDTMTFSDGLTLNRTQMHNAGFGPLTDLVFTFANQLLPLEMDDTETGLLSAICLICGDRQDLEEPTKVDKLQEPLLEALKIYIRKRRPSKPHMFPKILMKITDLRSISAKGAERVITLKMEIPGSMPPLIQEMLENSEGHEPLTPSSSGNTAEHSPSISPSSVENSGVSQSPLVQ

SEQ ID NO: 37570 - protein, 336 aa, Homo sapiens
MIYTCHRDKNCVINKVTRNRCQYCRLQKCFEVGMSKESVRNDRNKKKKETSKQECTESYEMTAELDDLTEKIRKAHQETFPSLCQLGKYTTNSSADHRVRLDLGLWDKFSELATKCIIKIVEFAKRLPGFTGLTIADQITLLKAACLDILILRICTRYTPEQDTMTFSDGLTLNRTQMHNAGFGPLTDLVFTFANQLLPLEMDDTETGLLSAICLICGDRQDLEEPTKVDKLQEPLLEALKIYIRKRRPSKPHMFPKILMKITDLRSISAKGAERVITLKMEIPGSMPPLIQEMLENSEGHEPLTPSSSGNTAEHSPSISPSSVENSGVSQSPLVQ

SEQ ID NO: 37571 - protein, 357 aa, Homo sapiens
MATTVPDGCRNGLKSKYYRLCDKAEAWGIVLETVATAGVVTSVAFMLTLPILVCKVQDSNRRKMLPTQFLFLLGVLGIFGLTFAFIIGLDGSTGPTRFFLFGILFSICFSCLLAHAVSLTKLVRGRKPLSLLVILGLAVGFSLVQDVIAIEYIVLTMNRTNVNVFSELSAPRRNEDFVLLLTYVLFLMALTFLMSSFTFCGSFTGWKRHGAHIYLTMLLSIAIWVAWITLLMLPDFDRRWDDTILSSALAANGWVFLLAYVSPEFWLLTKQRNPMDYPVEDAFCKPQLVKKSYGVENRAYSQEEITQGFEETGDTLYAPYSTHFQLQNQPPQKEFSIPRAHAWPSPYKDYEVKKEGS

SEQ ID NO: 37572 - protein, 266 aa, Homo sapiens
MGAAAAEADRTLFVGNLETKVTEELLFELFHQAGPVIKVKIPKDKDGKPKQFAFVNFKHEVSVPYAMNLLNGIKLYGRPIKIQFRSGSSHAPQDVSLSYPQHHVGNSSPTSTSPSRYERTMDNMTSSAQIIQRSFSSPENFQRQAVMNSALRQMSYGGKFGSSPLDQSGFSPSVQSHSHSFNQSSSSQWRQGTPSSQRKVRMNSYPYLADRHYSREQRYTDHGSDHHYRGKRDDFFYEDRNHDDWSHDYDNRRDSSRDGKWRSSRH

SEQ ID NO: 37573 - protein, 538 aa, Homo sapiens
MNLELLESFGQNYPEEADGTLDCISMALTCTFNRWGTLLAVGCNDGRIVIWDFLTRGIAKIISAHIHPVCSLCWSRDGHKLVSASTDNIVSQWDVLSGDCDQRFRFPSPILKVQYHPRDQNKVLVCPMKSAPVMLTLSDSKHVVLPVDDDSDLNVVASFDRRGEYIYTGNAKGKILVLKTDSQDLVASFRVTTGTSNTTAIKSIEFARKGSCFLINTADRIIRVYDGREILTCGRDGEPEPMQKLQDLVNRTPWKKCCFSGDGEYIVAGSARQHALYIWEKSIGNLVKILHGTRGELLLDVAWHPVRPIIASISSGVVSIWAQNQVENWSAFAPDFKELDENVEYEERESEFDIEDEDKSEPEQTGADAAEDEEVDVTSVDPIAAFCSSDEELEDSKALLYLPIAPEVEDPEENPYGPPPDAVQTSLMDEGASSEKKRQSSADGSQPPKKKPKTTNIELQGVPNDEVHPLLGVKGDGKSKKKQAGRPKGSKGKEKDSPFKPKLYKGDRGLPLEGSAKGKVQAELSQPLTAGGAISELL

SEQ ID NO: 37574 - protein, 500 aa, Homo sapiens
MNLELLESFGQNYPEEADGTLDCISMALTCTFNRWGTLLAVGCNDGRIVIWDFLTRGIAKIISAHIHPVCSLCWSRDGHKLVSASTDNIVSQWDVLSGDCDQRFRFPSPILKVQYHPRDQNKVLVCPMKSAPVMLTLSDSKHVVLPVDDDSDLNVVASFDRRGEYIYTGNAKGKILVLKTDSQDLVASFRVTTGTSNTTAIKSIEFARKGSCFLINTADRIIRVYDGREILTCGRDGEPEPMQKLQDLVNRTPWKKCCFSGDGEYIVAGSARQHALYIWEKSIGNLVKILHGTRGELLLDVAWHPVRPIIASISSGVVSIWAQNQVENWSAFAPDFKELDENVEYEERESEFDIEDEDKSEPEQTGADAAEDEEVDVTSVDPIAAFCSSDEELEDSKALLYLPIAPEVEDPEENPYGPPPDAVQTSLMDEGASSEKKRQSSADGSQPPKKKPKTTNIELQGVPNDEVHPLLGVKGDGKSKKKQAGRPKGSKAGGAISELL

SEQ ID NO: 37575 - protein, 208 aa, Homo sapiens
MSTGGDFGNPLRKFKLVFLGEQSVGKTSLITRFMYDSFDNTYQATIGIDFLSKTMYLEDRTVRLQLWDTAGQERFRSLIPSYIRDSTVAVVVYDITNVNSFQQTTKWIDDVRTERGSDVIIMLVGNKTDLADKRQVSIEEGERKAKELNVMFIETSAKAGYNVKQLFRRVAAALPGMESTQDRSREDMIDIKLEKPQEQPVSEGGCSC

SEQ ID NO: 37576 - protein, 208 aa, Homo sapiens
MSTGGDFGNPLRKFKLVFLGEQSVGKTSLITRFMYDSFDNTYQATIGIDFLSKTMYLEDRTIRLQLWDTAGQERFRSLIPSYIRDSAAAVVVYDITNVNSFQQTTKWIDDVRTERGSDVIIMLVGNKTDLADKRQVSIEEGERKAKELNVMFIETSAKAGYNVKQLFRRVAAALPGMESTQDRSREDMIDIKLEKPQEQPVSEGGCSC

SEQ ID NO: 37577 - protein, 104 aa, Homo sapiens
MSTGGDFGNPLRKFKLVFLGEQSVGKTSLITRFMYDSFDNTYQATIGIDFLSKTMYLEDRTLFRRVAAALPGMESTQDRSREDMIDIKLEKPQEQPVSEGGCSC

SEQ ID NO: 37578 - protein, 175 aa, Homo sapiens
MYDSFDNTYQATIGIDFLSKTMYLEDRTIRLQLWDTAGQERFRSLIPSYIRDSAAAVVVYDITNVNSFQQTTKWIDDVRTERGSDVIIMLVGNKTDLADKRQVSIEEGERKAKELNVMFIETSAKAGYNVKQLFRRVAAALPGMESTQDRSREDMIDIKLEKPQEQPVSEGGCSC

SEQ ID NO: 37579 - protein, 137 aa, Homo sapiens
MPNFAGTWKMRSSENFDELLKALGVNAMLRKVAVAAASKPHVEIRQDGDQFYIKTSTTVRTTEINFKVGEGFEEETVDGRKCRSLATWENENKIHCTQTLLEGDGPKTYWTRELANDELILTFGADDVVCTRIYVRE

SEQ ID NO: 37580 - protein, 100 aa, Homo sapiens
MAKNKLRGPKSRNVFHIASQKNFKAKNKAKPVTTNLKKINIMNEEKVNRVNKAFVNVQKELAHFAKSISLEPLQKELIPQQRHESKPVNVDEATRLMALL

SEQ ID NO: 37581 - protein, 43 aa, Homo sapiens
MAKNKLRGPKSRNVFHIASQKNFKAKNKAKPVTTNLKKVLHFS

SEQ ID NO: 37582 - protein, 138 aa, Homo sapiens
MPNFSGNWKIIRSENFEELLKVLGVNVMLRKIAVAAASKPAVEIKQEGDTFYIKTSTTVRTTEINFKVGEEFEEQTVDGRPCKSLVKWESENKMVCEQKLLKGEGPKTSWTRELTNDGELILTMTADDVVCTRVYVRE

SEQ ID NO: 37583 - protein, 223 aa, Homo sapiens
MTGTPGAVATRDGEAPERSPPCSPSYDLTGKVMLLGDTGVGKTCFLIQFKDGAFLSGTFIATVGIDFRNKVVTVDGVRVKLQIWDTAGQERFRSVTHAYYRDAQALLLLYDITNKSSFDNIRAWLTEIHEYAQRDVVIMLLGNKADMSSERVIRSEDGETLAREYGVPFLETSAKTGMNVELAFLAIAKELKYRAGHQADEPSFQIRDYVESQKKRSSCCSFM

SEQ ID NO: 37584 - protein, 216 aa, Homo sapiens
MDLQRPDSYQGGAGPDFNDHVLHKTILVGDSGVGKTSLLVQFDQGKFIPGSFSATVGIGFTNKVVTVDGVRVKLQIWDTAGQERFRSVTHAYYRDAQALLLLYDITNKSSFDNIRAWLTEIHEYAQRDVVIMLLGNKADMSSERVIRSEDGETLAREYGVPFLETSAKTGMNVELAFLAIAKELKYRAGHQADEPSFQIRDYVESQKKRSSCCSFM

SEQ ID NO: 37585 - protein, 228 aa, Homo sapiens
MWLMSEAHGAEPVLLREAARPFTQTLRLCVPSGNSKVMLLGDTGVGKTCFLIQFKDGAFLSGTFIATVGIDFRNKVVTVDGVRVKLQIWDTAGQERFRSVTHAYYRDAQALLLLYDITNKSSFDNIRAWLTEIHEYAQRDVVIMLLGNKADMSSERVIRSEDGETLAREYGVPFLETSAKTGMNVELAFLAIAKELKYRAGHQADEPSFQIRDYVESQKKRSSCCSFM

SEQ ID NO: 37586 - protein, 186 aa, Homo sapiens
MTGTPGAVATRDGEAPERSPPCSPSYDLTGKNKVVTVDGVRVKLQIWDTAGQERFRSVTHAYYRDAQALLLLYDITNKSSFDNIRAWLTEIHEYAQRDVVIMLLGNKADMSSERVIRSEDGETLAREYGVPFLETSAKTGMNVELAFLAIAKELKYRAGHQADEPSFQIRDYVESQKKRSSCCSFM

SEQ ID NO: 37587 - protein, 496 aa, Homo sapiens
MVEADHPGKLFIGGLNRETNEKMLKAVFGKHGPISEVLLIKDRTSKSRGFAFITFENPADAKNAAKDMNGKSLHGKAIKVEQAKKPSFQSGGRRRPPASSRNRSPSGSLRSARGSRGGTRGWLPSQEGHLDDGGYTPDLKMSYSRGLIPVKRGPSSRSGGPPPKKSAPSAVARSNSWMGSQGPMSQRRENYGVPPRRATISSWRNDRMSTRHDGYATNDGNHPSCQETRDYAPPSRGYAYRDNGHSNRDEHSSRGYRNHRSSRETRDYAPPSRGHAYRDYGHSRRDESYSRGYRNRRSSRETREYAPPSRGHGYRDYGHSRRHESYSRGYRNHPSSRETRDYAPPHRDYAYRDYGHSSWDEHSSRGYSYHDGYGEALGRDHSEHLSGSSYRDALQRYGTSHGAPPARGPRMSYGGSTCHAYSNTRDRYGRSWESYSSCGDFHYCDREHVCRKDQRNPPSLGRVLPDPREACGSSSYVASIVDGGESRSEKGDSSRY

SEQ ID NO: 37588 - protein, 459 aa, Homo sapiens
MVEADHPGKLFIGGLNRETNEKMLKAVFGKHGPISEVLLIKDRTSKSRGFAFITFENPADAKNAAKDMNGKSLHGKAIKVEQAKKPSFQSGGRRRPPASSRNRSPSGSLRSARGSRGGTRGWLPSQEGHLDDGGYTPDLKMSYSRGLIPVKRGPSSRSGGPPPKKSAPSAVARSNSWMGSQGPMSQRRENYGVPPRRATISSWRNDRMSTRHDGYATNDGNHPSCQETRDYAPPSRGYAYRDNGHSNRDEHSSRGYRNHRSSRETRDYAPPSRGHAYRDYGHSRRDESYSRGYRNRRSSRETREYAPPSRGHGYRDYGHSRRHESYSRGYSYHDGYGEALGRDHSEHLSGSSYRDALQRYGTSHGAPPARGPRMSYGGSTCHAYSNTRDRYGRSWESYSSCGDFHYCDREHVCRKDQRNPPSLGRVLPDPREACGSSSYVASIVDGGESRSEKGDSSRY

SEQ ID NO: 37589 - protein, 496 aa, Homo sapiens
MVEADHPGKLFIGGLNRETNEKMLKAVFGKHGPISEVLLIKDRTSKSRGFAFITFENPADAKNAAKDMNGKSLHGKAIKVEQAKKPSFQSGGRRRPPASSRNRSPSGSLRSARGSRGGTRGWLPSQEGHLDDGGYTPDLKMSYSRGLIPVKRGPSSRSGGPPPKKSAPSAVARSNSWMGSQGPMSQRRENYGVPPRRATISSWRNDRMSTRHDGYATNDGNHPSCQETRDYAPPSRGYAYRDNGHSNRDEHSSRGYRNHRSSRETRDYAPPSRGHAYRDYGHSRRDESYSRGYRNRRSSRETREYAPPSRGHGYRDYGHSRRHESYSRGYRNHPSSRETRDYAPPHRDYAYRDYGHSSWDEHSSRGYSYHDGYGEALGRDHSEHLSGSSYRDALQRYGTAHGAPPARGPRMSYGGSTCHAYSNTRDRYGRSWESYSSCGDFHYCDREHVCRKDQRNPPSLGRVLPDPREACGSSSYVASIVDGGESRSEKGDSSRY

SEQ ID NO: 37590 - protein, 158 aa, Homo sapiens
MASRSMRLLLLLSCLAKTGVLGDIIMRPSCAPGWFYHKSNCYGYFRKLRNWSDAELECQSYGNGAHLASILSLKEASTIAEYISGYQRSQPIWIGLHDPQKRQQWQWIDGAMYLYRSWSGKSMGGNKHCAEMSSNNNFLTWSSNECNKRQHFLCKYRP

SEQ ID NO: 37591 - protein, 134 aa, Homo sapiens
MASRSMRLLLLLSCLAKTGVLGDIIMRPSCAPGWFYHKSNCYGYFRKLRNWSDAEVRNLLPAWPGLSRAKDQPEPQISFDSGSSVLPGHYEEKPLWLVKWREEGCVFNSFNSVSIAEAGAVCQTLDGLQAHTDT

SEQ ID NO: 37592 - protein, 495 aa, Homo sapiens
MAQGNNYGQTSNGVADESPNMLVYRKMEDVIARMQDEKNGIPIRTVKSFLSKIPSVFSGSDIVQWLIKNLTIEDPVEALHLGTLMAAHGYFFPISDHVLTLKDDGTFYRFQTPYFWPSNCWEPENTDYAVYLCKRTMQNKARLELADYEAESLARLQRAFARKWEFIFMQAEAQAKVDKKRDKIERKILDSQERAFWDVHRPVPGCVNTTEVDIKKSSRMRNPHKTRKSVYGLQNDIRSHSPTHTPTPETKPPTEDELQQQIKYWQIQLDRHRLKMSKVADSLLSYTEQYLEYDPFLLPPDPSNPWLSDDTTFWELEASKEPSQQRVKRWGFGMDEALKDPVGREQFLKFLESEFSSENLRFWLAVEDLKKRPIKEVPSRVQEIWQEFLAPGAPSAINLDSKSYDKTTQNVKEPGRYTFEDAQEHIYKLMKSDSYPRFIRSSAYQELLQAKKKSGNSMDRRTSFEKFAQNVGRNIPIFPCHKNCTPTLRASTNLL

SEQ ID NO: 37593 - protein, 469 aa, Homo sapiens
MAQGNNYGQTSNGVADESPNMLVYRKMEDVIARMQDEKNGIPIRTVKSFLSKIPSVFSGSDIVQWLIKNLTIEDPVEALHLGTLMAAHGYFFPISDHVLTLKDDGTFYRFQTPYFWPSNCWEPENTDYAVYLCKRTMQNKARLELADYEAESLARLQRAFARKWEFIFMQAEAQAKVDKKRDKIERKILDSQERAFWDVHRPVPGCVNTTEVDIKKSSRMRNPHKTRKSVYGLQNDIRSHSPTHTPTPETKPPTEDELQQQIKYWQIQLDRHRLKMSKVADSLLSYTEQYLEYDPFLLPPDPSNPWLSDDTTFWELEASKEPSQQRVKRWGFGMDEALKDPVGREQFLKFLESEFSSENLRFWLAVEDLKKRPIKEVPSRVQEIWQEFLAPGAPSAINLDSKSYDKTTQNVKEPGRYTFEDAQEHIYKLMKSDSYPRFIRSSAYQELLQAKKKGKSLTSKRLTSLAQSY

SEQ ID NO: 37594 - protein, 477 aa, Homo sapiens
MAQGNNYGQTSNGVADESPNMLVYRKMEDVIARMQDEKNGIPIRTVKSFLSKIPSVFSGSDIVQWLIKNLTIEDPVEALHLGTLMAAHGYFFPISDHVLTLKDDGTFYRFQTPYFWPSNCWEPENTDYAVYLCKRTMQNKARLELADYEAESLARLQRAFARKWEFIFMQAEAQAKVDKKRDKIERKILDSQERAFWDVHRPVPGCVNTTEVDIKKSSRMRNPHKTRKSVYGLQNDIRSHSPTHTPTPETKPPTEDELQQQIKYWQIQLDRHRLKMSKVADSLLSYTEQYLEYDPFLLPPDPSNPWLSDDTTFWELEASKEPSQQRVKRWGFGMDEALKDPVGREQFLKFLESEFSSENLRFWLAVEDLKKRPIKEVPSRVQEIWQEFLAPGAPSAINLDSKSYDKTTQNVKEPGRYTFEDAQEHIYKLMKSDSYPRFIRSSAYQELLQAKKKGRNIPIFPCHKNCTPTLRASTNLL

SEQ ID NO: 37595 - protein, 424 aa, Homo sapiens
MAQGNNYGQTSNGVADESPNMLVYRKMEDVIARMQDEKNGIPIRTVKSFLSKIPSVFSGSDIVQWLIKNLTIEDPAVYLCKRTMQNKARLELADYEAESLARLQRAFARKWEFIFMQAEAQAKVDKKRDKIERKILDSQERAFWDVHRPVPGCVNTTEVDIKKSSRMRNPHKTRKSVYGLQNDIRSHSPTHTPTPETKPPTEDELQQQIKYWQIQLDRHRLKMSKVADSLLSYTEQYLEYDPFLLPPDPSNPWLSDDTTFWELEASKEPSQQRVKRWGFGMDEALKDPVGREQFLKFLESEFSSENLRFWLAVEDLKKRPIKEVPSRVQEIWQEFLAPGAPSAINLDSKSYDKTTQNVKEPGRYTFEDAQEHIYKLMKSDSYPRFIRSSAYQELLQAKKKGRNIPIFPCHKNCTPTLRASTNLL

SEQ ID NO: 37596 - protein, 487 aa, Homo sapiens
MAQGNNYGQTSNGVADESPNMLVYRKMEDVIARMQDEKNGIPIRTVKSFLSKIPSVFSGSDIVQWLIKNLTIEDPVEALHLGTLMAAHGYFFPISDHVLTLKDDGTFYRFQTPYFWPSNCWEPENTDYAVYLCKRTMQNKARLELADYEAESLARLQRAFARKWEFIFMQAEAQAKVDKKRDKIERKILDSQERAFWDVHRPVPGCVNTTEVDIKKSSRMRNPHKTRKSVYGLQNDIRSHSPTHTPTPETKPPTEDELQQQIKYWQIQLDRHRLKMSKVADSLLSYTEQYLEYDPFLLPPDPSNPWLSDDTTFWELEASKEPSQQRVKRWGFGMDEALKDPVGREQFLKFLESEFSSENLRFWLAVEDLKKRPIKEVPSRVQEIWQEFLAPGAPSAINLDSKSYDKTTQNVKEPGRYTFEDAQEHIYKLMKSDSYPRFIRSSAYQELLQAKKKSGNSMDRRTSFEKFAQNVGKSLTSKRLTSLAQSY

SEQ ID NO: 37597 - protein, 1251 aa, Homo sapiens
MRRGGWRKRAENDGWETWGGYMAAKVQKLEEQFRSDAAMQKDGTSSTIFSGVAIYVNGYTDPSAEELRKLMMLHGGQYHVYYSRSKTTHIIATNLPNAKIKELKGEKVIRPEWIVESIKAGRLLSYIPYQLYTKQSSVQKGLSFNPVCRPEDPLPGPSNIAKQLNNRVNHIVKKIETENEVKVNGMNSWNEEDENNDFSFVDLEQTSPGRKQNGIPHPRGSTAIFNGHTPSSNGALKTQDCLVPMVNSVASRLSPAFSQEEDKAEKSSTDFRDCTLQQLQQSTRNTDALRNPHRTNSFSLSPLHSNTKINGAHHSTVQGPSSTKSTSSVSTFSKAAPSVPSKPSDCNFISNFYSHSRLHHISMWKCELTEFVNTLQRQSNGIFPGREKLKKMKTGRSALVVTDTGDMSVLNSPRHQSCIMHVDMDCFFVSVGIRNRPDLKGKPVAVTSNRGTGRAPLRPGANPQLEWQYYQNKILKGKAADIPDSSLWENPDSAQANGIDSVLSRAEIASCSYEARQLGIKNGMFFGHAKQLCPNLQAVPYDFHAYKEVAQTLYETLASYTHNIEAVSCDEALVDITEILAETKLTPDEFANAVRMEIKDQTKCAASVGIGSNILLARMATRKAKPDGQYHLKPEEVDDFIRGQLVTNLPGVGHSMESKLASLGIKTCGDLQYMTMAKLQKEFGPKTGQMLYRFCRGLDDRPVRTEKERKSVSAEINYGIRFTQPKEAEAFLLSLSEEIQRRLEATGMKGKRLTLKIMVRKPGAPVETAKFGGHGICDNIARTVTLDQATDNAKIIGKAMLNMFHTMKLNISDMRGVGIHVNQLVPTNLNPSTCPSRPSVQSSHFPSGSYSVRDVFQVQKAKKSTEEEHKEVFRAAVDLEISSASRTCTFLPPFPAHLPTSPDTNKAESSGKWNGLHTPVSVQSRLNLSIEVPSPSQLDQSVLEALPPDLREQVEQVCAVQQAESHGDKKKEPVNGCNTGILPQPVGTVLLQIPEPQESNSDAGINLIALPAFSQVDPEVFAALPAELQRELKAAYDQRQRQGENSTHQQSASASVPKNPLLHLKAAVKEKKRNKKKKTIGSPKRIQSPLNNKLLNSPAKTLPGACGSPQKLIDGFLKHEGPPAEKPLEELSASTSGVPGLSSLQSDPAGCVRPPAPNLAGAVEFNDVKTLLREWITTISDPMEEDILQVVKYCTDLIEEKDLEKLDLVIKYMKRLMQQSVESVWNMAFDFILDNVQVVLQQTYGSTLKVT

SEQ ID NO: 37598 - protein, 1250 aa, Homo sapiens
MRRGGWRKRAENDGWETWGGYMAAKVQKLEEQFRSDAAMQKDGTSSTIFSGVAIYVNGYTDPSAEELRKLMMLHGGQYHVYYSRSKTTHIIATNLPNAKIKELKGEKVIRPEWIVESIKAGRLLSYIPYQLYTKQSSVQKGLSFNPVCRPEDPLPGPSNIAKQLNNRVNHIVKKIETENEVKVNGMNSWNEEDENNDFSFVDLEQTSPGRKQNGIPHPRGSTAIFNGHTPSSNGALKTQDCLVPMVNSVASRLSPAFSQEEDKAEKSSTDFRDCTLQQLQQSTRNTDALRNPHRTNSFSLSPLHSNTKINGAHHSTVQGPSSTKSTSSVSTFSKAAPSVPSKPSDCNFISNFYSHSRLHHISMWKCELTEFVNTLQRQSNGIFPGREKLKKMKTGRSALVVTDTGDMSVLNSPRHQSCIMHVDMDCFFVSVGIRNRPDLKGKPVAVTSNRGTGRAPLRPGANPQLEWQYYQNKILKGKADIPDSSLWENPDSAQANGIDSVLSRAEIASCSYEARQLGIKNGMFFGHAKQLCPNLQAVPYDFHAYKEVAQTLYETLASYTHNIEAVSCDEALVDITEILAETKLTPDEFANAVRMEIKDQTKCAASVGIGSNILLARMATRKAKPDGQYHLKPEEVDDFIRGQLVTNLPGVGHSMESKLASLGIKTCGDLQYMTMAKLQKEFGPKTGQMLYRFCRGLDDRPVRTEKERKSVSAEINYGIRFTQPKEAEAFLLSLSEEIQRRLEATGMKGKRLTLKIMVRKPGAPVETAKFGGHGICDNIARTVTLDQATDNAKIIGKAMLNMFHTMKLNISDMRGVGIHVNQLVPTNLNPSTCPSRPSVQSSHFPSGSYSVRDVFQVQKAKKSTEEEHKEVFRAAVDLEISSASRTCTFLPPFPAHLPTSPDTNKAESSGKWNGLHTPVSVQSRLNLSIEVPSPSQLDQSVLEALPPDLREQVEQVCAVQQAESHGDKKKEPVNGCNTGILPQPVGTVLLQIPEPQESNSDAGINLIALPAFSQVDPEVFAALPAELQRELKAAYDQRQRQGENSTHQQSASASVPKNPLLHLKAAVKEKKRNKKKKTIGSPKRIQSPLNNKLLNSPAKTLPGACGSPQKLIDGFLKHEGPPAEKPLEELSASTSGVPGLSSLQSDPAGCVRPPAPNLAGAVEFNDVKTLLREWITTISDPMEEDILQVVKYCTDLIEEKDLEKLDLVIKYMKRLMQQSVESVWNMAFDFILDNVQVVLQQTYGSTLKVT

SEQ ID NO: 37599 - protein, 392 aa, Homo sapiens
MAAKVQKLEEQFRSDAAMQKDGTSSTIFSGVAIYVNGYTDPSAEELRKLMMLHGGQYHVYYSRSKTTHIIATNLPNAKIKELKGEKVIRPEWIVESIKAGRLLSYIPYQLYTKQSSVQKGLSFNPVCRPEDPLPGPSNIAKQLNNRVNHIVKKIETENEVKVNGMNSWNEEDENNDFSFVDLEQTSPGRKQNGIPHPRGSTAIFNGHTPSSNGALKTQDCLVPMVNSVASRLSPAFSQEEDKAEKSSTDFRDCTLQQLQQSTRNTDALRNPHRTNSFSLSPLHSNTKINGAHHSTVQGPSSTKSTSSVSTFSKAAPSVPSKPSDCNFISNFYSHSRLHHISMWKCELTEFVNTLQRQSNGIFPGREKLKKMKTGRSALVVTDTGRYLLKLSS

SEQ ID NO: 37600 - protein, 818 aa, Homo sapiens
MKKQFNRMRQLANQTVGRAEKTEVLSEDLLQVEKRLELVKQVSHSTHKKLTACLQGQQGAEADKRSKKLPLTTLAQCLMEGSAILGDDTLLGKMLKLCGETEDKLAQELIHFELQVERDVIEPLFLLAEVEIPNIQKQRKHLAKLVLDMDSSRTRWQQTSKSSGLSSSLQPAGAKADALREEMEEAANRVEICRDQLSADMYSFVAKEIDYANYFQTLIEVQAEYHRKSLTLLQAVLPQIKAQQEAWVEKPSFGKPLEEHLTISGREIAFPIEACVTMLLECGMQEEGLFRVAPSASKLKKLKAALDCCVVDVQEYSADPHAIAGALKSYLRELPEPLMTFELYDEWIQASNVQEQDKKLQALWNACEKLPKANHNNIRYLIKFLSKLSEYQDVNKMTPSNMAIVLGPNLLWPQAEGNITEMMTTVSLQIVGIIEPIIQHADWFFPGEIEFNITGNYGSPVHVNHNANYSSMPSPDMDPADRRQPEQARRPLSVATDNMMLEFYKKDGLRKIQSMGVRVMDTNWVARRGSSAGRKVSCAPPSMQPPAPPAELAAPLPSPLPEQPLDSPAAPALSPSGLGLQPGPERTSTTKSKELSPGSAQKGSPGSSQGTACAGTQPGAQPGAQPGASPSPSQPPADQSPHTLRKVSKKLAPIPPKVPFGQPGAMADQSAGQPSPVSLSPTPPSTPSPYGLSYPQGYSLASGQLSPAAAPPLASPSVFTSTLSKSRPTPKPRQRPTLPPPQPPTVNLSASSPQSTEAPMLDGMSPGESMSTDLVHFDIPSIHIELGSTLRLSPLEHMRRHSVTDKRDSEEESESTAL

SEQ ID NO: 37601 - protein, 768 aa, Homo sapiens
MKKQFNRMRQLANQTVGRAEKTEVLSEDLLQVEKRLELVKQVSHSTHKKLTACLQGQQGAEADKRSKKLPLTTLAQCLMEGSAILGDDTLLGKMLKLCGETEDKLAQELIHFELQVERDVIEPLFLLAEVEIPNIQKQRKHLAKLVLDMDSSRTRWQQTSKSSGLSSSLQPAGAKADALREEMEEAANRVEICRDQLSADMYSFVAKEIDYANYFQTLIEVQAEYHRKSLTLLQAVLPQIKAQQEAWVEKPSFGKPLEEHLTISGREIAFPIEACVTMLLECGMQEEGLFRVAPSASKLKKLKAALDCCVVDVQEYSADPHAIAGALKSYLRELPEPLMTFELYDEWIQASNVQEQDKKLQALWNACEKLPKANHNNIRYLIKFLSKLSEYQDVNKMTPSNMAIVLGPNLLWPQAEGNITEMMTTVSLQIVGIIEPIIQHADWFFPGEIEFNITGNYGSPVHVNHNANYSSMPSPDMDPADRRQPEQARRPLSVATDNMMLEFYKKDGMGVRVMDTNWVARRGSSAGRKVSCAPPSMQPPAPPAELAAPLPSPLPEQPLDSPAAPALSPSGLGLQPGPERTSTTKSKELSPGSAQKGSPGSSQGTACAGTQPGAQPGAQPGASPSPSQPPADQSPHTLRKVSKKLAPIPPKVPFGQPGAMADQSAGQPSPVSLSPTPPSTPSPYGLSYPQGYSLASGQLSPAAAPPLASPSVFTSTLSKSRPTPKPRQRPTLPPPQPPTVNLSASSPQSTEAPMLDGMSPGESMSTAV

SEQ ID NO: 37602 - protein, 812 aa, Homo sapiens
MKKQFNRMRQLANQTVGRAEKTEVLSEDLLQVEKRLELVKQVSHSTHKKLTACLQGQQGAEADKRSKKLPLTTLAQCLMEGSAILGDDTLLGKMLKLCGETEDKLAQELIHFELQVERDVIEPLFLLAEVEIPNIQKQRKHLAKLVLDMDSSRTRWQQTSKSSGLSSSLQPAGAKADALREEMEEAANRVEICRDQLSADMYSFVAKEIDYANYFQTLIEVQAEYHRKSLTLLQAVLPQIKAQQEAWVEKPSFGKPLEEHLTISGREIAFPIEACVTMLLECGMQEEGLFRVAPSASKLKKLKAALDCCVVDVQEYSADPHAIAGALKSYLRELPEPLMTFELYDEWIQASNVQEQDKKLQALWNACEKLPKANHNNIRYLIKFLSKLSEYQDVNKMTPSNMAIVLGPNLLWPQAEGNITEMMTTVSLQIVGIIEPIIQHADWFFPGEIEFNITGNYGSPVHVNHNANYSSMPSPDMDPADRRQPEQARRPLSVATDNMMLEFYKKDGMGVRVMDTNWVARRGSSAGRKVSCAPPSMQPPAPPAELAAPLPSPLPEQPLDSPAAPALSPSGLGLQPGPERTSTTKSKELSPGSAQKGSPGSSQGTACAGTQPGAQPGAQPGASPSPSQPPADQSPHTLRKVSKKLAPIPPKVPFGQPGAMADQSAGQPSPVSLSPTPPSTPSPYGLSYPQGYSLASGQLSPAAAPPLASPSVFTSTLSKSRPTPKPRQRPTLPPPQPPTVNLSASSPQSTEAPMLDGMSPGESMSTDLVHFDIPSIHIELGSTLRLSPLEHMRRHSVTDKRDSEEESESTAL

SEQ ID NO: 37603 - protein, 125 aa, Homo sapiens
MEPDGTYEPGFVGIRFCQECNNMLYPKEDKENRILLYACRNCDYQQEADNSCIYVNKITHEVDELTQIIADVSQDPTLPRTEDHPCQKCGHKEAVFFQSHSARAEDAMRLYYVCTAPHCGHRWTE

SEQ ID NO: 37604 - protein, 1363 aa, Homo sapiens
MSSSRAQQMHAFSWIRNTLEEHPETSLPKQEVYDEYKSYCDNLGYHPLSAADFGKIMKNVFPNMKARRLGTRGKSKYCYSGLRKKAFVHMPTLPNLDFHKTGDGLEGAEPSGQLQNIDEEVISSACRLVCEWAQKVLSQPFDTVLELARFLVKSHYIGTKSMAALTVMAAAPAGMKGITQPSAFIPTAESNSFQPQVKTLPSPIDAKQQLQRKIQKKQQEQKLQSPLPGESAAKKSESATSNGVTNLPNGNPSILSPQPIGIVVAAVPSPIPVQRTRQLVTSPSPMSSSDGKVLPLNVQVVTQHMQSVKQAPKTPQNVPASPGGDRSARHRYPQILPKPANTSALTIRSPTTVLFTSSPIKTAVVPASHMSSLNVVKMTTISLTPSNSNTPLKHSASVSSATGTTEESRSVPQIKNGSVVSLQSPGSRSSSAGGTSAVEVKVEPETSSDEHPVQCQENSDEAKAPQTPSALLGQKSNTDGALQKPSNEGVIEIKATKVCDQRTKCKSRCNEMLPGTSTGNNQSTITLSVASQNLTFTSSSSPPNGDSINKDPKLCTKSPRKRLSSTLQETQVPPVKKPIVEQLSAATIEGQKQGSVKKDQKVPHSGKTEGSTAGAQIPSKVSVNVSSHIGANQPLNSSALVISDSALEQQTTPSSSPDIKVKLEGSVFLLDSDSKSVGSFNPNGWQQITKDSEFISASCEQQQDISVMTIPEHSDINDLEKSVWELEGMPQDTYSQQLHSQIQESSLNQIQAHSSDQLPLQSELKEFEPSVSQTNESYFPFDDELTQDSIVEELVLMEQQMSMNNSHSYGNCLGMTLQSQSVTPGAPMSSHTSSTHFYHPIHSNGTPIHTPTPTPTPTPTPTPTPTPTSEMIAGSQSLSRESPCSRLAQTTPVDSALGSSRHTPIGTPHSNCSSSVPPSPVECRNPFAFTPISSSMAYHDASIVSSSPVKPMQRPMATHPDKTKLEWMNNGYSGVGNSSVSGHGILPSYQELVEDRFRKPHAFAVPGQSYQSQSRHHDTHFGRLTPVSPVQHQGATVNNTNKQEGFAVPAPLDNKGTNSSASSNFRCRSVSPAVHRQRNLSGSTLYPVSNIPRSNVTPFGSPVTPEVHVFTNVHTDACANNIAQRSQSVPLTVMMQTAFPNALQKQANSKKITNVLLSKLDSDNDDAVRGLGMNNLPSNYTARMNLTQILEPSTVFPSANPQNMIDSSTSVYEFQTPSYLTKSNSTGQINFSPGDNQAQSEIGEQQLDFNSTVKDLLSGDSLQTNQQLVGQGASDLTNTASDFSSDIRLSSELSGSINDLNTLDPNLLFDPGRQQGQDDEATLEELKNDPLFQQICSESMNSMTSSGFEWIESKDHPTVEMLG

SEQ ID NO: 37605 - protein, 1281 aa, Homo sapiens
MSSSRAQQMHAFSWIRNTLEEHPETSLPKQEVYDEYKSYCDNLGYHPLSAADFGKIMKNVFPNMKARRLGTRGKSKYCYSGLRKKAFVHMPTLPNLDFHKTGDGLEGAEPSGQLQNIDEEVISSACRLVCEWAQKVLSQPFDTVLELARFLVKSHYIGTKSMAALTVMAAAPAGMKGITQPSAFIPTAESNSFQPQVKTLPSPIDAKQQLQRKIQKKQQEQKLQSPLPGESAAKKSESATSNGVTNLPNGNPSILSPQPIGIVVAAVPSPIPVQRTRQLVTSPSPMSSSDGKVLPLNVQVVTQHMQSVKQAPKTPQNVPASPGGDRSARHRYPQILPKPANTSALTIRSPTTVLFTSSPIKTAVVPASHMSSLNVVKMTTISLTPSNSNTPLKHSASVSSATGTTEESRSVPQIKNGSVVSLQSPGSRSSSAGGTSAVEVKVEPETSSDEHPVQCQENSDEAKAPQTPSALLGQKSNTDGALQKPSNEGVIEIKATKVCDQRTKCKSRCNEMLPGTSTGNNQSTITLSVASQNLTFTSSSSPPNGDSINKDPKLCTKSPRKRLSSTLQETQVPPVKKPIVEQLSAATIEGQKQGSVKKDQKVPHSGKTEGSTAGAQIPSKVSVNVSSHIGANQPLNSSALVISDSALEQQTTPSSSPDIKVKLEGSVFLLDSDSKSVGSFNPNGWQQITKDSEFISASCEQQQDISVMTIPEHSDINDLEKSVWELEGMPQDTYSQQLHSQIQESSLNQIQAHSSDQLPLQSELKEFEPSVSQTNESYFPFDDELTQDSIVEELVLMEQQMSMNNSHSYGNCLGMTLQSQSVTPGAPMSSHTSSTHFYHPIHSNGTPIHTPTPTPTPTPTPTPTPTPTSEMIAGSQSLSRESPCSRLAQTTPVDSALGSSRHTPIGTPHSNCSSSVPPSPVECRNPFAFTPISSSMAYHDASIVSSSPVKPMQRPMATHPDKTKLEWMNNGYSGVGNSSVSGHGILPSYQELVEDRFRKPHAFAVPGQSYQSQSRHHDTHFGRLTPVSPVQHQGATVNNTNKQEGFAVPAPLDNKGTNSSASSNFRCRSVSPAVHRQRNLSGSTLYPVSNIPRSNVTPFGSPVTPEVHVFTNVHTDACANNIAQRSQSVPLTVMMQTAFPNALQKQANSKKITNVLLSKLDSDNDDAVRGLGMNNLPSNYTARMNLTQILEPSTVFPSANPQNMIDSSTSVYEFQTPSYLTKSNSTGQINFSPGDNQAQSEIGEQQLDFNSTVKDLLSGDSLQTNQQLCSCPSSLLAGMQM

SEQ ID NO: 37606 - protein, 148 aa, Homo sapiens
MASVVLALRTRTAVTSLLSPTPATALAVRYASKKSGGSSKNLGGKSSGRRQGIKKMEGHYVHAGNIIATQRHFRWHPGAHVGVGKNKCLYALEEGIVRYTKEVYVPHPRNTEAVDLITRLPKGAVLYKTFVHVVPAKPEGTFKLVAML

SEQ ID NO: 37607 - protein, 161 aa, Homo sapiens
MAGILRLVVQWPPGRLQTVTKGVESLICTDWIRHKFTRSRIPEKVFQASPEDHEKYGGDPQNPHKLHIVTRIKSTRRRPYWEKDIIKMLGLEKAHTPQVHKNIPSVNAKLKVVKHLIRIKPLKLPQGLPAEENMSNTCLKSTGELVVQWHLKPVEQKAHES

SEQ ID NO: 37608 - protein, 191 aa, Homo sapiens
MSSTLGKLSNQVEETLPLLKKPLKRAITTLMAGILRLVVQWPPGRLQTVTKGVESLICTDWIRHKFTRSRIPEKVFQASPEDHEKYGGDPQNPHKLHIVTRIKSTRRRPYWEKDIIKMLGLEKAHTPQVHKNIPSVNAKLKVVKHLIRIKPLKLPQGLPAEENMSNTCLKSTGELVVQWHLKPVEQKAHES

SEQ ID NO: 37609 - protein, 131 aa, Homo sapiens
MAGILRLVVQWPPGRLQTVTKGVESLICTDWIRHKFTRSRIPEKVFQASPEDHEKYGGDPQNPHKLHIVTRIKSTRRRPYWEKDIIKMLGLEKAHTPQVHKNIPSVNAKLKVVKHLIRFVVSSQLFLKCIA

SEQ ID NO: 37610 - protein, 1390 aa, Homo sapiens
MVKEQFRETDVAKKISHICFGMKSPEEMRQQAHIQVVSKNLYSQDNQHAPLLYGVLDHRMGTSEKDRPCETCGKNLADCLGHYGYIDLELPCFHVGYFRAVIGILQMICKTCCHIMLSQEEKKQFLDYLKRPGLTYLQKRGLKKKISDKCRKKNICHHCGAFNGTVKKCGLLKIIHEKYKTNKKVVDPIVSNFLQSFETAIEHNKEVEPLLGRAQENLNPLVVLNLFKRIPAEDVPLLLMNPEAGKPSDLILTRLLVPPLCIRPSVVSDLKSGTNEDDLTMKLTEIIFLNDVIKKHRISGAKTQMIMEDWDFLQLQCALYINSELSGIPLNMAPKKWTRGFVQRLKGKQGRFRGNLSGKRVDFSGRTVISPDPNLRIDEVAVPVHVAKILTFPEKVNKANINFLRKLVQNGPEVHPGANFIQQRHTQMKRFLKYGNREKMAQELKYGDIVERHLIDGDVVLFNRQPSLHKLSIMAHLARVKPHRTFRFNECVCTPYNADFDGDEMNLHLPQTEEAKAEALVLMGTKANLVTPRNGEPLIAAIQDFLTGAYLLTLKDTFFDRAKACQIIASILVGKDEKIKVRLPPPTILKPVTLWTGKQIFSVILRPSDDNPVRANLRTKGKQYCGKGEDLCANDSYVTIQNSELMSGSMDKGTLGSGSKNNIFYILLRDWGQNEAADAMSRLARLAPVYLSNRGFSIGIGDVTPGQGLLKAKYELLNAGYKKCDEYIEALNTGKLQQQPGCTAEETLEALILKELSVIRDHAGSACLRELDKSNSPLTMALCGSKGSFINISQMIACVGQQAISGSRVPDGFENRSLPHFEKHSKLPAAKGFVANSFYSGLTPTEFFFHTMAGREGLVDTAVKTAETGYMQRRLVKSLEDLCSQYDLTVRSSTGDIIQFIYGGDGLDPAAMEGKDEPLEFKRVLDNIKAVFPCPSEPALSKNELILTTESIMKKSEFLCCQDSFLQEIKKFIKGVSEKIKKTRDKYGINDNGTTEPRVLYQLDRITPTQVEKFLETCRDKYMRAQMEPGSAVGALCAQSIGEPGTQMTLKTFHFAGVASMNITLGVPRIKEIINASKAISTPIITAQLDKDDDADYARLVKGRIEKTLLGEISEYIEEVFLPDDCFILVKLSLERIRLLRLEVNAETVRYSICTSKLRVKPGDVAVHGEAVVCVTPRENSKSSMYYVLQFLKEDLPKVVVQGIPEVSRAVIHIDEQSGKEKYKLLVEGDNLRAVMATHGVKGTRTTSNNTYEVEKTLGIEAARTTIINEIQYTMVNHGMSIDRRHVMLLSDLMTYKGEVLGITRFGLAKMKESVLMLASFEKTADHLFDAAYFGQKDSVCGVSECIIMGIPMNIGTGLFKLLHKADRDPNPPKRPLIFDTNEFHIPLVT

SEQ ID NO: 37611 - protein, 188 aa, Homo sapiens [sequence omitted]

SEQ ID NO: 37612 - protein, 305 aa, Homo sapiens [sequence omitted]

SEQ ID NO: 37613 - protein, 65 aa, Homo sapiens [sequence omitted]

SEQ ID NO: 37614 - protein, 54 aa, Homo sapiens
MFLSAVFFAKSKSNETKSPLRGKEKNTLPLNGGLKMTLIYKEKTEGGDTDSEIL

SEQ ID NO: 37615 - protein, 122 aa, Homo sapiens
MEEDQELERKAIEELLKEAKRGKTRAETMGPMGWMKCPLASTNKRFLINTIKNTLPSHKEQDHEQKEGDKEPAKSQAQKEENPKKHRSHPYKHSFRARGSASYSPPRKRSSQDKYEKRSNRR

SEQ ID NO: 37616 - protein, 92 aa, Homo sapiens [sequence omitted]

SEQ ID NO: 37617 - protein, 348 aa, Homo sapiens [sequence omitted]

SEQ ID NO: 37618 - protein, 1133 aa, Homo sapiens
MDVLAEEFGNLTPEQLAAPIPTVEEKWRLLPAFLKVKGLVKQHIDSFNYFINVEIKKIMKANEKVTSDADPMWYLKYLNIYVGLPDVEESFNVTRPVSPHECRLRDMTYSAPITVDIEYTRGSQRIIRNALPIGRMPIMLRSSNCVLTGKTPAEFAKLNECPLDPGGYFIVKGVEKVILIQEQLSKNRIIVEADRKGAVGASVTSSTHEKKSRTNMAVKQGRFYLRHNTLSEDIPIVIIFKAMGVESDQEIVQMIGTEEHVMAAFGPSLEECQKAQIFTQMQALKYIGNKVRRQRMWGGGPKKTKIEEARELLASTILTHVPVKEFNFRAKCIYTAVMVRRVILAQGDNKVDDRDYYGNKRLELAGQLLSLLFEDLFKKFNSEMKKIADQVIPKQRAAQFDVVKHMRQDQITNGMVNAISTGNWSLKRFKMDRQGVTQVLSRLSYISALGMMTRISSQFEKTRKVSGPRSLQPSQWGMLCPSDTPEGEACGLVKNLALMTHITTDMEDGPIVKLASNLGVEDVNLLCGEELSYPNVFLVFLNGNILGVIRDHKKLVNTFRLMRRAGYINEFVSISTNLTDRCVYISSDGGRLCRPYIIVKKQKPAVTNKHMEELAQGYRNFEDFLHESLVEYLDVNEENDCNIALYEHTINKDTTHLEIEPFTLLGVCAGLIPYPHHNQSPRNTYQCAMGKQAMGTIGYNQRNRIDTLMYLLAYPQKPMVKTKTIELIEFEKLPAGQNATVAVMSYSGYDIEDALVLNKASLDRGFGRCLVYKNAKCTLKRYTNQTFDKVMGPMLDAATRKPIWRHEILDADGICSPGEKVENKQVLVNKSMPTVTQIPLEGSNVPQQPQYKDVPITYKGATDSYIEKVMISSNAEDAFLIKMLLRQTRRPEIGDKFSSRHGQKGVCGLIVPQEDMPFCDSGICPDIIMNPHGFPSRMTVGKLIELLAGKAGVLDGRFHYGTAFGGSKVKDVCEDLVRHGYNYLGKDYVTSGITGEPLEAYIYFGPVYYQKLKHMVLDKMHARARGPRAVLTRQPTEGRSRDGGLRLGEMERDCLIGYGASMLLLERLMISSDAFEVDVCGQCGLLGYSGWCHYCKSSCHVSSLRIPYACKLLFQELQSMNIIPRLKLSKYNE

SEQ ID NO: 37619 - protein, 1075 aa, Homo sapiens
MKANEKVTSDADPMWYLKYLNIYVGLPDVEESFNVTRPVSPHECRLRDMTYSAPITVDIEYTRGSQRIIRNALPIGRMPIMLRSSNCVLTGKTPAEFAKLNECPLDPGGYFIVKGVEKVILIQEQLSKNRIIVEADRKGAVGASVTSSTHEKKSRTNMAVKQGRFYLRHNTLSEDIPIVIIFKAMGVESDQEIVQMIGTEEHVMAAFGPSLEECQKAQIFTQMQALKYIGNKVRRQRMWGGGPKKTKIEEARELLASTILTHVPVKEFNFRAKCIYTAVMVRRVILAQGDNKVDDRDYYGNKRLELAGQLLSLLFEDLFKKFNSEMKKIADQVIPKQRAAQFDVVKHMRQDQITNGMVNAISTGNWSLKRFKMDRQGVTQVLSRLSYISALGMMTRISSQFEKTRKVSGPRSLQPSQWGMLCPSDTPEGEACGLVKNLALMTHITTDMEDGPIVKLASNLGVEDVNLLCGEELSYPNVFLVFLNGNILGVIRDHKKLVNTFRLMRRAGYINEFVSISTNLTDRCVYISSDGGRLCRPYIIVKKQKPAVTNKHMEELAQGYRNFEDFLHESLVEYLDVNEENDCNIALYEHTINKDTTHLEIEPFTLLGVCAGLIPYPHHNQSPRNTYQCAMGKQAMGTIGYNQRNRIDTLMYLLAYPQKPMVKTKTIELIEFEKLPAGQNATVAVMSYSGYDIEDALVLNKASLDRGFGRCLVYKNAKCTLKRYTNQTFDKVMGPMLDAATRKPIWRHEILDADGICSPGEKVENKQVLVNKSMPTVTQIPLEGSNVPQQPQYKDVPITYKGATDSYIEKVMISSNAEDAFLIKMLLRQTRRPEIGDKFSSRHGQKGVCGLIVPQEDMPFCDSGICPDIIMNPHGFPSRMTVGKLIELLAGKAGVLDGRFHYGTAFGGSKVKDVCEDLVRHGYNYLGKDYVTSGITGEPLEAYIYFGPVYYQKLKHMVLDKMHARARGPRAVLTRQPTEGRSRDGGLRLGEMERDCLIGYGASMLLLERLMISSDAFEVDVCGQCGLLGYSGWCHYCKSSCHVSSLRIPYACKLLFQELQSMNIIPRLKLSKYNE

SEQ ID NO: 37620 - protein, 188 aa, Homo sapiens [sequence omitted]

SEQ ID NO: 37621 - protein, 170 aa, Homo sapiens
MAASAFAGAVRAASGILRPLNILASSTYRNCVKNASLISALSTGRFSHIQTPVVSSTPRLTTSERNLTCGHTSVILNRMAPVLPSVLKLPVRSLTYFSARKGKRKTVKAVIDRFLRLHCGLWVRRKAGYKKKLWKKTPARKKRLREFVFCNKTQSKLLDKMTTSFWKRRN

SEQ ID NO: 37622 - protein, 476 aa, Homo sapiens
MRSEKEGAGGLRAAVAARGPSGREKLSALEVQFHRDSQQQEAETPPTSSSGCGGGAGKPREEKRTALSKVVIRRLPPGLTKEQLEEQLRPLPAHDYFEFFAADLSLYPHLYSRAYINFRNPDDILLFRDRFDGYIFLDSKGLEYPAVVEFAPFQKIAKKKLRKKDAKTGSIEDDPEYKKFLETYCVEEEKTSANPETLLGEMEAKTRELIARRTTPLLEYIKNRKLEKQRIREEKREERRRRELEKKRLREEEKRRRREEERCKKKETDKQKKIAEKEVRIKLLKKPEKGEEPTTEKPKERGEEIDTGGGKQESCAPGAVVKARPMEGSLEEPQETSHSGSDKEHRDVERSQEQESEAQRYHVDDGRRHRAHHEPERLSRRSEDEQRWGKGPGQDRGKKGSQDSGAPGEAMERLGRAQRCDDSPAPRKERLANKDRPALQLYDPGARFRARECGGNRRICKAEGSGTGPEKREEAE

SEQ ID NO: 37623 - protein, 443 aa, Homo sapiens
MRSEKEGAGGLRAAVAARGPSGREKLSALEVQFHRDSQQQEAETPPTSSSGCGGGAGKPREEKRTALSKVVIRRLPPGLTKEQLEEQLRPLPAHDYFEFFAADLSLYPHLYSRAYINFRNPDDILLFRDRFDGYIFLDSKDPEYKKFLETYCVEEEKTSANPETLLGEMEAKTRELIARRTTPLLEYIKNRKLEKQRIREEKREERRRRELEKKRLREEEKRRRREEERCKKKETDKQKKIAEKEVRIKLLKKPEKGEEPTTEKPKERGEEIDTGGGKQESCAPGAVVKARPMEGSLEEPQETSHSGSDKEHRDVERSQEQESEAQRYHVDDGRRHRAHHEPERLSRRSEDEQRWGKGPGQDRGKKGSQDSGAPGEAMERLGRAQRCDDSPAPRKERLANKDRPALQLYDPGARFRARECGGNRRICKAEGSGTGPEKREEAE

SEQ ID NO: 37624 - protein, 151 aa, Homo sapiens
MEGSLEEPQETSHSGSDKEHRDVERSQEQESEAQRYHVDDGRRHRAHHEPERLSRRSEDEQRWGKGPGQDRGKKGSQDSGAPGEAMERLGRAQRCDDSPAPRKERLANKDRPALQLYDPGARFRARECGGNRRICKAEGSGTGPEKREEAE

SEQ ID NO: 37625 - protein, 520 aa, Homo sapiens
MDEERALYIVRAGEAGAIERVLRDYSDKHRATFKFESTDEDKRKKLCEGIFKVLIKDIPTTCQVSCLEVLRILSRDKKVLVPVTTKENMQILLRLAKLNELDDSLEKVSEFPVIVESLKCLCNIVFNSQMAQQLSLELNLAAKLCNLLRKCKDRKFINDIKCFDLRLLFLLSLLHTDIRSQLRYELQGLPLLTQILESAFSIKWTDEYESAIDHNGPPLSPQETDCAIEALKALFNVTVDSWKVHKESDSHQFRVMAAVLRHCLLIVGPTEDKTEELHSNAVNLLSNVPVSCLDVLICPLTHEETAQEATTLDELPSNKTAEKETVLKNNTMVYNGMNMEAIHVLLNFMEKRIDKGSSYREGLTPVLSLLTECSRAHRNIRKFLKDQVLPPLRDVTNRPEVGSTVRNKLVRLMTHVDLGVKQIAAEFLFVLCKERVDSLLKYTGYGNAAGLLAARGLLAGGRGDNWYSEDEDTDTEEYKNAKPKEELLKPMGLKPDGTITPLEEALNQYSVIEETSSDTD

SEQ ID NO: 37626 - protein, 536 aa, Homo sapiens
MDEERALYIVRAGEAGAIERVLRDYSDKHRATFKFESTDEDKRKKLCEGIFKVLIKDIPTTCQVSCLEVLRILSRDKKVLVPVTTKENMQILLRLAKLNELDDSLEKVSEFPVIVESLKCLCNIVFNSQMAQQLSLELNLAAKLCNLLRKCKDRKFINDIKCFDLRLLFLLSLLHTDIRSQLRYELQGLPLLTQILESAFSIKWTDEYESAIDHNGPPLSPQETDCAIEALKALFNVTVDSWKVHKESDSHQFRVMAAVLRHCLLIVGPTEDKTEELHSNAVNLLSNVPVSCLDVLICPLTHEETAQEATTLDELPSNKTAEKETVLKNNTMVYNGMNMEAIHVLLNFMEKRIDKGSSYREGLTPVLSLLTECSRAHRNIRKFLKDQVLPPLRDVTNRPEVGSTVRNKLVRLMTHVDLGVKQIAAEFLFVLCKERVDSLLKYTGYGNAAGLLAARGLLAGGRGDNWYSEDEDTDTEEYKNAKPNINLITGHLEEPMPNPIDEMTEEQKEYEAMKLVNMLDKLSRRADVKDLHQDGG

SEQ ID NO: 37627 - protein, 496 aa, Homo sapiens
MLASKLCEGIFKVLIKDIPTTCQVSCLEVLRILSRDKKVLVPVTTKENMQILLRLAKLNELDDSLEKVSEFPVIVESLKCLCNIVFNSQMAQQLSLELNLAAKLCNLLRKCKDRKFINDIKCFDLRLLFLLSLLHTDIRSQLRYELQGLPLLTQILESAFSIKWTDEYESAIDHNGPPLSPQETDCAIEALKALFNVTVDSWKVHKESDSHQFRVMAAVLRHCLLIVGPTEDKTEELHSNAVNLLSNVPVSCLDVLICPLTHEETAQEATTLDELPSNKTAEKETVLKNNTMVYNGMNMEAIHVLLNFMEKRIDKGSSYREGLTPVLSLLTECSRAHRNIRKFLKDQVLPPLRDVTNRPEVGSTVRNKLVRLMTHVDLGVKQIAAEFLFVLCKERVDSLLKYTGYGNAAGLLAARGLLAGGRGDNWYSEDEDTDTEEYKNAKPNINLITGHLEEPMPNPIDEMTEEQKEYEAMKLVNMLDKLSRRADVKDLHQDGG

SEQ ID NO: 37628 - protein, 258 aa, Homo sapiens
MLSKLEKSDSHQFRVMAAVLRHCLLIVGPTEDKTEELHSNAVNLLSNVPVSCLDVLICPLTHEETAQEATTLDELPSNKTAEKETVLKNNTMVYNGMNMEAIHVLLNFMEKRIDKGSSYREGLTPVLSLLTECSRAHRNIRKFLKDQVLPPLRDVTNRPEVGSTVRNKLVRLMTHVDLGVKQIAAEFLFVLCKERVDSLLKYTGYGNAAGLLAARGLLAGGRGDNWYSEDEDTDTEEYKNAKPNSIEFEERSHLSRGK

SEQ ID NO: 37629 - protein, 473 aa, Homo sapiens
MRKLLTNLPAAAVLSAQVYSAVLQGLWEENVCGTPGRTRVCTALLYGQVCPFQDSTDGLRTITSILFNWPPENTSVYYQPPQRSSFRIKLAFRNLSWPGLGLEDHQEIVLGQLVLPEPNEAKPDDPAPRPGQHALTMPALEPAPPLLADLGPALEPESPAALGPPGYLHSAPGPAPAPGEGPPPGTVLEPQSAPESSCPCRGSVKNQPSEELPDMTTFPPRLLAEQLTLMDAELFKKVVLHECLGCIWGQGHLKGNEHMAPTVRATIAHFNRLTNCITTSCLGDHSMRARDRARVVEHWIKVARECLSLNNFSSVHVIVSALCSNPIGQLHKTWAGVSSKSMKELKELCKKDTAVKRDLLIKAGSFKVATQERNPQRVQMRLRRQKKGVVPFLGDFLTELQRLDSAIPDDLDGNTNKRSKEVRVLQEMQLLQVAAMNYRLRPLEKFVTYFTRMEQLSDKESYKLSCQLEPENP

SEQ ID NO: 37630 - protein, 492 aa, Homo sapiens
MRKLLTNLPAAAVLSAQVYSAVLQGLWEENVCGTPGRTRVCTALLYGQVCPFQDSTDGLRTITSILFNWPPENTSVYYQPPQRSSFRIKLAFRNLSWPGLGLEDHQEIVLGQLVLPEPNEAKPDDPAPRPGQHALTMPALEPAPPLLADLGPALEPESPAALGPPGYLHSAPGPAPAPGEGPPPGTVLEPQSAPESSCPCRGSVKNQPSEELPDMTTFPPRLLAEQLTLMDAELFKKVVLHECLGCIWGQGHLKGNEHMAPTVRATIAHFNRLTNCITTSCLGDHSMRARDRARVVEHWIKVARECLSLNNFSSVHVIVSALCSNPIGQLHKTWAGVSSKSMKELKELCKKDTAVKRDLLIKAGSFKVATQERNPQRVQMRLRRQKKGVVPFLGDFLTELQRLDSAIPDDLDGNTNKRSKEVRVLQEMQLLQVAAMNYRLRPLEKFVTYFTRMEQLSDKERWGFTMMSRIVSNSWPQAIHPPQPPKVLTLQV

SEQ ID NO: 37631 - protein, 261 aa, Homo sapiens
MSKSGFGSYGSISAADGASGGSDQLCERDATPAIKTQRPKVRIQDVVPCNVNQLLSSTVFDPVFKVRGIIVSQVSIVGVIRGAEKASNHICYKIDDMTAKPIEARQWFGREKVKQVTPLSVGVYVKVFGILKCPTGTKSLEVLKIHVLEDMNEFTVHILETVNAHMMLDKARRDTTVESVPVSPSEVNDAGDNDESHRNFIQDEVLRLIHECPHQEGKSIHELRAQLCDLSVKAIKEAIDYLTVEGHIYPTVDREHFKSAD

SEQ ID NO: 37632 - protein, 466 aa, Homo sapiens
MPQTLSASDMVTPGSLSPPPTEPTDGEQAGQPLLDGAPSSASLETLIQHLVPTADYYPEKAYIFTFLLSSRLFIEPRELLARVCHLCIEQQQLDKPVLDKARVRKFGPKLLQLLAEWTETFPRDFQEESTIGHLKDVVGRIAPCDEAYRKRMHQLLQALHQKLAALRQGPEGLVGADKPISYRTKPPASIHRELLGVCSDPYTLAQQLTHVELERLRHIGPEEFVQAFVNKDPLASTKPCFSDKTSNLEAYVKWFNRLCYLVATEICMPAKKKQRAQVIEFFIDVARECFNIGNFNSLMAIISGMNMSPVSRLKKTWAKVRTAKFFILEHQMDPTGNFCNYRTALRGAAHRSLTAHSSREKIVIPFFSLLIKDIYFLNEGCANRLPNGHVNFEKFLELAKQVGEFITWKQVECPFEQDASITHYLYTAPIFSEDGLYLASYESESPENQTEKERWKALRSSILGKT

SEQ ID NO: 37633 - protein, 315 aa, Homo sapiens
MHQLLQALHQKLAALRQGPEGLVGADKPISYRTKPPASIHRELLGVCSDPYTLAQQLTHVELERLRHIGPEEFVQAFVNKDPLASTKPCFSDKTSNLEAYVKWFNRLCYLVATEICMPAKKKQRAQVIEFFIDVARECFNIGNFNSLMAIISGMNMSPVSRLKKTWAKVRTAKFFILEHQMDPTGNFCNYRTALRGAAHRSLTAHSSREKIVIPFFSLLIKDIYFLNEGCANRLPNGHVNFEKFLELAKQVGEFITWKQVECPFEQDASITHYLYTAPIFSEDGLYLASYESESPENQTEKERWKALRSSILGKT

SEQ ID NO: 37634 - protein, 423 aa, Homo sapiens [sequence omitted]

SEQ ID NO: 37635 - protein, 534 aa, Homo sapiens
MTQAEIKLCSLLLQEHFGEIVEKIGVHLIRTGSQPLRVIAHDTGTSLDQVKKALCVLVQHNLVSYQVHKRGVVEYEAQCSRVLRMLRYPRYIYTTKTLYSDTGELIVEELLLNGKLTMSAVVKKVADRLTETMEDGKTMDYAEVSNTFVRLADTHFVQRCPSVPTTENSDPGPPPPAPTLVINEKDMYLVPKLSLIGKGKRRRSSDEDAAGEPKAKRPKYTTDNKEPIPDDGIYWQANLDRFHQHFRDQAIVSAVANRMDQTSSEIVRTMLRMSEITTSSSAPFTQPLSSNEIFRSLPVGYNISKQVLDQYLTLLADDPLEFVGKSGDSGGGMYVINLHKALASLATATLESVVQERFGSRCARIFRLVLQKKHIEQKQVEDFAMIPAKEAKDMLYKMLSENFMSLQEIPKTPDHAPSRTFYLYTVNILSAARMLLHRCYKSIANLIERRQFETKENKRLLEKSQRVEAIIASMQATGAEEAQLQEIEEMITAPERQQLETLKRNVNKLDASEIQVDETIFLLESYIECTMKRQ

SEQ ID NO: 37636 - protein, 380 aa, Homo sapiens [sequence omitted]

SEQ ID NO: 37637 - protein, 196 aa, Homo sapiens
MPVYCGNEVTPTEAAQAPEVTYEAEEGSLWTLLLTSLDGHLLEPDAEYLHWLLTNIPGNRVAEGQVTCPYLPPFPARGSGIHRLAFLLFKQDQPIDFSEDARPSPCYQLAQRTFRTFDFYKKHQETMTPAGLSFFQCRWDDSVTYIFHQLLDMREPVFEFVRPPPYHPKQKRFPHRQPLRYLDRYRDSHEPTYGIY

SEQ ID NO: 37638 - protein, 390 aa, Homo sapiens
MVEADRPGKLFIGGLNTETNEKALETVFGKYGRIVEVLLIKDRETNKSRGFAFVTFESPADAKDAARDMNGKSLDGKAIKVEQATKPSFERGRHGPPPPPRSRGPPRGFGAGRGGSGGTRGPPSRGGHMDDGGYSMNFNMSSSRGPLPVKRGPPPRSGGPSPKRSAPSGLVRSSSGMGGRAPLSRGRDSYGGPPRREPLPSRRDVYLSPRDDGYSTKDSYSSRDYPSSRDTRDYAPPPRDYTYRDYGHSSSRDDYPSRGYGDRDGYGRDRDYSDHPSGGSYRDSYESYGNSRSAPLTRGPPPSYGGSSRYDDYSSSRDGYGGSRDSYSSSRSDLYSSCDRVGRQERGLPPSVERGYPSSRDSYSSSSRGAPRGAGPGGSRSDRGGGRSRY

SEQ ID NO: 37639 - protein, 1129 aa, Homo sapiens
MSVEAYGPSSQTLTFLDTEEAELLGADTQGSEFEFTDFTLPSQTQTPPGGPGGPGGGGAGGPGGAGAGAAAGQLDAQVGPEGILQNGAVDDSVAKTSQLLAELNFEEDEEDTYYTKDLPIHACSYCGIHDPACVVYCNTSKKWFCNGRGNTSGSHIVNHLVRAKCKEVTLHKDGPLGETVLECYNCGCRNVFLLGFIPAKADSVVVLLCRQPCASQSSLKDINWDSSQWQPLIQDRCFLSWLVKIPSEQEQLRARQITAQQINKLEELWKENPSATLEDLEKPGVDEEPQHVLLRYEDAYQYQNIFGPLVKLEADYDKKLKESQTQDNITVRWDLGLNKKRIAYFTLPKTDSGNEDLVIIWLRDMRLMQGDEICLRYKGDLAPLWKGIGHVIKVPDNYGDEIAIELRSSVGAPVEVTHNFQVDFVWKSTSFDRMQSALKTFAVDETSVSGYIYHKLLGHEVEDVIIKCQLPKRFTAQGLPDLNHSQVYAVKTVLQRPLSLIQGPPGTGKTVTSATIVYHLARQGNGPVLVCAPSNIAVDQLTEKIHQTGLKVVRLCAKSREAIDSPVSFLALHNQIRNMDSMPELQKLQQLKDETGELSSADEKRYRALKRTAERELLMNADVICCTCVGAGDPRLAKMQFRSILIDESTQATEPECMVPVVLGAKQLILVGDHCQLGPVVMCKKAAKAGLSQSLFERLVVLGIRPIRLQVQYRMHPALSAFPSNIFYEGSLQNGVTAADRVKKGFDFQWPQPDKPMFFYVTQGQEEIASSGTSYLNRTEAANVEKITTKLLKAGAKPDQIGIITPYEGQRSYLVQYMQFSGSLHTKLYQEVEIASVDAFQGREKDFIILSCVRANEHQGIGFLNDPRRLNVALTRARYGVIIVGNPKALSKQPLWNHLLNYYKEQKVLVEGPLNNLRESLMQFSKPRKLVNTINPGARFMTTAMYDAREAIIPGSVYDRSSQGRPSSMYFQTHDQIGMISAGPSHVAAMNIPIPFNLVMPPMPPPGYFGQANGPAAGRGTPKGKTGRGGRQKNRFGLPGPSQTNLPNSQASQDVASQPFSQGALTQGYISMSQPSQMSQPGLSQPELSQDSYLGDEFKSQIDVALSQDSTYQGERAYQHGGVTGLSQY

SEQ ID NO: 37640 - protein, 1118 aa, Homo sapiens
MSVEAYGPSSQTLTFLDTEEAELLGADTQGSEFEFTDFTLPSQTQTPPGGPGGPGGGGAGGPGGAGAGAAAGQLDAQVGPEGILQNGAVDDSVAKTSQLLAELNFEEDEEDTYYTKDLPIHACSYCGIHDPACVVYCNTSKKWFCNGRGNTSGSHIVNHLVRAKCKEVTLHKDGPLGETVLECYNCGCRNVFLLGFIPAKADSVVVLLCRQPCASQSSLKDINWDSSQWQPLIQDRCFLSWLVKIPSEQEQLRARQITAQQINKLEELWKENPSATLEDLEKPGVDEEPQHVLLRYEDAYQYQNIFGPLVKLEADYDKKLKESQTQDNITVRWDLGLNKKRIAYFTLPKTDSDMRLMQGDEICLRYKGDLAPLWKGIGHVIKVPDNYGDEIAIELRSSVGAPVEVTHNFQVDFVWKSTSFDRMQSALKTFAVDETSVSGYIYHKLLGHEVEDVIIKCQLPKRFTAQGLPDLNHSQVYAVKTVLQRPLSLIQGPPGTGKTVTSATIVYHLARQGNGPVLVCAPSNIAVDQLTEKIHQTGLKVVRLCAKSREAIDSPVSFLALHNQIRNMDSMPELQKLQQLKDETGELSSADEKRYRALKRTAERELLMNADVICCTCVGAGDPRLAKMQFRSILIDESTQATEPECMVPVVLGAKQLILVGDHCQLGPVVMCKKAAKAGLSQSLFERLVVLGIRPIRLQVQYRMHPALSAFPSNIFYEGSLQNGVTAADRVKKGFDFQWPQPDKPMFFYVTQGQEEIASSGTSYLNRTEAANVEKITTKLLKAGAKPDQIGIITPYEGQRSYLVQYMQFSGSLHTKLYQEVEIASVDAFQGREKDFIILSCVRANEHQGIGFLNDPRRLNVALTRARYGVIIVGNPKALSKQPLWNHLLNYYKEQKVLVEGPLNNLRESLMQFSKPRKLVNTINPGARFMTTAMYDAREAIIPGSVYDRSSQGRPSSMYFQTHDQIGMISAGPSHVAAMNIPIPFNLVMPPMPPPGYFGQANGPAAGRGTPKGKTGRGGRQKNRFGLPGPSQTNLPNSQASQDVASQPFSQGALTQGYISMSQPSQMSQPGLSQPELSQDSYLGDEFKSQIDVALSQDSTYQGERAYQHGGVTGLSQY

SEQ ID NO: 37641 - protein, 214 aa, Homo sapiens
MVGRLSLQDVPELVDAKKKGDGVLDSPDSGLPPSPSPSHWGLAAGGGGGERAAAPGTLEPDAAAATPAAPSPASLPLAPGCALRLCPLSFGEGVEFDPLPPKEVRYTSLVKYDSERHFIDDVQLPLGLAVASCSQTVTCVPNGTWRNYKAEVRFEPRHRPTRFLSTTIVYPKYPKAVYTTTLDYNCRKTLRRFLSSVELEAAELPGSDDLSDEC

SEQ ID NO: 37642 - protein, 331 aa, Homo sapiens
MSRARGALCRACLALAAALAALLLLPLPLPRAPAPARTPAPAPRAPPSRPAAPSLRPDDVFIAVKTTRKNHGPRLRLLLRTWISRARQQTFIFTDGDDPELELQGGDRVINTNCSAVRTRQALCCKMSVEYDKFIESGRKWFCHVDDDNYVNARSLLHLLSSFSPSQDVYLGRPSLDHPIEATERVQGGRTVTTVKFWFATGGAGFCLSRGLALKMSPWASLGSFMSTAEQVRLPDDCTVGYIVEGLLGARLLHSPLFHSHLENLQRLPPDTLLQQVTLSHGGPENPHNVVNVAGGFSLHQDPTRFKSIHCLLYPDTDWCPRQKQGAPTSR

SEQ ID NO: 37643 - protein, 768 aa, Homo sapiens
MKLLWQAKMSSIQDWGEEVEEGAVYHVTLKRVQIQQAANKGARWLGVEGDQLPPGHTVSQYETCKIRTIKAGTLEKLVENLLTAFGDNDFTYISIFLSTYRGFASTKEVLELLLDRYGNLTSPNCEEDGSQSSSESKMVIRNAIASILRAWLDQCAEDFREPPHFPCLQKLLDYLTRMMPGSDPERRAQNLLEQFQKQEVETDNGLPNTISFSLEEEEELEGGESAEFTCFSEDLVAEQLTYMDAQLFKKVVPHHCLGCIWSRRDKKENKHLAPTIRATISQFNTLTKCVVSTILGGKELKTQQRAKIIEKWINIAHECRLLKNFSSLRAIVSALQSNSIYRLKKTWAAVPRDRMLMFEELSDIFSDHNNHLTSRELLMKEGTSKFANLDSSVKENQKRTQRRLQLQKDMGVMQGTVPYLGTFLTDLTMLDTALQDYIEGGLINFEKRRREFEVIAQIKLLQSACNSYCMTPDQKFIQWFQRQQLLTEEESYALSCEIEAAADASTTSPKPRKSMVKRLSLLFLGSDMITSPTPTKEQPKSTASGSSGESMDSVSVSSCESNHSEAEEGSITPMDTPDEPQKKLSESSSSCSSIHSMDTNSSGMSSLINPLSSPPSCNNNPKIHKRSVSVTSITSTVLPPVYNQQNEDTCIIRISVEDNNGNMYKSIMLTSQDKTPAVIQRAMLKHNLDSDPAEEYELVQVISEDKELVIPDSANVFYAMNSQVNFDFILRKKNSMEEQVKLRSRTSLTLPRTAKRGCWSNRHSKITL

SEQ ID NO: 37644 - protein, 803 aa, Homo sapiens
MEVKPVGEPTQEVSKFKLSTKVESTGHWLVEDHVRIWEVLKTEESSIQDWGEEVEEGAVYHVTLKRVQIQQAANKGARWLGVEGDQLPPGHTVSQYETCKIRTIKAGTLEKLVENLLTAFGDNDFTYISIFLSTYRGFASTKEVLELLLDRYGNLTSPNCEEDGSQSSSESKMVIRNAIASILRAWLDQCAEDFREPPHFPCLQKLLDYLTRMMPGSDPERRAQNLLEQFQKQEVETDNGLPNTISFSLEEEEELEGGESAEFTCFSEDLVAEQLTYMDAQLFKKVVPHHCLGCIWSRRDKKENKHLAPTIRATISQFNTLTKCVVSTILGGKELKTQQRAKIIEKWINIAHECRLLKNFSSLRAIVSALQSNSIYRLKKTWAAVPRDRMLMFEELSDIFSDHNNHLTSRELLMKEGTSKFANLDSSVKENQKRTQRRLQLQKDMGVMQGTVPYLGTFLTDLTMLDTALQDYIEGGLINFEKRRREFEVIAQIKLLQSACNSYCMTPDQKFIQWFQRQQLLTEEESYALSCEIEAAADASTTSPKPRKSMVKRLSLLFLGSDMITSPTPTKEQPKSTASGSSGESMDSVSVSSCESNHSEAEEGSITPMDTPDEPQKKLSESSSSCSSIHSMDTNSSGMSSLINPLSSPPSCNNNPKIHKRSVSVTSITSTVLPPVYNQQNEDTCIIRISVEDNNGNMYKSIMLTSQDKTPAVIQRAMLKHNLDSDPAEEYELVQVISEDKELVIPDSANVFYAMNSQVNFDFILRKKNSMEEQVKLRSRTSLTLPRTAKRGCWSNRHSKITL

SEQ ID NO: 37645 - protein, 236 aa, Homo sapiens
MGQKASQQLALKDSKEVPVVCEVVSEAIVHAAQKLKEYLGFEYPPSKLCPAANTLNEIFLIHFITFCQEKGVDEWLTTTKMTKHQAFLFGADWIWTFWGSNKQIKLQLAVQTLQMSSPPPVESKPCDLSNPESRVEESSWKKSRFDKLEEFCNLIGEDCLGLFIIFGMPGKPKDIRGVVLDSVKSQMVRSHLPGGKAVAQFVLETEDCVFIKELLRNCLSKKDGLREVGKVYISIL

SEQ ID NO: 37646 - protein, 287 aa, Homo sapiens
MAEHFKQIIRCPVCLKDLEEAVQLKCGYACCLQCLNSLQKEPDGEGLLCRFCSVVSQKDDIKPKYKLRALVSIIKELEPKLKSVLTMNPRMRKFQVDMTFDVDTANNYLIISEDLRSFRSGDLSQNRKEQAERFDTALCVLGTPRFTSGRHYWEVDVGTSQVWDVGVCKESVNRQGKIVLSSEHGFLTVGCREGKVFAASTVPMTPLWVSPQLHRVGIFLDVGMRSIAFYNVSDGCHIYTFIEIPVCEPWRPFFAHKRGSQDDQSILSICSVINPSAASAPVSSEGK

SEQ ID NO: 37647 - protein, 501 aa, Homo sapiens
MGCGLRKLEDPDDSSPGKIFSTLKRPQVETKTEFAYEYVLLDFTLQASSNPEVIKINSILDIVTKVENYYLKGYIVGAIHPVIQPVGQRKHLPASYLYRVVLLRLKLSPKNSAAPSGQRRPRLVIEECPLTSEAQTNDAAKELIEKINVAAKRGMKFVGFISQHYSPSKFCNGTNHDGDIESMLHVRHGSDENCRSWNEGTLSGQSSESGIEEELHHESGQYQMEQNGSPTSSKSRKGEASDNKLYTVFNAFDDDSTSWAYQEGILSMKVTRKGSVISTLDADWLELTTFYYKQGLSLIDSFVFWETSKGEHLPKSLEGFFIYEEEGSGVPGSSRKGNDAIVVEQWTVIEGCEIKTDYGPLLHTLAEFGWLLTSVLPTPVLRHDSEGNLATKQIVFLQRPVMWNSAAQTPDKKASRHIKGEDKNKATSRSIGLDTTSSQPAESRHLPEECRLSPSRECWTKEGRLAQHNSFSGFSSSDNVLRELDDGQFDQEDGVTQVTCM

SEQ ID NO: 37648 - protein, 211 aa, Homo sapiens [sequence omitted]

SEQ ID NO: 37649 - protein, 164 aa, Homo sapiens
MAPSRNGMVLKPHFHKDWQRRVATWFNQPARKIRRRKARQAKARRIAPRPASGPIRPIVRCPTVRYHTKVRAGRGFSLEELRVAGIHKKGDSSAEELKLATQLTGPVMPVRNVYKKEKARVITEEEKNFKAFASLRMARANARLFGIRAKRAKEAAEQDVEKKK

SEQ ID NO: 37650 - protein, 152 aa, Homo sapiens [sequence omitted]

SEQ ID NO: 37651 - protein, 396 aa, Homo sapiens
MAFAPMGPEASFFDVLDRHRESLLAALRRGGREPPTGGSRLASSSEVLASIENIIQDIITSLARNEAPAFTIDNRSSWENIKFEDSVGLQMVSHCTTRKIKSDSPKSAQKFSLILKILSMIYKLVQSNTYATKRDIYYTDSQLFGNQTVVDNIINDISCMLKVSRRSLHILSTSKGLIAGNLRYIEEDGTKVNCTCGATAVAVPSNIQGIRNLVTDAKFVLIVEKDATFQRLLDDNFCNKLSPCIMITGKGVPDLNTRLLVKKLWDTFHVPVFTLVDADPHGIEIMCIYKYGSMSMSFEAHHLTVPAIRWLGLLPSDLKRLNVPKDSLIPLTKRDQMKLDSILRRPYVTCQPFWRKEMEIMADSKMKAEIQALTFLSSDYLSRVYLPNKLKFGGWI

SEQ ID NO: 37652 - protein, 358 aa, Homo sapiens
MAFAPMGPEASFFDVLDRHRESLLAALRRGGREPPTGGSRLASRFEDSVGLQMVSHCTTRKIKSDSPKSAQKFSLILKILSMIYKLVQSNTYATKRDIYYTDSQLFGNQTVVDNIINDISCMLKVSRRSLHILSTSKGLIAGNLRYIEEDGTKVNCTCGATAVAVPSNIQGIRNLVTDAKFVLIVEKDATFQRLLDDNFCNKLSPCIMITGKGVPDLNTRLLVKKLWDTFHVPVFTLVDADPHGIEIMCIYKYGSMSMSFEAHHLTVPAIRWLGLLPSDLKRLNVPKDSLIPLTKRDQMKLDSILRRPYVTCQPFWRKEMEIMADSKMKAEIQALTFLSSDYLSRVYLPNKLKFGGWI

SEQ ID NO: 37653 - protein, 5150 aa, Homo sapiens
MLLPALLFGMAWALADGRWCEWTETIRVEEEVAPRQEDLVPCASLDHYSRLGWRLDLPWSGRSGLTRSPAPGLCPIYKPPETRPAKWNRTVRTCCPGWGGAHCTEALAKASPEGHCFAMWQCQLQAGSANASAGSLEECCARPWGQSWWDGSSQACRSCSSRHLPGSASSPALLQPLAGAVGQLWSQHQRPSATCASWSGFHYRTFDGRHYHFLGRCTYLLAGAADSTWAVHLTPGDRCPQPGHCQRVTMGPEEVLIQAGNVSVKGQLVPEGQSWLLHGLSLQWLGDWLVLSGGLGVVVRLDRTGSISISVDHELWGQTQGLCGLYNGWPEDDFMEPGGGLAMLAATFGNSWRLPGSESGCLDAVEVAQGCDSPLGLIDADVEPGHLRAEAQDVCHQLLEGPFGQCHAQVSPAEYHEACLFAYCAGAMAGSGQEGRQQAVCATFASYVQACARRHIHIRWRKPGFCERLCPGGQLYSDCVSLCPPSCEAVGQGEEESCREECVSGCECPRGLFWNGTLCVPAAHCPCYYCRQRYVPGDTVRQLCNPCVCRDGRWHCAQALCPAECAVGGDGHYLTFDGRSYSFWGGQGCRYSLVQDYVKGQLLILLEHGACDAGSCLHAISVSLEDTHIQLRDSGAVLVNGQDVGLPWIGAEGLSVRRASSAFLLLRWPGAQVLWGLSDPVAYITLDPRHAHQVQGLCGTFTQNQQDDFLTPAGDVETSIAAFASKFQVAGKGRCPSEDSALLSPCTTHSQRHAFAEAACAILHSSVFQECHRLVDKEPFYLRCLAAVCGCDPGSDCLCPVLSAYARRCAQEGASPPWRNQTLCPVMCPGGQEYRECAPACGQHCGKPEDCGELGSCVAGCNCPLGLLWDPEGQCVPPSLCPCQLGARRYAPGSATMKECNRCICQERGLWNCTARHCPSQAFCPRELVYAPGACLLTCDSPSANHSCPAGSTDGCVCPPGTVLLDERCVPPDLCPCRHSGQWYLPNATIQEDCNVCVCRGRQWHCTGQRRSGRCQASGAPHYVTFDGLAFTYPGACEYLLVREASGLFTVSAQNLPCGASGLTCTKALAVRLEGTVVHMLRGRAVTVNGVSVTPPKVYTGPGLSLRRAGLFLLLSTHLGLTLLWDGGTRVLVQLSPQFRGRVAGLCGDFDGDASNDLRSRQGVLEPTAELAAHSWRLSPLCPEPGDLPHPCTMNTHRAGWARARCGALLQPLFTLCHAEVPPQQHYEWCLYDACGCDSGGDCECLCSAIATYADECARHGHHVRWRSQELCSLQCEGGQVYEACGPTCPPTCHEQHPEPGWHCQVVACVEGCFCPEGTLLHGGACLEPASCPCEWGRNSFPPGSVLQKDCGNCTCQEGQWHCGGDGGHCEELVPACAEGEALCQENGHCVPHGWLCDNQDDCGDGSDEEGCAAPGCGEGQMTCSSGHCLPLALLCDRQDDCGDGTDEPSYPCPQGLLACADGRCLPPALLCDGHPDCLDAADEESCLGQVTCVPGEVSCVDGTCLGAIQLCDGVWDCPDGADEGPGHCPLPSLPTPPASTLPGPSPGSLDTASSPLASASPAPPCGPFEFRCGSGECTPRGWRCDQEEDCADGSDERGCGGPCAPHHAPCARGPHCVSPEQLCDGVRQCPDGSDEGPDACGGLPALGGPNRTGLPCPEYTCPNGTCIGFQLVCDGQPDCGRPGQVGPSPEEQGCGAWGPWSPWGPCSRTCGPWGQGRSRRCSPLGLLVLQNCPGPEHQSQACFTAACPVDGEWSTWSPWSVCSEPCRGTMTRQRQCHSPQNGGRTCAALPGGLHSTRQTKPCPQDGCPNATCSGELMFQPCAPCPLTCDDISGQVTCPPDWPCGSPGCWCPEGQVLGSEGWCVWPRQCPCLVDGARYWPGQRIKADCQLCICQDGRPRRCRLNPDCAVDCGWSSWSPWAKCLGPCGSQSIQWSFRSSNNPRPSGRGRQCRGIHRKARRCQTEPCEGCEHQGQVHRVGERWHGGPCRVCQCLHNLTAHCSPYCPLGSCPQGWVLVEGTGESCCHCALPGENQTVQPMATPAAAPAPSPQIRFPLATYILPPSGDPCYSPLGLAGLAEGSLHASSQQLEHPTQAALLGAPTQGPSPQGWHAGGDAYAKWHTRPHYLQLDLLQPRNLTGILVPETGSSNAYASSFSLQFSSNGLHWHDYRDLLPGILPLPKLFPRNWDDLDPAVWTFGRMVQARFVRVWPHDVHHSDVPLQVELLGCEPGSPPAPLCPGVGLRCASGECVLRGGPCDGVLDCEDGSDEEGCVLLPEGTGRFHSTAKTLALSSAQPGQLLHWPREGLAETEHWPPGQESPTSPTETRPVSPGPASGVPHHGESVQMVTTTPIPQMEARTLPPGMAAVTVVPPHPVTPATPAGQSVAPGPFPPVQCGPGQTPCEVLGCVEQAQVCDGREDCLDGSDERHCARNLLMWLPSLPALWAASTVPFMMPTMALPGLPASRALCSPSQLSCGSGECLSAERRCDLRPDCQDGSDEDGCVDCVLAPWSVWSSCSRSCGLGLTFQRQELLRPPLPGGSCPRDRFRSQSCFVQACPVAGAWAMWEAWGPCSVSCGGGHQSRQRSCVDPPPKNGGAPCPGASQERAPCGLQPCSGGTDCELGRVYVSADLCQKGLVPPCPPSCLDPKANRSCSGHCVEGCRCPPGLLLHDTRCLPLSECPCLVGEELKWPGVSFLLGNCSQCVCEKGELLCQPGGCPLPCGWSAWSSWAPCDRSCGSGVRARFRSPSNPPAAWGGAPCEGDRQELQGCHTVCGTEVFGWTPWTSWSSCSQSCLAPGGGPGWRSRSRLCPSPGDSSCPGDATQEEPCSPPVCPVPSIWGLWAPWSTCSAPCDGGIQTRGRSCSSLAPGDTTCPGPHSQTRDCNTQPCTAQCPENMLFRSAEQCHQEGGPCPRLCLTQGPGIECTGFCAPGCTCPPGLFLHNASCLPRSQCPCQLHGQLYASGAMARLDSCNNCTCVSGKMACTSERCPVACGWSPWTLWSLCSCSCNVGIRRRFRAGTAPPAAFGGAECQGPTMEAEFCSLRPCPGPGGEWGPWSPCSVPCGGGYRNRTRGSSRSLMEFSTCGLQPCAGPVPGMCPRDKQWLDCAQGPASCAELSAPRGTNQTCHPGCHCPSGMLLLNNVCVPTQDCPCAHEGHLYPPGSTVVRPCENCSCVSGLIANCSSWPCAEGEPTWSPWTPWSQCSASCGPARCHRHRFCARSPSAVPSTVAPLPLPATPTPLCSGPEAEEEPCLLQGCDRAGGWGPWGPWSHCSRSCGGGLRSRTRACDQPPPQGLGDYCEGPRAQGEVCQALPCPVTNCTAIEGAEYSPCGPPCPRSCDDLVHCVWRCQPGCYCPPGQVLSSNGAICVQPGHCSCLDLLTGQRHHPGARLARPDGCNHCTCLEGRLNCTDLPCPVPGGWCPWSEWTMCSQPCRGQTRSRSRACACPTPQHGGAPCTGEAGEAGAQHQREACPSYATCPVDGAWGPWGPWSPCDMCLGQSHRSRACSRPPTPEGGRPCPGNHTQSRPCQENSTQCTDCGGGQSLHPCGQPCPRSCQDLSPGSVCQPGSVGCQPTCGCPLGQLSQDGLCVPPAHCRCQYQPGAMGIPENQSRSAGSRFSSWESLEPGEVVTGPCDNCTCVAGILQCQEVPDCPDPGVWSSWGPWEDCSVSCGGGEQLRSRRCARPPCPGPARQSRTCSTQVCREAGCPAGRLYRECQPGEGCPFSCAHVTQQVGCFSEGCEEGCHCPEGTFQHRLACVQECPCVLTAWLLQELGATIGDPGQPLGPGDELDSGQTLRTSCGNCSCAHGKLSCSLDDCFEADGGFGPWSPWGPCSRSCGGLGTRTRSRQCVLTMPTLSGQGCRGPRQDLEYCPSPDCPGAEGSTVEPVTGLPGGWGPWSSWSPCSRSCTDPARPAWRSRTRLCLANCTMGDPLQERPCNLPSCTELPVCPGPGCGAGNCSWTSWAPWEPCSRSCGVGQQRRLRAYRPPGPGGHWCPNILTAYQERRFCNLRACPVPGGWSRWSPWSWCDRSCGGGQSLRSRSCSSPPSKNGGAPCAGERHQARLCNPMPCEAGCPAGMEVVTCANRCPRRCSDLQEGIVCQDDQVCQKGCRCPKGSLEQDGGCVPIGHCDCTDAQGHSWAPGSQHQDACNNCSCQAGQLSCTAQPCPPPTHCAWSHWSAWSPCSHSCGPRGQQSRFRSSTSGSWAPECREEQSQSQPCPQPSCPPLCLQGTRSRTLGDSWLQGECQRCSCTPEGVICEDTECAVPEAWTLWSSWSDCPVSCGGGNQVRTRACRAAAPHHRSPPCLGPDTQTRQQPCPGLLEACSWGPWGPCSRSCGPGLASRSGSCPCLMAKADPTCNSTFLHLDTQGCYSGPCPEECVWSSWSSWTRCSCRVLVQQRYRHQGPASRGARAGAPCTRLDGHFRPCLISNCSEDSCTPPFEFHACGSPCAGLCATHLSHQLCQDLPPCQPGCYCPKGLLEQAGGCIPPEECNCWHTSAAGAGMTLAPGDRLQLGCKECECRRGELHCTSQGCQGLLPLSEWSEWSPCGPCLPPSALAPASRTALEEHWLRDPTGLSPTLAPLLASEQHRHRLCLDPATGRPWTGAPHLCTAPLSQQRLCPDPGACPDSCQWSLWGPWSPCQVPCSGGFRLRWREAEALCGGGCREPWAQESCNGGPCPESCEAQDTVFTLDCANQCPHSCADLWDRVQCLQGPCRPGCRCPPGQLVQDGRCVPISSCRCGLPSANASWELAPAQAVQLDCQNCTCVNESLVCPHQECPVLGPWSAWSSCSAPCGGGTMERHRTCEGGPGVAPCQAQDTEQRQECNLQPCPECPPGQVLSACATSCPCLCWHLQPGAICVQEPCQPGCGCPGGQLLHNGTCVPPTACPCTQHSLPWGLTLTLEEQAQELPPGTVLTRNCTRCVCHGGAFSCSLVDCQVPPGETWQQVAPGELGLCEQTCLEMNATKTQSNCSSARASGCVCQPGHFRSQAGPCVPEDHCECWHLGRPHLPGSEWQEACESCLCLSGRPVCTQHCSPLTCAQGEEMVLEPGSCCPSCRREAPEEQSPSCQLLTELRNFTKGTCYLDQVEVSYCSGYCPSSTHVMPEEPYLQSQCDCCSYRLDPESPVRILNLRCLGGHTEPVVLPVIHSCQCSSCQGGDFSKR

SEQ ID NO: 37654 - protein, 1317 aa, Homo sapiens
MLPPGTRVLVQLSPQFRGRVAGLCGDFDGDASNDLRSRQGVLEPTAELAAHSWRLSPLCPEPGDLPHPCTMNTHRAGWARARCGALLQPLFTLCHAEVPPQQHYEWCLYDACGCDSGGDCECLCSAIATYADECARHGHHVRWRSQELCSLQCEGGQVYEACGPTCPPTCHEQHPEPGWHCQVVACVEGCFCPEGTLLHGGACLEPASCPCEWGRNSFPPGSVLQKDCGNCTCQEGQWHCGGDGGHCEELVPACAEGEALCQENGHCVPHGWLCDNQDDCGDGSDEEGCAAPGCGEGQMTCSSGHCLPLALLCDRQDDCGDGTDEPSYPCPQGLLACADGRCLPPALLCDGHPDCLDAADEESCLGQVTCVPGEVSCVDGTCLGAIQLCDGVWDCPDGADEGPGHCPLPSLPTPPASTLPGPSPGSLDTASSPLASASPAPPCGPFEFRCGSGECTPRGWRCDQEEDCADGSDERGCGGPCAPHHAPCARGPHCVSPEQLCDGVRQCPDGSDEGPDACVEAPAPPAMRGPPGQAGGPTSSRAPSPPSPPEAQGEGRKGQERSRTHLTVPAGSTQLPLCPGLFPCGVAPGLCLTPEQLCDGIPDCPQGEDELDCGGLPALGGPNRTGLPCPEYTCPNGTCIGFQLVRVGVGGGGGSAMLPPSTRALTPLPPQVCDGQPDCGRPGQVGPSPEEQGCGAWGPWSPWGPCSRTCGPWGQGRSRRCSPLGLLVLQNCPGPEHQSQACFTAACPVDGEWSTWSPWSVCSEPCRGTMTRQRQCHSPQNGGRTCAALPGGLHSTRQTKPCPQDGCPNATCSGELMFQPCAPCPLTCDDISGQVTCPPDWPCGSPGCWCPEGQVLGSEGWCVWPRQCPCLVDGARYWPGQRIKADCQLCICQDGRPRRCRLNPDCAVDCGWSSWSPWAKCLGPCGSQSIQWSFRSSNNPRPSGRGRQCRGIHRKARRCQTEPCEGCEHQGQVHRVGERWHGGPCRVCQCLHNLTAHCSPYCPLGSCPQGWVLVEGTGESCCHCALPGENQTVQPMATPAAAPAPSPQIRFPLATYILPPSGDPCYSPLGLAGLAEGSLHASSQQLEHPTQAALLGAPTQGPSPQGWHAGGDAYAKWHTRPHYLQLDLLQPRNLTGILVPETGSSNAYASSFSLQFSSNGLHWHDYRDLLPGILPLPKVSPAQGRWGQQPTMPFCGFHSLCPQGPSSVPEGHGLHSMLVEYLVSSRDCALWSRGLGATVTWMLETIQVAQTQGRYVKPARERGWGDTKFTEGLREPRPTHVFVESSLGTALPSGGLHPSRRQTARSGRNQSVLCSKR

SEQ ID NO: 37655 - protein, 2752 aa, Homo sapiens
MYNGIGLPTPRGSGTNGYVQRNLSLVRGRRGERPDYKGEEELRRLEAALVKRPNPDILDHERKRRVELRCLELEEMMEEQGYEEQQIQEKVATFRLMLLEKDVNPGGKEETPGQRPAVTETHQLAELNEKKNERLRAAFGISDSYVDGSSFDPQRRAREAKQPAPEPPKPYSLVRESSSSRSPTPKQKKKKKKKDRGRRSESSSPRRERKKSSKKKKHRSESESKKRKHRSPTPKSKRKSKDKKRKRSRSTTPAPKSRRAHRSTSADSASSSDTSRSRSRSAAAKTHTTALAGRSPSPASGRRGEGDAPFSEPGTTSTQRPSSPETATKQPSSPYEDKDKDKKEKSATRPSPSPERSSTGPEPPAPTPLLAERHGGSPQPLATTPLSQEPVNPPSEASPTRDRSPPKSPEKLPQSSSSESSPPSPQPTKVSRHASSSPESPKPAPAPGSHREISSSPTSKNRSHGRAKRDKSHSHTPSRRMGRSRSPATAKRGRSRSRTPTKRGHSRSRSPQWRRSRSAQRWGRSRSPQRRGRSRSPQRPGWSRSRNTQRRGRSRSARRGRSHSRSPATRGRSRSRTPARRGRSRSRTPARRRSRSRTPTRRRSRSRTPARRGRSRSRTPARRRSRTRSPVRRRSRSRSPARRSGRSRSRTPARRGRSRSRTPARRGRSRSRTPARRSGRSRSRTPARRGRSRSRTPRRGRSRSRSLVRRGRSHSRTPQRRGRSGSSSERKNKSRTSQRRSRSNSSPEMKKSRISSRRSRSLSSPRSKAKSRLSLRRSLSGSSPCPKQKSQTPPRRSRSGSSQPKAKSRTPPRRSRSSSSPPPKQKSKTPSRQSHSSSSPHPKVKSGTPPRQGSITSPQANEQSVTPQRRSCFESSPDPELKSRTPSRHSCSGSSPPRVKSSTPPRQSPSRSSSPQPKVKAIISPRQRSHSGSSSPSPSRVTSRTTPRRSRSVSPCSNVESRLLPRYSHSGSSSPDTKVKPETPPRQSHSGSISPYPKVKAQTPPGPSLSGSKSPCPQEKSKDSLVQSCPGSLSLCAGVKSSTPPGESYFGVSSLQLKGQSQTSPDHRSDTSSPEVRQSHSESPSLQSKSQTSPKGGRSRSSSPVTELASRSPIRQDRGEFSASPMLKSGMSPEQSRFQSDSSSYPTVDSNSLLGQSRLETAESKEKMALPPQEDATASPPRQKDKFSPFPVQDRPESSLVFKDTLRTPPRERSGAGSSPETKEQNSALPTSSQDEELMEVVEKSEEPAGQILSHLSSELKEMSTSNFESSPEVEERPAVSLTLDQSQSQASLEAVEVPSMASSWGGPHFSPEHKELSNSPLRENSFGSPLEFRNSGPLGTEMNTGFSSEVKEDLNGPFLNQLETDPSLDMKEQSTRSSGHSSSELSPDAVEKAGMSSNQSISSPVLDAVPRTPSRERSSSASSPEMKDGLPRTPSRRSRSGSSPGLRDGSGTPSRHSLSGSSPGMKDIPRTPSRGRSECDSSPEPKALPQTPRPRSRSPSSPELNNKCLTPQRERSGSESSVDQKTVARTPLGQRSRSGSSQELDVKPSASPQERSESDSSPDSKAKTRTPLRQRSRSGSSPEVDSKSRLSPRRSRSGSSPEVKDKPRAAPRAQSGSDSSPEPKAPAPRALPRRSRSGSSSKGRGPSPEGSSSTESSPEHPPKSRTARRGSRSSPEPKTKSRTPPRRRSSRSSPELTRKARLSRRSRSASSSPETRSRTPPRHRRSPSVSSPEPAEKSRSSRRRRSASSPRTKTTSRRGRSPSPKPRGLQRSRSRSRREKTRTTRRRDRSGSSQSTSRRRQRSRSRSRVTRRRRGGSGYHSRSPARQESSRTSSRRRRGRSRTPPTSRKRSRSRTSPAPWKRSRSRASPATHRRSRSRTPLISRRRSRSRTSPVSRRRSRSRTSVTRRRSRSRASPVSRRRSRSRTPPVTRRRSRSRTPTTRRRSRSRTPPVTRRRSRSRTPPVTRRRSRSRTSPITRRRSRSRTSPVTRRRSRSRTSPVTRRRSRSRTSPVTRRRSRSRTPPAIRRRSRSRTPLLPRKRSRSRSPLAIRRRSRSRTPRTARGKRSLTRSPPAIRRRSASGSSSDRSRSATPPATRNHSGSRTPPVALNSSRMSCFSRPSMSPTPLDRCRSPGMLEPLGSSRTPMSVLQQAGGSMMDGPGPRIPDHQRTSVPENHAQSRIALALTAISLGTARPPPSMSAAGLAARMSQVPAPVPLMSLRTAPAANLASRIPAASAAAMNLASARTPAIPTAVNLADSRTPAAAAAMNLASPRTAVAPSAVNLADPRTPTAPAVNLAGARTPAALAALSLTGSGTPPTAANYPSSSRTPQAPASANLVGPRSAHATAPVNIAGSRTAAALAPASLTSARMAPALSGANLTSPRVPLSAYERVSGRTSPPLLDRARSRTPPSAPSQSRMTSERAPSPSSRMGQAPSQSLLPPAQDQPRSPVPSAFSDQSRCLIAQTTPVAGSQSLSSGAVATTTSSAGDHNGMLSVPAPGVPHSDVGEPPASTGAQQPSALAALQPAKERRSSSSSSSSSSSSSSSSSSSSSSSSSGSSSSDSEGSSLPVQPEVALKRVPSPTPAPKEAVREGRPPEPTPAKRKRRSSSSSSSSSSSSSSSSSSSSSSSSSSSSSSSSSSSSSSSSSSPSPAKPGPQALPKPASPKKPPPGERRSRSPRKPIDSLRDSRSLSYSPVERRRPSPQPSPRDQQSSSSERGSRRGQRGDSRSPSHKRRRETPSPRPMRHRSSRSP

SEQ ID NO: 37656 - protein, 2334 aa, Homo sapiens
MYNGIGLPTPRGSGTNGYVQRNLSLVRGRRGERPDYKGEEELRRLEAALVKRPNPDILDHERKRRVELRCLELEEMMEEQGYEEQQIQEKVATFRLMLLEKDVNPGGKEETPGQRPAVTETHQLAELNEKKNERLRAAFGISDSYVDGSSFDPQRRAREAKQPAPEPPKPYSLVRESSSSRSPTPKQKKKKKKKDRGRRSESSSPRRERKKSSKKKKHRSESESKKRKHRSPTPKSKRKSKDKKRKRSRSTTPAPKSRRAHRSTSADSASSSDTSRSRSRSAAAKTHTTALAGRSPSPASGRRGEGDAPFSEPGTTSTQRPSSPETATKQPSSPYEDKDKDKKEKSATRPSPSPERSSTGPEPPAPTPLLAERHGGSPQPLATTPLSQEPVNPPSEASPTRDRSPPKSPEKLPQSSSSESSPPSPQPTKVSRHASSSPESPKPAPAPGSHREISSSPTSKNRSHGRAKRDKSHSHTPSRRMGRSRSPATAKRGRSRSRTPTKRGHSRSRSPQWRRSRSAQRWGRSRSPQRRGRSRSPQRPGWSRSRNTQRRGRSRSARRGRSHSRSPATRGRSRSRTPARRGRSRSRTPARRRSRSRTPTRRRSRSRTPARRGRSRSRTPARRRSRTRSPVRRRSRSRSPARRSGRSRSRTPARRGRSRSRTPARRGRSRSRTPARRSGRSRSRTPARRGRSRSRTPRRGRSRSRSLVRRGRSHSRTPQRRGRSGSSSERKNKSRTSQRRSRSNSSPEMKKSRISSRRSRSLSSPRSKAKSRLSLRRSLSGSSPCPKQKSQTPPRRSRSGSSQPKAKSRTPPRRSRSSSSPPPKQKSKTPSRQSHSSSSPHPKVKSGTPPRQGSITSPQANEQSVTPQRRSCFESSPDPELKSRTPSRHSCSGSSPPRVKSSTPPRQSPSRSSSPQPKVKAIISPRQRSHSGSSSPSPSRVTSRTTPRRSRSVSPCSNVESRLLPRYSHSGSSSPDTKVKPETPPRQSHSGSISPYPKVKAQTPPGPSLSGSKSPCPQEKSKDSLVQSCPGSLSLCAGVKSSTPPGESYFGVSSLQLKGQSQTSPDHRSDTSSPEVRQSHSESPSLQSKSQTSPKGGRSRSSSPVTELASRSPIRQDRGEFSASPMLKSGMSPEQSRFQSDSSSYPTVDSNSLLGQSRLETAESKEKMALPPQEDATASPPRQKDKFSPFPVQDRPESSLVFKDTLRTPPRERSGAGSSPETKEQNSALPTSSQDEELMEVVEKSEEPAGQILSHLSSELKEMSTSNFESSPEVEERPAVSLTLDQSQSQASLEAVEVPSMASSWGGPHFSPEHKELSNSPLRENSFGSPLEFRNSGPLGTEMNTGFSSEVKEDLNGPFLNQLETDPSLDMKEQSTRSSGHSSSELSPDAVEKAGMSSNQSISSPVLDAVPRTPSRERSSSASSPEMKDGLPRTPSRRSRSGSSPGLRDGSGTPSRHSLSGSSPGMKDIPRTPSRGRSECDSSPEPKALPQTPRPRSRSPSSPELNNKCLTPQRERSGSESSVDQKTVARTPLGQRSRSGSSQELDVKPSASPQERSESDSSPDSKAKTRTPLRQRSRSGSSPEVDSKSRLSPRRSRSGSSPEVKDKPRAAPRAQSGSDSSPEPKAPAPRALPRRSRSGSSSKGRGPSPEGSSSTESSPEHPPKSRTARRGSRSSPEPKTKSRTPPRRRSSRSSPELTRKARLSRRSRSASSSPETRSRTPPRHRRSPSVSSPEPAEKSRSSRRRRSASSPRTKTTSRRGRSPSPKPRGLQRSRSRSRREKTRTTRRRDRSGSSQSTSRRRQRSRSRSRVTRRRRGGSGYHSRSPARQESSRTSSRRRRGRSRTPPTSRKRSRSRTSPAPWKRSRSRASPATHRRSRSRTPLISRRRSRSRTSPVSRRRSRSRTSVTRRRSRSRASPVSRRRSRSRTPPVTRRRSRSRTPTTRRRSRSRTPPVTRRRSRSRTPPVTRRRSRSRTSPITRRRSRSRTSPVTRRRSRSRTSPVTRRRSRSRTSPVTRRRSRSRTPPAQDQPRSPVPSAFSDQSRCLIAQTTPVAGSQSLSSGAVATTTSSAGDHNGMLSVPAPGVPHSDVGEPPASTGAQQPSALAALQPAKERRSSSSSSSSSSSSSSSSSSSSSSSSSGSSSSDSEGSSLPVQPEVALKRVPSPTPAPKEAVREGRPPEPTPAKRKRRSSSSSSSSSSSSSSSSSSSSSSSSSSSSSSSSSSSSSSSSSSPSPAKPGPQALPKPASPKKPPPGERRSRSPRKPIDSLRDSRSLSYSPVERRRPSPQPSPRDQQSSSSERGSRRGQRGDSRSPSHKRRRETPSPRPMRHRSSRSP

SEQ ID NO: 37657 - protein, 311 aa, Homo sapiens
MLLEKDVNPGGKEETPGQRPAVTETHQLAELNEKKNERLRAAFGISDSYVDGSSFDPQRRAREAKQPAPEPPKPYSLVRESSSSRSPTPKQKKKKKKKDRGRRSESSSPRRERKKSSKKKKHRSESESKKRKHRSPTPKSKRKSKDKKRKRSRSTTPAPKSRRAHRSTSADSASSSDTSRSRSRSAAAKTHTTALAGRSPSPASGRRGEGDAPFSEPGTTSTQRPSSPETATKQPSSPYEDKDKDKKEKSATRPSPSPERSSTGPEPPAPTPLLAERHGGSPQPLATTPLSQEPVNPSPQLFMFLKGILVF

SEQ ID NO: 37658 - protein, 508 aa, Homo sapiens
MTSLMPGAGLLPIPTPNPLTTLGVSLSSLGAIPAAALDPNIATLGEIPQPPLMGNVDPSKIDEIRRTVYVGNLNSQTTTADQLLEFFKQVGEVKFVRMAGDETQPTRFAFVEFADQNSVPRALAFNGVMFGDRPLKINHSNNAIVKPPEMTPQAAAKELEEVMKRVREAQSFISAAIEPESGKSNERKGGRSRSHTRSKSRSSSKSHSRRKRSQSKHRSRSHNRSRSRQKDRRRSKSPHKKRSKSRERRKSRSRSHSRDKRKDTREKIKEKERVKEKDREKEREREKEREKEKERGKNKDRDKEREKDREKDKEKDREREREKEHEKDRDKEKEKEQDKEKEREKDRSKEIDEKRKKDKKSRTPPRSYNASRRSRSSSRERRRRRSRSSSRSPRTSKTIKRKSSRSPSPRSRNKKDKKREKERDHISERRERERSTSMRKSSNDRDGKEKLEKNSTSLKEKEHNKEPDSSVSKEVDDKDAPRTEENKIQHNGNCQLNEENLSTKTEAV

SEQ ID NO: 37659 - protein, 624 aa, Homo sapiens
MNSGGGFGLGLGFGLTPTSVIQVTNLSSAVTSEQMRTLFSFLGEIEELRLYPPDNAPLAFSSKVCYVKFRDPSSVGVAQHLTNTVFIDRALIVVPCAEGKIPEESKALSLLAPAPTMTSLMPGAGLLPIPTPNPLTTLGVSLSSLGAIPAAALDPNIATLGEIPQPPLMGNVDPSKIDEIRRTVYVGNLNSQTTTADQLLEFFKQVGEVKFVRMAGDETQPTRFAFVEFADQNSVPRALAFNGVMFGDRPLKINHSNNAIVKPPEMTPQAAAKELEEVMKRVREAQSFISAAIEPESGKSNERKGGRSRSHTRSKSRSSSKSHSRRKRSQSKHRSRSHNRSRSRQKDRRRSKSPHKKRSKSRERRKSRSRSHSRDKRKDTREKIKEKERVKEKDREKEREREKEREKEKERGKNKDRDKEREKDREKDKEKDREREREKEHEKDRDKEKEKEQDKEKEREKDRSKEIDEKRKKDKKSRTPPRSYNASRRSRSSSRERRRRRSRSSSRSPRTSKTIKRKSSRSPSPRSRNKKDKKREKERDHISERRERERSTSMRKSSNDRDGKEKLEKNSTSLKEKEHNKEPDSSVSKEVDDKDAPRTEENKIQHNGNCQLNEENLSTKTEAV

SEQ ID NO: 37660 - protein, 72 aa, Homo sapiens
MEQPTSSINGEKRKSPCESNNENDEMQETPNRDLAPEPSLKKMKTSEYSTVLAFCYRKAKKIHSNQLENDQS

SEQ ID NO: 37661 - protein, 536 aa, Homo sapiens
MGSNKSKPKDASQRRRSLEPAENVHGAGGGAFPASQTPSKPASADGHRGPSAAFAPAAAEPKLFGGFNSSDTVTSPQRAGPLAGGVTTFVALYDYESRTETDLSFKKGERLQIVNNTEGDWWLAHSLSTGQTGYIPSNYVAPSDSIQAEEWYFGKITRRESERLLLNAENPRGTFLVRESETTKGAYCLSVSDFDNAKGLNVKHYKIRKLDSGGFYITSRTQFNSLQQLVAYYSKHADGLCHRLTTVCPTSKPQTQGLAKDAWEIPRESLRLEVKLGQGCFGEVWMGTWNGTTRVAIKTLKPGTMSPEAFLQEAQVMKKLRHEKLVQLYAVVSEEPIYIVTEYMSKGSLLDFLKGETGKYLRLPQLVDMAAQIASGMAYVERMNYVHRDLRAANILVGENLVCKVADFGLARLIEDNEYTARQGAKFPIKWTAPEAALYGRFTIKSDVWSFGILLTELTTKGRVPYPGMVNREVLDQVERGYRMPCPPECPESLHDLMCQCWRKEPEERPTFEYLQAFLEDYFTSTEPQYQPGENL

SEQ ID NO: 37662 - protein, 542 aa, Homo sapiens
MGSNKSKPKDASQRRRSLEPAENVHGAGGGAFPASQTPSKPASADGHRGPSAAFAPAAAEPKLFGGFNSSDTVTSPQRAGPLAGGVTTFVALYDYESRTETDLSFKKGERLQIVNNTRKVDVREGDWWLAHSLSTGQTGYIPSNYVAPSDSIQAEEWYFGKITRRESERLLLNAENPRGTFLVRESETTKGAYCLSVSDFDNAKGLNVKHYKIRKLDSGGFYITSRTQFNSLQQLVAYYSKHADGLCHRLTTVCPTSKPQTQGLAKDAWEIPRESLRLEVKLGQGCFGEVWMGTWNGTTRVAIKTLKPGTMSPEAFLQEAQVMKKLRHEKLVQLYAVVSEEPIYIVTEYMSKGSLLDFLKGETGKYLRLPQLVDMAAQIASGMAYVERMNYVHRDLRAANILVGENLVCKVADFGLARLIEDNEYTARQGAKFPIKWTAPEAALYGRFTIKSDVWSFGILLTELTTKGRVPYPGMVNREVLDQVERGYRMPCPPECPESLHDLMCQCWRKEPEERPTFEYLQAFLEDYFTSTEPQYQPGENL

SEQ ID NO: 37663 - protein, 392 aa, Homo sapiens
MASHKLLVTPPKALLKPLSIPNQLLLGPGPSNLPPRIMAAGGLQMIGSMSKDMYQIMDEIKEGIQYVFQTRNPLTLVISGSGHCALEAALVNVLEPGDSFLVGANGIWGQRAVDIGERIGARVHPMTKDPGGHYTLQEVEEGLAQHKPVLLFLTHGESSTGVLQPLDGFGELCHRYKCLLLVDSVASLGGTPLYMDRQGIDILYSGSQKALNAPPGTSLISFSDKAKKKMYSRKTKPFSFYLDIKWLANFWGCDDQPRMYHHTIPVISLYSLRESLALIAEQGLENSWRQHREAAAYLHGRLQALGLQLFVKDPALRLPTVTTVAVPAGYDWRDIVSYVIDHFDIEIMGGLGPSTGKVLRIGLLGCNATRENVDRVTEALRAALQHCPKKKL

SEQ ID NO: 37664 - protein, 262 aa, Homo sapiens
MLALEAAQLDGPHFSCLYPDGVFYDLDSCKHSSYPDSEGAPDSLWDWTVAPPVPATPYEAFDPAAAAFSHPQAAQLCYEPPTYSPAGNLELAPSLEAPGPGLPAYPTENFASQTLVPPAYAPYPSPVLSEEEDLPLDSPALEVSDSESDEALVAGPEGKGSEAGTRKKLRLYQFLLGLLTRGDMRECVWWVEPGAGVFQFSSKHKELLARRWGQQKGNRKRMTYQKLARALRNYAKTGEIRKVKRKLTYQFDSALLPAVRRA

SEQ ID NO: 37665 - protein, 177 aa, Homo sapiens
MLALEAAQLDGPHFSCLYPDGVFYDLDSCKHSSYPDSEGAPDSLWDWTVAPPVPATPYEAFDPAAAAFSHPQAAQLCYEPPTYSPAGNLELAPSLEAPGPGLPAYPTENFASQTLVPPAYAPYPSPVLSEEEDLPLDSPALEVSDSESDEALVAGPEGKGSEGLARSCACTSSCWGY

SEQ ID NO: 37666 - protein, 171 aa, Homo sapiens
MASSMTWTAASIPATLIQRGLLTLVPPAYAPYPSPVLSEEEDLPLDSPALEVSDSESDEALVAGPEGKGSEAGTRKKLRLYQFLLGLLTRGDMRECVWWVEPGAGVFQFSSKHKELLARRWGQQKGNRKRMTYQKLARALRNYAKTGEIRKVKRKLTYQFDSALLPAVRRA

SEQ ID NO: 37667 - protein, 86 aa, Homo sapiens
MPQYQTWEEFSRAAEKLYLADPMKARVVLKYRHSDGNLCVKVTDDLVCLVYKTDQAQDVKKIEKFHSQLMRLMVAKEARNVTMETE

SEQ ID NO: 37668 - protein, 82 aa, Homo sapiens
MPQYQTWEEFSRAAEKLYLADPMKARVVLKYRHSDGNLCVKVTDDLVRQCLALLLRLQCSGMIIAHCILDLLGSSGPLASAS

SEQ ID NO: 37669 - protein, 364 aa, Homo sapiens
MEPLFPASTPSWNASSPGAASGGGDNRTLVGPAPSAGARAVLVPVLYLLVCAAGLGGNTLVIYVVLRFAKMKTVTNIYILNLAVADVLYMLGLPFLATQNAASFWPFGPVLCRLVMTLDGVNQFTSVFCLTVMSVDRYLAVVHPLSSARWRRPRVAKLASAAAWVLSLCMSLPLLVFADVQEGGTCNASWPEPVGLWGAVFIIYTAVLGFFAPLLVICLCYLLIVVKVRAAGVRVGCVRRRSERKVTRMVLVVVLVFAGCWLPFFTVNIVNLAVALPQEPASAGLYFFVVILSYANSCANPVLYGFLSDNFRQSFQKVLCLRKGSGAKDADATEPRPDRIRQQQEATPPAHRAAANGLMQTSKL

SEQ ID NO: 37670 - protein, 388 aa, Homo sapiens
MSAPSTLPPGGEEGLGTAWPSAANASSAPAEAEEAVAGPGDARAAGMVAIQCIYALVCLVGLVGNALVIFVILRYAKMKTATNIYLLNLAVADELFMLSVPFVASSAALRHWPFGSVLCRAVLSVDGLNMFTSVFCLTVLSVDRYVAVVHPLRAATYRRPSVAKLINLGVWLASLLVTLPIAIFADTRPARGGQAVACNLQWPHPAWSAVFVVYTFLLGFLLPVLAIGLCYLLIVGKMRAVALRAGWQQRRRSEKKITRLVLMVVVVFVLCWMPFYVVQLLNLFVTSLDATVNHVSLILSYANSCANPILYGFLSDNFRRFFQRVLCLRCCLLEGAGGAEEEPLDYYATALKSKGGAGCMCPPLPCQQEALQPEPGRKRIPLTRTTTF

SEQ ID NO: 37671 - protein, 900 aa, Homo sapiens
MSSKESCGKKETSQRKDTTTSSPNFGEKDKKERKTPASSTSSSSIRSVSSEKRKLKSDHTDVLYYNIKRRQGLKRLSVEIDTLRRRPKIGSSSQRPIKLKEASYSNDNQIILQSPSSNGTKKDIHKCVDFKPKDIKLTNAGSKLDHGIKSLSSPKIASDVKPKAEGQASENKWSHLLVQREKMKELKKGRNSKFRDNSEKCVLEKWKRNQFSQDYNSNKIIKEPLGSRRQKISFKIPIKSRDTLQKLVEENVFNIDSNNSKTKQEEREYLESSQVSLNVTRQKTEHLLSDFTYKRTVHEWKRKHHYDHQESNDSHSRENLTQSFEAPCCSVSSESIQDADQEMQIVEELHAARVGKSVDLPGELMSMEIDLEDDVHSSSANNTSDRKLLIVIDTNILMNHLKFVRILKTTEVPGFDKLVLIIPWVVMQELDRMKEGKLLKRAQHKAIPAVHFINDSLKNQDRKLWGQSIQLASQKHYGLSDENNDDRVLKCCLQHQELFPCSFVILCTDDRNLRNKGLISGVKSLSKEELSAELLHLSLNTDVCHQPCIPKQQLKAETTPLKESYKEESTNSGLSILLESIVSDLEKSLGTGLSSILETEMKIAFGNLWMEILYLKPPWTLLHLLQCFKKHWLAVFGLVMEKNLLLTIESLYKNLRKANKAVDFTTVKFLLQDSRSLLHAFSTRSNYDGILPQTFAQVNNLLQTFAEVKTKLKPNSSENTVTKKQEGTSLKNSHNQEITVFSSSHLPQPSRHQEIWSILESVWITIYQNSTDVFQRLGSNSALTTSNIASFEEAFICLQKLMAAVRDILEGIQRILAPNSNYQDVETLYNFLIKYEVNKNVKFTAQEIYDCVSQTEYREKLTIGCRQLVEMEYTMQQCNASVYMEAKNRGWCEDMLNYRI

SEQ ID NO: 37672 - protein, 351 aa, Homo sapiens
MAGRSLTSKAEPTAGAVDRAEKAGGQDTSSQKIEDLMEMVQKLQKVGSLEPRVEVLINRINEVQQAKKKANKDLGEARTICEALQKELDSLHGEKVHLKEILSKKQETLRILRLHCQEKESEAHRKHTMLQECKERISALNLQIEEEKNKQRQLRLAFEEQLEDLMGQHKDLWDFHMPERLAKEICALDSSKEQLLKEEKLVKATLEDVKHQLCSLCGAEGPSTLDEGLFLRSQEAAATVQLFQEEHRKAEELLAAAAQRHQQLQQKCQQQQQKRQRLKEELEKHGMQVPAQAQSTQEEEAGPGDVASPKPLKGERPGAAHQAGPDVLIGQEDTLHPDLSPRGFQEIKELF

SEQ ID NO: 37673 - protein, 282 aa, Homo sapiens
MEMVQKLQKVGSLEPRVEVLINRINEVQQAKKKANKDLGEARTICEALQKELDSLHGEKVHLKEILSKKQETLRILRLHCQEKESEAHRKHTMLQECKERISALNLQIEEEKNKQRQLRLAFEEQLEDLMGQHKDLWDFHMPERLAKEICALDSSKEQLLKEEKLVKATLEDVKHQLCSLCGAEGPSTLDEGLFLRSQEAAATVQLFQEEHRKAEELLAAAAQRHQQLQQKCQQQQQKRQRLKEELEKHGMQVPAQAQSTQEEEAGPGDVAPRPGRPVTWWS

SEQ ID NO: 37674 - protein, 190 aa, Homo sapiens
MLQECKERISALNLQIEEEKNKQRQLRLAFEEQLEDLMGQHKDLWDFHMPERLAKEICALDSSKEQLLKEEKLVKATLEDVKHQLCSLCGAEGPSTLDEGLFLRSQEAAATVQLFQEEHRKAEELLAAAAQRHQQLQQKCQQQQQKRQRLKEELEKHGMQVPAQAQSTQEEEAGPGDVAPRPGRPVTWWS

SEQ ID NO: 37675 - protein, 645 aa, Homo sapiens
MYFPSWLSQLYRGLSRPIRRTTQPIWGSLYRSLLQSSQRRIPEFSSFVVRTNTCGELRSSHLGQEVTLCGWIQYRRQNTFLVLRDFDGLVQVIIPQDESAASVKKILCEAPVESVVQVSGTVISRPAGQENPKMPTGEIEIKVKTAELLNACKKLPFEIKNFVKKTEALRLQYRYLDLRSFQMQYNLRLRSQMVMKMREYLCNLHGFVDIETPTLFKRTPGGAKEFLVPSREPGKFYSLPQSPQQFKQLLMVGGLDRYFQVARCYRDEGSRPDRQPEFTQIDIEMSFVDQTGIQSLIEGLLQYSWPNDKDPVVVPFPTMTFAEVLATYGTDKPDTRFGMKIIDISDVFRNTEIGFLQDALSKPHGTVKAICIPEGAKYLKRKDIESIRNFAADHFNQEILPVFLNANRNWNSPVANFIMESQRLELIRLMETQEEDVVLLTAGEHNKACSLLGKLRLECADLLETRGVVLRDPTLFSFLWVVDFPLFLPKEENPRELESAHHPFTAPHPSDIHLLYTEPKKARSQHYDLVLNGNEIGGGSIRIHNAELQRYILATLLKEDVKMLSHLLQALDYGAPPHGGIALGLDRLICLVTGSPSIRDVIAFPKSFRGHDLMSNTPDSVPPEELKPYHIRVSKPTDSKAERAH

SEQ ID NO: 37676 - protein, 593 aa, Homo sapiens
MLRTSVLRLLGRTGASRLSLLEDFGPRYYSSGSLSAGDDACDVRAYFTTPIFYVNAAPHIGHLYSALLADALCRHRRLRGPSTAATRFSTGTDEHGLKIQQAAATAGLAPTELCDRVSEQFQQLFQEAGISCTDFIRTTEARHRVAVQHFWGVLKSRGLLYKGVYEGWYCASDECFLPEAKVTQQPGPSGDSFPVSLESGHPVSWTKEENYIFRLSQFRKPLQRWLRGNPQAITPEPFHHVVLQWLDEELPDLSVSRRSSHLHWGIPVPGDDSQTIYVWLDALVNYLTVIGYPNAEFKSWWPATSHIIGKDILKFHAIYWPAFLLGAGMSPPQRICVHSHWTVCGQKMSKSLGNVVDPRTCLNRYTVDGFRYFLLRQGVPNWDCDYYDEKVVKLLNSELADALGGLLNRCTAKRINPSETYPAFCTTCFPSEPGLVGPSVRAQAEDYALVSAVATLPKQVADHYDNFRIYKALEAVSSCVRQTNGFVQRHAPWKLNWESPVDAPWLGTVLHVALECLRVFGTLLQPVTPSLADKLLSRLGVSASERSLGELYFLPRFYGHPCPFEGRRLGPETGLLFPRLDQSRTWLVKAHRT

SEQ ID NO: 37677 - protein, 406 aa, Homo sapiens
MSGCPFLGNNFGYTFKKLPVEGSEEDKSQTGVNRASKGGLIYGNYLHLEKVLNAQELQSETKGNKIHDEHLFIITHQAYELWFKQILWELDSVREIFQNGHVRDERNMLKVVSRMHRVSVILKLLVQQFSILETMTALDFNDFREYLSPASGFQSLQFRLLENKIGVLQNMRVPYNRRHYRDNFKGEENELLLKSEQEKTLLELVEAWLERTPGLEPHGFNFWGKLEKNITRGLEEEFIRIQAKEESEEKEEQVAEFQKQKEVLLSLFDEKRHEHLLSKGERRLSYRALQGALMIYFYREEPRFQVPFQLLTSLMDIDSLMTKWRYNHVCMVHRMLGSKAGTGGSSGYHYLRSTVSDRYKVFVDLFNLSTYLIPRHWIPKMNPTIHKFLYTAEYCDSSYFSSDESD

SEQ ID NO: 37678 - protein, 262 aa, Homo sapiens
MGKTFSQLGSWREDENKSILSSKPAIGSKAVNYSSTGSSKSFCSCVPCEGTADASFVTCPTCQGSGKIPQELEKQLVALIPYGDQRLKPKHTKLFVFLAVLICLVTSSFIVFFLFPRSVIVQPAGLNSSTVAFDEADIYLNITNILNISNGNYYPIMVTQLTLEVLHLSLVVGQVSNNLLLHIGPLASEQMFYAVATKIRDENTYKICTWLEIKVHHVLLHIQGTLTCSYLSHSEQLVFQSYEYVDCRGNASVPHQLTPHPP

SEQ ID NO: 37679 - protein, 214 aa, Homo sapiens
MGTADASFVTCPTCQGSGKIPQELEKQLVALIPYGDQRLKPKHTKLFVFLAVLICLVTSSFIVFFLFPRSVIVQPAGLNSSTVAFDEADIYLNITNILNISNGNYYPIMVTQLTLEVLHLSLVVGQVSNNLLLHIGPLASEQMFYAVATKIRDENTYKICTWLEIKVHHVLLHIQGTLTCSYLSHSEQLVFQSYEYVDCRGNASVPHQLTPHPP

SEQ ID NO: 37680 - protein, 1621 aa, Homo sapiens
MEWVLAEALLSQSRDPRALLGALCQGEASAERVETLRFLLQRLEDEEARGSGGAGALPEAAREVAAGYLVPLLRSLRGRPAGGPDPSLQPRHRRRVLRAAGAALRSCVRLAGRPQLAAALAEEALRDLLAGWRAPGAEAAVEVLAAVGPCLRPREDGPLLERVAGTAVALALGGGGDGDEAGPAEDAAALVAGRLLPVLVQCGGAALRAVWGGLAAPGASLGSGRVEEKLLVLSALAEKLLPEPGGDRARGAREAGPDARRCWRFWRTVQAGLGQADALTRKRARYLLQRAVEVSAELGADCTCGPQEGNGPSLFWWSERKKDELLKFWENYILIMETLEGNQIHVIKPVLPKLNNLFEYAVSEENGCWLFHPSWHMCIYKRMFESENKILSKEGVIHFLELYETKILPFSPEFSEFIIGPLMDALSESSLYSRSPGQPIGSCSPLGLKLQKFLVTYISLLPEEIKSSFLLKFIRKMTSRHWCAVPILFLSKALANVPRHKALGIDGLLALRDVIHCTMITHQILLRGAAQCYLLQTAMNLLDVEKVSLSDVSTFLMSLRQEESLGRGTSLWTELCDWLRVNESYFKPSPTCSSIGLHKTSLNAYVKSIVQEYVKSSAWETGENCFMPDWFEAKLVSLMVLLAVDVEGMKTQYSGKQRTENVLRIFLDPLLDVLMKFSTNAYMPLLKTDRCLQLLLKLLNTCRLKGSSAQDDEVSTVLQNFFMSTTESISEFILRRLTMNELNSVSDLDRCHLYLMVLTELINLHLKVGWKRGNPIWRVISLLKNASIQHLQEMDSGQEPTVGSQIQRVVSMAALAMVCEAIDQKPELQLDSLHAGPLESFLSSLQLNQTLQKPHAEEQSSYAHPLECSSVLEESSSSQGWGKIVAQYIHDQWVCLSFLLKKYHTLIPTTGSEILEPFLPAVQMPIRTLQSALEALTVLSSDQVLPVFHCLKVLVPKLLTSSESLCIESFDMAWKIISSLSNTQLIFWANLKAFVQFVFDNKVLTIAAKIKGQAYFKIKEIMYKIIEMSAIKTGVFNTLISYCCQSWIVSASNVSQGSLSSAKNYSELILEACIFGTVFRRDQRLVQDVQTFIENLGHDCAANIVMENTKREDHYVRICAVKFLCLLDGSNMSHKLFIEDLAIKLLDKDELVSKSKKRYYVNSLQHRVKNRVWQTLLVLFPRLDQNFLNGIIDRIFQAGFTNNQASIKYFIEWIIILILHKFPQFLPKFWDCFSYGEENLKTSICTFLAVLSHLDIITQNIPEKKLILKQALIVVLQWCFNHNFSVRLYALVALKKLWTVCKVLSVEEFDALTPVIESSLHQVESMHGAGNAKKNWQRIQEHFFFATFHPLKDYCLETIFYILPRLSGLIEDEWITIDKFTRFTDVPLAAGFQWYLSQTQLSKLKPGDWSQQDIGTNLVEADNQAEWTDVQKKIIPWNSRVSDLDLELLFQDRAARLGKSISRLIVVASLIDKPTNLGGLCRTCEVFGASVLVVGSLQCISDKQFQHLSVSAEQWLPLVEVKPPQLIDYLQQKKTEGYTIIGVEQTAKSLDLTQYCFPEKSLLLLGNEREGIPANLIQQLDVCVEIPQQGIIRSLNVHVSGALLIWEYTRQQLLSHGDTKP

SEQ ID NO: 37681 - protein, 677 aa, Homo sapiens
MAEEKKLKLSNTVLPSESMKVVAESMGIAQIQEETCQLLTDEVSYRIKEIAQDALKFMHMGKRQKLTTSDIDYALKLKNVEPLYGFHAQEFIPFRFASGGGRELYFYEEKEVDLSDIINTPLPRVPLDVCLKAHWLSIEGCQPAIPENPPPAPKEQQKAEATEPLKSAKPGQEEDGPLKGKGQGATTADGKGKEKKAPPLLEGAPLRLKPRSIHELSVEQQLYYKEITEACVGSCEAKRAEALQSIATDPGLYQMLPRFSTFISEGVRVNVVQNNLALLIYLMRMVKALMDNPTLYLEKYVHELIPAVMTCIVSRQLCLRPDVDNHWALRDFAARLVAQICKHFSTTTNNIQSRITKTFTKSWVDEKTPWTTRYGSIAGLAELGHDVIKTLILPRLQQEGERIRSVLDGPVLSNIDRIGADHVQSLLLKHCAPVLAKLRPPPDNQDAYRAEFGSLGPLLCSQVVKARAQAALQAQQVNRTTLTITQPRPTLTLSQAPQPGPRTPGLLKVPGSIALPVQTLVSARAAAPPQPSPPPTKFIVMSSSSSAPSTQQVLSLSTSAPGSGSTTTSPVTTTVPSVQPIVKLVSTATTAPPSTAPSGPGSVQKYIVVSLPPTGEGKGGPTSHPSPVPPPASSPSPLSGSALCGGKQEAGDSPPPAPGTPKANGSQPNSGSPQPAP

SEQ ID NO: 37682 - protein, 667 aa, Homo sapiens
MAEEKKLKLSNTVLPSESMKVVAESMGIAQIQEETCQLLTDEVSYRIKEIAQDALKFMHMGKRQKLTTSDIDYALKLKNVEPLYGFHAQEFIPFRFASGGGRELYFYEEKEVDLSDIINTPLPRVPLDVCLKAHWLSIEGCQPAIPENPPPAPKEQQKAEATEPLKSAKPGQEEDGPLKGKGQGATTADGKGKEKKAPPLLEGAPLRLKPRSIHELSVEQQLYYKEITEACVGSCEAKRAEALQSIATDPGLYQMLPRFSTFISEGVRVNVVQNNLALLIYLMRMVKALMDNPTLYLEKYVHELIPAVMTCIVSRQLCLRPDVDNHWALRDFAARLVAQICKHFSTTTNNIQSRITKTFTKSWVDEKTPWTTRYGSIAGLAELGHDVIKTLILPRLQQEGERIRSVLDGPVLSNIDRIGADHVQSLLLKHCAPVLAKLRPPPDNQDAYRAEFGSLGPLLCSQVVKARAQAALQAQQPRPTLTLSQAPQPGPRTPGLLKVPGSIALPVQTLVSARAAAPPQPSPPPTKFIVMSSSSSAPSTQQVLSLSTSAPGSGSTTTSPVTTTVPSVQPIVKLVSTATTAPPSTAPSGPGSVQKYIVVSLPPTGEGKGGPTSHPSPVPPPASSPSPLSGSALCGGKQEAGDSPPPAPGTPKANGSQPNSGSPQPAP

SEQ ID NO: 37683 - protein, 714 aa, Homo sapiens
MTKRRLQTITACLQLREGSPSLHRGLHPSREEKRDSRMAEEKKLKLSNTVLPSESMKVVAESMGIAQIQEETCQLLTDEVSYRIKEIAQDALKFMHMGKRQKLTTSDIDYALKLKNVEPLYGFHAQEFIPFRFASGGGRELYFYEEKEVDLSDIINTPLPRVPLDVCLKAHWLSIEGCQPAIPENPPPAPKEQQKAEATEPLKSAKPGQEEDGPLKGKGQGATTADGKGKEKKAPPLLEGAPLRLKPRSIHELSVEQQLYYKEITEACVGSCEAKRAEALQSIATDPGLYQMLPRFSTFISEGVRVNVVQNNLALLIYLMRMVKALMDNPTLYLEKYVHELIPAVMTCIVSRQLCLRPDVDNHWALRDFAARLVAQICKHFSTTTNNIQSRITKTFTKSWVDEKTPWTTRYGSIAGLAELGHDVIKTLILPRLQQEGERIRSVLDGPVLSNIDRIGADHVQSLLLKHCAPVLAKLRPPPDNQDAYRAEFGSLGPLLCSQVVKARAQAALQAQQVNRTTLTITQPRPTLTLSQAPQPGPRTPGLLKVPGSIALPVQTLVSARAAAPPQPSPPPTKFIVMSSSSSAPSTQQVLSLSTSAPGSGSTTTSPVTTTVPSVQPIVKLVSTATTAPPSTAPSGPGSVQKYIVVSLPPTGEGKGGPTSHPSPVPPPASSPSPLSGSALCGGKQEAGDSPPPAPGTPKANGSQPNSGSPQPAP

SEQ ID NO: 37684 - protein, 667 aa, Homo sapiens
MAEEKKLKLSNTVLPSESMKVVAESMGIAQIQEETCQLLTDEDALKFMHMGKRQKLTTSDIDYALKLKNVEPLYGFHAQEFIPFRFASGGGRELYFYEEKEVDLSDIINTPLPRVPLDVCLKAHWLSIEGCQPAIPENPPPAPKEQQKAEATEPLKSAKPGQEEDGPLKGKGQGATTADGKGKEKKAPPLLEGAPLRLKPRSIHELSVEQQLYYKEITEACVGSCEAKRAEALQSIATDPGLYQMLPRFSTFISEGVRVNVVQNNLALLIYLMRMVKALMDNPTLYLEKYVHELIPAVMTCIVSRQLCLRPDVDNHWALRDFAARLVAQICKHFSTTTNNIQSRITKTFTKSWVDEKTPWTTRYGSIAGLAELGHDVIKTLILPRLQQEGERIRSVLDGPVLSNIDRIGADHVQSLLLKHCAPVLAKLRPPPDNQDAYRAEFGSLGPLLCSQVVKARAQAALQAQQVNRTTLTITQPRPTLTLSQAPQPGPRTPGLLKVPGSIALPVQTLVSARAAAPPQPSPPPTKFIVMSSSSSAPSTQQVLSLSTSAPGSGSTTTSPVTTTVPSVQPIVKLVSTATTAPPSTAPSGPGSVQKYIVVSLPPTGEGKGGPTSHPSPVPPPASSPSPLSGSALCGGKQEAGDSPPPAPGTPKANGSQPNSGSPQPAP

SEQ ID NO: 37685 - protein, 316 aa, Homo sapiens [sequence omitted]

SEQ ID NO: 37686 - protein, 764 aa, Homo sapiens
MERAVQGTDGGGGSNSSSRSSSRATSAGSSPSCSLAGRGVSSRSAAAGLGGGGSRSSPGSVAASPSGGGGRRREPALEGVLSKYTNLLQGWQNRYFVLDFEAGILQYFVNEQSKHQKPRGVLSLSGAIVSLSDEAPHMLVVYSANGEMFKLRAADAKEKQFWVTQLRACAKYHMEMNSKSAPSSRSRSLTLLPHGTPNSASPCSQRHLSVGAPGVVTITHHKSPAAARRAKSQYSGQLHEVREMMNQVEGQQKNLVHAIESLPGSGPLTALDQDLLLLKATSAATLSCLGECLNLLQQSVHQAGQPSQKPGASENILGWHGSKSHSTEQLKNGTLGSLPSASANITWAILPNSAEDEQTSQPEPEPNSGSELVLSEDEKSDNEDKEETELGVMEDQRSIILHLISQLKLGMDLTKVVLPTFILEKRSLLEMYADFMAHPDLLLAITAGATPEERVICFVEYYLTAFHEGRKGALAKKPYNPIIGETFHCSWEVPKDRVKPKRTASRSPASCHEHPMADDPSKSYKLRFVAEQVSHHPPISCFYCECEEKRLCVNTHVWTKSKFMGMSVGVSMIGEGVLRLLEHGEEYVFTLPSAYARSILTIPWVELGGKVSINCAKTGYSATVIFHTKPFYGGKVHRVTAEVKHNPTNTIVCKAHGEWNGTLEFTYNNGETKVIDTTTLPVYPKKIRPLEKQGPMESRNLWREVTRYLRLGDIDAATEQKRHLEEKQRVEERKRENLRTPWKPKYFIQEGDGWVYFNPLWKAH

SEQ ID NO: 37687 - protein, 700 aa, Homo sapiens
MERAVQGTDGGGGSNSSSRSSSRATSAGSSPSCSLAGRGVSSRSAAAGLGGGGSRSSPGSVAASPSGGGGRRREPALEGVLSKYTNLLQGWQNRYFVLDFEAGILQYFVNEQSKHQKPRGVLSLSGAIVSLSDEAPHMLVVYSANGEMFKLRAADAKEKQFWVTQLRACAKYHMEMNSKMMNQVEGQQKNLVHAIESLPGSGPLTALDQDLLLLKATSAATLSCLGECLNLLQQSVHQAGQPSQKPGASENILGWHGSKSHSTEQLKNGTLGSLPSASANITWAILPNSAEDEQTSQPEPEPNSGSELVLSEDEKSDNEDKEETELGVMEDQRSIILHLISQLKLGMDLTKVVLPTFILEKRSLLEMYADFMAHPDLLLAITAGATPEERVICFVEYYLTAFHEGRKGALAKKPYNPIIGETFHCSWEVPKDRVKPKRTASRSPASCHEHPMADDPSKSYKLRFVAEQVSHHPPISCFYCECEEKRLCVNTHVWTKSKFMGMSVGVSMIGEGVLRLLEHGEEYVFTLPSAYARSILTIPWVELGGKVSINCAKTGYSATVIFHTKPFYGGKVHRVTAEVKHNPTNTIVCKAHGEWNGTLEFTYNNGETKVIDTTTLPVYPKKIRPLEKQGPMESRNLWREVTRYLRLGDIDAATEQKRHLEEKQRVEERKRENLRTPWKPKYFIQEGDGWVYFNPLWKAH

SEQ ID NO: 37688 - protein, 312 aa, Homo sapiens
MRNHTTVANFILLGLTDDPQLQVIIFLLLFFTYMLSITGNLTIITLTLLDLHLKTPMYFFLRNFSFLEVSFTTVYIPKFLVSMATGDKTISYNDCAAQLFFTILLGATEFFLLAAMSYERYVAICKPLHYTTIMSSRVCSLLVFASWMAGFLIIFPPLLMGLQLDFCAANTVDHFFCDVSPILQLSCTDTDIIELMMLLSAILTLLVTLVLVILSYTNIIRTILKIPSSQQRKKAFSTCSSHMVVVSISYGSCIFMYVKPSAKERVSLNKGIALLSTSVAPMLNPFIYTLRNKQVKDVFKHTVKKIELFSMK

SEQ ID NO: 37689 - protein, 316 aa, Homo sapiens
MQGENFTIWSIFFLEGFSQYPGLEVVLFVFSLVMYLTTLLGNSTLILITILDSRLKTPMYLFLGNLSFMDICYTSASVPTLLVNLLSSQKTIIFSGCAVQMYLSLAMGSTECVLLAVMAYDRYVAICNPLRYSIIMNRCVCARMATVSWVTGCLTALLETSFALQIPLCGNLIDHFTCEILAVLKLACTSSLLMNTIMLVVSILLLPIPMLLVCISYIFILSTILRITSAEGRNKAFSTCGAHLTVVILYYGAALSMYLKPSSSNAQKIDKIISLLYGVLTPMLNPIIYSLRNKEVKDAMKKLLGKITLHQTHEHL

SEQ ID NO: 37690 - protein, 316 aa, Homo sapiens
MVEENHTMKNEFILTGFTDHPELKTLLFVVFFAIYLITVVGNISLVALIFTHCRLHTPMYIFLGNLALVDSCCACAITPKMLENFFSEGKRISLYECAVQFYFLCTVETADCFLLAAVAYDRYVAICNPLQYHIMMSKKLCIQMTTGAFIAGNLHSMIHVGLVFRLVFCGLNHINHFYCDTLPLYRLSCVDPFINELVLFIFSGSVQVFTIGSVLISYLYILLTIFRMKSKEGRAKAFSTCASHFSSVSLFYGSIFFLYIRPNLLEEGGNDIPAAILFTIVVPLLNPFIYSLRNKEVISVLRKILLKIKSQGSVNK

SEQ ID NO: 37691 - protein, 328 aa, Homo sapiens
MRPSSNVTEFVLLGLTQDPDVKKTLFVMFLLIYIVTMVGNLLIWVTTIGSPSLGSLMYFFLAYLSLMDAIYSTAMSPKLMIDLLCDKIAISLSACMGQLFIEHLLGGAEVFLLVVMAYDRYVAISKPLHYLNIMNRLVCILLLVVAMIGGFVHSVVQIVFLYSLPICGPNVIDHSVCDMYPLLELLCLDTYFIGLTVVANGGIICMVIFTFLLISCGVILNFLKTYSQEERHKALPTCISHIIVVALVFVPCIFMYVRPVSNFPFDKLMTVFYSIITLMLNPLIYSLRQSEMKNAMKNLWCEKLSIVRKRVSPTLNIFIPSSKATNRR

SEQ ID NO: 37692 - protein, 322 aa, Homo sapiens
MNSLKDGNHTALTGFILLGLTDDPILRVILFMIILSGNLSIIILIRISSQLHHPMYFFLSHLAFADMAYSSSVTPNMLVNFLVERNTVSYLGCAIQLGSAAFFATVECVLLAAMAYDRFVAICSPLLYSTKMSTQVSVQLLLVVYIAGFLIAVSYTTSFYFLLFCGPNQVNHFFCDFAPLLELSCSDISVSTVVLSFSSGSIIVVTVCVIAVCYIYILITILKMRSTEGHHKAFSTCTSHLTVVTLFYGTITFIYVMPNFSYSTDQNKVVSVLYTVVIPMLNPLIYSLRNKEIKGALKRELVRKILSHDACYFSRTSNNDIT

SEQ ID NO: 37693 - protein, 312 aa, Homo sapiens
MRKHTAITTFILLGLTEDPQLQVLLFMFLFITYMLSVTGKLTIIALTMLDPHLKTPMYFFLQNLSFLEISFTATCVPRFLYSISTGNKIITYNACVIQLFFADLFGVTEFFLLATMSYDRYVAICKPLHYMAIMSNKVCKTMVICCWMAALMIILPPLSLGFHLEFCDSNVINHFGCDALPILKIPCSDTSLIEQMVVASAVLTFIITLVCVVLSYTYIIRTILKFPSVQQKKKAFSTCSSHITVVSITYGSCIFIYIKPSAKEEVNINKGVSVLISSISPMLNSFIYTLRNEQVKQAFHDSLKKIAFRLKK

SEQ ID NO: 37694 - protein, 324 aa, Homo sapiens
MGMEGLLQNSTNFVLTGLITHPAFPGLLFAIVFSIFVVAITANLVMILLIHMDSRLHTPMYFLLSQLSIMDTIYICITVPKMLQDLLSKDKTISFLGCAVQIFLYLTLIGGEFFLLGLMAYDRYVAVCNPLRYPLLMNRRVCLFMVVGSWVGGSLDGFMLTPVTMSFPFCRSREINHFFCEIPAVLKLSCTDTSLYETLMYACCVLMLLIPLSVISVSYTHILLTVHRMNSAEGRRKAFATCSSHIMVVSVFYGAAFYTNVLPHSYHTPEKDKVVSAFYTILTPMLNPLIYSLRNKDVAAALRKVLGRCGSSQSIRVATVIRKG

SEQ ID NO: 37695 - protein, 318 aa, Homo sapiens
MEWENHTILVEFFLKGLSGHPRLELLFFVLIFIMYVVILLGNGTLILISILDPHLHTPMYFFLGNLSFLDICYTTTSIPSTLVSFLSERKTISLSGCAVQMFLGLAMGTTECVLLGMMAFDRYVAICNPLRYPIIMSKDAYVPMAAGSWIIGAVNSAVQSVFVVQLPFCRNNIINHFTCEILAVMKLACADISDNEFIMLVATTLFILTPLLLIIVSYTLIIVSIFKISSSEGRSKASSTCSAHLTVVIIFYGTILFMYMKPKSKETLNSDDLDATDKIISMFYGVMTPMMNPLIYSLRNKDVKEAVKHLLNRRFFSK

SEQ ID NO: 37696 - protein, 315 aa, Homo sapiens
MTTHRNDTLSTEASDFLLNCFVRSPSWQHWLSLPLSLLFLLAVGANTTLLMTIWLEASLHQPLYYLLSLLSLLDIVLCLTVIPKVLTIFWFDLRPISFPACFLQMYIMNCFLAMESCTFMVMAYDRYVAICHPLRYPSIITDHFVVKAAMFILTRNVLMTLPIPILSAQLRYCGRNVIENCICANMSVSRLSCDDVTINHLYQFAGGWTLLGSDLILIFLSYTFILRAVLRLKAEGAVAKALSTCGSHFMLILFFSTILLVFVLTHVAKKKVSPDVPVLLNVLHHVIPAALNPIIYGVRTQEIKQGMQRLLKKGC

SEQ ID NO: 37697 - protein, 321 aa, Homo sapiens
MARENHSLAAEFILIGFTNYPELKTLLFVVFSAIYLVTMVGNLGLVALIYVERRLLTPMYIFLGNLALMDSCCSCAVTPKMLENFFSEDRIISLYECMAQFYFLCLAETTDCFLLATMAYDRYVAICHPLQYHTMMSKTLCIRMTTGAFKAGNLHSMIHVGLLLRLTFCRSNKIHHFFCDILPLYRLSCTDPSINELMIYIFSIPIQIFTIATVLISYLCILLTVFKMKSKEGRGKAFSTCASHFLSVSIFYICLLMYIGPSEEGDKDTPVAIFYAIVIPLLNPFIYSLRNKEVINVLKKIMRNYNILKQTCSIANLFLIY

SEQ ID NO: 37698 - protein, 335 aa, Homo sapiens
MNISDVISFDILVSAMKTGNQSFGTDFLLVGLFQYGWINSLLFVVIATLFTVALTGNIMLIHLIRLNTRLHTPMYFLLSQLSIVDLMYISTTVPKMAVSFLSQSKTIRFLGCEIQTYVFLALGGTEALLLGFMSYDRYVAICHPLHYPMLMSKKICCLMVACAWASGSINAFIHTLYVFQLPFCRSRLINHFFCEVPALLSLVCQDTSQYEYTVLLSGLIILLLPFLAILASYARVLIVVFQMSSGKGQAKAVSTCSSHLIVASLFYATTLFTYTRPHSLRSPSRDKAVAVFYTIVTPLLNPFIYSLRNKEVTGAVRRLLGYWICCRKYDFRSLY

SEQ ID NO: 37699 - protein, 370 aa, Homo sapiens
MNVAAKYRMASLYVGDLHADVTEDLLFRKFSTVGPVLSIRICRDQVTRRSLGYAYVNFLQLADAQKALDTMNFDIIKGKSIRLMWSQRDAYLRRSGIGNVFIKNLDKSIDNKTLYEHFSAFGKILSSKVMSDDQGSKGYAFVHFQNQSAADRAIEEMNGKLLKGCKVFVGRFKNRKDREAELRSKASEFTNVYIKNFGGDMDDERLKDVFSKYGKTLSVKVMTDSSGKSKGFGFVSFDSHEAAKKAVEEMNGRDINGQLIFVGRAQKKVERQAELKQMFEQLKRERIRGCQGVKLYIKNLDDTIDDEKLRNEFSSFGSISRVKVMQEEGQSKGFGLICFSSPEDATKAMTEMNGRILGSKPLSIALAQRH

SEQ ID NO: 37700 - protein, 521 aa, Homo sapiens
MGEVEAPGRLWLESPPGGAPPIFLPSDGQALVLGRGPLTQVTDRKCSRTQVELVADPETRTVAVKQLGVNPSTTGTQELKPGLEGSLGVGDTLYLVNGLHPLTLRWEETRTPESQPDTPPGTPLVSQDEKRDAELPKKRMRKSNPGWENLEKLLVFTAAGVKPQGKVAGFDLDGTLITTRSGKVFPTGPSDWRILYPEIPRKLRELEAEGYKLVIFTNQMSIGRGKLPAEEFKAKVEAVVEKLGVPFQVLVATHAGLYRKPVTGMWDHLQEQANDGTPISIGDSIFVGDAAGRPANWAPGRKKKDFSCADRLFALNLGLPFATPEEFFLKWPAAGFELPAFDPRTVSRSGPLCLPESRALLSASPEVVVAVGFPGAGKSTFLKKHLVSAGYVHVNRDTLGSWQRCVTTCETALKQGKRVAIDNTNPDAASRARYVQCARAAGVPCRCFLFTATLEQARHNNRFREMTDSSHIPVSDMVMYGYRKQFEAPTLAEGFSAILEIPFRLWVEPRLGRLYCQFSEG

SEQ ID NO: 37701 - protein, 482 aa, Homo sapiens
MQILTPPLQSSVELVADPETRTVAVKQLGVNPSTTGTQELKPGLEGSLGVGDTLYLVNGLHPLTLRWEETRTPESQPDTPPGTPLVSQDEKRDAELPKKRMRKSNPGWENLEKLLVFTAAGVKPQGKVAGFDLDGTLITTRSGKVFPTGPSDWRILYPEIPRKLRELEAEGYKLVIFTNQMSIGRGKLPAEEFKAKVEAVVEKLGVPFQVLVATHAGLYRKPVTGMWDHLQEQANDGTPISIGDSIFVGDAAGRPANWAPGRKKKDFSCADRLFALNLGLPFATPEEFFLKWPAAGFELPAFDPRTVSRSGPLCLPESRALLSASPEVVVAVGFPGAGKSTFLKKHLVSAGYVHVNRDTLGSWQRCVTTCETALKQGKRVAIDNTNPDAASRARYVQCARAAGVPCRCFLFTATLEQARHNNRFREMTDSSHIPVSDMVMYGYRKQFEAPTLAEGFSAILEIPFRLWVEPRLGRLYCQFSEG

SEQ ID NO: 37702 - protein, 603 aa, Homo sapiens
MSAAVTAGKLARAPADPGKAGVPGVAAPGAPAAAPPAKEIPEVLVDPRSRRRYVRGRFLGKGGFAKCFEISDADTKEVFAGKIVPKSLLLKPHQREKMSMEISIHRSLAHQHVVGFHGFFEDNDFVFVVLELCRRRSLLELHKRRKALTEPEARYYLRQIVLGCQYLHRNRVIHRDLKLGNLFLNEDLEVKIGDFGLATKVEYDGERKKTLCGTPNYIAPEVLSKKGHSFEVDVWSIGCIMYTLLVGKPPFETSCLKETYLRIKKNEYSIPKHINPVAASLIQKMLQTDPTARPTINELLNDEFFTSGYIPARLPITCLTIPPRFSIAPSSLDPSNRKPLTVLNKGLENPLPERPREKEEPVVRETGEVVDCHLSDMLQQLHSVNASKPSERGLVRQEEAEDPACIPIFWVSKWVDYSDKYGLGYQLCDNSVGVLFNDSTRLILYNDGDSLQYIERDGTESYLTVSSHPNSLMKKITLLKYFRNYMSEHLLKAGANITPREGDELARLPYLRTWFRTRSAIILHLSNGSVQINFFQDHTKLILCPLMAAVTYIDEKRDFRTYRLSLLEEYGCCKELASRLRYARTMVDKLLSSRSASNRLKAS

SEQ ID NO: 37703 - protein, 441 aa, Homo sapiens
MEQPQEEAPEVREEEEKEEVAEAEGAPELNGGPQHALPSSSYTDLSRSSSPPSLLDQLQMGCDGASCGSLNMECRVCGDKASGFHYGVHACEGCKGFFRRTIRMKLEYEKCERSCKIQKKNRNKCQYCRFQKCLALGMSHNAIRFGRMPEAEKRKLVAGLTANEGSQYNPQVADLKAFSKHIYNAYLKNFNMTKKKARSILTGKASHTAPFVIHDIETLWQAEKGLVWKQLVNGLPPYKEISVHVFYRCQCTTVETVRELTEFAKSIPSFSSLFLNDQVTLLKYGVHEAIFAMLASIVNKDGLLVANGSGFVTREFLRSLRKPFSDIIEPKFEFAVKFNALELDDSDLALFIAAIILCGDRPGLMNVPRVEAIQDTILRALEFHLQANHPDAQYLFPKLLQKMADLRQLVTEHAQMMQRIKKTETETSLHPLLQEIYKDMY

SEQ ID NO: 37704 - protein, 361 aa, Homo sapiens
MEQPQEEAPEVREEEEKEEVAEAEGAPELNGGPQHALPSSSYTDLSRSSSPPSLLDQLQMGCDGASCGSLNMECRVCGDKASGFHYGVHACEGCKGFFRRTIRMKLEYEKCERSCKIQKKNRNKCQYCRFQKCLALGMSHNAIRFGRMPEAEKRKLVAGLTANEGSQYNPQVADLKAFSKHIYNAYLKNFNMTKKKARSILTGKASHTAPFVIHDIETLWQAEKGLVWKQLVNGLPPYKEISVHVFYRCQCTTVETVRELTEFAKSIPSFSSLFLNDQVTLLKYGVHEAIFAMLASIVNKDGLLVANGSGFVTREFLRSLRKPFSDIIEPKFEFAVKFNALELDDSDLALFIAAIILCGGE

SEQ ID NO: 37705 - protein, 402 aa, Homo sapiens
MHQRDLSRSSSPPSLLDQLQMGCDGASCGSLNMECRVCGDKASGFHYGVHACEGCKGFFRRTIRMKLEYEKCERSCKIQKKNRNKCQYCRFQKCLALGMSHNAIRFGRMPEAEKRKLVAGLTANEGSQYNPQVADLKAFSKHIYNAYLKNFNMTKKKARSILTGKASHTAPFVIHDIETLWQAEKGLVWKQLVNGLPPYKEISVHVFYRCQCTTVETVRELTEFAKSIPSFSSLFLNDQVTLLKYGVHEAIFAMLASIVNKDGLLVANGSGFVTREFLRSLRKPFSDIIEPKFEFAVKFNALELDDSDLALFIAAIILCGDRPGLMNVPRVEAIQDTILRALEFHLQANHPDAQYLFPKLLQKMADLRQLVTEHAQMMQRIKKTETETSLHPLLQEIYKDMY

SEQ ID NO: 37706 - protein, 343 aa, Homo sapiens
MEQPQEEAPEVREEEEKEEVAEAEGAPELNGGPQHALPSSSYTAIRFGRMPEAEKRKLVAGLTANEGSQYNPQVADLKAFSKHIYNAYLKNFNMTKKKARSILTGKASHTAPFVIHDIETLWQAEKGLVWKQLVNGLPPYKEISVHVFYRCQCTTVETVRELTEFAKSIPSFSSLFLNDQVTLLKYGVHEAIFAMLASIVNKDGLLVANGSGFVTREFLRSLRKPFSDIIEPKFEFAVKFNALELDDSDLALFIAAIILCGDRPGLMNVPRVEAIQDTILRALEFHLQANHPDAQYLFPKLLQKMADLRQLVTEHAQMMQRIKKTETETSLHPLLQEIYKDMY

SEQ ID NO: 37707 - protein, 754 aa, Homo sapiens
MAAGVLPQNEQPYSTLVNNSECVANMKGNLERPTPKYTKVGERLRHVIPGHMACSMACGGRACKYENPARWSEQEQAIKGVYSSWVTDNILAMARPSSELLEKYHIIDQFLSHGIKTIINLQRPGEHASCGNPLEQESGFTYLPEAFMEAGIYFYNFGWKDYGVASLTTILDMVKVMTFALQEGKVAIHCHAGLGRTGVLIACYLVFATRMTADQAIIFVRAKRPNSIQTRGQLLCVREFTQFLTPLRNIFSCCDPKAHAVTLPQYLIRQRHLLHGYEARLLKHVPKIIHLVCKLLLDLAENRPVMMKDVSEGPGLSAEIEKTMSEMVTMQLDKELLRHDSDVSNPPNPTAVAADFDNRGMIFSNEQQFDPLWKRRNVECLQPLTHLKRRLSYSDSDLKRAENLLEQGETPQTVPAQILVGHKPRQQKLISHCYIPQSPEPDLHKEALVRSTLSFWSQSKFGGLEGLKDNGSPIFHGRIIPKEAQQSGAFSADVSGSHSPGEPVSPSFANVHKDPNPAHQQVSHCQCKTHGVGSPGSVRQNSRTPRSPLDCGSSPKAQFLVEHETQDSKDLSEAASHSALQSELSAEARRILAAKALANLNESVEKEELKRKVEMWQKELNSRDGAWERICGERDPFILCSLMWSWVEQLKEPVITKEDVDMLVDRRADAAEALFLLEKGQHQTILCVLHCIVNLQTIPVDVEEAFLAHAIKAFTKVNFDSENGPTVYNTLKKIFKHTLEEKRKMTKDGPKPGL

SEQ ID NO: 37708 - protein, 806 aa, Homo sapiens
MQVQDATRRPSAVRFLSSFLQGRRHSTSDPVLRLQQARRGSGLGSGSATKLLSSSSLQVMVAVSSVSHAEGNPTFPERKRNLERPTPKYTKVGERLRHVIPGHMACSMACGGRACKYENPARWSEQEQAIKGVYSSWVTDNILAMARPSSELLEKYHIIDQFLSHGIKTIINLQRPGEHASCGNPLEQESGFTYLPEAFMEAGIYFYNFGWKDYGVASLTTILDMVKVMTFALQEGKVAIHCHAGLGRTGVLIACYLVFATRMTADQAIIFVRAKRPNSIQTRGQLLCVREFTQFLTPLRNIFSCCDPKAHAVTLPQYLIRQRHLLHGYEARLLKHVPKIIHLVCKLLLDLAENRPVMMKDVSEGPGLSAEIEKTMSEMVTMQLDKELLRHDSDVSNPPNPTAVAADFDNRGMIFSNEQQFDPLWKRRNVECLQPLTHLKRRLSYSDSDLKRAENLLEQGETPQTVPAQILVGHKPRQQKLISHCYIPQSPEPDLHKEALVRSTLSFWSQSKFGGLEGLKDNGSPIFHGRIIPKEAQQSGAFSADVSGSHSPGEPVSPSFANVHKDPNPAHQQVSHCQCKTHGVGSPGSVRQNSRTPRSPLDCGSSPKAQFLVEHETQDSKDLSEAASHSALQSELSAEARRILAAKALANLNESVEKEELKRKVEMWQKELNSRDGAWERICGERDPFILCSLMWSWVEQLKEPVITKEDVDMLVDRRADAAEALFLLEKGQHQTILCVLHCIVNLQTIPVDVEEAFLAHAIKAFTKVNFDSENGPTVYNTLKKIFKHTLEEKRKMTKDGPKPGL

SEQ ID NO: 37709 - protein, 109 aa, Homo sapiens
MEPNSPKKIQFAVPVFQSQIAPEAAEQIRKRRPTPASLVILNEHNPPEIDDKRGPNTQGELQNASPKQRKQSVYTPPTIKGVKHLKGQNESAFPEEEEGTNEREEQRDH

SEQ ID NO: 37710 - protein, 116 aa, Homo sapiens
MEPNSPKKIQFAVPVFQSQIAPEAAEQLGFCRSQIRKRRPTPASLVILNEHNPPEIDDKRGPNTQGELQNASPKQRKQSVYTPPTIKGVKHLKGQNESAFPEEEEGTNEREEQRDH

SEQ ID NO: 37711 - protein, 147 aa, Homo sapiens
MGATGLGFLLSWRQDNLNGTDCQGCNILYFSETTGSMCSELSLNRGLEARRKKDLKDSFLWRYGKVGCISLPLREMTAWINPPQISEIFQGYHQRVHGADALSLQTNSLRSRLSSQCLGQSFLLRTLERGRGFRALGDICGHVHEED

SEQ ID NO: 37712 - protein, 71 aa, Homo sapiens
MGATGLGFLLSWRQDNLNGTDCQGCNILYFSETTGSMCSELSLNRGLEARRKKDLKDSFLWRDGVSPCLPC

SEQ ID NO: 37713 - protein, 802 aa, Homo sapiens
MDSWFILVLLGSGLICVSANNATTVAPSVGITRLINSSTAEPVKEEAKTSNPTSSLTSLSVAPTFSPNITLGPTYLTTVNSSDSDNGTTRTASTNSIGITISPNGTWLPDNQFTDARTEPWEGNSSTAATTPETFPPSGNSDSKDRRDETPIIAVMVALSSLLVIVFIIIVLYMLRFKKYKQAGSHSNSFRLSNGRTEDVEPQSVPLLARSPSTNRKYPPLPVDKLEEEINRRMADDNKLFREEFNALPACPIQATCEAASKEENKEKNRYVNILPYDHSRVHLTPVEGVPDSDYINASFINGYQEKNKFIAAQGPKEETVNDFWRMIWEQNTATIVMVTNLKERKECKCAQYWPDQGCWTYGNIRVSVEDVTVLVDYTVRKFCIQQVGDMTNRKPQRLITQFHFTSWPDFGVPFTPIGMLKFLKKVKACNPQYAGAIVVHCSAGVGRTGTFVVIDAMLDMMHTERKVDVYGFVSRIRAQRCQMVQTDMQYVFIYQALLEHYLYGDTELEVTSLETHLQKIYNKIPGTSNNGLEEEFKKLTSIKIQNDKMRTGNLPANMKKNRVLQIIPYEFNRVIIPVKRGEENTDYVNASFIDGYRQKDSYIASQGPLLHTIEDFWRMIWEWKSCSIVMLTELEERGQEKCAQYWPSDGLVSYGDITVELKKEEECESYTVRDLLVTNTRENKSRQIRQFHFHGWPEVGIPSDGKGMISIIAAVQKQQQQSGNHPITVHCSAGAGRTGTFCALSTVLERVKAEGILDVFQTVKSLRLQRPHMVQTLEQYEFCYKVVQEYIDAFSDYANFK

SEQ ID NO: 37714 - protein, 793 aa, Homo sapiens
MDSWFILVLLGSGLICVSANNATTVAPSVGITRLINSSTAEPVKEEAKTSNPTSSLTSLSVAPTFSPNITLGPTYLTTVNSSDSDNGTTRTASTNSIGITISPNGTWLPDNQFTDARTEPWEGNSSTAATTPETFPPSDETPIIAVMVALSSLLVIVFIIIVLYMLRFKKYKQAGSHSNSFRLSNGRTEDVEPQSVPLLARSPSTNRKYPPLPVDKLEEEINRRMADDNKLFREEFNALPACPIQATCEAASKEENKEKNRYVNILPYDHSRVHLTPVEGVPDSDYINASFINGYQEKNKFIAAQGPKEETVNDFWRMIWEQNTATIVMVTNLKERKECKCAQYWPDQGCWTYGNIRVSVEDVTVLVDYTVRKFCIQQVGDMTNRKPQRLITQFHFTSWPDFGVPFTPIGMLKFLKKVKACNPQYAGAIVVHCSAGVGRTGTFVVIDAMLDMMHTERKVDVYGFVSRIRAQRCQMVQTDMQYVFIYQALLEHYLYGDTELEVTSLETHLQKIYNKIPGTSNNGLEEEFKKLTSIKIQNDKMRTGNLPANMKKNRVLQIIPYEFNRVIIPVKRGEENTDYVNASFIDGYRQKDSYIASQGPLLHTIEDFWRMIWEWKSCSIVMLTELEERGQEKCAQYWPSDGLVSYGDITVELKKEEECESYTVRDLLVTNTRENKSRQIRQFHFHGWPEVGIPSDGKGMISIIAAVQKQQQQSGNHPITVHCSAGAGRTGTFCALSTVLERVKAEGILDVFQTVKSLRLQRPHMVQTLEQYEFCYKVVQEYIDAFSDYANFK

SEQ ID NO: 37715 - protein, 350 aa, Homo sapiens
MFIKGRAPRAPPRERRRATRGGLRQVVAPPRALGSTSRPHFRRASVCRRRCRKSGGLLAASRKMAAAAVNGAAGFSSSGPAATSGAVLQAATGMYEQLKGEWNRKSPNLSKCGEELGRLKLVLLELNFLPTTGTKLTKQQLILARDILEIGAQWSILRKDIPSFERYMAQLKCYYFDYKEQLPESAYMHQLLGLNLLFLLSQNRVAEFHTELERLPAKDIQTNVYIKHPVSLEQYLMEGSYNKVFLAKGNIPAESYTFFIDILLDTIRDEIAGCIEKAYEKILFTEATRILFFNTPKKMTDYAKKRGWVLGPNNYYSFASQQQKPEDTTIPSTELAKQVIEYARQLEMIV

SEQ ID NO: 37716 - protein, 698 aa, Homo sapiens
MAAAGAAVARSPGIGAGPALRARRSPPPRAARLPRLLVLLAAAAVGPGAGGAARLYRAGEDAVWVLDSGSVRGATANSSAAWLVQFYSSWCGHCIGYAPTWRALAGDVRDWASAIRVAALDCMEEKNQAVCHDYDIHFYPTFRYFKAFTKEFTTGENFKGPDRELRTVRQTMIDFLQNHTEGSRPPACPRLDPIQPSDVLSLLDNRGSHYVAIVFESNSSYLGREVILDLIPYESIVVTRALDGDKAFLEKLGVSSVPSCYLIYPNGSHGLINVVKPLRAFFSSYLKSLPDVRKKSLPLPEKPHKEENSEIVVWREFDKSKLYTVDLESGLHYLLRVELAAHKSLAGAELKTLKDFVTVLAKLFPGRPPVKKLLEMLQEWLASLPLDRIPYNAVLDLVNNKMRISGIFLTNHIKWVGCQGSRSELRGYPCSLWKLFHTLTVEASTHPDALVGTGFEDDPQAVLQTMRRYVHTFFGCKECGEHFEEMAKESMDSVKTPDQAILWLWKKHNMVNGRLAGHLSEDPRFPKLQWPTPDLCPACHEEIKGLASWDEGHVLTFLKQHYGRDNLLDTYSADQGDSSEGGTLARGEEEEKRLTPPEVSHGDRDTQSVRPPGALGPRPALPESLHHSLDGKLQSLDGPGAHKEVGGAAPFLGVDFSSLDMSLCVVLYVASSLFLMVMYFFFRVRSRRWKVKHHHPAV

SEQ ID NO: 37717 - protein, 341 aa, Homo sapiens
MDGLLNPRESSKFIAENSRDVFIDSGGVRRVAELLLAKAAGPELRVEGWKALHELNPRAADEAAVNWVFVTDTLNFSFWSEQDEHKCVVRYRGKTYSGYWSLCAAVNRALDEGIPITSASYYATVTLDQVRNILRSDTDVSMPLVEERHRILNETGKILLEKFGGSFLNCVRESENSAQKLMHLVVESFPSYRDVTLFEGKRVSFYKRAQILVADTWSVLEGKGDGCFKDISSITMFADYRLPQVLAHLGALKYSDDLLKKLLKGEMLSYGDRQEVEIRGCSLWCVELIRDCLLELIEQKGEKPNGEINSILLDYYLWDYAHDHREDMKGIPFHRIRCIYY

SEQ ID NO: 37718 - protein, 480 aa, Homo sapiens
MAGAGPAPGLPGAGGPVVPGPGAGIPGKSGEERLKEMEAEMALFEQEVLGAPVPGIPTAVPAVPTVPTVPTVEAMQVPAAPVIRPIIATNTYQQVQQTLEARAAAAATVVPPMVGGPPFVGPVGFGPGDRSHLDSPEAREAMFLRRAAVAPQRAPILRPAFVPHVLQRADSALSSAAAGPRPMALRPPHQALVGPPLPGPPGPPMMLPPMARAPGPPLGSMAALRPPLEEPAAPRELGLGLGLGLKEKEEAVVAAAAGLEEASAAVAVGAGGAPAGPAVIGPSLPLALAMPLPEPEPLPLPLEVVRGLLPPLRIPELLSLRPRPRPPRPEPPPGLMALEVPEPLGEDKKKGKPEKLKRCIRTAAGSSWEDPSLLEWDADDFRIFCGDLGNEVNDDILARAFSRFPSFLKAKVIRDKRTGKTKGYGFVSFKDPSDYVRAMREMNGKYVGSRPIKLRKSMWKDRNLDVVRKKQKEKKKLGLR

SEQ ID NO: 37719 - protein, 450 aa, Homo sapiens
MAGAGPAPGLPGAGGPVVPGPGAGIPGKSGEERLKEMEAEMALFEQEVLGAPVPGIPTAVPAVPTVPTVPTVEAMQVPAAPVIRPIIATNTYQQVQQTLEARAAAAATVVPPMVGGPPFVGPVGFGPGDRSHLDSPEAREAMFLRRAAGPRPMALRPPHQALVGPPLPGPPGPPMMLPPMARAPGPPLGSMAALRPPLEEPAAPRELGLGLGLGLKEKEEAVVAAAAGLEEASAAVAVGAGGAPAGPAVIGPSLPLALAMPLPEPEPLPLPLEVVRGLLPPLRIPELLSLRPRPRPPRPEPPPGLMALEVPEPLGEDKKKGKPEKLKRCIRTAAGSSWEDPSLLEWDADDFRIFCGDLGNEVNDDILARAFSRFPSFLKAKVIRDKRTGKTKGYGFVSFKDPSDYVRAMREMNGKYVGSRPIKLRKSMWKDRNLDVVRKKQKEKKKLGLR

SEQ ID NO: 37720 - protein, 451 aa, Homo sapiens
MAGAGPAPGLPGAGGPVVPGPGAGIPGKSGEERLKEMEAEMALFEQEVLGAPVPGIPTAVPAVPTVPTVPTVEAMQVPAAPVIRPIIATNTYQQVQQTLEARAAAAATVVPPMVGGPPFVGPVGFGPGDRSHLDSPEAREAMFLRRAAAGPRPMALRPPHQALVGPPLPGPPGPPMMLPPMARAPGPPLGSMAALRPPLEEPAAPRELGLGLGLGLKEKEEAVVAAAAGLEEASAAVAVGAGGAPAGPAVIGPSLPLALAMPLPEPEPLPLPLEVVRGLLPPLRIPELLSLRPRPRPPRPEPPPGLMALEVPEPLGEDKKKGKPEKLKRCIRTAAGSSWEDPSLLEWDADDFRIFCGDLGNEVNDDILARAFSRFPSFLKAKVIRDKRTGKTKGYGFVSFKDPSDYVRAMREMNGKYVGSRPIKLRKSMWKDRNLDVVRKKQKEKKKLGLR

SEQ ID NO: 37721 - protein, 446 aa, Homo sapiens
MAGAGPAPGLPGAGGPVVPGPGAGIPGKSGEERLKEMEAEMALFEQEVLGAPVPGIPTAVPAVPTVPTVPTVEAMQVPAAPVIRPIIATNTYQQVQQTLEARAAAAATVVPPMVGGPPFVGPVGFGPGDRSHLDSPEAREAMFLRRRPMALRPPHQALVGPPLPGPPGPPMMLPPMARAPGPPLGSMAALRPPLEEPAAPRELGLGLGLGLKEKEEAVVAAAAGLEEASAAVAVGAGGAPAGPAVIGPSLPLALAMPLPEPEPLPLPLEVVRGLLPPLRIPELLSLRPRPRPPRPEPPPGLMALEVPEPLGEDKKKGKPEKLKRCIRTAAGSSWEDPSLLEWDADDFRIFCGDLGNEVNDDILARAFSRFPSFLKAKVIRDKRTGKTKGYGFVSFKDPSDYVRAMREMNGKYVGSRPIKLRKSMWKDRNLDVVRKKQKEKKKLGLR

SEQ ID NO: 37722 - protein, 189 aa, Homo sapiens [sequence omitted]

SEQ ID NO: 37723 - protein, 188 aa, Homo sapiens [sequence omitted]

SEQ ID NO: 37724 - protein, 406 aa, Homo sapiens
MGKVWKQQMYPQYATYYYPQYLQAKQSLVPAHPMAPPSPSTTSSNNNSSSSSNSGWDQLSKTNLYIRGLPPHTTDQDLVKLCQPYGKIVSTKAILDKTTNKCKGYGFVDFDSPAAAQKAVSALKASGVQAQMAKQQEQDPTNLYISNLPLSMDEQELENMLKPFGQVISTRILRDSSGTSRGVGFARMESTEKCEAVIGHFNGKFIKTPPGVSAPTEPLLCKFADGGQKKRQNPNKYIPNGRPWHREGEVRLAGMTLTYDPTTAAIQNGFYPSPYSIATNRMITQTSITPYIASPVSAYQVQSPSWMQPQPYILQHPGAVLTPSMEHTMSLQPASMISPLAQQMSHLSLGSTGTYMPATSAMQGAYLPQYAHMQTTAVPVEEASGQQQVAVETSNDHSPYTFQPNK

SEQ ID NO: 37725 - protein, 403 aa, Homo sapiens
MGKVWKQQMYPQYATYYYPQYLQAKQSLVPAHPMAPPSPSTTSSNNNSSSSSNSGWDQLSKTNLYIRGLPPHTTDQDLVKLCQPYGKIVSTKAILDKTTNKCKGYGFVDFDSPAAAQKAVSALKASGVQAQMAKQQEQDPTNLYISNLPLSMDEQELENMLKPFGQVISTRILRDSSGTSRGVGFARMESTEKCEAVIGHFNGKFIKTPPGVSAPTEPLLCKFADGGQKKRQNPNKYIPNGRPWHREGEAGMTLTYDPTTAAIQNGFYPSPYSIATNRMITQTSITPYIASPVSAYQVQSPSWMQPQPYILQHPGAVLTPSMEHTMSLQPASMISPLAQQMSHLSLGSTGTYMPATSAMQGAYLPQYAHMQTTAVPVEEASGQQQVAVETSNDHSPYTFQPNK

SEQ ID NO: 37726 - protein, 38 aa, Homo sapiens
MGKVWKQQMYPQYATYYYPQYLQAKFGRHSGIPSEKEE

SEQ ID NO: 37727 - protein, 367 aa, Homo sapiens
MASSGGELGSLFDHHVQRAVCDTRAKYREGRRPRAVKVYTINLESQYLLIQGVPAVGVMKELVERFALYGAIEQYNALDEYPAEDFTEVYLIKFMNLQSARTAKRKMDEQSFFGGLLHVCYAPEFETVEETRKKLQMRKAYVVKTTENKDHYVTKKKLVTEHKDTEDFRQDFHSEMSGFCKAALNTSAGNSNPYLPYSCELPLCYFSSKCMCSSGGPVDRAPDSSKDGRNHHKTMGHYNHNDSLRKTQINSLKNSVACPGAQKAITSSEAVDRFMPRTTQLQERKRRREDDRKLGTFLQTNPTGNEIMIGPLLPDISKVDMHDDSLNTTANLIRHKLKEVISSVPKPPEDKPEDVHTSHPLKQRRRI

SEQ ID NO: 37728 - protein, 376 aa, Homo sapiens
MASSGGELGSLFDHHVQRAVCDTRAKYREGRRPRAVKVYTINLESQYLLIQGVPAVGVMKELVERFALYGAIEQYNALDEYPAEDFTEVYLIKFMNLQSARTAKRKMDEQSFFGGLLHVCYAPEFETVEETRKKLQMRKAYVVKTTENKDHYVTKKKLVTEHKDTEDFRQDFHSEMSGFCKAALNTSAGNSNPYLPYSCELPLCYFSSKCMCSSGGPVDRAPDSSKDGRNHHKTMGHYNHNDSLRKTQINSLKNSVACPGAQKAITSSEAVDRFMPRTTQLQERKRRREDDRKLGTFLQTNPTGNEIMIGPLLPDISKVDMHDDSLNTTANLIRHKLKEVRLFLKNYSKTRFGYRIKWRIICGNNSTVIFFHFLVF

SEQ ID NO: 37729 - protein, 606 aa, Homo sapiens
MAADVSVTHRPPLSPKSGAEVEAGDAAERRAPEEELPPLDPEEIRKRLEHTERQFRNRRKILIRGLPGDVTNQEVHDLLSDYELKYCFVDKYKGTAFVTLLNGEQAEAAINAFHQSRLRERELSVQLQPTDALLCVANLPPSLTQQQFEELVRPFGSLERCFLVYSERTGQSKGYGFAEYMKKDSAARAKSDLLGKPLGPRTLYVHWTDAGQLTPALLHSRCLCVDRLPPGFNDVDALCRALSAVHSPTFCQLACGQDGQLKGFAVLEYETAEMAEEAQQQADGLSLGGSHLRVSFCAPGPPGRSMLAALIAAQATALNRGKGLLPEPNILQLLNNLGPSASLQLLLNPLLHGSAGGKQGLLGAPPAMPLLNGPALSTALLQLALQTQGQKKPGILGDSPLGALQPGAQPANPLLGELPAGGGLPPELPPRRGKPPPLLPSVLGPAGGDREALGLGPPAAQLTPPPAPVGLRGSGLRGPLSHFYSGSPTSYFTSGLQAGLKQSHLSKAIGSSPLGSGEGLLGLSPGPNGHSHLLKVRAGGGDMQGWEAPAPQRPLTRPALPSVSRPHWAARNAALPTCCPRPSPAQKAAMWASTPRASAATTRTPT

SEQ ID NO: 37730 - protein, 739 aa, Homo sapiens
MAADVSVTHRPPLSPKSGAEVEAGDAAERRAPEEELPPLDPEEIRKRLEHTERQFRNRRKILIRGLPGDVTNQEVHDLLSDYELKYCFVDKYKGTAFVTLLNGEQAEAAINAFHQSRLRERELSVQLQPTDALLCVANLPPSLTQQQFEELVRPFGSLERCFLVYSERTGQSKGYGFAEYMKKDSAARAKSDLLGKPLGPRTLYVHWTDAGQLTPALLHSRCLCVDRLPPGFNDVDALCRALSAVHSPTFCQLACGQDGQLKGFAVLEYETAEMAEEAQQQADGLSLGGSHLRVSFCAPGPPGRSMLAALIAAQATALNRGKGLLPEPNILQLLNNLGPSASLQLLLNPLLHGSAGGKQGLLGAPPAMPLLNGPALSTALLQLALQTQGQKKPGILGDSPLGALQPGAQPANPLLGELPAGGGLPPELPPRRGKPPPLLPSVLGPAGGDREALGLGPPAAQLTPPPAPVGLRGSGLRGLQKDSGPLPTPPGVSLLGEPPKDYRIPLNPYLNLHSLLPASNLAGKEARGWGGAGRSRRPAEGPLTNPPAPGGGSSSSKAFQLKSRLLSPLSSARLPPEPGLSDSYSFDYPSDMGPRRLFSHPREPALGPHGPSRHKMSPPPSGFGERSSGGSGGGPLSHFYSGSPTSYFTSGLQAGLKQSHLSKAIGSSPLGSGEGLLGLSPGPNGHSHLLKTPLGGQKRSFAHLLPSPEPSPEGSYVGQHSQGLGGHYADSYLKRKRIF

SEQ ID NO: 37731 - protein, 75 aa, Homo sapiens
MAADVSVTHRPPLSPKSGAEVEAGDAAERRAPEEELPPLDPEEIRKRLEHTERQFRNRRKILIRGLPGDVTNQPS

SEQ ID NO: 37732 - protein, 1021 aa, Homo sapiens
METGQRTSRKVRKLGSNRRRQTREPADGEGAAVAPEPESWSSQAAAELQAFFQDCGAKERGFVTREDLAVAKFSFLGSKEESEMIFDWVDVERKGHLSLEEFSSGLKNIFGSSQSPHRLRRRKPLPSKRVSATTSFPALEEADAEEKEAFLAFMEQLGTGHLLPKQMEIWQLWGQLRQEEPQLAGNLAGFLAKMTSRLQEAQADKEALELTLRKRDSDHHREVQQLYEEMEQQIRQEKQQLQAESDSRGLALTSQMQDVLEAKEREVQRLAEGQRELEAQLSHLRSTHQEAASENQQLQEAKRDLAGRLEEVRGQLQVTRGRLDAARGRVSWQVEEKLSFPGAGEKTPDPQAASPEEAPLPGLFGDNDDWDQLLSNFGSPPHGALQLCWSPPPTPRATSGPQTPRVVRQISISEPQAFLFGQEPSSDPDGAPRTPPGVTFSAKDNKGVDPHEQDIRAEQPVEPHDPDPNQEPGSTPEGRLLWGLSGSLVAPAFKVLIPLEDGPPPPANSPPPQAPAGSSKQIQASDPDDKGPGSWAPPSGAQPGAGAGPQEPTQTPPTMTERETQPGPSPTTALTGVGPAKPPRQRDALQQDLHATGSEPRLGTQRARALTLGPAEPFQGLEFVGPVPTERLEQGQAGPAVQEGLPEGLREAHGQVLGLGELSAFPHQELEEEPRSEEGKQEGRGGQDLSSEQSEQSVEAHGLETAHSELPQQDSLLVSLPSATPQAQVEAEGPTPGKSAPPRGSPPRGAQPGAGAGPQEPTQTPPTMAEQEAQPRPSLTTAHAEEQGPPHSREPRAESRLEDPGMDSREAGLTPSPGDPMAGGGPQANPDYLFHVIFLGDSNVGKTSFLHLLHQNSFATGLTATVGVDFRVKTLLVDNKCFVLQLWDTAGQERYHSMTRQLLRKADGVVLMYDITSQESFAHVRYWLDCLQDAGSDGVVILLLGNKMDCEEERQVSVEAGQQLAQELGVYFGECSAALGHNILEPVVNLARSLRMQEEGLKDSLVKVAPKRPPKRFGCCS

SEQ ID NO: 37733 - protein, 1099 aa, Homo sapiens
MRMSDTVTVKDETATMKDLEAEVKDTTRVENLIKSENYGKILVEKNEHCIENNIDLQRPLQSFGQTGKRSKSSSKLKLVRSLAVCEESPPPPAPEISQENQEKIQIQLTQSFEKEEKPSKDEAEKEKASDKLPRKMLSRDSSQEYTDSTGIDLHEFLVNTLKNNPRDRMMLLKLEQEILDFIGNNESPRKKFPPMTSYHRMLLHRVAAYFGLDHNVDQSGKSVIVNKTSNTRIPDQKFNEHIKDDKGEDFQKRYILKRDNSSFDKDDNQMRIRLKDDRRSKSIEEREEEYQRARDRIFSQDSLCSQENYIIDKRLQDEDASSTQQRRQIFRVNKDASGRSTNSHQSSTENELKYSEPRPWSSTDSDSSLRNLKPAVTKASSFSGISVLTRGDSSGSSKSIGRLSKTGSESSGSVGSSTGSLSHIQQPLPGTALSQSSHGAPVVYPTVSTHSSLSFDGGLNGQVASPSTSFFLLPLEAAGIPPGSILINPQTGQPFINPDGSPVVYNPPMTQQPVRSQVPGPPQPPLPAPPQQPAANHIFSQDNLGSQFSHMSLARQPSADGSDPHAAMFQSTVVLQSPQQSGYIMTAAPPPHPPPPPPPPPPPPPLPPGQPVPTAGYPASGHPVSQPVLQQQGYIQQPSPQMPACYCAPGHYHSSQPQYRPVPSVHYNSHLNQPLPQPAQQTGYQVIPNQQQNYQGIVGVQQPQSQSLVSGQPNSIGNQIQGVVIPYTSVPTYQVSLPQGSQGIPHQTYQQPVMFPNQSNQGSMPTTGMPVYYSVIPPGQQNNLSSSVGYLQHPGSEQVQFPRTTSPCSSQQLQGHQCTAGPPPPPGGGMVMMQLSVPNNPQSCAHSPPQWKQNKYYCDHQRGQKCVEFSSVDNIVQHSPQLSSPIISPAQSPAPAQLSTLKTVRPSGPPLSIMPQFSRPFVPGQGDSRYPLLGQPLQYNPPAVLHGHIPNQQGQPGSRHGNRGRRQAKKAASTDLGAGETVVGKVLEITELPDGITRMEAEKLFGELFKIGAKIRWLRDPQSQPRRHPLCCGSGDNTANPERSKPSDLASTYTVLATFPSISAAQNALKKQINSVNKFKLRTSKKHYDFHILERASSQ

SEQ ID NO: 37734 - protein, 971 aa, Homo sapiens
MRMSDTVTVKDETATMKDLEAEVKDTTRVENLIKSENYGKILVEKNEHCIENNIDLQEKIQIQLTQSFEKEEKPSKDEAEKEKASDKLPRKMLSRDSSQEYTDSTGIDLHEFLVNTLKNNPRDRMMLLKLEQEILDFIGNNESPRKKFPPMTSYHRMLLHRVAAYFGLDHNVDQSGKSVIVNKTSNTRIPDQKFNEHIKDDKGEDFQKRYILKRDNSSFDKDDNQMRIRLKDDRRSKSIEEREEEYQRARDRIFSQDSLCSQENYIIDKRLQDEDASSTQQRRQIFRVNKDASGRSTNSHQSSTENELKYSEPRPWSSTDSDSSLRNLKPAVTKASSFSGISVLTRGDSSGSSKSIGRLSKTGQPFINPDGSPVVYNPPMTQQPVRSQVPGPPQPPLPAPPQQPAANHIFSQQDNLGSQFSHMSLARQPSADGSDPHAAMFQSTVVLQSPQQSGYIMTAAPPPHPPPPPPPPPPPPPLPPGQPVPTAGYPASGHPVSQPVLQQQGYIQQPSPQMPACYCAPGHYHSSQPQYRPVPSVHYNSHLNQPLPQPAQQTGYQVIPNQQQNYQGIVGVQQPQSQSLVSGQPNSIGNQIQGVVIPYTSVPTYQVSLPQGSQGIPHQTYQQPVMFPNQSNQGSMPTTGMPVYYSVIPPGQQNNLSSSVGYLQHPGSEQVQFPRTTSPCSSQQLQGHQCTAGPPPPPGGGMVMMQLSVPNNPQSCAHSPPQWKQNKYYCDHQRGQKCVEFSSVDNIVQHSPQLSSPIISPAQSPAPAQLSTLKTVRPSGPPLSIMPQFSRPFVPGQGDSRYPLLGQPLQYNPPAVLHGHIPNQQGQPGSRHGNRGRRQAKKAASTDLGAGETVVGKVLEITELPDGITRMEAEKLFGELFKIGAKIRWLRDPQSQPRRHPLCCGSGDNTANPERSKPSDLASTYTVLATFPSISAAQNALKKQINSVNKFKLRTSKKHYDFHILERASSQ

SEQ ID NO: 37735 - protein, 1100 aa, Homo sapiens
MRMSDTVTVKDETATMKDLEAEVKDTTRVENLIKSENYGKILVEKNEHCIENNIDLQRPLQSFGQTGKRSKSSSKLKLVRSLAVCEESPPPPAPEISQENQEKIQIQLTQSFEKEEKPSKDEAEKEKASDKLPRKMLSRDSSQEYTDSTGIDLHEFLVNTLKNNPRDRMMLLKLEQEILDFIGNNESPRKKFPPMTSYHRMLLHRVAAYFGLDHNVDQSGKSVIVNKTSNTRIPDQKFNEHIKDDKGEDFQKRYILKRDNSSFDKDDNQMRIRLKDDRRSKSIEEREEEYQRARDRIFSQDSLCSQENYIIDKRLQDEDASSTQQRRQIFRVNKDASGRSTNSHQSSTENELKYSEPRPWSSTDSDSSLRNLKPAVTKASSFSGISVLTRGDSSGSSKSIGRLSKTGSESSGSVGSSTGSLSHIQQPLPGTALSQSSHGAPVVYPTVSTHSSLSFDGGLNGQVASPSTSFFLLPLEAAGIPPGSILINPQTGQPFINPDGSPVVYNPPMTQQPVRSQVPGPPQPPLPAPPQQPAANHIFSQQDNLGSQFSHMSLARQPSADGSDPHAAMFQSTVVLQSPQQSGYIMTAAPPPHPPPPPPPPPPPPPLPPGQPVPTAGYPASGHPVSQPVLQQQGYIQQPSPQMPACYCAPGHYHSSQPQYRPVPSVHYNSHLNQPLPQPAQQTGYQVIPNQQQNYQGIVGVQQPQSQSLVSGQPNSIGNQIQGVVIPYTSVPTYQVSLPQGSQGIPHQTYQQPVMFPNQSNQGSMPTTGMPVYYSVIPPGQQNNLSSSVGYLQHPGSEQVQFPRTTSPCSSQQLQGHQCTAGPPPPPGGGMVMMQLSVPNNPQSCAHSPPQWKQNKYYCDHQRGQKCVEFSSVDNIVQHSPQLSSPIISPAQSPAPAQLSTLKTVRPSGPPLSIMPQFSRPFVPGQGDSRYPLLGQPLQYNPPAVLHGHIPNQQGQPGSRHGNRGRRQAKKAASTDLGAGETVVGKVLEITELPDGITRMEAEKLFGELFKIGAKIRWLRDPQSQPRRHPLCCGSGDNTANPERSKPSDLASTYTVLATFPSISAAQNALKKQINSVNKFKLRTSKKHYDFHILERASSQ

SEQ ID NO: 37736 - protein, 1044 aa, Homo sapiens
MGLLLPDYRWFTTVDILADNCEKEPWIILFYFCGTPQSQIQRTHQEKIQIQLTQSFEKEEKPSKDEAEKEKASDKLPRKMLSRDSSQEYTDSTGIDLHEFLVNTLKNNPRDRMMLLKLEQEILDFIGNNESPRKKFPPMTSYHRMLLHRVAAYFGLDHNVDQSGKSVIVNKTSNTRIPDQKFNEHIKDDKGEDFQKRYILKRDNSSFDKDDNQMRIRLKDDRRSKSIEEREEEYQRARDRIFSQDSLCSQENYIIDKRLQDEDASSTQQRRQIFRVNKDASGRSTNSHQSSTENELKYSEPRPWSSTDSDSSLRNLKPAVTKASSFSGISVLTRGDSSGSSKSIGRLSKTGSESSGSVGSSTGSLSHIQQPLPGTALSQSSHGAPVVYPTVSTHSSLSFDGGLNGQVASPSTSFFLLPLEAAGIPPGSILINPQTGQPFINPDGSPVVYNPPMTQQPVRSQVPGPPQPPLPAPPQQPAANHIFSQQDNLGSQFSHMSLARQPSADGSDPHAAMFQSTVVLQSPQQSGYIMTAAPPPHPPPPPPPPPPPPPLPPGQPVPTAGYPASGHPVSQPVLQQQGYIQQPSPQMPACYCAPGHYHSSQPQYRPVPSVHYNSHLNQPLPQPAQQTGYQVIPNQQQNYQGIVGVQQPQSQSLVSGQPNSIGNQIQGVVIPYTSVPTYQVSLPQGSQGIPHQTYQQPVMFPNQSNQGSMPTTGMPVYYSVIPPGQQNNLSSSVGYLQHPGSEQVQFPRTTSPCSSQQLQGHQCTAGPPPPPGGGMVMMQLSVPNNPQSCAHSPPQWKQNKYYCDHQRGQKCVEFSSVDNIVQHSPQLSSPIISPAQSPAPAQLSTLKTVRPSGPPLSIMPQFSRPFVPGQGDSRYPLLGQPLQYNPPAVLHGHIPNQQGQPGSRHGNRGRRQAKKAASTDLGAGETVVGKVLEITELPDGITRMEAEKLFGELFKIGAKIRWLRDPQSQPRRHPLCCGSGDNTANPERSKPSDLASTYTVLATFPSISAAQNALKKQINSVNKFKLRTSKKHYDFHILERASSQ

SEQ ID NO: 37737 - protein, 51 aa, Homo sapiens
MSSHKTFKIKQFLAKKQKQNRPIPQWIRMKTGNKIRYNSKRRHWKRTKLGL

SEQ ID NO: 37738 - protein, 102 aa, Homo sapiens
MAQDFSQHPQTGIIRRHRFYSPKPLSTTPRGQSFLLSRQAKVATWDPMLSPDFQPKSAFKLTWTAQPPCLSVTPSQGQTFHPNSPEGELPPDLTENTCPSQA

SEQ ID NO: 37739 - protein, 531 aa, Homo sapiens
MVDVGKWPIFTLLSPQEIASIRKACVFGTSASEALYVTDNDEVFVFGLNYSNCLGTGDNQSTLVPKKLEGLCGKKIKSLSYGSGPHVLLSTEDGVVYAWGHNGYSQLGNGTTNQGIAPVQVCTNLLIKQVVEVACGSHHSMALAADGEVFAWGYNNCGQVGSGSTANQPTPRKVTNCLHIKRVVGIACGQTSSMAVLDNGEVYGWGYNGNGQLGLGNNGNQLTPVRVAALHSVCVNQIVCGYAHTLALTDEGLLYAWGANTYGQLGTGNKNNLLSPAHIMVEKERVVEIAACHSAHTSAAKTQGGHVYMWGQCRGQSVILPHLTHFSCTDDVFACFATPAVSWRLLSVEHEDFLTVAESLKKEFDSPETADLKFRIDGKYIHVHKAVLKIRCEHFRSMFQSYWNEDMKEVIEIDQFSYPVYRAFLQYLYTDTVDLPPEDAIGLLDLATSYCENRLKKLCQHIIKRGITVENAFSLFSAAVRYDAEDLEEFCFKFCINHLTEVTQTAAFWQMDGPLLKEFIAKASKCGAFKN

SEQ ID NO: 37740 - protein, 355 aa, Homo sapiens
MVDVGKWPIFTLLSPQEIASIRKACVFGTSASEALYVTDNDEVFVFGLNYSNCLGTGDNQSTLVPKKLEGLCGKKIKSLSYGSGPHVLLSTEDGVVYAWGHNGYSQLGNGTTNQGIAPVQVCTNLLIKQVVEVACGSHHSMALAADGEVFAWGYNNCGQVGSGSTANQPTPRKVTNCLHIKRVVGIACGQTSSMAVLDNGEVYGWGYNGNGQLGLGNNGNQLTPVRVAALHSVCVNQIVCGYAHTLALTDEGLLYAWGANTYGQLGTGNKNNLLSPAHIMVEKERVVEIAACHSAHTSAAKTQGGHVYMWGQCRGQSVILPHLTHFSCTDDVFACFATPAVSWRLLSVVSIVIGK

SEQ ID NO: 37741 - protein, 1133 aa, Homo sapiens
MPVQAPQWTDFLSCPICTQTFDETIRKPISLGCGHTVCKMCLNKLHRKACPFDQTTINTDIELLPVNSALLQLVGAQVPEQQPITLCSGVEDTKHYEEAKKCVEELALYLKPLSSARGVGLNSTTQSVLSRPMQRKLVTLVHCQLVEEEGRIRAMRAARSLGERTVTELILQHQNPQQLSSNLWAAVRARGCQFLGPAMQEEALKLVLLALEDGSALSRKVLVLFVVQRLEPRFPQASKTSIGHVVQLLYRASCFKVTKRDEDSSLMQLKEEFRTYEALRREHDSQIVQIAMEAGLRIAPDQWSSLLYGDQSHKSHMQSIIDKLQTPASFAQSVQELTIALQRTGDPANLNRLRPHLELLANIDPSPDAPPPTWEQLENGLVAVRTVVHGLVDYIQNHSKKGADQQQPPQHSKYKTYMCRDMKQRGGCPRGASCTFAHSQEELEKFRKMNKRLVPRRPLSASLGQLNEVGLPSAAILPDEGAVDLPSRKPPALPNGIVSTGNTVTQLIPRGTDPSYDSSLKPGKIDHLSSSAPGSPPDLLESVPKSISALPVNPHSIPPRGPADLPPMPVTKPLQMVPRGSQLYPAQQTDVYYQDPRGAAPPFEPAPYQQGMYYTPPPQCVSRFVRPPPSAPEPAPPYLDHYPPYLQERVVNSQYGTQPQQYPPIYPSHYDGRRVYPAPSYTREEIFRESPIPIEIPPAAVPSYVPESRERYQQIESYYPVAPHPTQIRPSYLREPPYSRLPPPPQPHPSLDELHRRRKEIMAQLEERKVISPPPFAPSPTLPPTFHPEEFLDEDLKVAGKYKGNDYSQYSPWSCDTIGSYIGTKDAKPKDVVAAGSVEMMNVESKGMRDQRLDLQRRAAETSDDDLIPFGDRPTVSRFGAISRTSKTIYQGAGPMQAMAPQGAPTKSINISDYSPYGTHGGWGASPYSPHQNIPSQGHFSERERISMSEVASHGKPLPSAEREQLRLELQQLNHQISQQTQLRGLEAVSNRLVLQREANTLAGQSQPPPPPPPKWPGMISSEQLSLELHQVEREIGKRTRELSMENQCSLDMKSKLNTSKQAENGQPEPQNKVPAEDLTLTFSDVPNGSALTQENISLLSNKTSSLNLSEDPEGGGDNNDSQRSGVTPSSAP

SEQ ID NO: 37742 - protein, 1125 aa, Homo sapiens
MPVQAPQWTDFLSCPICTQTFDETIRKPISLGCGHTVCKMCLNKLHRKACPFDQTTINTDIELLPVNSALLQLVGAQVPEQQPITLCSGVEDTKHYEEAKKCVEELALYLKPLSSARGVGLNSTTQSVLSRPMQRKLVTLVHCQLVEEEGRIRAMRAARSLGERTVTELILQHQNPQQLSSNLWAAVRARGCQFLGPAMQEEALKLVLLALEDGSALSRKVLVLFVVQRLEPRFPQASKTSIGHVVQLLYRASCFKVTKRDEDSSLMQLKEEFRTYEALRREHDSQIVQIAMEAGLRIAPDQWSSLLYGDQSHKSHMQSIIDKLQTPASFAQSVQELTIALQRTGDPANLNRLRPHLELLANIDPSPDAPPPTWEQLENGLVAVRTVVHGLVDYIQNHSKKGADQQQPPQHSKYKTYMCRDMKQRGGCPRGASCTFAHSQEELEKFRKMNKRLVPRRPLSASLGQLNEVGLPSAAILPDEGAVDLPSRKPPALPNGIVSTGNTVTQLIPRGTDPSYDSSLKPGKIDHLSSSAPGSPPDLLESVPKSISALPVNPHSIPPRGPADLPPMPVTKPLQMVPRGSQLYPAQQTDVYYQDPRGAAPPFEPAPYQQGMYYTPPPQCVSRFVRPPPSAPEPAPPYLDHYPPYLQERVVNSQYGTQPQQYPPIYPSHYDGRRVYPAPSYTREEIFRESPIPIEIPPAAVPSYVPESRERYQQIESYYPVAPHPTQIRPSYLREPPYSRLPPPPQPHPSLDELHRRRKEIMAQLEERKVISPPPFAPSPTLPPTFHPEEFLDEDLKVAGKYKGNDYSQYSPWSCDTIGSYIGTKDAKPKDVVAAGSVEMMNVESKGMRDQRLDLQRRAAETSDDDLIPFGDRPTVSRFGAISRTSKTIYQGAGPMQAMAPQGAPTKSINISDYSPYGTHGGWGASPYSPHQNIPSQGHFSERERISMSEVASHGKPLPSAEREQLRLELQQLNHQISQQTQLRGLEREANTLAGQSQPPPPPPPKWPGMISSEQLSLELHQVEREIGKRTRELSMENQCSLDMKSKLNTSKQAENGQPEPQNKVPAEDLTLTFSSDVPNGSALTQENISLLSNKTSSLNLSEDPEGGGDNNDSQRSGVTPSSAP

SEQ ID NO: 37743 - protein, 382 aa, Homo sapiens
MWSGPPQPDQGLPPPLAAVPVPWKSTDPCQGHRESPGALVETSAGEEAQGQEGPAAAQLDVLRLRSSSMEIREKGSEFLKEELHRAQKELKLKDEECERLSKVREQLEQELEELTASLFEEAHKMVREANMKQAASEKQLKEARGKIDMLQAEVTALKTLVITSTPASPNRELHPQLLSPTKAGPRKGHSRHKSTSSTLCPAVCPAAGHTLTPDREGKEVDTILFAEFQAWRESPTLDKTCPFLERVYREDVGPCLDFTMQELSVLVRAAVEDNTLTIEPVASQTLPTVKVAEVDCSSTNTCALSGLTRTCRHRIRLGDSKSHYYISPSSRARITAVCNFFTYIRYIQQGLVRQDAEPMFWEIMRLRKEMSLAKLGFFPQEA

SEQ ID NO: 37744 - protein, 356 aa, Homo sapiens
MDSSEEHAGCPARGTCPVFLAMSAGTVRYAPSGLCPVLEGNLREEPWGTDSPPQPDQGLPPPLAAVPVPWKSTDPCQGHRESPGALVETSAGEEAQGQEGPAAAQLDVLRLRSSSMEIREKGSEFLKEELHRAQKELKLKDEECERLSKVREQLEQELEELTASLFEEAHKMVREANMKQAASEKQLKEARGKVDTILFAEFQAWRESPTLDKTCPFLERVYREDVGPCLDFTMQELSVLVRAAVEDNTLTIEPVASQTLPTVKVAEVDCSSTNTCALSGLTRTCRHRIRLGDSKSHYYISPSSRARITAVCNFFTYIRYIQQGLVRQDAEPMFWEIMRLRKEMSLAKLGFFPQEA

SEQ ID NO: 37745 - protein, 208 aa, Homo sapiens
MSAGGDFGNPLRKFKLVFLGEQSVGKTSLITRFMYDSFDNTYQATIGIDFLSKTMYLEDRTVRLQLWDTAGQERFRSLIPSYIRDSTVAVVVYDITNLNSFQQTSKWIDDVRTERGSDVIIMLVGNKTDLADKRQITIEEGEQRAKELSVMFIETSAKTGYNVKQLFRRVASALPGMENVQEKSKEGMIDIKLDKPQEPPASEGGCSC

SEQ ID NO: 37746 - protein, 195 aa, Homo sapiens
MWHMTRNWPLVGKTSLITRFMYDSFDNTYQATIGIDFLSKTMYLEDRTVRLQLWDTAGQERFRSLIPSYIRDSTVAVVVYDITNLNSFQQTSKWIDDVRTERGSDVIIMLVGNKTDLADKRQITIEEGEQRAKELSVMFIETSAKTGYNVKQLFRRVASALPGMENVQEKSKEGMIDIKLDKPQEPPASEGGCSC

SEQ ID NO: 37747 - protein, 216 aa, Homo sapiens
MAGRGGAARPNGPAAGNKICQFKLVLLGESAVGKSSLVLRFVKGQFHEYQESTIGAAFLTQTVCLDDTTVKFEIWDTAGQERYHSLAPMYYRGAQAAIVVYDITNTDTFARAKNWVKELQRQASPNIVIALAGNKADLASKRAVEFQEAQAYADDNSLLFMETSAKTAMNVNEIFMAIAKKLPKNEPQNATGAPGRNRGVDLQENNPASRSQCCSN

SEQ ID NO: 37748 - protein, 249 aa, Homo sapiens
MELSWRSPSPLSASLHSTSPHPHALWTTTAGRAMAGRGGAARPNGPAAGNKICQFKLVLLGESAVGKSSLVLRFVKGQFHEYQESTIGAAFLTQTVCLDDTTVKFEIWDTAGQERYHSLAPMYYRGAQAAIVVYDITNTDTFARAKNWVKELQRQASPNIVIALAGNKADLASKRAVEFQEAQAYADDNSLLFMETSAKTAMNVNEIFMAIAKKLPKNEPQNATGAPGRNRGVDLQENNPASRSQCCSN

SEQ ID NO: 37749 - protein, 352 aa, Homo sapiens
MVRPVRHKKPVNYSQFDHSDSDDDFVSATVPLNKKSRTAPKELKQDKPKPNLNNLRKEEIPVQEKTPKKRLPEGTFSIPASAVPCTKMALDDKLYQRDLEVALALSVKELPTVTTNVQNSQDKSIEKHGSSKIETMNKSPHISNCSVASDYLDLDKITVEDDVGGVQGKRKAASKAAAQQRKILLEGSDGDSANDTEPDFAPGEDSEDDSDFCESEDNDEDFSMRKSKVKEIKKKEVKVKSPVEKKEKKSKSKCNALVTSVDSAPAAVKSESQSLPKKVSLSSDTTRKPLEIRSPSAESKKPKWVPPAASGGSRSSSSPLVVVSVKSPNQSLRLGLSRLARVKPLHPNATST

SEQ ID NO: 37750 - protein, 335 aa, Homo sapiens
MVRPVRHKKPVNYSQFDHSDSDDDFVSATVPLNKKSRTAPKELKQDKPKPNLNNLRKEEIPVQEKTPKKRMALDDKLYQRDLEVALALSVKELPTVTTNVQNSQDKSIEKHGSSKIETMNKSPHISNCSVASDYLDLDKITVEDDVGGVQGKRKAASKAAAQQRKILLEGSDGDSANDTEPDFAPGEDSEDDSDFCESEDNDEDFSMRKSKVKEIKKKEVKVKSPVEKKEKKSKSKCNALVTSVDSAPAAVKSESQSLPKKVSLSSDTTRKPLEIRSPSAESKKPKWVPPAASGGSRSSSSPLVVVSVKSPNQSLRLGLSRLARVKPLHPNATST

SEQ ID NO: 37751 - protein, 302 aa, Homo sapiens
MVRPVRHKKPVNYSQFDHSDSDDDFVSATVPLNKKSRTAPKELKQDKPKPNLNNLRKEEIPVQEKTPKKRLPEGTFSIPASAVPCTKMALDDKLYQRDLEVALALSVKELPTVTTNVQNSQDKSIEKHGSSKIETMNKSPHISNCSVASDYLDLDKITVEDDVGGVQGKRKAASKAAAQQRKILLEGSDGDSANDTEPDFAPGEDSEDDSDFCESEDNDEDFSMRKSKVKEIKKKEVKVKSPVEKKEKKSKSKCNALAASGGSRSSSSPLVVVSVKSPNQSLRLGLSRLARVKPLHPNATST

SEQ ID NO: 37752 - protein, 425 aa, Homo sapiens
MASKEMFEDTVEERVINEEYKIWKKNTPFLYDLVMTHALQWPSLTVQWLPEVTKPEGKDYALHWLVLGTHTSDEQNHLVVARVHIPNDDAQFDASHCDSDKGEFGGFGSVTGKIECEIKINHEGEVNRARYMPQNPHIIATKTPSSDVLVFDYTKHPAKPDPSGECNPDLRLRGHQKEGYGLSWNSNLSGHLLSASDDHTVCLWDINAGPKEGKIVDAKAIFTGHSAVVEDVAWHLLHESLFGSVADDQKLMIWDTRSNTTSKPSHLVDAHTAEVNCLSFNPYSEFILATGSADKTVALWDLRNLKLKLHTFESHKDEIFQVHWSPHNETILASSGTDRRLNVWDLSKIGEEQSAEDAEDGPPELLFIHGGHTAKISDFSWNPNEPWVICSVSEDNIMQIWQMAENIYNDEESDVTTSELEGQGS

SEQ ID NO: 37753 - protein, 469 aa, Homo sapiens
MAAEAGVVGAGASPDGDWRDQACGLLLHVHLSSRLGRAAPVRTGRHLRTVFEDTVEERVINEEYKIWKKNTPFLYDLVMTHALQWPSLTVQWLPEVTKPEGKDYALHWLVLGTHTSDEQNHLVVARVHIPNDDAQFDASHCDSDKGEFGGFGSVTGKIECEIKINHEGEVNRARYMPQNPHIIATKTPSSDVLVFDYTKHPAKPDPSGECNPDLRLRGHQKEGYGLSWNSNLSGHLLSASDDHTVCLWDINAGPKEGKIVDAKAIFTGHSAVVEDVAWHLLHESLFGSVADDQKLMIWDTRSNTTSKPSHLVDAHTAEVNCLSFNPYSEFILATGSADKTVALWDLRNLKLKLHTFESHKDEIFQVHWSPHNETILASSGTDRRLNVWDLSKIGEEQSAEDAEDGPPELLFIHGGHTAKISDFSWNPNEPWVICSVSEDNIMQIWQMAENIYNDEESDVTTSELEGQGS

SEQ ID NO: 37754 - protein, 522 aa, Homo sapiens
MPRKKAAAAAWEEPSSGNGTARAGPRKRGGPAGRKRERPERCSSSSGGGSSGDEDGLELDGAPGGGKRAARPATAGKAGGAAVVITEPEHTKERVKLEGSKCKGQLLIFGATNWDLIGRKEVPKQQAAYRNLGQNLWGPHRYGCLAGVRVRTVVSGSCAAHSLLITTEGKLWSWGRNEKGQLGHGDTKRVEAPRLIEGLSHEVIVSAACGRNHTLALTETGSVFAFGENKMGQLGLGNQTDAVPSPAQIMYNGQPITKMACGAEFSMIMDCKGNLYSFGCPEYGQLGHNSDGKFIARAQRIEYDCELVPRRVAIFIEKTKDGQILPVPNVVVRDVACGANHTLVLDSQKRVFSWGFGGYGRLGHAEQKDEMVPRLVKLFDFPGRGASQIYAGYTCSFAVSEVGGLFFWGATNTSRESTMYPKAVQDLCGWRIRSLACGKSSIIVAADESTISWGPSPTFGELGYGDHKPKSSTAAQEVKTLDGIFSEQVAMGYSHSLVIARDESETEKEKIKKLPEYNPRTL

SEQ ID NO: 37755 - protein, 268 aa, Homo sapiens
MVALENPECGPEAAEGTPGGRRLLPLPSCLPALASSQVKRLSASRRKQHFINQAVRNSDLVPKAKGRKSLQRLENTQYLLTLLETDGGLPGLEDGDLAPPASPGIFAEACNNATYVEVWNDFMNRSGEEQERVLRYLEDEGRSKARRRGPGRGEDRRREDPAYTPRECFQRISRRLRAVLKRSRIPMETLETWEERLLRFFSVSPQAVYTAMLDNSFERLLLHAVCQYMDLISASADLEGKRQMKVSNRHLDFLPPGLLLSAYLEQHS

SEQ ID NO: 37756 - protein, 217 aa, Homo sapiens
MPTPHEAEKQITGPEEADRPPSMSSHDTASPAAPSRNPCCLCWCCCCSCSWNQERRRAWQASRESKLQPLPSCEVCATPSPEEVQSWAQSFDKLMHSPAGRSVFRAFLRTEYSEENMLFWLACEELKAEANQHVVDEKARLIYEDYVSILSPKEVSLDSRVREGINKKMQEPSAHTFDDAQLQIYTLMHRDSYPRFLSSPTYRALLLQGPSQSSSEA

SEQ ID NO: 37757 - protein, 92 aa, Homo sapiens
METLPGLLQRPDPGALSAAQLEQLRKFKIQTRIANEKYLRTHKEVEWLISGFFREIFLKRPDNILEFAADYFTDPRLPNKIHMQLIKDKKAA

SEQ ID NO: 37758 - protein, 1198 aa, Homo sapiens
MPVIPALWEVEMGRSQGQEIETILANRSHSDSTPLPNFLSGSHRPECCTCRLLTASGAQDSLPFGRRLYSGPWRSCEEVCHVSVLSVLSTSCGLSLSLPIFPGWMEWLSPDIALPRRDEWTQTSPARKRITHAKVQGAGQLRLSIDAQDRVLLLHIIEGKGLISKQPGTCDPYVKISLIPEDSRLRHQKTQTVPDCRDPAFHEHFFFPVQEEDDQKRLLVTVWNRASQSRQSGLIGCMSFGVKSLLTPDKEISGWYYLLGEHLGRTKHLKVARRRLRPLRDPLLRMPGGGDTENGKKLKITIPRGKDGFGFTICCDSPVRVQAVDSGGPAERAGLQQLDTVLQLNERPVEHWKCVELAHEIRSCPSEIILLVWRMVPQVKPGPDGGVLRRASCKSTHDLQSPPNKREKNCTHGVQARPEQRHSCHLVCDSSDGLLLGGWERYTEVAKRGGQHTLPALSRATAPTDPNYIILAPLNPGSQLLRPVYQEDTIPEESGSPSKGKSYTGLGKKSRLMKTVQTMKGHGNYQNCPVVRPHATHSSYGTYVTLAPKVLVFPVFVQPLDLCNPARTLLLSEELLLYEGRNKAAEVTLFAYSDLLLFTKEDEPGRCDVLRNPLYLQSVKLQEGSSEDLKFCVLYLAEKAECLFTLEAHSQEQKKRVCWCLSENIAKQQQLAASPPDSKMFETEADEKREMALEEGKGPGAEDSPPSKEPSPGQELPPGQDLPPNKDSPSGQEPAPSQEPLSSKDSATSEGSPPGPDAPPSKDVPPCQEPPPAQDLSPCQDLPAGQEPLPHQDPLLTKDLPAIQESPTRDLPPCQDLPPSQVSLPAKALTEDTMSSGDLLAATGDPPAAPRPAFVIPEVRLDSTYSQKAGAEQGCSGDEEDAEEAEEVEEGEEGEEDEDEDTSDDNYGERSEAKRSSMIETGQGAEGGLSLRVQNSLRRRTHSEGSLLQEPRGPCFASDTTLHCSDGEGAASTWGMPSPSTLKKELGRNGGSMHHLSLFFTGHRKMSGADTVGDDDEASRKRKSKNLAKDMKNKLGIFRRRNESPGAPPAGKADKMMKSFKPTSEEALKWGESLEKLLVHKYGLAVFQAFLRTEFSEENLEFWLACEDFKKVKSQSKMASKAKKIFAEYIAIQACKEVNLDSYTREHTKDNLQSVTRGCFDLAQKRIFGLMEKDSYPRFLRSDLYLDLINQKKMSPPL

SEQ ID NO: 37759 - protein, 519 aa, Homo sapiens
MFETEADEKREMALEEGKGPGAEDSPPSKEPSPGQELPPGQDLPPNKDSPSGQEPAPSQEPLSSKDSATSEGSPPGPDAPPSKDVPPCQEPPPAQDLSPCQDLPAGQEPLPHQDPLLTKDLPAIQESPTRDLPPCQDLPPSQVSLPAKALTEDTMSSGDLLAATGDPPAAPRPAFVIPEVRLDSTYSQKAGAEQGCSGDEEDAEEAEEVEEGEEGEEDEDEDTSDDNYGERSEAKRSSMIETGQGAEGGLSLRVQNSLRRRTHSEGSLLQEPRGPCFASDTTLHCSDGEGAASTWGMPSPSTLKKELGRNGGSMHHLSLFFTGHRKMSGADTVGDDDEASRKRKSKNLAKDMKNKLGIFRRRNESPGAPPAGKADKMMKSFKPTSEEALKWGESLEKLLVHKYGLAVFQAFLRTEFSEENLEFWLACEDFKKVKSQSKMASKAKKIFAEYIAIQACKEVNLDSYTREHTKDNLQSVTRGCFDLAQKRIFGLMEKDSYPRFLRSDLYLDLINQKKMSPPL

SEQ ID NO: 37760 - protein, 206 aa, Homo sapiens
MHHLSLFFTGHRKMSGADTVGDDDEASRKRKSKNLAKDMKNKLGIFRRRNESPGAPPAGKADKMMKSFKPTSEEALKWGESLEKLLVHKYGLAVFQAFLRTEFSEENLEFWLACEDFKKVKSQSKMASKAKKIFAEYIAIQACKEVNLDSYTREHTKDNLQSVTRGCFDLAQKRIFGLMEKDSYPRFLRSDLYLDLINQKKMSPPL

SEQ ID NO: 37761 - protein, 917 aa, Homo sapiens
MNRFNGLCKVCSERRYRQITIPRGKDGFGFTICCDSPVRVQAVDSGGPAERAGLQQLDTVLQLNERPVEHWKCVELAHEIRSCPSEIILLVWRMVPQVKPGPDGGVLRRASCKSTHDLQSPPNKREKNCTHGVQARPEQRHSCHLVCDSSDGLLLGGWERYTEVAKRGGQHTLPALSRATAPTDPNYIILAPLNPGSQLLRPVYQEDTIPEESGSPSKGKSYTGLGKKSRLMKTVQTMKGHGNYQNCPVVRPHATHSSYGTYVTLAPKVLVFPVFVQPLDLCNPARTLLLSEELLLYEGRNKAAEVTLFAYSDLLLFTKEDEPGRCDVLRNPLYLQSVKLQEGSSEDLKFCVLYLAEKAECLFTLEAHSQEQKKRVCWCLSENIAKQQQLAASPPDSKMFETEADEKREMALEEGKGPGAEDSPPSKEPSPGQELPPGQDLPPNKDSPSGQEPAPSQEPLSSKDSATSEGSPPGPDAPPSKDVPPCQEPPPAQDLSPCQDLPAGQEPLPHQDPLLTKDLPAIQESPTRDLPPCQDLPPSQVSLPAKALTEDTMSSGDLLAATGDPPAAPRPAFVIPEVRLDSTYSQKAGAEQGCSGDEEDAEEAEEVEEGEEGEEDEDEDTSDDNYGERSEAKRSSMIETGQGAEGGLSLRVQNSLRRRTHSEGSLLQEPRGPCFASDTTLHCSDGEGAASTWGMPSPSTLKKELGRNGGSMHHLSLFFTGHRKMSGADTVGDDDEASRKRKSKNLAKDMKNKLGIFRRRNESPGAPPAGKADKMMKSFKPTSEEALKWGESLEKLLVHKYGLAVFQAFLRTEFSEENLEFWLACEDFKKVKSQSKMASKAKKIFAEYIAIQACKEVNLDSYTREHTKDNLQSVTRGCFDLAQKRIFGLMEKDSYPRFLRSDLYLDLINQKKMSPPL

SEQ ID NO: 37762 - protein, 602 aa, Homo sapiens
MERSLHRVSLGSRRAHPDLSFYLTTFGQLRLSIDAQDRVLLLHIIEGKGLISKQPGTCDPYVKISLIPEDSRLRHQKTQTVPDCRDPAFHEHFFFPVQEEDDQKRLLVTVWNRASQSRQSGLIGCMSFGVKSLLTPDKEISGWYYLLGEHLGRTKHLKVARRRLRPLRDPLLRMPGGGDTENGKKLKITIPRGKDGFGFTICCDSPVRVQAVDSGGPAERAGLQQLDTVLQLNERPVEHWKCVELAHEIRSCPSEIILLVWRMVPQVKPGPDGGVLRRASCKSTHDLQSPPNKREKNCTHGVQARPEQRHSCHLVCDSSDGLLLGGWERYTEVAKRGGQHTLPALSRATAPTDPNYIILAPLNPGSQLLRPVYQEDTIPEESGSPSKGKSYTGLGKKSRLMKTVQTMKGHGNYQNCPVVRPHATHSSYGTYVTLAPKVLVFPVFVQPLDLCNPARTLLLSEELLLYEGRNKAAEVTLFAYSDLLLFTKEDEPGRCDVLRNPLYLQSVKLQEGSSEDLKFCVLYLAEKAECLFTLEAHSQEQKKRVCWCLSENIAKQQQLAASPPDSKKLHPFGSLQQEMGPVNSTNATQDRSFTSPGQTLIG

SEQ ID NO: 37763 - protein, 1094 aa, Homo sapiens
MEWLSPDIALPRRDEWTQTSPARKRITHAKVQGAGQLRLSIDAQDRVLLLHIIEGKGLISKQPGTCDPYVKISLIPEDSRLRHQKTQTVPDCRDPAFHEHFFFPVQEEDDQKRLLVTVWNRASQSRQSGLIGCMSFGVKSLLTPDKEISGWYYLLGEHLGRTKHLKVARRRLRPLRDPLLRMPGGGDTENGKKLKITIPRGKDGFGFTICCDSPVRVQAVDSGGPAERAGLQQLDTVLQLNERPVEHWKCVELAHEIRSCPSEIILLVWRMVPQVKPGPDGGVLRRASCKSTHDLQSPPNKREKNCTHGVQARPEQRHSCHLVCDSSDGLLLGGWERYTEVAKRGGQHTLPALSRATAPTDPNYIILAPLNPGSQLLRPVYQEDTIPEESGSPSKGKSYTGLGKKSRLMKTVQTMKGHGNYQNCPVVRPHATHSSYGTYVTLAPKVLVFPVFVQPLDLCNPARTLLLSEELLLYEGRNKAAEVTLFAYSDLLLFTKEDEPGRCDVLRNPLYLQSVKLQEGSSEDLKFCVLYLAEKAECLFTLEAHSQEQKKRVCWCLSENIAKQQQLAASPPDSKMFETEADEKREMALEEGKGPGAEDSPPSKEPSPGQELPPGQDLPPNKDSPSGQEPAPSQEPLSSKDSATSEGSPPGPDAPPSKDVPPCQEPPPAQDLSPCQDLPAGQEPLPHQDPLLTKDLPAIQESPTRDLPPCQDLPPSQVSLPAKALTEDTMSSGDLLAATGDPPAAPRPAFVIPEVRLDSTYSQKAGAEQGCSGDEEDAEEAEEVEEGEEGEEDEDEDTSDDNYGERSEAKRSSMIETGQGAEGGLSLRVQNSLRRRTHSEGSLLQEPRGPCFASDTTLHCSDGEGAASTWGMPSPSTLKKELGRNGGSMHHLSLFFTGHRKMSGADTVGDDDEASRKRKSKNLAKDMKNKLGIFRRRNESPGAPPAGKADKMMKSFKPTSEEALKWGESLEKLLVHKYGLAVFQAFLRTEFSEENLEFWLACEDFKKVKSQSKMASKAKKIFAEYIAIQACKEVNLDSYTREHTKDNLQSVTRGCFDLAQKRIFGLMEKDSYPRFLRSDLYLDLINQKKMSPPL

SEQ ID NO: 37764 - protein, 311 aa, Homo sapiens
MVTRRPVTNSWDWLPAGAAPEAVPCRHMPLSRLPLRVGQKEFFFPLPLLVPPISWLLLSESQPRLVPGSPVIRPGFQRACVAAACTVAARCPGRGVGDRSQSGASYRPICGPKVGGPTEMLRGMYLTRNGNLQRRHTMKEAKDMKNKLGIFRRRNESPGAPPAGKADKMMKSFKPTSEEALKWGESLEKLLVHKYGLAVFQAFLRTEFSEENLEFWLACEDFKKVKSQSKMASKAKKIFAEYIAIQACKEVNLDSYTREHTKDNLQSVTRGCFDLAQKRIFGLMEKDSYPRFLRSDLYLDLINQKKMSPPL

SEQ ID NO: 37765 - protein, 319 aa, Homo sapiens
MVTRRPVTNSWDWLPAGAAPEAVPCRHMPLSRLPLRVGQKEFFFPLPLLVPPISWLLLSESQPRLVPGSPVIRPGFQRACVAAACTVAARCPGRGVGDRSQSGASYRPICGPKVGGPTEMLRGMYLTRNGNLQRRHTMKEAKDMKNKLGIFRRRNESPGAPPAGKADKMMKSFKPTSEEALKWGESLEKLLVHKYGLAVFQAFLRTEFSEENLEFWLACEDFKKVKSQSKMASKAKKIFAEYIAIQACKEVNLDSYTREHTKDNLQSVTRGCFDLAQKRIFGLMEKDSYPRFLRSDLYLDLINQKKMSPPLDYKDDDDK

SEQ ID NO: 37766 - protein, 591 aa, Homo sapiens
MNRFNGLCKVCSERRYRQITIPRGKDGFGFTICCDSPVRVQAVDSGGPAERAGLQQLDTVLQLNERPVEHWKCVELAHEIRSCPSEIILLVWRMVPQVKPGPDGGVLRRASCKSTHDLQSPPNKREKNCTHGVQARPEQRHSCHLVCDSSDGLLLGGWERYTEVAKRGGQHTLPALSRATAPTDPNYIILAPLNPGSQLLRPVYQEDTIPEESGSPSKGKSYTGLGKKSRLMKTVQTMKGHGNYQNCPVVRPHATHSSYGTYVTLAPKVLVFPVFVQPLDLCNPARTLLLSEELLLYEGRNKAAEVTLFAYSDLLLFTKEDEPGRCDVLRNPLYLQSVKLQEGSSEDLKFCVLYLAEKAECLFTLEAHSQEQKKRVCWCLSENIAKQQQLAASPPDSKMSGADTVGDDDEASRKRKSKNLAKDMKNKLGIFRRRNESPGAPPAGKADKMMKSFKPTSEEALKWGESLEKLLVHKYGLAVFQAFLRTEFSEENLEFWLACEDFKKVKSQSKMASKAKKIFAEYIAIQACKEVNLDSYTREHTKDNLQSVTRGCFDLAQKRIFGLMEKDSYPRFLRSDLYLDLINQKKMSPPL

SEQ ID NO: 37767 - protein, 1639 aa, Homo sapiens
MAKDSPSPLGASPKKPGCSSPAAAVLENQRRELEKLRAELEAERAGWRAERRRFAARERQLREEAERERRQLADRLRSKWEAQRSRELRQLQEEMQREREAEIRQLLRWKEAEQRQLQQLLHRERDGVVRQARELQRQLAEELVNRGHCSRPGASEVSAAQCRCRLQEVLAQLRWQTDGEQAARIRYLQAALEVERQLFLKYILAHFRGHPALSGSPDPQAVHSLEEPLPQTSSGSCHAPKPACQLGSLDSLSAEVGVRSRSLGLVSSACSSSPDGLLSTHASSLDCFAPACSRSLDSTRSLPKASKSEERPSSPDTSTPGSRRLSPPPSPLPPPPPPSAHRKLSNPRGGEGSESQPCEVLTPSPPGLGHHELIKLNWLLAKALWVLARRCYTLQAENKQLRRAGCPYQADEKVKRLKVKRAELTGLARRLADRARKLQETNLRAVSAPIPGESCAGLELCQVFARQRARDLSEQASAPLAKDKQIEELRQECHLLQARVASGPCSDLHTGRGGPCTQWLNVRDLDRLQRESQREVLRLQRQLMLQQGNGGAWPEAGGQSATCEEVRRQMLALERELDQRRRECQELGAQAAPARRRGEEAETQLQAALLKNAWLAEENGRLQAKTDWVRKVEAENSEVRGHLGRACQERDASGLIAEQLLQQAARGQDRQQQLQRDPQKALCDLHPSWKEIQALQCRPGHPPEQPWETSQMPESQVKGSRRPKFHARPEDYAVSQPNRDIQEKREASLEESPVALGESASVPQVSETVPASQPLSKKTSSQSNSSSEGSMWATVPSSPTLDRDTASEVDDLEPDSVSLALEMGGSAAPAAPKLKIFMAQYNYNPFEGPNDHPEGELPLTAGDYIYIFGDMDEDGFYEGELEDGRRGLVPSNFVEQIPDSYIPGCLPAKSPDLGPSQLPAGQDEALEEDSLLSGKAQGVVDRGLCQMVRVGSKTEVATEILDTKTEACQLGLLQSMGKQGLSRPLLGTKGVLRMAPMQLHLQNVTATSANITWVYSSHRHPHVVYLDDREHALTPAGVSCYTFQGLCPGTHYRARVEVRLPRDLLQVYWGTMSSTVTFDTLLAGPPYPPLDVLVERHASPGVLVVSWLPVTIDSAGSSNGVQVTGYAVYADGLKVCEVADATAGSTLLEFSQLQVPLTWQKVSVRTMSLCGESLDSVPAQIPEDFFMCHRWPETPPFSYTCGDPSTYRVTFPVCPQKLSLAPPSAKASPHNPGSCGEPQAKFLEAFFEEPPRRQSPVSNLGSEGECPSSGAGSQAQELAEAWEGCRKDLLFQKSPQNHRPPSVSDQPGEKENCSQHMGTSKSPAPGFIHLRTECGPRKEPCQEKAALERVLRQKQDAQGFTPPQLGASQQYASDFHNVLKEEQEALCLDLWGTERREERREPEPHSRQGQALGVKRGCQLHEPSSALCPAPSAKVIKMPRGGPQQLGTGANTPARVFVALSDYNPLVMSANLKAAEEELVFQKRQLLRVWGSQDTHDFYLSECNRQVGNIPGRLVAEMEVGTEQTDRRWRSPAQGNLPSVAHLEDFQGLTIPQGSSLVLQGNSKRLPLWTPKIMIAALDYDPGDGQMGGQGKGRLALRAGDVVMVYGPMDDQGFYYGELGGHRGLVPAHLLDHMSLHGH

SEQ ID NO: 37768 - protein, 645 aa, Homo sapiens
MSLKLPRNWDFNLKVEAAKIARSRSVMTGEQMAAFHPSSTPNPLERPIKMGWLKKQRSIVKNWQQRYFVLRAQQLYYYKDEEDTKPQGCMYLPGCTIKEIATNPEEAGKFVFEIIPASWDQNRMGQDSYVLMASSQAEMEEWVKFLRRVAGTPCGVFGQRLDETVAYEQKFGPHLVPILVEKCAEFILEHGRNEEGIFRLPGQDNLVKQLRDAFDAGERPSFDRDTDVHTVASLLKLYLRDLPEPVVPWSQYEGFLLCGQLTNADEAKAQQELMKQLSILPRDNYSLLSYICRFLHEIQLNCAVNKMSVDNLATVIGVNLIRSKVEDPAVIMRGTPQIQRVMTMMIRDHEVLFPKSKDIPLSPPAQKNDPKKAPVARSSVGWDATEDLRISRTDSFSSMTSDSDTTSPTGQQPSDAFPEDSSKVPREKPGDWKMQSRKRTQTLPNRKCFLTSAFQGANSSKMEIFKNEFWSPSSEAKAGEGHRRTMSQDLRQLSDSQRTSTYDNVPSLPGSPGEEASALSSQACDSKGDTLASPNSETGPGKKNSGEEEIDSLQRMVQELRKEIETQKQMYEEQIKNLEKENYDVWAKVVRLNEELEKEKKKSAALEISLRNMERSREDVEKRNKALEEEVKEFVKSMKEPKTEA

SEQ ID NO: 37769 - protein, 458 aa, Homo sapiens
MSLGQSACLFLSIARSRSVMTGEQMAAFHPSSTPNPLERPIKMGWLKKQRSIVKNWQQRYFVLRAQQLYYYKDEEDTKPQGCMYLPGCTIKEIATNPEEAGKFVFEIIPASWDQNRMGQDSYVLMASSQAEMEEWVKFLRRVAGTPCGAVFGQRLDETVAYEQKFGPHLVPILVEKCAEFILEHGRNEEGIFRLPGQDNLVKQLRDAFDAGERPSFDRDTDVHTVASLLKLYLRDLPEPVVPWSQYEGFLLCGQLTNADEAKAQQELMKQLSILPRDNYSLLSYICRFLHEIQLNCAVNKMSVDNLATVIGVNLIRSKVEDPAVIMRGTPQIQRVMTMMIRDHEVLFPKSKDIPLSPPAQKNDPKKAPVARSSVGWDATEDLRISRTDSFSSMVRCREPSCFHWVLPLVQAIPCKACSRVAIWGVLGDAVAVGAAATDSSEHTLKAWPLSKSSFYWHL

SEQ ID NO: 37770 - protein, 638 aa, Homo sapiens
MSLGQSACLFLSIARSRSVMTGEQMAAFHPSSTPNPLERPIKMGWLKKQRSIVKNWQQRYFVLRAQQLYYYKDEEDTKPQGCMYLPGCTIKEIATNPEEAGKFVFEIIPASWDQNRMGQDSYVLMASSQAEMEEWVKFLRRVAGTPCGVFGQRLDETVAYEQKFGPHLVPILVEKCAEFILEHGRNEEGIFRLPGQDNLVKQLRDAFDAGERPSFDRDTDVHTVASLLKLYLRDLPEPVVPWSQYEGFLLCGQLTNADEAKAQQELMKQLSILPRDNYSLLSYICRFLHEIQLNCAVNKMSVDNLATVIGVNLIRSKVEDPAVIMRGTPQIQRVMTMMIRDHEVLFPKSKDIPLSPPAQKNDPKKAPVARSSVGWDATEDLRISRTDSFSSMTSDSDTTSPTGQQPSDAFPEDSSKVPREKPGDWKMQSRKRTQTLPNRKCFLTSAFQGANSSKMEIFKNEFWSPSSEAKAGEGHRRTMSQDLRQLSDSQRTSTYDNVPSLPGSPGEEASALSSQACDSKGDTLASPNSETGPGKKNSGEEEIDSLQRMVQELRKEIETQKQMYEEQIKNLEKENYDVWAKVVRLNEELEKEKKKSAALEISLRNMERSREDVEKRNKALEEEVKEFVKSMKEPKTEA

SEQ ID NO: 37771 - protein, 646 aa, Homo sapiens
MSLKLPRNWDFNLKVEAAKIARSRSVMTGEQMAAFHPSSTPNPLERPIKMGWLKKQRSIVKNWQQRYFVLRAQQLYYYKDEEDTKPQGCMYLPGCTIKEIATNPEEAGKFVFEIIPASWDQNRMGQDSYVLMASSQAEMEEWVKFLRRVAGTPCGAVFGQRLDETVAYEQKFGPHLVPILVEKCAEFILEHGRNEEGIFRLPGQDNLVKQLRDAFDAGERPSFDRDTDVHTVASLLKLYLRDLPEPVVPWSQYEGFLLCGQLTNADEAKAQQELMKQLSILPRDNYSLLSYICRFLHEIQLNCAVNKMSVDNLATVIGVNLIRSKVEDPAVIMRGTPQIQRVMTMMIRDHEVLFPKSKDIPLSPPAQKNDPKKAPVARSSVGWDATEDLRISRTDSFSSMTSDSDTTSPTGQQPSDAFPEDSSKVPREKPGDWKMQSRKRTQTLPNRKCFLTSAFQGANSSKMEIFKNEFWSPSSEAKAGEGHRRTMSQDLRQLSDSQRTSTYDNVPSLPGSPGEEASALSSQACDSKGDTLASPNSETGPGKKNSGEEEIDSLQRMVQELRKEIETQKQMYEEQIKNLEKENYDVWAKVVRLNEELEKEKKKSAALEISLRNMERSREDVEKRNKALEEEVKEFVKSMKEPKTEA

SEQ ID NO: 37772 - protein, 606 aa, Homo sapiens
MSLKLPRNWDFNLKVEAAKIARSRSVMTGEQMAAFHPSSTPNPLERPIKMGWLKKQRSIVKNWQQRYFVLRAQQLYYYKDEEDTKPQGCMYLPGCTIKEIATNPEEAGKFVFEIIPVFGQRLDETVAYEQKFGPHLVPILVEKCAEFILEHGRNEEGIFRLPGQDNLVKQLRDAFDAGERPSFDRDTDVHTVASLLKLYLRDLPEPVVPWSQYEGFLLCGQLTNADEAKAQQELMKQLSILPRDNYSLLSYICRFLHEIQLNCAVNKMSVDNLATVIGVNLIRSKVEDPAVIMRGTPQIQRVMTMMIRDHEVLFPKSKDIPLSPPAQKNDPKKAPVARSSVGWDATEDLRISRTDSFSSMTSDSDTTSPTGQQPSDAFPEDSSKVPREKPGDWKMQSRKRTQTLPNRKCFLTSAFQGANSSKMEIFKNEFWSPSSEAKAGEGHRRTMSQDLRQLSDSQRTSTYDNVPSLPGSPGEEASALSSQACDSKGDTLASPNSETGPGKKNSGEEEIDSLQRMVQELRKEIETQKQMYEEQIKNLEKENYDVWAKVVRLNEELEKEKKKSAALEISLRNMERSREDVEKRNKALEEEVKEFVKSMKEPKTEA

SEQ ID NO: 37773 - protein, 639 aa, Homo sapiens
MSLGQSACLFLSIARSRSVMTGEQMAAFHPSSTPNPLERPIKMGWLKKQRSIVKNWQQRYFVLRAQQLYYYKDEEDTKPQGCMYLPGCTIKEIATNPEEAGKFVFEIIPASWDQNRMGQDSYVLMASSQAEMEEWVKFLRRVAGTPCGAVFGQRLDETVAYEQKFGPHLVPILVEKCAEFILEHGRNEEGIFRLPGQDNLVKQLRDAFDAGERPSFDRDTDVHTVASLLKLYLRDLPEPVVPWSQYEGFLLCGQLTNADEAKAQQELMKQLSILPRDNYSLLSYICRFLHEIQLNCAVNKMSVDNLATVIGVNLIRSKVEDPAVIMRGTPQIQRVMTMMIRDHEVLFPKSKDIPLSPPAQKNDPKKAPVARSSVGWDATEDLRISRTDSFSSMTSDSDTTSPTGQQPSDAFPEDSSKVPREKPGDWKMQSRKRTQTLPNRKCFLTSAFQGANSSKMEIFKNEFWSPSSEAKAGEGHRRTMSQDLRQLSDSQRTSTYDNVPSLPGSPGEEASALSSQACDSKGDTLASPNSETGPGKKNSGEEEIDSLQRMVQELRKEIETQKQMYEEQIKNLEKENYDVWAKVVRLNEELEKEKKKSAALEISLRNMERSREDVEKRNKALEEEVKEFVKSMKEPKTEA

SEQ ID NO: 37774 - protein, 216 aa, Homo sapiens
MRLSALLALASKVTLPPHYRYGMSPPGSVADKRKNPPWIRRRPVVVEPISDEDWYLFCGDTVEILEGKDAGKQGKVVQVIRQRNWVVVGGLNTHYRYIGKTMDYRGTMIPSEAPLLHRQVKLVDPMDRKPTEIEWRFTEAGERVRVSTRSGRIIPKPEFPRADGIVPETWIDGPKDTSVEDALERTYVPCLKTLQEEVMEAMGIKETRKYKKVYWY

SEQ ID NO: 37775 - protein, 134 aa, Homo sapiens
MPADLSGTWTLLSSDNFEGYMLALGIDFATRKIAKLLKPQKVIEQNGDSFTIHTNSSLRNYFVKFKVGEEFDEDNRGLDNRKCKSLVIWDNDRLTCIQKGEKKNRGWTHWIEGDKLHLEMFCEGQVCKQTFQRA

SEQ ID NO: 37776 - protein, 156 aa, Homo sapiens
MAPARAGFCPLLLLLLLGLWVAEIPVSAKPKGMTSSQWFKIQHMQPSPQACNSAMKNINKHTKRCKDLNTFLHEPFSSVAATCQTPKIACKNGDKNCHQSHGAVSLTMCKLTSGKHPNCRYKEKRQNKSYVVACKPPQKKDSQQFHLVPVHLDRVL

SEQ ID NO: 37777 - protein, 272 aa, Homo sapiens
MEAQGVAEGAGPGAASGVPHPAALAPAAAPTLAPASVAAAASQFTLLVMQPCAGQDEAAAPGGSVGAGKPVRYLCEGAGDGEEEAGEDEADLLDTSDPPGGGESAASLEDLEDEETHSGGEGSSGGARRRGSGGGSMSKTCTYEGCSETTSQVAKQRKPWMCKKHRNKMYKDKYKKKKSDQALNCGGTASTGSAGNVKLEESADNILSIVKQRTGSFGDRPARPTLLEQVLNQKRLSLLRSPEVVQFLQKQQQLLNQQVLEQRQQQFPGTSM

SEQ ID NO: 37778 - protein, 137 aa, Homo sapiens
MKPPAAQGSPAAAAAAAPALDSAAAEDLSDALCEFDAVLADFASPFHERHFHYEEHLERMKRRSSASVSDSSGFSDSESADSLYRNSFSFSDEKLNSPTDSTPALLSATVTPQKAKLGDTKELEAFIADLDKTLASM

SEQ ID NO: 37779 - protein, 117 aa, Homo sapiens
MKPPAEDLSDALCEFDAVLADFASPFHERHFHYEEHLERMKRRSSASVSDSSGFSDSESADSLYRNSFSFSDEKLNSPTDSTPALLSATVTPQKAKLGDTKELEAFIADLDKTLASM

SEQ ID NO: 37780 - protein, 427 aa, Homo sapiens
MSKGLPARQDMEKERETLQAWKERVGQELDRVVAFWMEHSHDQEHGGFFTCLGREGRVYDDLKYVWLQGRQVWMYCRLYRTFERFRHAQLLDAAKAGGEFLLRYARVAPPGKKCAFVLTRDGRPVKVQRTIFSECFYTMAMNELWRATGEVRYQTEAVEMMDQIVHWVQEDASGLGRPQLQGAPAAEPMAVPMMLLNLVEQLGEADEELAGKYAELGDWCARRILQHVQRDGQAVLENVSEGGKELPGCLGRQQNPGHTLEAGWFLLRHCIRKGDPELRAHVIDKFLLLPFHSGWDPDHGGLFYFQDADNFCPTQLEWAMKLWWPHSEAMIAFLMGYSDSGDPVLLRLFYQVAEYTFRQFRDPEYGEWFGYLSREGKVALSIKGGPFKGCFHVPRCLAMCEEMLGALLSRPAPAPSPAPTPACRGAE

SEQ ID NO: 37781 - protein, 254 aa, Homo sapiens
MSKGLPARQDMEKERETLQAWKERVGQELDRVVAFWMEHSHDQEHGGFFTCLGREGRVYDDLKYVWLQGRQVWMYCRLYRTFERFRHAQLLDAAKAGGEFLLRYARVAPPGKKCAFVLTRDGRPVKVQRTIFSECFYTMAMNELWRATGEVRYQTEAVEMMDQIVHWVQEDASGLGRPQLQGAPAAEPMAVPMMLLNLVEQLGEADEELAGKYAELGDWCARRILQHVQATRWKPAGFCSVIAFGKATPNFEPT

SEQ ID NO: 37782 - protein, 311 aa, Homo sapiens [sequence omitted]

SEQ ID NO: 37783 - protein, 263 aa, Homo sapiens
MLQFVRAGARAWLRPTGSQGLSSLAEEAARATENPEQVASEGLPEPVLRKVELPVPTHRRPVQAWVESLRGFEQERVGLADLHPDVFATAPRLDILHQVAMWQKNFKRISYAKTKTRAEVRGGGRKPWPQKGTGRARHGSIRSPLWRGGGVAHGPRGPTSYYYMLPMKVRALGLKVALTVKLAQDDLHIMDSLELPTGDPQYLTELAHYRRWGDSVLLVDLTHEEMPQSIVEATSRLKTFNLIPAVGEQRAQAPRVRMCRLRC

SEQ ID NO: 37784 - protein, 481 aa, Homo sapiens
MPQTSVVFSSILGPSCSGQVQPGMGERGGGAGGGSGDLIFQDGHLISGSLEALMEHLVPTVDYYPDRTYIFTFLLSSRVFMPPHDLLARVGQICVEQKQQLEAGPEKAKLKSFSAKIVQLLKEWTEAFPYDFQDEKAMAELKAITHRVTQCDEENGTVKKAIAQMTQSLLLSLAARSQLQELREKLRPPAVDKGPILKTKPPAAQKDILGVCCDPLVLAQQLTHIELDRVSSIYPEDLMQIVSHMDSLDNHRCRGDLTKTYSLEAYDNWFNCLSMLVATEVCRVVKKKHRTRMLEFFIDVARECFNIGNFNSMMAIISGMNLSPVARLKKTWSKVKTAKFDVLEHHMDPSSNFCNYRTALQGATQRSQMANSSREKIVIPVFNLFVKDIYFLHKIHTNHLPNGHINFKKFWEISRQIHEFMTWTQVECPFEKDKKIQSYLLTAPIYSEEALFVASFESEGPENHMEKDSWKTLRTTLLNRA

SEQ ID NO: 37785 - protein, 489 aa, Homo sapiens
MFLEPQETMPQTSVVFSSILGPSCSGQVQPGMGERGGGAGGGSGDLIFQDGHLISGSLEALMEHLVPTVDYYPDRTYIFTFLLSSRVFMPPHDLLARVGQICVEQKQQLEAGPEKAKLKSFSAKIVQLLKEWTEAFPYDFQDEKAMAELKAITHRVTQCDEENGTVKKAIAQMTQSLLLSLAARSQLQELREKLRPPAVDKGPILKTKPPAAQKDILGVCCDPLVLAQQLTHIELDRVSSIYPEDLMQIVSHMDSLDNHRCRGDLTKTYSLEAYDNWFNCLSMLVATEVCRVVKKKHRTRMLEFFIDVARECFNIGNFNSMMAIISGMNLSPVARLKKTWSKVKTAKFDVLEHHMDPSSNFCNYRTALQGATQRSQMANSSREKIVIPVFNLFVKDIYFLHKIHTNHLPNGHINFKKFWEISRQIHEFMTWTQVECPFEKDKKIQSYLLTAPIYSEEALFVASFESEGPENHMEKDSWKTLRTTLLNRA

SEQ ID NO: 37786 - protein, 103 aa, Homo sapiens [sequence omitted]

SEQ ID NO: 37787 - protein, 406 aa, Homo sapiens
MDGWRRMPRWGLLLLLWGSCTFGLPTDTTTFKRIFLKRMPSIRESLKERGVDMARLGPEWSQPMKRLTLGNTTSSVILTNYMDTQYYGEIGIGTPPQTFKVVFDTGSSNVWVPSSKCSRLYTACVYHKLFDASDSSSYKHNGTELTLRYSTGTVSGFLSQDIITVGGITVTQMFGEVTEMPALPFMLAEFDGVVGMGFIEQAIGRVTPIFDNIISQGVLKEDVFSFYYNRDSENSQSLGGQIVLGGSDPQHYEGNFHYINLIKTGVWQIQMKGVSVGSSTLLCEDGCLALVDTGASYISGSTSSIEKLMEALGAKKRLFDYVVKCNEGPTLPDISFHLGGKEYTLTSADYVFQESYSSKKLCTLAIHAMDIPPPTGPTWALGATFIRKFYTEFDRRNNRIGFALAR

SEQ ID NO: 37788 - protein, 403 aa, Homo sapiens
MDGWRRMPRWGLLLLLWGSCTFGLPTDTTTFKRIFLKRMPSIRESLKERGVDMARLGPEWSQPMKRLTLGNTTSSVILTNYMDTQYYGEIGIGTPPQTFKVVFDTGSSNVWVPSSKCSRLYTACVYHKLFDASDSSSYKHNGTELTLRYSTGTVSGFLSQDIITVGGITVTQMFGEVTEMPALPFMLAEFDGVVGMGFIEQAIGRVTPIFDNIISQGVLKEDVFSFYYNRNSQSLGGQIVLGGSDPQHYEGNFHYINLIKTGVWQIQMKGVSVGSSTLLCEDGCLALVDTGASYISGSTSSIEKLMEALGAKKRLFDYVVKCNEGPTLPDISFHLGGKEYTLTSADYVFQESYSSKKLCTLAIHAMDIPPPTGPTWALGATFIRKFYTEFDRRNNRIGFALAR

SEQ ID NO: 37789 - protein, 261 aa, Homo sapiens [sequence omitted]

SEQ ID NO: 37790 - protein, 271 aa, Homo sapiens
MISAHCNLHLPGSSDSPASASQVAGITGRLPTLQTVRYGSKAVTRHRRVMHFQRQKLMAVTEYIPPKPAIHPSCLPSPPSPPQEEIGLIRLLRREIAAVFQDNRMIAVCQNVALSAEDKLLMRHQLRKHKILMKVFPNQVLKPFLEDSKYQNLLPLFVGHNMLLVSEEPKVKEMVRILRTVPFLPLLGGCIDDTILSRQGFINYSKLPSLPLVQGELVGGLTCLTAQTHSLLQHQPLQLTTLLDQYIREQREKDSVMSANGKPDPDTVPDS

SEQ ID NO: 37791 - protein, 391 aa, Homo sapiens
MIEVVAELSRGPVFLAGEALECVVTVTNPLPPTATSASSEALAWASAQIHCQFHASESRVALPPPDSSQPDVQPDSQTVFLPHRGERGQCILSTPPKILFCDLRLDPGESKSYSYSEVLPIEGPPSFRGQSVKYVYKLTIGCQRVNSPITLLRVPLRVLVLTGLQDVRFPQDEAVAPSSPFLEEDEGGKKDSWLAELAGERLMAATSCRSLHLYNISDGRGKVGTFGIFKSVYRLGEDVVGTLNLGEGTVACLQFSVSLQTEERVQPEYQRRRGAGGVPSVSHVTHARHQESCLHTTRTSFSLPIPLSSTPGFCTAIVSLKWRLHFEFVTSREPGLVLLPPVEQPEPTTWTGPEQVPVDTFSWDLPIKVLPTSPTLASYAAPGPSTSTITI

SEQ ID NO: 37792 - protein, 219 aa, Homo sapiens
MDSGTRPVGSCCSSPAGLSREYKLVMLGAGGVGKSAMTMQFISHRFPEDHDPTIEDAYKIRIRIDDEPANLDILDTAGQAEFTAMRDQYMRAGEGFIICYSITDRRSFHEVREFKQLIYRVRRTDDTPVVLVGNKSDLKQLRQVTKEEGLALAREFSCPFFETSAAYRYYIDDVFHALVREIRRKEKEAVLAMEKKSKPKNSVWKRLKSPFRKKKDSVT

SEQ ID NO: 37793 - protein, 183 aa, Homo sapiens
MTMQFISHRFPEDHDPTIEDAYKIRIRIDDEPANLDILDTAGQAEFTAMRDQYMRAGEGFIICYSITDRRSFHEVREFKQLIYRVRRTDDTPVVLVGNKSDLKQLRQVTKEEGLALAREFSCPFFETSAAYRYYIDDVFHALVREIRRKEKEAVLAMEKKSKPKNSVWKRLKSPFRKKKDSVT

SEQ ID NO: 37794 - protein, 236 aa, Homo sapiens
MERWLFLGATEEGPKRTMDSGTRPVGSCCSSPAGLSREYKLVMLGAGGVGKSAMTMQFISHRFPEDHDPTIEDAYKIRIRIDDEPANLDILDTAGQAEFTAMRDQYMRAGEGFIICYSITDRRSFHEVREFKQLIYRVRRTDDTPVVLVGNKSDLKQLRQVTKEEGLALAREFSCPFFETSAAYRYYIDDVFHALVREIRRKEKEAVLAMEKKSKPKNSVWKRLKSPFRKKKDSVT

SEQ ID NO: 37795 - protein, 792 aa, Homo sapiens
MHVIKRDGRQERVMFDKITSRIQKLCYGLNMDFVDPAQITMKVIQGLYSGVTTVELDTLAAETAATLTTKHPDYAILAARIAVSNLHKETKKVFSDVMEDLYNYINPHNGKHSPMVAKSTLDIVLANKDRLNSAIIYDRDFSYNYFGFKTLERSYLLKINGKVAERPQHMLMRVSVGIHKEDIDAAIETYNLLSERWFTHASPTLFNAGTNRPQLSSCFLLSMKDDSIEGIYDTLKQCALISKSAGGIGVAVSCIRATGSYIAGTNGNSNGLVPMLRVYNNTARYVDQGGNKRPGAFAIYLEPWHLDIFEFLDLKKNTGKEEQRARDLFFALWIPDLFMKRVETNQDWSLMCPNECPGLDEVWGEEFEKLYASYEKQGRVRKVVKAQQLWYAIIESQTETGTPYMLYKDSCNRKSNQQNLGTIKCSNLCTEIVEYTSKDEVAVCNLASLALNMYVTSEHTYDFKKLAEVTKVVVRNLNKIIDINYYPVPEACLSNKRHRPIGIGVQGLADAFILMRYPFESAEAQLLNKQIFETIYYGALEASCDLAKEQGPYETYEGSPVSKGILQYDMWNVTPTDLWDWKVLKEKIAKYGIRNSLLIAPMPTASTAQILGNNESIEPYTSNIYTRRVLSGEFQIVNPHLLKDLTERGLWHEEMKNQIIACNGSIQSIPEIPDDLKQLYKTVWEISQKTVLKMAAERGAFIDQSQSLNIHIAEPNYGKLTSMHFYGWKQGLKTGMYYLRTRPAANPIQFTLNKEKLKDKEKVSKEEEEKERNTAAMVCSLENRDECLMCGS

SEQ ID NO: 37796 - protein, 407 aa, Homo sapiens
MSHRKFSAPRHGHLGFLPHKRSHRHRGKVKTWPRDDPSQPVHLTAFLGYKAGMTHTLREVHRPGLKISKREEVEAVTIVETPPLVVVGVVGYVATPRGLRSFKTIFAEHLSDECRRRFYKDWHKSKKKAFTKACKRWRDTDGKKQLQKDFAAMKKYCKVIRVIVHTQMKLLPFRQKKAHIMEIQLNGGTVAEKVAWAQARLEKQVPVHSVFSQSEVIDVIAVTKGRGVKGVTSRWHTKKLPRKTHKGLRKVACIGAWHPARVGCSIARAGQKGYHHRTELNKKIFRIGRGPHMEDGKLVKNNASTSYDVTAKSITPLGGFPHYGEVNNDFVMLKGCIAGTKKRVITLRKSLLVHHSRQAVENIELKFIDTTSKFGHGRFQTAQEKRAFMGPQKKHLEKETPETSGDL

SEQ ID NO: 37797 - protein, 372 aa, Homo sapiens
MSKSESPKEPEQLRKLFIGGLSFETTDESLRSHFEQWGTLTDCVVMRDPNTKRSRGFGFVTYATVEEVDAAMNARPHKVDGRVVEPKRAVSREDSQRPGAHLTVKKIFVGGIKEDTEEHHLRDYFEQYGKIEVIEIMTDRGSGKKRGFAFVTFDDHDSVDKIVIQKYHTVNGHNCEVRKALSKQEMASASSSQRGRSGSGNFGGGRGGGFGGNDNFGRGGNFSGRGGFGGSRGGGGYGGSGDGYNGFGNDGGYGGGGPGYSGGSRGYGSGGQGYGNQGSGYGGSGSYDSYNNGGGGGFGGGSGSNFGGGGSYNDFGNYNNQSSNFGPMKGGNFGGRSSGPYGGGGQYFAKPRNQGGYGGSSSSSSYGSGRRF

SEQ ID NO: 37798 - protein, 320 aa, Homo sapiens
MSKSESPKEPEQLRKLFIGGLSFETTDESLRSHFEQWGTLTDCVVMRDPNTKRSRGFGFVTYATVEEVDAAMNARPHKVDGRVVEPKRAVSREDSQRPGAHLTVKKIFVGGIKEDTEEHHLRDYFEQYGKIEVIEIMTDRGSGKKRGFAFVTFDDHDSVDKIVIQKYHTVNGHNCEVRKALSKQEMASASSSQRGRSGSGNFGGGRGGGFGGNDNFGRGGNFSGRGGFGGSRGGGGYGGSGDGYNGFGNDGSNFGGGGSYNDFGNYNNQSSNFGPMKGGNFGGRSSGPYGGGGQYFAKPRNQGGYGGSSSSSSYGSGRRF

SEQ ID NO: 37799 - protein, 267 aa, Homo sapiens
MSKSESPKEPEQLRKLFIGGLSFETTDESLRSHFEQWGTLTDCVVMRDPNTKRSRGFGFVTYATVEEVDAAMNARPHKVDGRVVEPKRAVSREDSQRPGAHLTVKKIFVGGIKEDTEEHHLRDYFEQYGKIEVIEIMTDRGSGKKRGFAFVTFDDHDSVDKIVIQKYHTVNGHNCEVRKALSKQEMASASSSQRGRSGSGNFGGGSYNDFGNYNNQSSNFGPMKGGNFGGRSSGPYGGGGQYFAKPRNQGGYGGSSSSSSYGSGRRF

SEQ ID NO: 37800 - protein, 353 aa, Homo sapiens
MEKTLETVPLERKKREKEQFRKLFIGGLSFETTEESLRNYYEQWGKLTDCVVMRDPASKRSRGFGFVTFSSMAEVDAAMAARPHSIDGRVVEPKRAVAREESGKPGAHVTVKKLFVGGIKEDTEEHHLRDYFEEYGKIDTIEIITDRQSGKKRGFGFVTFDDHDPVDKIVLQKYHTINGHNAEVRKALSRQEMQEVQSSRSGRGGNFGFGDSRGGGGNFGPGPGSNFRGGSDGYGSGRGFGDGYNGYGGGPGGGNFGGSPGYGGGRGGYGGGGPGYGNQGGGYGGGYDNYGGGNYGSGNYNDFGNYNQQPSNYGPMKSGNFGGSRNMGGPYGGGNYGPGGSGGSGGYGGRSRY

SEQ ID NO: 37801 - protein, 341 aa, Homo sapiens
MEREKEQFRKLFIGGLSFETTEESLRNYYEQWGKLTDCVVMRDPASKRSRGFGFVTFSSMAEVDAAMAARPHSIDGRVVEPKRAVAREESGKPGAHVTVKKLFVGGIKEDTEEHHLRDYFEEYGKIDTIEIITDRQSGKKRGFGFVTFDDHDPVDKIVLQKYHTINGHNAEVRKALSRQEMQEVQSSRSGRGGNFGFGDSRGGGGNFGPGPGSNFRGGSDGYGSGRGFGDGYNGYGGGPGGGNFGGSPGYGGGRGGYGGGGPGYGNQGGGYGGGYDNYGGGNYGSGNYNDFGNYNQQPSNYGPMKSGNFGGSRNMGGPYGGGNYGPGGSGGSGGYGGRSRY

SEQ ID NO: 37802 - protein, 703 aa, Homo sapiens
MAASEVAGVVANAPSPPESSSLCASKSDEGLPDGLSTKDSAQKQKNSPLLSVSSQTITKENNRNVHLEHSEQNPGSSAGDTSAAHQVVLGENLIATALCLSGSGSQSDLKDVASTAGEEGDTSLRESLHPVTRSLKAGCHTKQLASRNCSEEKSPQTSILKEGNRDTSLDFRPVVSPANGVEGVRVDQDDDQDSSSLKLSQNIAVQTDFKTADSEVNTDQDIEKNLDKMMTERTLLKERYQEVLDKQRQVENQLQVQLKQLQQRREEEMKNHQEILKAIQDVTIKREETKKKIEKEKKEFLQKEQDLKAEIEKLCEKGRREVWEMELDRLKNQDGEINRNIMEETERAWKAEILSLESRKELLVLKLEEAEKEAELHLTYLKSTPPTLETVRSKQEWETRLNGVRIMKKNVRDQFNSHIQLVRNGAKLSSLPQIPTPTLPPPPSETDFMLQVFQPSPSLAPRMPFSIGQVTMPMVMPSADPRSLSFPILNPALSQPSQPSSPLPGSHGRNSPGLGSLVSPHGPHMPPAASIPPPPGLGGVKASAETPRPQPVDKLEKILEKLLTRFPQCNKAQMTNILQQIKTARTTMAGLTMEELIQLVAARLAEHERVAASTQPLGRIRALFPAPLAQISTPMFLPSAQVSYPGRSSHAPATCKLCLMCQKLVQPSELHPMACTHVLHKECIKFWAQTNTNDTCPFCPTLK

SEQ ID NO: 37803 - protein, 548 aa, Homo sapiens
MAASEVAGVVANAPSPPESSSLCASKSDEGLPDGLSTKDSAQKQKNSPLLSTDFKTADSEVNTDQDIEKNLDKMMTERTLLKERYQEVLDKQRQVENQLQVQLKQLQQRREEEMKNHQEILKAIQDVTIKREETKKKIEKEKKEFLQKEQDLKAEIEKLCEKGRREVWEMELDRLKNQDGEINRNIMEETERAWKAEILSLESRKELLVLKLEEAEKEAELHLTYLKSTPPTLETVRSKQEWETRLNGVRIMKKNVRDQFNSHIQLVRNGAKLSSLPQIPTPTLPPPPSETDFMLQVFQPSPSLAPRMPFSIGQVTMPMVMPSADPRSLSFPILNPALSQPSQPSSPLPGSHGRNSPGLGSLVSPHGPHMPPAASIPPPPGLGGVKASAETPRPQPVDKLEKILEKLLTRFPQCNKAQMTNILQQIKTARTTMAGLTMEELIQLVAARLAEHERVAASTQPLGRIRALFPAPLAQISTPMFLPSAQVSYPGRSSHAPATCKLCLMCQKLVQPSELHPMACTHVLHKECIKFWAQTNTNDTCPFCPTLK

SEQ ID NO: 37804 - protein, 156 aa, Homo sapiens
MQDAAAGGPPGLGGGGPPEERTDCIICCSAYDLSGHLPRRLYCGHTFCQACVRRLDTPAPEQRWIPCPQCRQSTPTPRGGVAMLDLDLAAFLAVKAEREPARLEPLPLTSLKGSAITRQPAGLCPALGPQPHFPQPRYCCWGCGSLCCPPLGSPEV

SEQ ID NO: 37805 - protein, 377 aa, Homo sapiens
MGPAARPALRSPPPPPPPPPSPLLLLLPLLPLWLGLAGPGAAADGSEPAAGAGRGGARAVRVDVRLPRQDALVLEGVRIGSEADPAPLLGGRLLLMDIVDAEQEAPVEGWIAVAYVGKEQAAQFHQENKGSGPQAYPKALVQQMRRALFLGASALLLLILNHNVVRELDISQLLLRPVIVLHYSSNVTKLLDALLQRTQATAEITSGESLSANIEWKLTLWTTCGLSKDGYGGWQDLVCLGGSRAQEQKPLQQLWNAILLVAMLLCTGLVVQAQRQASRQSQRELGGQVDLFKRRVVRRLASLKTRRCRLSRAAQGLPDPGAETCAVCLDYFCNKQWLRVLPCKHEFHRDCVDPWLMLQQTCPLCKFNVLGNRYSDD

SEQ ID NO: 37806 - protein, 1400 aa, Homo sapiens
MELLPPLPQSFLLLLLLPAKPAAGEDWQCPRTPYAASRDFDVKYVVPSFSAGGLVQAMVTYEGDRNESAVFVAIRNRLHVLGPDLKSVQSLATGPAGDPGCQTCAACGPGPHGPPGDTDTKVLVLDPALPALVSCGSSLQGRCFLHDLEPQGTAVHLAAPACLFSAHHNRPDDCPDCVASPLGTRVTVVEQGQASYFYVASSLDAAVAASFSPRSVSIRRLKADASGFAPGFVALSVLPKHLVSYSIEYVHSFHTGAFVYFLTVQPASVTDDPSALHTRLARLSATEPELGDYRELVLDCRFAPKRRRRGAPEGGQPYPVLRVAHSAPVGAQLATELSIAEGQEVLFGVFVTGKDGGPGVGPNSVVCAFPIDLLDTLIDEGVERCCESPVHPGLRRGLDFFQSPSFCPNPPGLEALSPNTSCRHFPLLVSSSFSRVDLFNGLLGPVQVTALYVTRLDNVTVAHMGTMDGRILQVELVRSLNYLLYVSNFSLGDSGQPVQRDVSRLGDHLLFASGDQVFQVPIQGPGCRHFLTCGRCLRAWHFMGCGWCGNMCGQQKECPGSWQQDHCPPKLTEFHPHSGPLRGSTRLTLCGSNFYLHPSGLVPEGTHQVTVGQSPCRPLPKDSSKLRPVPRKDFVEEFECELEPLGTQAVGPTNVSLTVTNMPPGKHFRVDGTSVLRGFSFMEPVLIAVQPLFGPRAGGTCLTLEGQSLSVGTSRAVLVNGTECLLARVSEGQLLCATPPGATVASVPLSLQVGGAQVPGSWTFQYREDPVVLSISPNCGYINSHITICGQHLTSAWHLVLSFHDGLRAVESRCERQLPEQQLCRLPEYVVRDPQGWVAGNLSARGDGAAGFTLPGFRFLPPPHPPSANLVPLKPEEHAIKFEYIGLGAVADCVGINVTVGGESCQHEFRGDMVVCPLPPSLQLGQDGAPLQVCVDGECHILGRVVRPGPDGVPQSTLLGILLPLLLLVAALATALVFSYWWRRKQLVLPPNLNDLASLDQTAGATPLPILYSGSDYRSGLALPAIDGLDSTTCVHGASFSDSEDESCVPLLRKESIQLRDLDSALLAEVKDVLIPHERVVTHSDRVIGKGHFGVVYHGEYIDQAQNRIQCAIKSLSRITEMQQVEAFLREGLLMRGLNHPNVLALIGIMLPPEGLPHVLLPYMCHGDLLQFIRSPQRNPTVKDLISFGLQVARGMEYLAEQKFVHRDLAARNCMLDESFTVKVADFGLARDILDREYYSVQQHRHARLPVKWMALESLQTYRFTTKSDVWSFGVLLWELLTRGAPPYRHIDPFDLTHFLAQGRRLPQPEYCPDSLYQVMQQCWEADPAVRPTFRVLVGEVEQIVSALLGDHYVQLPATYMNLGPSTSHEMNVRPEQPQFSPMPGNVRRPRPLSEPPRPT

SEQ ID NO: 37807 - protein, 1351 aa, Homo sapiens
MELLPPLPQSFLLLLLLPAKPAAGEDWQCPRTPYAASRDFDVKYVVPSFSAGGLVQAMVTYEGDRNESAVFVAIRNRLHVLGPDLKSVQSLATGPAGDPGCQTCAACGPGPHGPPGDTDTKVLVLDPALPALVSCGSSLQGRCFLHDLEPQGTAVHLAAPACLFSAHHNRPDDCPDCVASPLGTRVTVVEQGQASYFYVASSLDAAVAASFSPRSVSIRRLKADASGFAPGFVALSVLPKHLVSYSIEYVHSFHTGAFVYFLTVQPASVTDDPSALHTRLARLSATEPELGDYRELVLDCRFAPKRRRRGAPEGGQPYPVLRVAHSAPVGAQLATELSIAEGQEVLFGVFVTGKDGGPGVGPNSVVCAFPIDLLDTLIDEGVERCCESPVHPGLRRGLDFFQSPSFCPNPPGLEALSPNTSCRHFPLLVSSSFSRVDLFNGLLGPVQVTALYVTRLDNVTVAHMGTMDGRILQVELVRSLNYLLYVSNFSLGDSGQPVQRDVSRLGDHLLFASGDQVFQVPIQGPGCRHFLTCGRCLRAWHFMGCGWCGNMCGQQKECPGSWQQDHCPPKLTEFHPHSGPLRGSTRLTLCGSNFYLHPSGLVPEGTHQVTVGQSPCRPLPKDSSKLRPVPRKDFVEEFECELEPLGTQAVGPTNVSLTVTNMPPGKHFRVDGTSVLRGFSFMEPVLIAVQPLFGPRAGGTCLTLEGQSLSVGTSRAVLVNGTECLLARVSEGQLLCATPPGATVASVPLSLQVGGAQVPGSWTFQYREDPVVLSISPNCGYINSHITICGQHLTSAWHLVLSFHDGLRAVESRCERQLPEQQLCRLPEYVVRDPQGWVAGNLSARGDGAAGFTLPGFRFLPPPHPPSANLVPLKPEEHAIKFEVCVDGECHILGRVVRPGPDGVPQSTLLGILLPLLLLVAALATALVFSYWWRRKQLVLPPNLNDLASLDQTAGATPLPILYSGSDYRSGLALPAIDGLDSTTCVHGASFSDSEDESCVPLLRKESIQLRDLDSALLAEVKDVLIPHERVVTHSDRVIGKGHFGVVYHGEYIDQAQNRIQCAIKSLSRITEMQQVEAFLREGLLMRGLNHPNVLALIGIMLPPEGLPHVLLPYMCHGDLLQFIRSPQRNPTVKDLISFGLQVARGMEYLAEQKFVHRDLAARNCMLDESFTVKVADFGLARDILDREYYSVQQHRHARLPVKWMALESLQTYRFTTKSDVWSFGVLLWELLTRGAPPYRHIDPFDLTHFLAQGRRLPQPEYCPDSLYQVMQQCWEADPAVRPTFRVLVGEVEQIVSALLGDHYVQLPATYMNLGPSTSHEMNVRPEQPQFSPMPGNVRRPRPLSEPPRPT

SEQ ID NO: 37808 - protein, 495 aa, Homo sapiens
MELLPPLPQSFLLLLLLPAKPAAGEDWQCPRTPYAASRDFDVKYVVPSFSAGGLVQAMVTYEGDRNESAVFVAIRNRLHVLGPDLKSVQSLATGPAGDPGCQTCAACGPGPHGPPGDTDTKVLVLDPALPALVSCGSSLQGRCFLHDLEPQGTAVHLAAPACLFSAHHNRPDDCPDCVASPLGTRVTVVEQGQASYFYVASSLDAAVAASFSPRSVSIRRLKADASGFAPGFVALSVLPKHLVSYSIEYVHSFHTGAFVYFLTVQPASVTDDPSALHTRLARLSATEPELGDYRELVLDCRFAPKRRRRGAPEGGQPYPVLRVAHSAPVGAQLATELSIAEGQEVLFGVFVTGKDGGPGVGPNSVVCAFPIDLLDTLIDEGVERCCESPVHPGLRRGLDFFQSPSFCPNPPGLEALSPNTSCRHFPLLVSSSFSRVDLFNGLLGPVQVTALYVTRLDNVTVAHMGTMDGRILQVGPHPHSPLALGPCLHPHFAHI

SEQ ID NO: 37809 - protein, 541 aa, Homo sapiens
MELLPPLPQSFLLLLLLPAKPAAGEDWQCPRTPYAASRDFDVKYVVPSFSAGGLVQAMVTYEGDRNESAVFVAIRNRLHVLGPDLKSVQSLATGPAGDPGCQTCAACGPGPHGPPGDTDTKVLVLDPALPALVSCGSSLQGRCFLHDLEPQGTAVHLAAPACLFSAHHNRPDDCPDCVASPLGTRVTVVEQGQASYFYVASSLDAAVAASFSPRSVSIRRLKADASGFAPGFVALSVLPKHLVSYSIEYVHSFHTGAFVYFLTVQPASVTDDPSALHTRLARLSATEPELGDYRELVLDCRFAPKRRRRGAPEGGQPYPVLRVAHSAPVGAQLATELSIAEGQEVLFGVFVTGKDGGPGVGPNSVVCAFPIDLLDTLIDEGVERCCESPVHPGLRRGLDFFQSPSFCPNPVFQVPIQGPGCRHFLTCGRCLRAWHFMGCGWCGNMCGQQKECPGSWQQDHCPPKLTEFHPHSGPLRGSTRLTLCGSNFYLHPSGLVPEGTHQVTVGQSPCRPLPKDSSKLRYNLVPPLPFPEGGNQAAPSP

SEQ ID NO: 37810 - protein, 907 aa, Homo sapiens
MELLPPLPQSFLLLLLLPAKPAAGEDWQCPRTPYAASRDFDVKYVVPSFSAGGLVQAMVTYEGDRNESAVFVAIRNRLHVLGPDLKSVQSLATGPAGDPGCQTCAACGPGPHGPPGDTDTKVLVLDPALPALVSCGSSLQGRCFLHDLEPQGTAVHLAAPACLFSAHHNRPDDCPDCVASPLGTRVTVVEQGQASYFYVASSLDAAVAASFSPRSVSIRRLKADASGFAPGFVALSVLPKHLVSYSIEYVHSFHTGAFVYFLTVQPASVTDDPSALHTRLARLSATEPELGDYRELVLDCRFAPKRRRRGAPEGGQPYPVLRVAHSAPVGAQLATELSIAEGQEVLFGVFVTGKDGGPGVGPNSVVCAFPIDLLDTLIDEGVERCCESPVHPGLRRGLDFFQSPSFCPNPPGLEALSPNTSCRHFPLLVSSSFSRVDLFNGLLGPVQVTALYVTRLDNVTVAHMGTMDGRILQVELVRSLNYLLYVSNFSLGDSGQPVQRDVSRLGDHLLFASGDQVFQVPIQGPGCRHFLTCGRCLRAWHFMGCGWCGNMCGQQKECPGSWQQDHCPPKLTEFHPHSGPLRGSTRLTLCGSNFYLHPSGLVPEGTHQVTVGQSPCRPLPKDSSKLRPVPRKDFVEEFECELEPLGTQAVGPTNVSLTVTNMPPGKHFRVDGTSVLRGFSFMEPVLIAVQPLFGPRAGGTCLTLEGQSLSVGTSRAVLVNGTECLLARVSEGQLLCATPPGATVASVPLSLQVGGAQVPGSWTFQYREDPVVLSISPNCGYINSHITICGQHLTSAWHLVLSFHDGLRAVESRCERQLPEQQLCRLPEYVVRDPQGWVAGNLSARGDGAAGFTLPGFRFLPPPHPPSANLVPLKPEEHAIKFEVSVRDRGRDSWGSESRGQPTGWSS

SEQ ID NO: 37811 - protein, 647 aa, Homo sapiens
MELLPPLPQSFLLLLLLPAKPAAGEDWQCPRTPYAASRDFDVKYVVPSFSAGGLVQAMVTYEGDRNESAVFVAIRNRLHVLGPDLKSVQSLATGPAGDPGCQTCAACGPGPHGPPGDTDTKVLVLDPALPALVSCGSSLQGRCFLHDLEPQGTAVHLAAPACLFSAHHNRPDDCPDCVASPLGTRVTVVEQGQASYFYVASSLDAAVAASFSPRSVSIRRLKADASGFAPGFVALSVLPKHLVSYSIEYVHSFHTGAFVYFLTVQPASVTDDPSALHTRLARLSATEPELGDYRELVLDCRFAPKRRRRGAPEGGQPYPVLRVAHSAPVGAQLATELSIAEGQEVLFGVFVTGKDGGPGVGPNSVVCAFPIDLLDTLIDEGVERCCESPVHPGLRRGLDFFQSPSFCPNPPGLEALSPNTSCRHFPLLVSSSFSRVDLFNGLLGPVQVTALYVTRLDNVTVAHMGTMDGRILQVELVRSLNYLLYVSNFSLGDSGQPVQRDVSRLGDHLLFASGDQVFQVPIQGPGCRHFLTCGRCLRAWHFMGCGWCGNMCGQQKECPGSWQQDHCPPKLTEFHPHSGPLRGSTRLTLCGSNFYLHPSGLVPEGTHQVTVGQSPCRPLPKDSSKLRYNLVPPLPFPEGGNQAAPSP

SEQ ID NO: 37812 - protein, 1294 aa, Homo sapiens
MELLPPLPQSFLLLLLLPAKPAAGEDWQCPRTPYAASRDFDVKYVVPSFSAGGLVQAMVTYEGDRNESAVFVAIRNRLHVLGPDLKSVQSLATGPAGDPGCQTCAACGPGPHGPPGDTDTKVLVLDPALPALVSCGSSLQGRCFLHDLEPQGTAVHLAAPACLFSAHHNRPDDCPDCVASPLGTRVTVVEQGQASYFYVASSLDAAVAASFSPRSVSIRRLKADASGFAPGFVALSVLPKHLVSYSIEYVHSFHTGAFVYFLTVQPASVTDDPSALHTRLARLSATEPELGDYRELVLDCRFAPKRRRRGAPEGGQPYPVLRVAHSAPVGAQLATELSIAEGQEVLFGVFVTGKDGGPGVGPNSVVCAFPIDLLDTLIDEGVERCCESPVHPGLRRGLDFFQSPSFCPNPVFQVPIQGPGCRHFLTCGRCLRAWHFMGCGWCGNMCGQQKECPGSWQQDHCPPKLTEFHPHSGPLRGSTRLTLCGSNFYLHPSGLVPEGTHQVTVGQSPCRPLPKDSSKLRPVPRKDFVEEFECELEPLGTQAVGPTNVSLTVTNMPPGKHFRVDGTSVLRGFSFMEPVLIAVQPLFGPRAGGTCLTLEGQSLSVGTSRAVLVNGTECLLARVSEGQLLCATPPGATVASVPLSLQVGGAQVPGSWTFQYREDPVVLSISPNCGYINSHITICGQHLTSAWHLVLSFHDGLRAVESRCERQLPEQQLCRLPEYVVRDPQGWVAGNLSARGDGAAGFTLPGFRFLPPPHPPSANLVPLKPEEHAIKFEYIGLGAVADCVGINVTVGGESCQHEFRGDMVVCPLPPSLQLGQDGAPLQVCVDGECHILGRVVRPGPDGVPQSTLLGILLPLLLLVAALATALVFSYWWRRKQLVLPPNLNDLASLDQTAGATPLPILYSGSDYRSGLALPAIDGLDSTTCVHGASFSDSEDESCVPLLRKESIQLRDLDSALLAEVKDVLIPHERVVTHSDRVIGKGHFGVVYHGEYIDQAQNRIQCAIKSLSRITEMQQVEAFLREGLLMRGLNHPNVLALIGIMLPPEGLPHVLLPYMCHGDLLQFIRSPQRNPTVKDLISFGLQVARGMEYLAEQKFVHRDLAARNCMLDESFTVKVADFGLARDILDREYYSVQQHRHARLPVKWMALESLQTYRFTTKSDVWSFGVLLWELLTRGAPPYRHIDPFDLTHFLAQGRRLPQPEYCPDSLYQVMQQCWEADPAVRPTFRVLVGEVEQIVSALLGDHYVQLPATYMNLGPSTSHEMNVRPEQPQFSPMPGNVRRPRPLSEPPRPT

SEQ ID NO: 37813 - protein, 438 aa, Homo sapiens
MAMSLIQACCSLALSTWLLSFCFVHLLCLDFTVAEKEEWYTAFVNITYAEPAPDPGAGAAGGGGAELHTEKTECGRYGEHSPKQDARGEVVMASSAHDRLACDPNTKFAAPTRGKNWIALIPKGNCTYRDKIRNAFLQNASAVVIFNVGSNTNETITMPHAGVEDIVAIMIPEPKGKEIVSLLERNITVTMYITIGTRNLQKYVSRTSVVFVSISFIVLMIISLAWLVFYYIQRFRYANARDRNQRRLGDAAKKAISKLQIRTIKKGDKETESDFDNCAVCIEGYKPNDVVRILPCRHLFHKSCVDPWLLDHRTCPMCKMNILKALGIPPNADCMDDLPTDFEGSLGGPPTNQITGASDTTVNESSVTLDPAVRTVGALQVVQDTDPIPQEGDVIFTTNSEQEPAVSSDSDISLIMAMEVGLSDVELSTDQDCEEVKS

SEQ ID NO: 37814 - protein, 396 aa, Homo sapiens
MAMSLIQACCSLALSTWLLSFCFVHLLCLDFTVAEKEEWYTAFVNITYAEPAPDPGAGAAGGGGAELHTEKTECGRYGEHSPKQDARGEVVMASSAHDRLACDPNTKFAAPTRGKNWIALIPKGNCTYRDKIRNAFLQNASAVVIFNVGSNTNETITMPHAGVEDIVAIMIPEPKGKEIVSLLERNITVTMYITIGTRNLQKYRRLGDAAKKAISKLQIRTIKKGDKETESDFDNCAVCIEGYKPNDVVRILPCRHLFHKSCVDPWLLDHRTCPMCKMNILKALGIPPNADCMDDLPTDFEGSLGGPPTNQITGASDTTVNESSVTLDPAVRTVGALQVVQDTDPIPQEGDVIFTTNSEQEPAVSSDSDISLIMAMEVGLSDVELSTDQDCEEVKS

SEQ ID NO: 37815 - protein, 405 aa, Homo sapiens
MAMSLIQACCSLALSTWLLSFCFVHLLCLDFTVAEKEEWYTAFVNITYAEPAPDPGAGAAGGGGAELHTEKTECGRYGEHSPKQDARGEVVMASSAHDRLACDPNTKFAAPTRGKNWIALIPKGNCTYRDKIRNAFLQNASAVVIFNVGSNTNETITMPHAGVEDIVAIMIPEPKGKEIVSLLERNITVTMYITIGTRNLQKYVSRTSVVFVSISFIVLMIISLAWLVFYYIQRFRYANARDRNQRRLGDAAKKAISKLQIRTIKKGDKETESDFDNCAVCIEGYKPNDVVRILPCRHLFHKSCVDPWLLDHRTCPMCKMNILKALGIPPNADCMDDLPTDFEGSLGGPPTNQITGASDTTVNESSVTLDPAVRTVGALQVVQDTDPIPQEGDVIFTTNSEFCHT

SEQ ID NO: 37816 - protein, 297 aa, Homo sapiens
MSSHAQPLKLISPCPYSLSSGVEDIVAIMIPEPKGKEIVSLLERNITVTMYITIGTRNLQKYVSRTSVVFVSISFIVLMIISLAWLVFYYIQRFRYANARDRNQRRLGDAAKKAISKLQIRTIKKGDKETESDFDNCAVCIEGYKPNDVVRILPCRHLFHKSCVDPWLLDHRTCPMCKMNILKALGIPPNADCMDDLPTDFEGSLGGPPTNQITGASDTTVNESSVTLDPAVRTVGALQVVQDTDPIPQEGDVIFTTNSEQEPAVSSDSDISLIMAMEVGLSDVELSTDQDCEEVKS

SEQ ID NO: 37817 - protein, 651 aa, Homo sapiens
MAAPLLHTRLPGDAAASSSAVKKLGASRTGISNMRALENDFFNSPPRKTVRFGGTVTEVLLKYKKGETNDFELLKNQLLDPDIKDDQIINWLLEFRSSIMYLTKDFEQLISIILRLPWLNRSQTVVEEYLAFLGNLVSAQTVFLRPCLSMIASHFVPPRVIIKEGDVDVSDSDDEDDNLPANFDTCHRALQIIARYVPSTPWFLMPILVEKFPFVRKSERTLECYVHNLLRISVYFPTLRHEILELIIEKLLKLDVNASRQGIEDAEETATQTCGGTDSTEGLFNMDEDEETEHETKAGPERLDQMVHPVAERLDILMSLVLSYMKDVCYVDGKVDNGKTKDLYRDLINIFDKLLLPTHASCHVQFFMFYLCSFKLGFAEAFLEHLWKKLQDPSNPAIIRQAAGNYIGSFLARAKFIPLITVKSCLDLLVNWLHIYLNNQDSGTKAFCDVALHGPFYSACQAVFYTFVFRHKQLLSGNLKEGLQYLQSLNFERIVMSQLNPLKICLPSVVNFFAAITNKYQLVFCYTIIERNNRQMLPVIRSTAGGDSVQICTNPLDTFFPFDPCVLKRSKKFIDPIYQVWEDMSAEELQEFKKPMKKDIVEDEDDDFLKGEVPQNDTVIGITPSSFDTHFRSPSSSVGSPPVLYMQPSPL

SEQ ID NO: 37818 - protein, 305 aa, Homo sapiens
MAAPLLHTRLPGDAAASSSAVKKLGASRTGISNMRALENDFFNSPPRKTVRFGGTVTEVLLKYKKGETNDFELLKNQLLDPDIKDDQIINWLLEFRSSIMYLTKDFEQLISIILRLPWLNRSQTVVEEYLAFLGNLVSAQTVFLRPCLSMIASHFVPPRVIIKEGDVDVSDSDDEDDNLPANFDTCHRALQIIARYVPSTPWFLMPILVEKFPFVRKSERTLECYVHNLLRISVYFPTLRHEILELIIEKLLKLDVNASRQGIEDAEETATQTCGGTDSTEGLFNMVSSLLMKVEMKFIIKGGNS

SEQ ID NO: 37819 - protein, 618 aa, Homo sapiens
MRALENDFFNSPPRKTVRFGGTVTEVLLKYKKGETNDFELLKNQLLDPDIKDDQIINWLLEFRSSIMYLTKDFEQLISIILRLPWLNRSQTVVEEYLAFLGNLVSAQTVFLRPCLSMIASHFVPPRVIIKEGDVDVSDSDDEDDNLPANFDTCHRALQIIARYVPSTPWFLMPILVEKFPFVRKSERTLECYVHNLLRISVYFPTLRHEILELIIEKLLKLDVNASRQGIEDAEETATQTCGGTDSTEGLFNMDEDEETEHETKAGPERLDQMVHPVAERLDILMSLVLSYMKDVCYVDGKVDNGKTKDLYRDLINIFDKLLLPTHASCHVQFFMFYLCSFKLGFAEAFLEHLWKKLQDPSNPAIIRQAAGNYIGSFLARAKFIPLITVKSCLDLLVNWLHIYLNNQDSGTKAFCDVALHGPFYSACQAVFYTFVFRHKQLLSGNLKEGLQYLQSLNFERIVMSQLNPLKICLPSVVNFFAAITNKYQLVFCYTIIERNNRQMLPVIRSTAGGDSVQICTNPLDTFFPFDPCVLKRSKKFIDPIYQVWEDMSAEELQEFKKPMKKDIVEDEDDDFLKGEVPQNDTVIGITPSSFDTHFRSPSSSVGSPPVLYMQPSPL

SEQ ID NO: 37820 - protein, 469 aa, Homo sapiens
MIASHFVPPRVIIKEGDVDVSDSDDEDDNLPANFDTCHRALQIIARYVPSTPWFLMPILVEKFPFVRKSERTLVNASRQGIEDAEETATQTCGGTDSTEGLFNMDEDEETEHETKAGPERLDQMVHPVAERLDILMSLVLSYMKDVCYVDGKVDNGKTKDLYRDLINIFDKLLLPTHASCHVQFFMFYLCSFKLGFAEAFLEHLWKKLQDPSNPAIIRQAAGNYIGSFLARAKFIPLITVKSCLDLLVNWLHIYLNNQDSGTKAFCDVALHGPFYSACQAVFYTFVFRHKQLLSGNLKEGLQYLQSLNFERIVMSQLNPLKICLPSVVNFFAAITNKYQLVFCYTIIERNNRQMLPVIRSTAGGDSVQICTNPLDTFFPFDPCVLKRSKKFIDPIYQVWEDMSAEELQEFKKPMKKDIVEDEDDDFLKGEVPQNDTVIGITPSSFDTHFRSPSSSVGSPPVLYMQPSPL

SEQ ID NO: 37821 - protein, 249 aa, Homo sapiens
MKLNISFPATGCQKLIEVDDERKLRTFYEKRMATEVAADALGEEWKGYVVRISGGNDKQGFPMKQGVLTHGRVRLLLSKGHSCYRPRRTGERKRKSVRGCIVDANLSVLNLVIVKKGEKDIPGLTDTTVPRRLGPKRASRIRKLFNLSKEDDVRQYVVRKPLNKEGKKPRTKAPKIQRLVTPRVLQHKRRRIALKKQRTKKNKEEAAEYAKLLAKRMKEAKEKRQEQIAKRRRLSSLRASTSKSESSQK

SEQ ID NO: 37822 - protein, 225 aa, Homo sapiens
MVSHSELRKLFYSADAVCFDVDSTVIREEGIDELAKICGVEDAVSEMTRRAMGGAVPFKAALTERLALIQPSREQVQRLIAEQPPHLTPGIRELVSRLQERNVQVFLISGGFRSIVEHVASKLNIPATNVFANRLKFYFNGEYAGFDETQPTAESGGKGKVIKLLKEKFHFKKIIMIGDGATDMEACPPADAFIGFGGNVIRQQVKDNAKWYITDFVELLGELEE

SEQ ID NO: 37823 - protein, 297 aa, Homo sapiens
MIDSEAHEKRPPILTSSKQDISPHITNVGEMKHYLCGCCAAFNNVAITYPIQKVLFRQQLYGIKTRDAVLQLRRDGFRNLYRGILPPLMQKTTTLALMFGLYEDLSCLLRKHVRAPEFATHGVAAVLAGTAEAIFTPLERVQTLLQNHKHHDKFTNTYQAFKALKCHGIGEYYRGLVPILFRNGLSNVLFFGLRGPIKEHLPTATTHSAHLVNDFIGGGLLGAMLGFLCFPINVVKTRLQSQIGGEFQSFPKVFQKIWLERDRKLINLFRGAHLNYHRSLISWGIINATYEFLLKFI

SEQ ID NO: 37824 - protein, 523 aa, Homo sapiens
MVPPRRHRGAGRPGVLSSSPPFRLRSAKFSGIALEDLRRALKTRLQMVCVFVMNRMNSQNSGFTQRRRMALGIVILLLVDVIWVASSELTSYVFTQYNKPFFSTFAKTSMFVLYLLGFIIWKPWRQQCTRGLRGKHAAFFADAEGYFAACTTDTTMNSSLSEPLYVPVKFHDLPSEKPESTNIDTEKTPKKSRVRFSNIMEIRQLPSSHALEAKLSRMSYPVKEQESILKTVGKLTATQVAKISFFFCFVWFLANLSYQEALSDTQVAIVNILSSTSGLFTLILAAVFPSNSGDRFTLSKLLAVILSIGGVVLVNLAGSEKPAGRDTVGSIWSLAGAMLYAVYIVMIKRKVDREDKLDIPMFFGFVGLFNLLLLWPGFFLLHYTGFEDFEFPNKVVLMCIIINGLIGTVLSEFLWLWGCFLTSSLIGTLALSLTIPLSIIADMCMQKVQFSWLFFAGAIPVFFSFFIVTLLCHYNNWDPVMVGIRRIFAFICRKHRIQRVPEDSEQCESLISMHSVSQEDGAS

SEQ ID NO: 37825 - protein, 244 aa, Homo sapiens
MDSSGWRGVLSSSPPFRLRSAKFSGIALEDLRRALKTRLQMVCVFVMNRMNSQNSGFTQRRRMALGIVILLLVDVIWVASSELTSYVFTQYNKPFFSTFAKTSMFVLYLLGFIIWKPWRQQCTRGLRGKHAAFFADAEGYFAACTTDTTMNSSLSEPLYVPVKFHDLPSEKPESTNIDTEKTPKKSRVRFSNIMEIRQLPSSHALEAKLSRMSYPVKEQESILKTVGKLTATQVAKISFFFALW

SEQ ID NO: 37826 - protein, 547 aa, Homo sapiens
MSSSPWEPATLRRVFVVGVGMTKFVKPGAENSRDYPDLAEEAGKKALADAQIPYSAVDQACVGYVFGDSTCGQRAIYHSLGMTGIPIINVNNNCATGSTALFMARQLIQGGVAECVLALGFEKMSKGSLGIKFSDRTIPTDKHVDLLINKYGLSAHPVAPQMFGYAGKEHMEKYGTKIEHFAKIGWKNHKHSVNNPYSQFQDEYSLDEVMASKEVFDFLTILQCCPTSDGAAAAILASEAFVQKYGLQSKAVEILAQEMMTDLPSSFEEKSIIKMVGFDMSKEAARKCYEKSGLTPNDIDVIELHDCFSTNELLTYEALGLCPEGQGATLVDRGDNTYGGKWVINPSGGLISKGHPLGATGLAQCAELCWQLRGEAGKRQVPGAKVALQHNLGIGGAVVVTLYKMGFPEAASSFRTHQIEAVPTSSASDGFKANLVFKEIEKKLEEEGEQFVKKIGGIFAFKVKDGPGGKEATWVVDVKNGKGSVLPNSDKKADCTITMADSDFLALMTGKMNPQSAFFQGKLKITGNMGLAMKLQNLQLQPGNAKL

SEQ ID NO: 37827 - protein, 143 aa, Homo sapiens
MGFPEAASSFRTHQIEAVPTSSASDGFKANLVFKEIEKKLEEEGEQFVKKIGGIFAFKVKDGPGGKEATWVVDVKNGKGSVLPNSDKKADCTITMADSDFLALMTGKMNPQSAFFQGKLKITGNMGLAMKLQNLQLQPGNAKL

SEQ ID NO: 37828 - protein, 322 aa, Homo sapiens
MSSSPWEPATLRRVFVVGVGMTKFVKPGAENSRDYPDLAEEAGKKALADAQIPYSAVDQACVGYVFGVAECVLALGFEKMSKGSLGIKFSDRTIPTDKHVDLLINKYGLSAHPVAPQMFGYAGKEHMEKYGTKIEHFAKIGWKNHKHSVNNPYSQFQDEYSLDEVMASKEVFDFLTILQCCPTSDGAAAAILASEAFVQKYGLQSKAVEILAQEMMTDLPSSFEEKSIIKMVGFDMSKEAARKCYEKSGLTPNDIDVIELHDCFSTNELLTYEALGLCPEGQGATLVDRGDNTYGGKWVINPSGGLISKGHPLGATGGHSCS

SEQ ID NO: 37829 - protein, 466 aa, Homo sapiens
MTGIPIINVNNNCATGSTALFMARQLIQGGVAECVLALGFEKMSKGSLGIKFSDRTIPTDKHVDLLINKYGLSAHPVAPQMFGYAGKEHMEKYGTKIEHFAKIGWKNHKHSVNNPYSQFQDEYSLDEVMASKEVFDFLTILQCCPTSDGAAAAILASEAFVQKYGLQSKAVEILAQEMMTDLPSSFEEKSIIKMVGFDMSKEAARKCYEKSGLTPNDIDVIELHDCFSTNELLTYEALGLCPEGQGATLVDRGDNTYGGKWVINPSGGLISKGHPLGATGLAQCAELCWQLRGEAGKRQVPGAKVALQHNLGIGGAVVVTLYKMGFPEAASSFRTHQIEAVPTSSASDGFKANLVFKEIEKKLEEEGEQFVKKIGGIFAFKVKDGPGGKEATWVVDVKNGKGSVLPNSDKKADCTITMADSDFLALMTGKMNPQSAFFQGKLKITGNMGLAMKLQNLQLQPGNAKL

SEQ ID NO: 37830 - protein, 59 aa, Homo sapiens
MGFPEAASSFRTHQIEAVPTSSASDGFKANLVFKEIEKKLEEIRRLTAQSQWLTQTSWL

SEQ ID NO: 37831 - protein, 140 aa, Homo sapiens
MGFPEAARTHQIEAVPTSSASDGFKANLVFKEIEKKLEEEGEQFVKKIGGIFAFKVKDGPGGKEATWVVDVKNGKGSVLPNSDKKADCTITMADSDFLALMTGKMNPQSAFFQGKLKITGNMGLAMKLQNLQLQPGNAKL

SEQ ID NO: 37832 - protein, 503 aa, Homo sapiens
MSSSPWEPATLRRVFVVGVGMTKFVKPGAENSRDYPDLAEEAGKKALADAQIPYSAVDQACVGYVFGVAECVLALGFEKMSKGSLGIKFSDRTIPTDKHVDLLINKYGLSAHPVAPQMFGYAGKEHMEKYGTKIEHFAKIGWKNHKHSVNNPYSQFQDEYSLDEVMASKEVFDFLTILQCCPTSDGAAAAILASEAFVQKYGLQSKAVEILAQEMMTDLPSSFEEKSIIKMVGFDMSKEAARKCYEKSGLTPNDIDVIELHDCFSTNELLTYEALGLCPEGQGATLVDRGDNTYGGKWVINPSGGLISKGHPLGATGLAQCAELCWQLRGEAGKRQVPGAKVALQHNLGIGGAVVVTLYKMGFPEAASSFRTHQIEAVPTSSASDGFKANLVFKEIEKKLEEEGEQFVKKIGGIFAFKVKDGPGGKEATWVVDVKNGKGSVLPNSDKKADCTITMADSDFLALMTGKMNPQSAFFQGKLKITGNMGLAMKLQNLQLQPGNAKL

SEQ ID NO: 37833 - protein, 523 aa, Homo sapiens
MSSSPWEPATLRRVFVVGVGMTKFVKPGAENSRDYPDLAEEAGDSTCGQRAIYHSLGMTGIPIINVNNNCATGSTALFMARQLIQGGVAECVLALGFEKMSKGSLGIKFSDRTIPTDKHVDLLINKYGLSAHPVAPQMFGYAGKEHMEKYGTKIEHFAKIGWKNHKHSVNNPYSQFQDEYSLDEVMASKEVFDFLTILQCCPTSDGAAAAILASEAFVQKYGLQSKAVEILAQEMMTDLPSSFEEKSIIKMVGFDMSKEAARKCYEKSGLTPNDIDVIELHDCFSTNELLTYEALGLCPEGQGATLVDRGDNTYGGKWVINPSGGLISKGHPLGATGLAQCAELCWQLRGEAGKRQVPGAKVALQHNLGIGGAVVVTLYKMGFPEAASSFRTHQIEAVPTSSASDGFKANLVFKEIEKKLEEEGEQFVKKIGGIFAFKVKDGPGGKEATWVVDVKNGKGSVLPNSDKKADCTITMADSDFLALMTGKMNPQSAFFQGKLKITGNMGLAMKLQNLQLQPGNAKL

SEQ ID NO: 37834 - protein, 540 aa, Homo sapiens
MMGSPVSHLLAGFCVWVVLGWVGGSVPNLGPAEQEQNHYLAQLFGLYGENGTLTAGGLARLLHSLGLGRVQGLRLGQHGPLTGRAASPAADNSTHRPQNPELSVDVWAGMPLGPSGWGDLEESKAPHLPRGPAPSGLDLLHRLLLLDHSLADHLNEDCLNGSQLLVNFGLSPAAPLTPRQFALLCPALLYQIDSRVCIGAPAPAPPGDLLSALLQSALAVLLLSLPSPLSLLLLRLLGPRLLRPLLGFLGALAVGTLCGDALLHLLPHAQEGRHAGPGGLPEKDLGPGLSVLGGLFLLFVLENMLGLLRHRGLRPRCCRRKRRNLETRNLDPENGSGMALQPLQAAPEPGAQGQREKNSQHPPALAPPGHQGHSHGHQGGTDITWMVLLGDGLHNLTDGLAIGAAFSDGFSSGLSTTLAVFCHELPHELGDFAMLLQSGLSFRRLLLLSLVSGALGLGGAVLGVGLSLGPVPLTPWVFGVTAGVFLYVALVDMLPALLRPPEPLPTPHVLLQGLGLLLGGGLMLAITLLEERLLPVTTEG

SEQ ID NO: 37835 - protein, 365 aa, Homo sapiens
MRPQDSTGVAELQEPGLPLTDDAPPGATEEPAAAEAAGAPDRGRCWLCLSSPCCSRTEPEAKKKAPCPGLGLFYTLLSAFLFSVGSLFVKKVQDVHAVEISAFRCVFQMLVVIPCLIYRKTGFIGPKGQRIFLILRGVLGSTAMMLIYYAYQTMSLADATVITFSSPVFTSIFAWICLKEKYSPWDALFTVFTITGVILIVRPPFLFGSDTSGMEESYSGHLKGTFAAIGSAVFAASTLVILRKMGKSVDYFLSIWYYVVLGLVESVIILSVLGEWSLPYCGLDRLFLIFIGLFGLGGQIFITKALQIEKAGPVAIMKTMDVVFAFIFQIIFFNNVPTWWTVGGALCVVASNVGAAIRKWYQSSK

SEQ ID NO: 37836 - protein, 364 aa, Homo sapiens
MRPQDSTGVAELQEPGLPLTDDAPPGATEEPAAAEAAGAPDRGRCWLCLSSPCCSRTEPAKKKAPCPGLGLFYTLLSAFLFSVGSLFVKKVQDVHAVEISAFRCVFQMLVVIPCLIYRKTGFIGPKGQRIFLILRGVLGSTAMMLIYYAYQTMSLADATVITFSSPVFTSIFAWICLKEKYSPWDALFTVFTITGVILIVRPPFLFGSDTSGMEESYSGHLKGTFAAIGSAVFAASTLVILRKMGKSVDYFLSIWYYVVLGLVESVIILSVLGEWSLPYCGLDRLFLIFIGLFGLGGQIFITKALQIEKAGPVAIMKTMDVVFAFIFQIIFFNNVPTWWTVGGALCVVASNVGAAIRKWYQSSK

SEQ ID NO: 37837 - protein, 374 aa, Homo sapiens
MEADSPAGPGAPEPLAEGAAAEFSSLLRRIKGKLFTWNILKTIALGQMLSLCICGTAITSQYLAERYKVNTPMLQSFINYCLLFLIYTVMLAFRSGSDNLLVILKRKWWKYILLGLADVEANYVIVRAYQYTTLTSVQLLDCFGIPVLMALSWFILHARYRVIHFIAVAVCLLGVGTMVGADILAGREDNSGSDVLIGDILVLLGASLYAISNVCEEYIVKKLSRQEFLGMVGLFGTIISGIQLLIVEYKDIASIHWDWKIALLFVAFALCMFCLYSFMPLVIKVTSATSVNLGILTADLYSLFVGLFLFGYKFSGLYILSFTVIMVGFILYCSTPTRTAEPAESSVPPVTSIGIDNLGLKLEENLQETHSAVL

SEQ ID NO: 37838 - protein, 357 aa, Homo sapiens
MEADSPAGPGAPEPLAEGAAAEFSSLLRRIKGKLFTWNILKTIALGQMLSLCICGTAITSQYLAERYKVNTPMLQSFINYCLLFLIYTVMLAFRSGSDNLLVILKRKWWKYILLGLADVEANYVIVRAYQYTTLTSVQLLDCFGIPVLMALSWFILHARYRVIHFIAVAVCLLGVGTMVGADILAGREDNSGSDVLIGDILVLLGASLYAISNVCEEYIVKKLSRQEFLGMVGLFGTIISGIQLLIVEYKDIASIHWDWKIALLFVAFALCMFCLYSFMPLVIKVTSATSVNLGILTADLYSLFVGLFLFGYKDSTSCPSLSSWWGLSCTAPPLLARPSRLKAACLQSPALGLTTWG

SEQ ID NO: 37839 - protein, 327 aa, Homo sapiens
MLSLCICGTAITSQYLAERYKVNTPMLQSFINYCLLFLIYTVMLAFRSGSDNLLVILKRKWWKYILLGLADVEANYVIVRAYQYTTLTSVQLLDCFGIPVLMALSWFILHARYRVIHFIAVAVCLLGVGTMVGADILAGREDNSGSDVLIGDILVLLGASLYAISNVCEEYIVKKLSRQEFLGMVGLFGTIISGIQLLIVEYKDIASIHWDWKIALLFVAFALCMFCLYSFMPLVIKVTSATSVNLGILTADLYSLFVGLFLFGYKFSGLYILSFTVIMVGFILYCSTPTRTAEPAESSVPPVTSIGIDNLGLKLEENLQETHSAVL

SEQ ID NO: 37840 - protein, 308 aa, Homo sapiens
MDFVAGAIGGVCGVAVGYPLDTVKVRIQTEPKYTGIWHCVRDTYHRERVWGFYRGLSLPVCTVSLVSSVSFGTYRHCLAHICRLRYGNPDAKPTKADITLSGCASGLVRVFLTSPTEVAKVRLQTQTQAQKQQRRLSASGPLAVPPMCPVPPACPEPKYRGPLHCLATVAREEGLCGLYKGSSALVLRDGHSFATYFLSYAVLCEWLSPAGHSRPDVPGVLVAGGCAGVLAWAVATPMDVIKSRLQADGQGQRRYRGLLHCMVTSVREEGPRVLFKGLVLNCCRAFPVNMVVFVAYEAVLRLARGLLT

SEQ ID NO: 37841 - protein, 30 aa, Homo sapiens
MDFVAGAIGGVCGVAVGYPLDTVKGLLALP

SEQ ID NO: 37842 - protein, 88 aa, Homo sapiens
MSIMDHSPTTGVVTVIVILIAIAALGALILGCWCYLRLQRISQSEDEESIVGDGETKEPFLLVQYSAKGPCVERKAKLMTPNGPEVHG

SEQ ID NO: 37843 - protein, 837 aa, Homo sapiens
MSLSHLYRDGEGRIDDDDDERENFEITDWDLQNEFNPNRQRHWQTKEEATYGVWAERDSDDERPSFGGKRARDYSAPVNFISAGLKKGAAEEAELEDSDDEEKPVKQDDFPKDFGPRKLKTGGNFKPSQKGFAGGTKSFMDFGSWERHTKGIGQKLLQKMGYVPGRGLGKNAQGIINPIEAKQRKGKGAVGAYGSERTTQSMQDFPVVDSEEEAEEEFQKELSQWRKDPSGSKKKPKYSYKTVEELKAKGRISKKLTAPQKELSQVKVIDMTGREQKVYYSYSQISHKHNVPDDGLPLQSQQLPQSGKEAKAPGFALPELEHNLQLLIDLTEQEIIQNDRQLQYERDMVVNLFHELEKMTEVLDHEERVISNLSKVLEMVEECERRMQPDCSNPLTLDECARIFETLQDKYYEEYRMSDRVDLAVAIVYPLMKEYFKEWDPLKDCTYGTEIISKWKSLLENDQLLSHGGQDLSADAFHRLIWEVWMPFVRNIVTQWQPRNCDPMVDFLDSWVHIIPVWILDNILDQLIFPKLQKEVENWNPLTDTVPIHSWIHPWLPLMQARLEPLYSPIRSKLSSALQKWHPSDSSAKLILQPWKDVFTPGSWEAFMVKNIVPKLGMCLGELVINPHQQHMDAFYWVIDWEGMISVSSLVGLLEKHFFPKWLQVLCSWLSNSPNYEEITKWYLGWKSMFSDQVLAHPSVKDKFNEALDIMNRAVSSNVGAYMQPGARENIAYLTHTERRKDFQYEAMQERREAENMAQRGIGVAASSVPMNFKDLIETKAEEHNIVFMPVIGKRHEGKQLYTFGRIVIYIDRGVVFVQGEKTWVPTSLQSLIDMAK

SEQ ID NO: 37844 - protein, 196 aa, Homo sapiens
MATSEILPSFVATMDASNFSFWQVLCSWLSNSPNYEEITKWYLGWKSMFSDQVLAHPSVKDKFNEALDIMNRAVSSNVGAYMQPGARENIAYLTHTERRKDFQYEAMQERREAENMAQRGIGVAASSVPMNFKDLIETKAEEHNIVFMPVIGKRHEGKQLYTFGRIVIYIDRGVVFVQGEKTWVPTSLQSLIDMAK

SEQ ID NO: 37845 - protein, 520 aa, Homo sapiens
MAALKLLSSGLRLCASARGSGATWYKGCVCSFSTSAHRHTKFYTDPVEAVKDIPDGATVLVGGFGLCGIPENLIDALLKTGVKGLTAVSNNAGVDNFGLGLLLRSKQIKRMVSSYVGENAEFERQYLSGELEVELTPQGTLAERIRAGGAGVPAFYTPTGYGTLVQEGGSPIKYNKDGSVAIASKPREVREFNGQHFILEEAITGDFALVKAWKADRAGNVIFRKSARNFNLPMCKAAETTVVEVEEIVDIGAFAPEDIHIPQIYVHRLIKGEKYEKRIERLSIRKEGDGEAKSAKPGDDVRERIIKRAALEFEDGMYANLGIGIPLLASNFISPNITVHLQSENGVLGLGPYPRQHEADADLINAGKETVTILPGASFFSSDESFAMIRGGHVDLTMLGAMQVSKYGDLANWMIPGKMVKGMGGAMDLVSSAKTKVVVTMEHSAKGNAHKIMEKCTLPLTGKQCVNRIITEKAVFDVDKKKGLTLIELWEGLTVDDVQKSTGCDFAVSPKLMPMQQIAN

SEQ ID NO: 37846 - protein, 123 aa, Homo sapiens
MLGAMQVSKYGDLANWMIPGKMVKGMGGAMDLVSSAKTKVVVTMEHSAKGNAHKIMEKCTLPLTGKQCVNRIITEKAVFDVDKKKGLTLIELWEGLTVDDVQKSTGCDFAVSPKLMPMQQIAN

SEQ ID NO: 37847 - protein, 520 aa, Homo sapiens
MSESGHSQPGLYGIERRRRWKEPGSGGPQNLSGPGGRERDYIAPWERERRDASEETSTSVMQKTPIILSKPPAERSKQPPPPTAPAAPPAPAPLEKPIVLMKPREEGKGPVAVTGASTPEGTAPPPPAAPAPPKGEKEGQRPTQPVYQIQNRGMGTAAPAAMDPVVGQAKLLPPERMKHSIKLVDDQMNWCDSAIEYLLDQTDVLVVGVLGLQGTGKSMVMSLLSANTPEEDQRTYVFRAQSAEMKERGGNQTSGIDFFITQERIVFLDTQPILSPSILDHLINNDRKLPPEYNLPHTYVEMQSLQIAAFLFTVCHVVIVVQDWFTDLSLYRFLQTAEMVKPSTPSPSHESSSSSGSDEGTEYYPHLVFLQNKARREDFCPRKLRQMHLMIDQLMAHSHLRYKGTLSMLQCNVFPGLPPDFLDSEVNLFLVPFMDSEAESENPPRAGPGSSPLFSLLPGYRGHPSFQSLVSKLRSQVMSMARPQLSHTILTEKNWFHYAARIWDGVRKSSALAEYSRLLA

SEQ ID NO: 37848 - protein, 495 aa, Homo sapiens
MSESGHSQPGLYGIERRRRWKEPGSGGPQNLSGPGGRERDYIAPWERERRDASEETSTSVMQKTPIILSKPPAERSKQPPPPTAPAAPPAPAPLEKPIVLMKPREEGKGPVAVTGASTPEGTAPPPPAAPAPPKGEKEGQRPTQPVYQIQNRGMGTAAPAAMDPVVGQAKLLPPERMKHSIKLVDDQMNWCDSAIEYLLDQTDVLVVGVLGLQGTGKSMVMSLLSANTPEEDQRTYVFRAQSAEMKERGGNQTSGIDFFITQERIVFLDTQPILSPSILDHLINNDRKLPPEYNLPHTYVEMQSLQIAAFLFTVCHVVIVVQDWFTDLSLYRFLQTAEMVKPSTPSPSHESSSSSGSDEGTEYYPHLVFLQNKARREDFCPRKLRQMHLMIDQLMAHSHLRYKGTLSMLQCNVFPGLPPDFLDSEVNLFLVPFMDSEAESENPPRAGPGSSPLFSLLPGYRGHPSFQSLVSKLRSQVMSMARPQLSHTILTEKNW

SEQ ID NO: 37849 - protein, 910 aa, Homo sapiens
MGTPRAQHPPPPQLLFLILLSCPWIQGLPLKEEEILPEPGSETPTVASEALAELLHGALLRRGPEMGYLPGSDRDPTLATPPAGQTLAVPSLPRATEPGTGPLTTAVTPNGVRGAGPTAPELLTPPPGTTAPPPPSPASPGPPLGPEGGEEETTTTIITTTTVTTTVTSPVLCNNNISEGEGYVESPDLGSPVSRTLGLLDCTYSIHVYPGYGIEIQVQTLNLSQEEELLVLAGGGSPGLAPRLLANSSMLGEGQVLRSPTNRLLLHFQSPRVPRGGGFRIHYQAYLLSCGFPPRPAHGDVSVTDLHPGGTATFHCDSGYQLQGEETLICLNGTRPSWNGETPSCMASCGGTIHNATLGRIVSPEPGGAVGPNLTCRWVIEAAEGRRLHLHFERVSLDEDNDRLMVRSGGSPLSPVIYDSDMDDVPERGLISDAQSLYVELLSETPANPLLLSLRFEAFEEDRCFAPFLAHGNVTTTDPEYRPGALATFSCLPGYALEPPGPPNAIECVDPTEPHWNDTEPACKAMCGGELSEPAGVVLSPDWPQSYSPGQDCVWGVHVQEEKRILLQVEILNVREGDMLTLFDGDGPSARVLAQLRGPQPRRRLLSSGPDLTLQFQAPPGPPNPGLGQGFVLHFKEVPRNDTCPELPPPEWGWRTASHGDLIRGTVLTYQCEPGYELLGSDILTCQWDLSWSAAPPACQKIMTCADPGEIANGHRTASDAGFPVGSHVQYRCLPGYSLEGAAMLTCYSRDTGTPKWSDRVPKCALKYEPCLNPGVPENGYQTLYKHHYQAGESLRFFCYEGFELIGEVTITCVPGHPSQWTSQPPLCKVTQTTDPSRQLEGGNLALAILLPLGLVIVLGSGVYIYYTKLQGKSLFGFSGSHSYSPITVESDFSNPLYEAGDTREYEVSI

SEQ ID NO: 37850 - protein, 840 aa, Homo sapiens
MGTPRAQHPPPPQLLFLILLSCPWIQGLPLKEEEILPEPGSETPTVASEALAELLHGALLRRGPEMGYLPGPPLGPEGGEEETTTTIITTTTVTTTVTSPVLCNNNISEGEGYVESPDLGSPVSRTLGLLDCTYSIHVYPGYGIEIQVQTLNLSQEEELLVLAGGGSPGLAPRLLANSSMLGEGQVLRSPTNRLLLHFQSPRVPRGGGFRIHYQAYLLSCGFPPRPAHGDVSVTDLHPGGTATFHCDSGYQLQGEETLICLNGTRPSWNGETPSCMASCGGTIHNATLGRIVSPEPGGAVGPNLTCRWVIEAAEGRRLHLHFERVSLDEDNDRLMVRSGGSPLSPVIYDSDMDDVPERGLISDAQSLYVELLSETPANPLLLSLRFEAFEEDRCFAPFLAHGNVTTTDPEYRPGALATFSCLPGYALEPPGPPNAIECVDPTEPHWNDTEPACKAMCGGELSEPAGVVLSPDWPQSYSPGQDCVWGVHVQEEKRILLQVEILNVREGDMLTLFDGDGPSARVLAQLRGPQPRRRLLSSGPDLTLQFQAPPGPPNPGLGQGFVLHFKEVPRNDTCPELPPPEWGWRTASHGDLIRGTVLTYQCEPGYELLGSDILTCQWDLSWSAAPPACQKIMTCADPGEIANGHRTASDAGFPVGSHVQYRCLPGYSLEGAAMLTCYSRDTGTPKWSDRVPKCALKYEPCLNPGVPENGYQTLYKHHYQAGESLRFFCYEGFELIGEVTITCVPGHPSQWTSQPPLCKVTQTTDPSRQLEGGNLALAILLPLGLVIVLGSGVYIYYTKLQGKSLFGFSGSHSYSPITVESDFSNPLYEAGDTREYEVSI

SEQ ID NO: 37851 - protein, 853 aa, Homo sapiens
MGTPRAQHPPPPQLLFLILLSCPWIQGLPLKEEEILPEPGSETPTVASEALAELLHGALLRRGPEMGYLPGPPLGPEGGEEETTTTIITTTTVTTTVTSPVLCNNNISEGEGYVESPDLGSPVSRTLGLLDCTYSIHVYPGYGIEIQVQTLNLSQEEELLVLAGGGSPGLAPRLLANSSMLGEGQVLRSPTNRLLLHFQSPRVPRGGGFRIHYQAYLLSCGFPPRPAHGDVSVTDLHPGGTATFHCDSGYQLQGEETLICLNGTRPSWNGETPSCMASCGGTIHNATLGRIVSPEPGGAVGPNLTCRWVIEAAEGRRLHLHFERVSLDEDNDRLMVRSGGSPLSPVIYDSDMDDVPERGLISDAQSLYVELLSETPANPLLLSLRFEAFEEDRCFAPFLAHGNVTTTDPEYRPGALATFSCLPGYALEPPGPPNAIECVDPTEPHWNDTEPACKAMCGGELSEPAGVVLSPDWPQSYSPGQDCVWGVHVQEEKRILLQVEILNVREGDMLTLFDGDGPSARVLAQLRGPQPRRRLLSSGPDLTLQFQAPPGPPNPGLGQGFVLHFKEVPRNDTCPELPPPEWGWRTASHGDLIRGTVLTYQCEPGYELLGSDILTCQWDLSWSAAPPACQKIMTCADPGEIANGHRTASDAGFPVGSHVQYRCLPGYSLEGAAMLTCYSRDTGTPKWSDRVPKCALKYEPCLNPGVPENGYQTLYKHHYQAGESLRFFCYEGFELIGEVTITCVPGHPSQWTSQPPLCKVAYEELLDNRKLEVTQTTDPSRQLEGGNLALAILLPLGLVIVLGSGVYIYYTKLQGKSLFGFSGSHSYSPITVESDFSNPLYEAGDTREYEVSI

SEQ ID NO: 37852 - protein, 580 aa, Homo sapiens
MGTPRAQHPPPPQLLFLILLSCPWIQGLPLKEEEILPEPGSETPTVASEALAELLHGALLRRGPEMGYLPGPPLGPEGGEEETTTTIITTTTVTTTVTSPVLCNNNISEGEGYVESPDLGSPVSRTLGLLDCTYSIHVYPGYGIEIQVQTLNLSQEEELLVLAGGGSPGLAPRLLANSSMLGEGQVLRSPTNRLLLHFQSPRVPRGGGFRIHYQAYLLSCGFPPRPAHGDVSVTDLHPGGTATFHCDSGYQLQGEETLICLNGTRPSWNGETPSCMASCGGTIHNATLGRIVSPEPGGAVGPNLTCRWVIEAAEGRRLHLHFERVSLDEDNDRLMVRSGGSPLSPVIYDSDMDDVPERGLISDAQSLYVELLSETPANPLLLSLRFEAFEEDRCFAPFLAHGNVTTTDPEYRPGALATFSCLPGYALEPPGPPNAIECVDPTEPHWNDTEPACKAMCGGELSEPAGVVLSPDWPQSYSPGQDCVWGVHVQEEKRILLQVEILNVREGDMLTLFDGDGPSARVLAQLRGPQPRRRLLSSGPDLTLQFQAPPGPPNPGLGQGFVLHFKEVPRNDTCPELPPP

SEQ ID NO: 37853 - protein, 879 aa, Homo sapiens
MGTPRAQHPPPPQLLFLILLSCPWIQGSDRDPTLATPPAGQTLAVPSLPRATEPGTGPLTTAVTPNGVRGAGPTAPELLTPPPGTTAPPPPSPASPGPPLGPEGGEEETTTTIITTTTVTTTVTSPVLCNNNISEGEGYVESPDLGSPVSRTLGLLDCTYSIHVYPGYGIEIQVQTLNLSQEEELLVLAGGGSPGLAPRLLANSSMLGEGQVLRSPTNRLLLHFQSPRVPRGGGFRIHYQAYLLSCGFPPRPAHGDVSVTDLHPGGTATFHCDSGYQLQGEETLICLNGTRPSWNGETPSCMASCGGTIHNATLGRIVSPEPGGAVGPNLTCRWVIEAAEGRRLHLHFERVSLDEDNDRLMVRSGGSPLSPVIYDSDMDDVPERGLISDAQSLYVELLSETPANPLLLSLRFEAFEEDRCFAPFLAHGNVTTTDPEYRPGALATFSCLPGYALEPPGPPNAIECVDPTEPHWNDTEPACKAMCGGELSEPAGVVLSPDWPQSYSPGQDCVWGVHVQEEKRILLQVEILNVREGDMLTLFDGDGPSARVLAQLRGPQPRRRLLSSGPDLTLQFQAPPGPPNPGLGQGFVLHFKEVPRNDTCPELPPPEWGWRTASHGDLIRGTVLTYQCEPGYELLGSDILTCQWDLSWSAAPPACQKIMTCADPGEIANGHRTASDAGFPVGSHVQYRCLPGYSLEGAAMLTCYSRDTGTPKWSDRVPKCALKYEPCLNPGVPENGYQTLYKHHYQAGESLRFFCYEGFELIGEVTITCVPGHPSQWTSQPPLCKVAYEELLDNRKLEVTQTTDPSRQLEGGNLALAILLPLGLVIVLGSGVYIYYTKLQGKSLFGFSGSHSYSPITVESDFSNPLYEAGDTREYEVSI

SEQ ID NO: 37854 - protein, 809 aa, Homo sapiens
MGTPRAQHPPPPQLLFLILLSCPWIQGLPLKEEEILPEPGSETPTVASEALAELLHGALLRRGPEMGYLPGSDRDPTLATPPAGQTLAVPSLPRATEPGTGPLTTAVTPNGVRGAGPTAPELLTPPPGTTAPPPPSPASPGPPLGPEGGEEETTTTIITTTTVTTTVTSPAYLLSCGFPPRPAHGDVSVTDLHPGGTATFHCDSGYQLQGEETLICLNGTRPSWNGETPSCMASCGGTIHNATLGRIVSPEPGGAVGPNLTCRWVIEAAEGRRLHLHFERVSLDEDNDRLMVRSGGSPLSPVIYDSDMDDVPERGLISDAQSLYVELLSETPANPLLLSLRFEAFEEDRCFAPFLAHGNVTTTDPEYRPGALATFSCLPGYALEPPGPPNAIECVDPTEPHWNDTEPACKAMCGGELSEPAGVVLSPDWPQSYSPGQDCVWGVHVQEEKRILLQVEILNVREGDMLTLFDGDGPSARVLAQLRGPQPRRRLLSSGPDLTLQFQAPPGPPNPGLGQGFVLHFKEVPRNDTCPELPPPEWGWRTASHGDLIRGTVLTYQCEPGYELLGSDILTCQWDLSWSAAPPACQKIMTCADPGEIANGHRTASDAGFPVGSHVQYRCLPGYSLEGAAMLTCYSRDTGTPKWSDRVPKCALKYEPCLNPGVPENGYQTLYKHHYQAGESLRFFCYEGFELIGEVTITCVPGHPSQWTSQPPLCKVAYEELLDNRKLEVTQTTDPSRQLEGGNLALAILLPLGLVIVLGSGVYIYYTKLQGKSLFGFSGSHSYSPITVESDFSNPLYEAGDTREYEVSI

SEQ ID NO: 37855 - protein, 160 aa, Homo sapiens
MQPASAKWYDRRDYVFIEFCVEDSKDVNVNFEKSKLTFSCLGGSDNFKHLNEIDLFHCIDPNDSKHKRTDRSILCCLRKGESGQSWPRLTKERAKLNWLSVDFNNWKDWEDDSDEDMSNFDRFSEMMNNMGGDEDVDLPEVDGADDDSQDSDDEKMPDLE

SEQ ID NO: 37856 - protein, 127 aa, Homo sapiens
MQPASAKWYDRRDYVFIEFCVEDSKDVNVNFEKSKLTFSCLGGSDNFKHLNEIDLFHCIDPNLNWLSVDFNNWKDWEDDSDEDMSNFDRFSEMMNNMGGDEDVDLPEVDGADDDSQDSDDEKMPDLE

SEQ ID NO: 37857 - protein, 130 aa, Homo sapiens
MQPASAKWYDRRDYVFIEFCVEDSKDVNVNFEKSKLTFSCLGGSDNFKHLNEIDLFHCIDPNDSKHKRTDRSILCCLRKGESGQSWPRLTKERAKMMNNMGGDEDVDLPEVDGADDDSQDSDDEKMPDLE

SEQ ID NO: 37858 - protein, 139 aa, Homo sapiens
MQPASAKWYDRRDYVFIEFCVEDSKDVNVNFEKSKLTFSCLGGSDNFKHLNEIDLFHCIDPNDSKHKRTDRSILCCLRKGESGQSWPRLTKERAKLNWLSVDFNNWKDWEDDSDEDMSNFDRFSEDSQDSDDEKMPDLE

SEQ ID NO: 37859 - protein, 162 aa, Homo sapiens
MAETVADTRRLITKPQNLNDAYGPPSNFLEIDVSNPQTVGVGRGRFTTYEIRVKTNLPIFKLKESTVRRRYSDFEWLRSELERESKVVVPPLPGKAFLRQLPFRGDDGIFDDNFIEERKQGLEQFINKVAGHPLAQNERCLHMFLQDEIIDKSYTPSKIRHA

SEQ ID NO: 37860 - protein, 130 aa, Homo sapiens
MAETVADTRRLITKPQNLNDAYGPPSNFLEIDVSNPQTVGVGRGRFTTYEIRVKVVVPPLPGKAFLRQLPFRGDDGIFDDNFIEERKQGLEQFINKVAGHPLAQNERCLHMFLQDEIIDKSYTPSKIRHA

SEQ ID NO: 37861 - protein, 113 aa, Homo sapiens
MAETVADTRRLITKPQNLNDAYGPPSNFLEIDVSNPQTVGVGRGRFTTYEIRVKTNLPIFKLKESTVRRRYSDFEWLRSELERESKPCLRMTSEARSHGRTWCAQNDEKLFCD

SEQ ID NO: 37862 - protein, 140 aa, Homo sapiens
MAETVADTRRLITKPQNLNDAYGPPSNFLEIDTNLPIFKLKESTVRRRYSDFEWLRSELERESKVVVPPLPGKAFLRQLPFRGDDGIFDDNFIEERKQGLEQFINKVAGHPLAQNERCLHMFLQDEIIDKSYTPSKIRHA

SEQ ID NO: 37863 - protein, 405 aa, Homo sapiens
MDSLVTANTKFCFDLFQEIGKDDRHKNIFFSPLSLSAALGMVRLGARSDSAHQIDEVLHFNEFSQNESKEPDPCLKSNKQKAGSLNNESGLVSCYFGQLLSKLDRIKTDYTLSIANRLYGEQEFPICQEYLDGVIQFYHTTIESVDFQKNPEKSRQEINFWVECQSQGKIKELFSKDAINAETVLVLVNAVYFKAKWETYFDHENTVDAPFCLNANENKSVKMMTQKGLYRIGFIEEVKAQILEMRYTKGKLSMFVLLPSHSKDNLKGLEELERKITYEKMVAWSSSENMSEESVVLSFPRFTLEDSYDLNSILQDMGITDIFDETRADLTGISPSPNLYLSKIIHKTFVEVDENGTQAAAATGAVVSERSLRSWVEFNANHPFLFFIRHNKTQTILFYGRVCSP

SEQ ID NO: 37864 - protein, 425 aa, Homo sapiens
MDSLVTANTKFCFDLFQEIGKDDRHKNIFFSPLSLSAALGMVRLGARSDSAHQIDEVLHFNEFSQNESKEPDPCLKSNKQKVLADSSLEGQKKTTEPLDQQAGSLNNESGLVSCYFGQLLSKLDRIKTDYTLSIANRLYGEQEFPICQEYLDGVIQFYHTTIESVDFQKNPEKSRQEINFWVECQSQGKIKELFSKDAINAETVLVLVNAVYFKAKWETYFDHENTVDAPFCLNANENKSVKMMTQKGLYRIGFIEEVKAQILEMRYTKGKLSMFVLLPSHSKDNLKGLEELERKITYEKMVAWSSSENMSEESVVLSFPRFTLEDSYDLNSILQDMGITDIFDETRADLTGISPSPNLYLSKIIHKTFVEVDENGTQAAAATGAVVSERSLRSWVEFNANHPFLFFIRHNKTQTILFYGRVCSP

SEQ ID NO: 37865 - protein, 404 aa, Homo sapiens
MAAVPELLQQQEEDRSKLRSVSVDLNVDPSLQIDIPDALSERDKVKFTVHTKTTLPTFQSPEFSVTRQHEDFVWLHDTLIETTDYAGLIIPPAPTKPDFDGPREKMQKLGEGEGSMTKEEFAKMKQELEAEYLAVFKKTVSSHEVFLQRLSSHPVLSKDRNFHVFLEYDQDLSVRRKNTKEMFGGFFKSVVKSADEVLFTGVKEVDDFFEQEKNFLINYYNRIKDSCVKADKMTRSHKNVADDYIHTAACLHSLALEEPTVIKKYLLKVAELFEKLRKVEGRVSSDEDLKLTELLRYYMLNIEAAKDLLYRRTKALIDYENSNKALDKARLKSKDVKLAEAHQQECCQKFEQLSESAKEELINFKRKRVAAFRKNLIEMSELEIKHARNNVSLLQSCIDLFKNN

SEQ ID NO: 37866 - protein, 126 aa, Homo sapiens
MAAVPELLQQQEEDRSKVRSSQPQTPGRAALRAPGSLHSFPCASIGRGCSPPSPAREAPVRPGRPLSLVFTEGCPGESLWMSRILLGQNQRRGTLAPAQAPVPSGLGEMISGDPGMFFLKLSSASW

SEQ ID NO: 37867 - protein, 258 aa, Homo sapiens
MSAYPKSYNPFDDDGEDEGARPAPWRDARDLPDGPDAPADRQQYLRQEVLRRAEATAASTSRSLALMYESEKVGVASSEELARQRGVLERTEKMVDKMDQDLKISQKHINSIKSVFGGLVNYFKSKPVETPPEQNGTLTSQPNNRLKEAISTSKEQEAKYQASHPNLRKLDDTDPVPRGAGSAMSTDAYPKNPHLRAYHQKIDSNLDELSMGLGRLKDIALGMQTEIEEQDDILDRLTTKVDKLDVNIKSTERKVRQL

SEQ ID NO: 37868 - protein, 595 aa, Homo sapiens
MATKARVMYDFAAEPGNNELTVNEGEIITITNPDVGGGWLEGRNIKGERGLVPTDYVEILPSDGKDQFSCGNSVADQAFLDSLSASTAQASSSAASNNHQVGSGNDPWSAWSASKSGNWESSEGWGAQPEGAGAQRNTNTPNNWDTAFGHPQAYQGPATGDDDDWDEDWDGPKSSSYFKDSESADAGGAQRGNSRASSSSMKIPLNKFPGFAKPGTEQYLLAKQLAKPKEKIPIIVGDYGPMWVYPTSTFDCVVADPRKGSKMYGLKSYIEYQLTPTNTNRSVNHRYKHFDWLYERLLVKFGSAIPIPSLPDKQVTGRFEEEFIKMRMERLQAWMTRMCRHPVISESEVFQQFLNFRDEKEWKTGKRKAERDELAGVMIFSTMEPEAPDLDLVEIEQKCEAVGKFTKAMDDGVKELLTVGQEHWKRCTGPLPKEYQKIGKALQSLATVFSSSGYQGETDLNDAITEAGKTYEEIASLVAEQPKKDLHFLMECNHEYKGFLGCFPDIIGTHKGAIEKVKESDKLVATSKITLQDKQNMVKRVSIMSYALQAEMNHFHSNRIYDYNSVIRLYLEQQVQFYETIAEKLRQALSRFPVM

SEQ ID NO: 37869 - protein, 747 aa, Homo sapiens
MADEAALALQPGGSPSAAGADREAASSPAGEPLRKRPRRDGPGLERSPGEPGGAAPEREVPAAARGCPGAAAAALWREAEAEAAAAGGEQEAQATAAAGEGDNGPGLQGPSREPPLADNLYDEDDDDEGEEEEEAAAAAIGYRDNLLFGDEIITNGFHSCESDEEDRASHASSSDWTPRPRIGPYTFVQQHLMIGTDPRTILKDLLPETIPPPELDDMTLWQIVINILSEPPKRKKRKDINTIEDAVKLLQECKKIIVLTGAGVSVSCGIPDFRSRDGIYARLAVDFPDLPDPQAMFDIEYFRKDPRPFFKFAKEIYPGQFQPSLCHKFIALSDKEGKLLRNYTQNIDTLEQVAGIQRIIQCHGSFATASCLICKYKVDCEAVRGDIFNQVVPRCPRCPADEPLAIMKPEIVFFGENLPEQFHRAMKYDKDEVDLLIVIGSSLKVRPVALIPSSIPHEVPQILINREPLPHLHFDVELLGDCDVIINELCHRLGGEYAKLCCNPVKLSEITEKPPRTQKELAYLSELPPTPLHVSEDSSSPERTSPPDSSVIVTLLDQAAKSNDDLDVSESKGCMEEKPQEVQTSRNVESIAEQMENPDLKNVGSSTGEKNERTSVAGTVRKCWPNRVAKEQISRRLDGNQYLFLPPNRYIFHGAEVYSDSEDDVLSSSSCGSNSDSGTCQSPSLEEPMEDESEIEEFYNGLEDEPDVPERAGGAGFGTDGDDQEAINEAISVKQEVTDMNYPSNKS

SEQ ID NO: 37870 - protein, 561 aa, Homo sapiens
MADEAALALQPGGSPSAAGADREAASSPAGEPLRKRPRRDGPGLERSPGEPGGAAPEREVPAAARGCPGAAAAALWREAEAEAAAAGGEQEAQATAAAGEGDNGPGLQGPSREPPLADNLYDEDDDDEGEEEEEAAAAAIGYRDNLLFGDEIITNGFHSCESDEEDRASHASSSDWTPRPRIGPYTFVQQHLMIGTDPRTILKDLLPETIPPPELDDMTLWQIVINILSEPPKRKKRKDINTIEDAVKLLQECKKIIVLTGAGVSVSCGIPDFRSRDGIYARLAVDFPDLPDPQAMFDIEYFRKDPRPFFKFAKEIYPGQFQPSLCHKFIALSDKEGKLLRNYTQNIDTLEQVAGIQRIIQCHGSFATASCLICKYKVDCEAVRGDIFNQVVPRCPRCPADEPLAIMKPEIVFFGENLPEQFHRAMKYDKDEVDLLIVIGSSLKVRPVALIPSNQYLFLPPNRYIFHGAEVYSDSEDDVLSSSSCGSNSDSGTCQSPSLEEPMEDESEIEEFYNGLEDEPDVPERAGGAGFGTDGDDQEAINEAISVKQEVTDMNYPSNKS

SEQ ID NO: 37871 - protein, 522 aa, Homo sapiens
MEPGGARLRLQRTEGLGGERERQPCGDGNTETHRAPDLVQWTRHMEAVKAQLLEQAQGQLRELLDRAMREAIQSYPSQDKPLPPPPPGSLSRTQEPSLGKQKVFIIRKSLLDELMEVQHFRTIYHMFIAGLCVFIISTLAIDFIDEGRLLLEFDLLIFSFGQLPLALVTWVPMFLSTLLAPYQALRLWARGTWTQATGLGCALLAAHAVVLCALPVHVAVEHQLPPASRCVLVFEQVRFLMKSYSFLREAVPGTLRARRGEGIQAPSFSSYLYFLFCPTLIYRETYPRTPYVRWNYVAKNFAQALGCVLYACFILGRLCVPVFANMSREPFSTRALVLSILHATLPGIFMLLLIFFAFLHCWLNAFAEMLRFGDRMFYRDWWNSTSFSNYYRTWNVVVHDWLYSYVYQDGLRLLGARARGVAMLGVFLVSAVAHEYIFCFVLGFFYPVMLILFLVIGGMLNFMMHDQRTGPAWNVLMWTMLFLGQGIQVSLYCQEWYARRHCPLPQATFWGLVTPRSWSCHT

SEQ ID NO: 37872 - protein, 502 aa, Homo sapiens
MEPGGARLRLQRTEGLGGERERQPCGDGNTETHRAPDLVQWTRHMEAVKAQLLEQAQGQLRELLDRAMREAIQSYPSQDKPLPPPPPGSLSRELMEVQHFRTIYHMFIAGLCVFIISTLAIDFIDEGRLLLEFDLLIFSFGQLPLALVTWVPMFLSTLLAPYQALRLWARGTWTQATGLGCALLAAHAVVLCALPVHVAVEHQLPPASRCVLVFEQVRFLMKSYSFLREAVPGTLRARRGEGIQAPSFSSYLYFLFCPTLIYRETYPRTPYVRWNYVAKNFAQALGCVLYACFILGRLCVPVFANMSREPFSTRALVLSILHATLPGIFMLLLIFFAFLHCWLNAFAEMLRFGDRMFYRDWWNSTSFSNYYRTWNVVVHDWLYSYVYQDGLRLLGARARGVAMLGVFLVSAVAHEYIFCFVLGFFYPVMLILFLVIGGMLNFMMHDQRTGPAWNVLMWTMLFLGQGIQVSLYCQEWYARRHCPLPQATFWGLVTPRSWSCHT

SEQ ID NO: 37873 - protein, 440 aa, Homo sapiens
MEPGGARLRLQRTEGLGGERERQPCGDGNTETHRAPDLVQWTRHMEAVKAQLLEQAQGQLRELLDRAMREAIQSYPSQDKPLPPPPPGSLSRLLLEFDLLIFSFGQLPLALVTWVPMFLSTLLAPYQALRLWARGTWTQATGLGCALLAAHAVVLCALPVHVAVEHQLPPASRCVLVFEGIQAPSFSSYLYFLFCPTLIYRETYPRTPYVRWNYVAKNFAQALGCVLYACFILGRLCVPVFANMSREPFSTRALVLSILHATLPGIFMLLLIFFAFLHCWLNAFAEMLRFGDRMFYRDWWNSTSFSNYYRTWNVVVHDWLYSYVYQDGLRLLGARARGVAMLGVFLVSAVAHEYIFCFVLGFFYPVMLILFLVIGGMLNFMMHDQRTGPAWNVLMWTMLFLGQGIQVSLYCQEWYARRHCPLPQATFWGLVTPRSWSCHT

SEQ ID NO: 37874 - protein, 310 aa, Homo sapiens
MEPGGARLRLQRTEGLGGERERQPCGDGNTETHRAPDLVQWTRHMEAVKAQLLEQAQGQLRELLDRAMREAIQSYPSQDKPLPPPPPGSLSRTQEPSLGKQKVFIIRKSLLDELMEVQHFRTIYHMFIAGLCVFIISTLAIDFIDEGRLLLEFDLLIFSFGQLPLALVTWVPMFLSTLLAPYQALRLWARGTWTQATGLGCALLAAHAVVLCALPVHVAVEHQLPPASRCVLVFEQVRFLMKSYSFLREAVPGTLRARRGEGIQAPSFSSYLYFLFCPTLIYRETYPRPWDVCSMPASSWAASVFLSLPT

SEQ ID NO: 37875 - protein, 451 aa, Homo sapiens
MEDSLKQLSLGRDPEGAGDSQALAELQELALKWFMETQAPFILQNGALPPWFHGFITRKQTEQLLRDKALGSFLIRLSDRATGYILSYRGSDRCRHFVINQLRNRRYIISGDTQSHSTLAELVHHYQEAQLEPFKEMLTAACPRPEDNDLYDAITRGLHQTIVDPENPPATAFLTVVPDKAASPRSSPKPQVSFLHAQKSLDVSPRNLSQEESMEAPIRVSPLPEKSSSLLEESFGGPSDIIYADLRRMNQARLGLGTEGSGRHGPVPAGSQAYSPGREAQRRLSDGEQNRPDGLGPVLSGVSPDQGPTESPTSWGCSDAMGSLGATWRQEFPKLSQEAQPCSQGSSADIYEFIGTEGLLQEARDTPDQEGSTYEQIPACWGGPARAPHPGASPTYSPWVHGYKRISGTPELSEPGNTYEQIPATKSKETGRTHKPDKLRRLFFTYRKHKF

SEQ ID NO: 37876 - protein, 800 aa, Homo sapiens
MGSSKKHRGEKEAAGTTAAAGTGGATEQPPRHREHKKHKHRSGGSGGSGGERRKRSRERGGERGSGRRGAEAEARSSTHGRERSQAEPSERRVKREKRDDGYEAAASSKTSSGDASSLSIEETNKLRAKLGLKPLEVNAIKKEAGTKEEPVTADVINPMALRQREELREKLAAAKEKRLLNQKLGKIKTLGEDDPWLDDTAAWIERSRQLQKEKDLAEKRAKLLEEMDQEFGVSTLVEEEFGQRRQDLYSARDLQGLTVEHAIDSFREGETMILTLKDKGVLQEEEDVLVNVNLVDKERAEKNVELRKKKPDYLPYAEDESVDDLAQQKPRSILSKYDEELEGERPHSFRLEQGGTADGLRERELEEIRAKLRLQAQSLSTVGPRLASEYLTPEEMVTFKKTKRRVKKIRKKEKEVVVRADDLLPLGDQTQDGDFGSRLRGRGRRRVSEVEEEKEPVPQPLPSDDTRVENMDISDEEEGGAPPPGSPQVLEEDEAELELQKQLEKGRRLRQLQQLQQLRDSGEKVVEIVKKLESRQRGWEEDEDPERKGAIVFNATSEFCRTLGEIPTYGLAGNREEQEELMDFERDEERSANGGSESDGEENIGWSTVNLDEEKQQQDFSASSTTILDEEPIVNRGLAAALLLCQNKGLLETTVQKVARVKAPNKSLPSAVYCIEDKMAIDDKYSRREEYRGFTQDFKEKDGYKPDVKIEYVDETGRKLTPKEAFRQLSHRFHGKGSGKMKTERRMKKLDEEALLKKMSSSDTPLGTVALLQEKQKAQKTPYIVLSGSGKSMNANTITK

SEQ ID NO: 37877 - protein, 389 aa, Homo sapiens
MAEPDPSHPLETQAGKVQEAQDSDSDSEGGAAGGEADMDFLRNLFSQTLSLGSQKERLLDELTLEGVARYMQSERCRRVICLVGAGISTSAGIPDFRSPSTGLYDNLEKYHLPYPEAIFEISYFKKHPEPFFALAKELYPGQFKPTICHYFMRLLKDKGLLLRCYTQNIDTLERIAGLEQEDLVEAHGTFYTSHCVSASCRHEYPLSWMKEKIFSEVTPKCEDCQSLVKPDIVFFGESLPARFFSCMQSDFLKVDLLLVMGTSLQVQPFASLISKAPLSTPRLLINKEKAGQSDPFLGMIMGLGGGMDFDSKKAYRDVAWLGECDQGCLALAELLGWKKELEDLVRREHASIDAQSGAGVPNPSTSASPKKSPPPAKDEARTTEREKPQ

SEQ ID NO: 37878 - protein, 352 aa, Homo sapiens
MDFLRNLFSQTLSLGSQKERLLDELTLEGVARYMQSERCRRVICLVGAGISTSAGIPDFRSPSTGLYDNLEKYHLPYPEAIFEISYFKKHPEPFFALAKELYPGQFKPTICHYFMRLLKDKGLLLRCYTQNIDTLERIAGLEQEDLVEAHGTFYTSHCVSASCRHEYPLSWMKEKIFSEVTPKCEDCQSLVKPDIVFFGESLPARFFSCMQSDFLKVDLLLVMGTSLQVQPFASLISKAPLSTPRLLINKEKAGQSDPFLGMIMGLGGGMDFDSKKAYRDVAWLGECDQGCLALAELLGWKKELEDLVRREHASIDAQSGAGVPNPSTSASPKKSPPPAKDEARTTEREKPQ

SEQ ID NO: 37879 - protein, 369 aa, Homo sapiens
MPLAECPSCRCLSSFRSVDFLRNLFSQTLSLGSQKERLLDELTLEGVARYMQSERCRRVICLVGAGISTSAGIPDFRSPSTGLYDNLEKYHLPYPEAIFEISYFKKHPEPFFALAKELYPGQFKPTICHYFMRLLKDKGLLLRCYTQNIDTLERIAGLEQEDLVEAHGTFYTSHCVSASCRHEYPLSWMKEKIFSEVTPKCEDCQSLVKPDIVFFGESLPARFFSCMQSDFLKVDLLLVMGTSLQVQPFASLISKAPLSTPRLLINKEKAGQSDPFLGMIMGLGGGMDFDSKKAYRDVAWLGECDQGCLALAELLGWKKELEDLVRREHASIDAQSGAGVPNPSTSASPKKSPPPAKDEARTTEREKPQ

SEQ ID NO: 37880 - protein, 271 aa, Homo sapiens
MAEPDPSHPLETQAGKVQEAQDSDSDSEGGAAGGEADMDFLRNLFSQTLSLGSQKERLLDELTLEGVARYMQSERCRRVICLVGAGISTSAGIPDFRSPSTGLYDNLEKYHLPYPEAIFEISYFKKHPEPFFALAKELYPGQFKPTICHYFMRLLKDKGLLLRCYTQNIDTLERIAGLEQEDLVEAHGTFYTSHCVSASCRHEYPLSWMKEKIFSEVTPKCEDCQSLVKPDIVFFGESLPARFFSCMQSDFLKVDLLLVMGTSLQGRGLAG

SEQ ID NO: 37881 - protein, 319 aa, Homo sapiens
MAEPDRRRVICLVGAGISTSAGIPDFRSPSTGLYDNLEKYHLPYPEAIFEISYFKKHPEPFFALAKELYPGQFKPTICHYFMRLLKDKGLLLRCYTQNIDTLERIAGLEQEDLVEAHGTFYTSHCVSASCRHEYPLSWMKEKIFSEVTPKCEDCQSLVKPDIVFFGESLPARFFSCMQSDFLKVDLLLVMGTSLQVQPFASLISKAPLSTPRLLINKEKAGQSDPFLGMIMGLGGGMDFDSKKAYRDVAWLGECDQGCLALAELLGWKKELEDLVRREHASIDAQSGAGVPNPSTSASPKKSPPPAKDEARTTEREKPQ

SEQ ID NO: 37882 - protein, 352 aa, Homo sapiens
MSVAGLKKQFHKATQKVSEKVGGAEGTKLDDDFKEMERKVDVTSRAVMEIMTKTIEYLQPNPASRAKLSMINTMSKIRGQEKGPGYPQAEALLAEAMLKFGRELGDDCNFGPALGEVGEAMRELSEVKDSLDIEVKQNFIDPLQNLHDKDLREIQHHLKKLEGRRLDFDYKKKRQGKIPDEELRQALEKFDESKEIAESSMFNLLEMDIEQVSQLSALVQAQLEYHKQAVQILQQVTVRLEERIRQASSQPRREYQPKPRMSLEFPTGDSTQPNGGLSHTGTPKPSGVQMDQPCCRALYDFEPENEGELGFKEGDIITLTNQIDENWYEGMLHGHSGFFPINYVEILVALPH

SEQ ID NO: 37883 - protein, 549 aa, Homo sapiens
MDVVEVAGSWWAQEREDIIMKYEKGHRAGLPEDKGPKPFRSYNNNVDHLGIVHETELPPLTAREAKQIRREISRKSKWVDMLGDWEKYKSSRKLIDRAYKGMPMNIRGPMWSVLLNIEEMKLKNPGRYQIMKEKGKKSSEHIQRIDRDVSGTLRKHIFFRDRYGTKQRELLHILLAYEEYNPEVGYCRDLSHIAALFLLYLPEEDAFWALVQLLASERHSLQGFHSPNGGTVQGLQDQQEHVVATSQPKTMGHQDKKDLCGQCSPLGCLIRILIDGISLGLTLRLWDVYLVEGEQALMPITRIAFKVQQKRLTKTSRCGPWARFCNRFVDTWARDEDTVLKHLRASMKKLTRKKGDLPPPAKPEQGSSASRPVPASRGGKTLCKGDRQAPPGPPARFPRPIWSASPPRAPRSSTPCPGGAVREDTYPVGTQGVPSPALAQGGPQGSWRFLQWNSMPRLPTDLDVEGPWFRHYDFRQSCWVRAISQEDQLAPCWQAEHPAERVRSAFAAPSTDSDQGTPFRARDEQQCAPTSGPCLCGLHLESSQFPPGF

SEQ ID NO: 37884 - protein, 574 aa, Homo sapiens
MALKGRALYDFHSENKEEISIQQDEDLVIFSETSLDGWLQGQNSRGETGLFPASYVEIVRSGISTNHADYSSSPAGSPGAQVSLYNSPSVASPARSGGGSGFLSNQGSFEEDDDDDWDDWDDGCTVVEEPRAGGLGTNGHPPLNLSYPGAYPSQHMAFRPKPPLERQDSLASAKRGSVVGRNLNRFSCFVRSGVEAFILGDVPMMAKIAETYSIEMGPRGPQWKANPHPFACSVEDPTKQTKFKGIKSYISYKLTPTHAASPVYRRYKHFDWLYNRLLHKFTVISVPHLPEKQATGRFEEDFIEKRKRRLILWMDHMTSHPVLSQYEGFQHFLSCLDDKQWKMGKRRAEKDEMVGASFLLTFQIPTEHQDLQDVEDRVDTFKAFSKKMDDSVLQLSTVASELVRKHVGGFRKEFQKLGSAFQAISHSFQMDPPFCSEALNSAISHTGRTYEAIGEMFAEQPKNDLFQMLDTLSLYQGLLSNFPDIIHLQKGAFAKVKESQRMSDEGRMVQDEADGIRRRCRVVGFALQAEMNHFHQRRELDFKHMMQNYLRQQILFYQRVGQQLEKTLRMYDNL

SEQ ID NO: 37885 - protein, 196 aa, Homo sapiens
MNQADPRLRAVCLWTLTSAAMSRGDNCTDLLALGIPSITQAWGLWVLLGAVTLLFLISLAAHLSQWTRGRSRSHPGQGRSGESVEEVPLYGNLHYLQTGRLSQDPEPDQQDPTLGGPARAAEEVMCYTSLQLRPPQGRIPGPGTPVKYSEVVLDSEPKSQASGPEPELYASVCAQTRRARASFPDQAYANSQPAAS

SEQ ID NO: 37886 - protein, 440 aa, Homo sapiens; identical to SEQ ID NO: 267

SEQ ID NO: 37887 - protein, 672 aa, Homo sapiens
MADGSLTGGGLEAAAMAPERMGWAVEQELASLEKGLFQDEDSCSDCSYRDKPGSSLQSFMPEGKTFFPEIFQTNQLLFYERFRAYQDYILADCKASEVQEFTAEFLEKVLEPSGWRAVWHTNVFKVLVEITDVDFAALKAVVRLAEPYLCDSQVSTFTMECMKELLDLKEHRLPLQELWVVFDDSGVFDQTALAIEHVRFFYQNIWRSWDEEEEDEYDYFVRCVEPRLRLHYDILEDRVPSGLIVDYHNLLSQCEESYRKFLNLRSSLSNCNSDSEQENISMVEGLKLYSEMEQLKQKLKLIENPLLRYVFGYQKNSNIQAKGVRSSGQKITHVVSSTMMAGLLRSLLTDRLCQEPGEEEREIQFHSDPLSAINACFEGDTVIVCPGHYVVHGTFSIADSIELEGYGLPDDIVIEKRGKGDTFVDCTGADIKISGIKFVQHDAVEGILIVHRGKTTLENCVLQCETTGVTVRTSAEFLMKNSDLYGAKGAGIEIYPGSQCTLSDNGIHHCKEGILIKDFLDEHYDIPKISMVNNIIHNNEGYGVVLVKPTIFSDLQENAEDGTEENKALKIQTSGEPDVAERVDLEELIECATGKMELCARTDPSEQVEGNCEIVNELIAASTQKGQIKKKRLSELGITQADDNLMSQEMFVGIVGNQFKWNGKGSFGTFLF

SEQ ID NO: 37888 - protein, 823 aa, Homo sapiens
MDRDLEQALDRAENIIEIAQQRPPRRRYSPRAGKTLQEKLYDIYVEECGKEPEDPQELRSNVNLLEKLVRRESLPCLLVNLYPGNQGYSVMLQREDGSFAETIRLPYEERALLDYLDAEELPPALGDVLDKASVNIFHSGCVIVEVRDYRQSSNMQPPGYQSRHILLRPTMQTLAHDVKMMTRDGQKWSQEDKLQLESQLILATAEPLCLDPSVAVACTANRLLYNKQKMNTDPMKRCLQRYSWPSVKPQQEQSDCPPPPELRVSTSGQKEERKVGQPCELNIAKAGSCVDTWKGRPCDLAVPSEVDVEKLAKGYQSVTAADPQLPVWPAQEVEDPFGFALEAGCQAWDTKPSIMQSFNDPLLCGKIRPRKKARQKSQKSPWQPFPDDHSACLRPGSETDAGRAVSQAQESVQSKVKGPGKMSHSSSGPASVSQLSSWKTPEQPDPVWVQSSVSGKGEKHPPPRTQLPSSSGKISSGNSFPPQQAGSPLKPAAPAAAASAAPSHSQKPSVPLIQASRPCPAAQPPTKFIKIAPAIQLRTGSTGLKAINVEGPVQGAQALGSSFKPVQAPGSGAPAPAGISGSDLQSSGGPLPDARPGAVQASSPAPLQFFLNTPEGLRPLTLLQVPQGSAVLTGPQQQSHQLVSLQQLQQPTAAHPPQPGPQGSALGLSTQGQAFPAQQLLKVNPTRARSGLQPQPQPAVLSLLGSAQVPQQGVQLPSVLRQQQPQPQPPKLQLQPQWQPKPRQEQPQSQQQQPQHIQLQTQQLRVLQQPQHIQLQTQQLRVLQQPVFLATGAVQIVQPHPGVQVGSQLVDQRKEGKPTPPAP

SEQ ID NO: 37889 - protein, 79 aa, Homo sapiens
MKSLTWILGLWALAACFTPGESQRGPRGPYPPGPLAPPQPFGPGFVPPPPPPPYGPGRIPPPPPAPYGPGIFPPPPPQP

SEQ ID NO: 37890 - protein, 284 aa, Homo sapiens
MSMLPSFGFTQEQVACVCEVLQQGGNLERLGRFLWSLPACDHLHKNESVLKAKAVVAFHRGNFRELYKILESHQFSPHNHPKLQQLWLKAHYVEAEKLRGRPLGAVGKYRVRRKFPLPRTIWDGEETSYCFKEKSRGVLREWYAHNPYPSPREKRELAEATGLTTTQVSNWFKNRRQRDRAAEAKERENTENNNSSSNKQNQLSPLEGGKPLMSSSEEEFSPPQSPDQNSVLLLQGNMGHARSSNYSLPGLTASQPSHGLQTHQHQLQDSLLGPLTSSLVDLGS

SEQ ID NO: 37891 - protein, 83 aa, Homo sapiens
MRLSVCLLMVSLALCCYQAHALVCPAVASEITVFLFLSDAAVNLQVAKLNPPPEALAAKLEVKHCTDQISFKKRLSLKKSWWK

SEQ ID NO: 37892 - protein, 95 aa, Homo sapiens
MKGSRALLLVALTLFCICRMATGEDNDEFFMDFLQTLLVGTPEELYEGTLGKYNVNEDAKAAMTELKSCIDGLQPMHKAELVKLLVQVLGSQDGA

SEQ ID NO: 37893 - protein, 300 aa, Homo sapiens
MSPSMLTGNSPRGCRLPSISSTTCGRQLEKVPEKRDSGMTEVERTYSANCSDFLESKGCFANTTPSGKSVSSSSSVETGPSVSEPPGLPRVSAYVDTTADLDRKLSFSHSDHSSEMSLPEVQKDKYPEEFSLLKLQTKDGHRPEWTFYPRFSSNIHTYHVGKQCFFNGVFLGNKRSLSERTVDKCFGRKKYDIDPRNGIPKLTPGDNPYMYPEQSKGFHKAGSMLPPVNFSIVPYEKKFDTFIPLEPLPQIPNLPFWVKEKANSLKNEIQEVEELDNWQPAVPLMHMLHLSGALDFPRQS

SEQ ID NO: 37894 - protein, 185 aa, Homo sapiens
MSLPEVQKDKYPEEFSLLKLQTKDGHRPEWTFYPRFSSNIHTYHVGKQCFFNGVFLGNKRSLSERTVDKCFGRKKYDIDPRNGIPKLTPGDNPYMYPEQSKGFHKAGSMLPPVNFSIVPYEKKFDTFIPLEPLPQIPNLPFWVKEKANSLKNEIQEVEELDNWQPAVPLMHMLHLSGALDFPRQS

SEQ ID NO: 37895 - protein, 233 aa, Homo sapiens
MEGGAYGAGKAGGAFDPYTLVRQPHTILRVVSWLFSIVVFGSIVNEGYLNSASEGEEFCIYNRNPNACSYGVAVGVLAFLTCLLYLALDVYFPQISSVKDRKKAVLSDIGVSAFWAFLWFVGFCYLANQWQVSKPKDNPLNEGTDAARAAIAFSFFSIFTWAGQAVLAFQRYQIGADSALFSQDYMDPSQDSSMPYAPYVEPTGPDPAGMGGTYQQPANTFDTEPQGYQSQGY

SEQ ID NO: 37896 - protein, 191 aa, Homo sapiens
MEGGAYGAGKAGGAFDPYTLVRQPHTILRVVSWLFSIVVFGSIVNEGYLNSASEGEEFCIYNRNPNACSYGVAVGVLAFLTCLLYLALDVYFPQISSVKDRKKAVLSDIGVSAFWAFLWFVGFCYLANQWQVSKPKDNPLNEGTDAARAAIAFSFFSIFTWSLTAALAVRRFKDLSFQEEYSTLFPASAQP

SEQ ID NO: 37897 - protein, 192 aa, Homo sapiens
MLTLEFGILEFDPSWIGSWTQRSWVSWRSRPGCELFSIVVFGSIVNEGYLNSASEGEEFCIYNRNPNACSYGVAVGVLAFLTCLLYLALDVYFPQISSVKDRKKAVLSDIGVSAFWAFLWFVGFCYLANQWQVSKPKDNPLNEGTDAARAAIAFSFFSIFTWSLTAALAVRRFKDLSFQEEYSTLFPASAQP

SEQ ID NO: 37898 - protein, 365 aa, Homo sapiens
MDIIETAKLEEHLENQPSDPTNTYARPAEPVEEENKNGNGKPKSLSSGLRKGTKKYPDYIQIAMPTESRNKFPLEWWKTGIAFIYAVFNLVLTTVMITVVHERVPPKELSPPLPDKFFDYIDRVKWAFSVSEINGIILVGLWITQWLFLRYKSIVGRRFCFIIGTLYLYRCITMYVTTLPVPGMHFQCAPKLNGDSQAKVQRILRLISGGGLSITGSHILCGDFLFSGHTVTLTLTYLFIKEYSPRHFWWYHLICWLLSAAGIICILVAHEHYTIDVIIAYYITTRLFWWYHSMANEKNLKVSSQTNFLSRAWWFPIFYFFEKNVQGSIPCCFSWPLSWPPGCFKSSCKKYSRVQKIGEDNEKST

SEQ ID NO: 37899 - protein, 95 aa, Homo sapiens
MANEKPTEEVKTENNNHINLKVAGQDGSVVQFKIKRQTPLSKLMKAYCEPRGLSMKQIRFRFGGQPISGTDKPAQLEMEDEDTIDVFQQPTGGVY

SEQ ID NO: 37900 - protein, 248 aa, Homo sapiens
MDQPAVATASTSIREDLVGGESFITASKPAQKTSSFEREGWWRIALTDTPIPGTYHLKTFIEESLLNPVIATYNFKNEGRKKPPLVQRNNPVLNDLPQYMPPDFLDLLKKQVATYSFKDKPRPSPSTLVDKDQSLQLSPGQYNVLPAPVPKYASRSCVFRSTVQRFPTTYFIPHEGPGPGHYNVKMPPTSSVTSCFQSRVPRFLPSCSKTPGPGAYTTLRQFPKQSPTIAKMGQEHSLFFNNNNWLLK

SEQ ID NO: 37901 - protein, 177 aa, Homo sapiens
MDQPAVATASTSIREDLVGGESFITASKPAQKTSSFEREGWWRIALTDTPIPGTYHLKTFIEESLLNPVIATYNFKNEGRKKPPLVQRNNPVLNDLPQYMPPDFLDLLKKQVATYSFKDKPRPSPSTLVDKDQSLQLSPGQYNVLPAPVPKYASRSCVFRSTVQRFPTTYFIPVSIM

SEQ ID NO: 37902 - protein, 535 aa, Homo sapiens
MATCIWLRSCGARRLGSTFPGCRLRPRAGGLVPASGPAPGPAQLRCYAGRLAGLSAALLRTDSFVGGRWLPAAATFPVQDPASGAALGMVADCGVREARAAVRAAYEAFCRWREVSAKERSSLLRKWYNLMIQNKDDLARIITAESGKPLKEAHGEILYSAFFLEWFSEEARRVYGDIIHTPAKDRRALVLKQPIGVAAVITPWNFPSAMITRKVGAALAAGCTVVVKPAEDTPFSALALAELASQAGIPSGVYNVIPCSRKNAKEVGEAICTDPLVSKISFTGSTTTGKILLHHAANSVKRVSMELGGLAPFIVFDSANVDQAVAGAMASKFRNTGQTCVCSNQFLVQRGIHDAFVKAFAEAMKKNLRVGNGFEEGTTQGPLINEKAVEKVEKQVNDAVSKGATVVTGGKRHQLGKNFFEPTLLCNVTQDMLCTHEETFGPLAPVIKFDTEEEAIAIANAADVGLAGYFYSQDPAQIWRVAEQLEVGMVGVNEGLISSVECPFGGVKQSGLGREGSKYGIDEYLELKYVCYGGL

SEQ ID NO: 37903 - protein, 548 aa, Homo sapiens
MATCIWLRSCGARRLGSTFPGCRLRPRAGGLVPASGPAPGPAQLRCYAGRLAGLSAALLRTDSFVGGRWLPAAATFPVQDPASGAALGMVADCGVREARAAVRAAYEAFCRWREVSAKERSSLLRKWYNLMIQNKDDLARIITAESGKPLKEAHGEILYSAFFLEWFSEEARRVYGDIIHTPAKDRRALVLKQPIGVAAVITPWNFPSAMITRKVGAALAAGCTVVVKPAEDTPFSALALAEVNQGFLLDLDPLLLASQAGIPSGVYNVIPCSRKNAKEVGEAICTDPLVSKISFTGSTTTGKILLHHAANSVKRVSMELGGLAPFIVFDSANVDQAVAGAMASKFRNTGQTCVCSNQFLVQRGIHDAFVKAFAEAMKKNLRVGNGFEEGTTQGPLINEKAVEKVEKQVNDAVSKGATVVTGGKRHQLGKNFFEPTLLCNVTQDMLCTHEETFGPLAPVIKFDTEEEAIAIANAADVGLAGYFYSQDPAQIWRVAEQLEVGMVGVNEGLISSVECPFGGVKQSGLGREGSKYGIDEYLELKYVCYGGL

SEQ ID NO: 37904 - protein, 753 aa, Homo sapiens
MMEERAAAAVAAAASSCRPLGSGAGPGPTGAAPVSAPAPGPGPAGKGGGGGGSPGPTAGPEPLSLPGILHFIQHEWARFEAEKARWEAERAELQAQVAFLQGERKGQENLKTDLVRRIKMLEYALKQERAKYHKLKFGTDLNQGEKKADVSEQVSNGPVESVTLENSPLVWKEGRQLLRQYLEEVGYTDTILDMRSKRVRSLLGRSLELNGAVEPSEGAPRAPPGPAGLSGGESLLVKQIEEQIKRNAAGKDGKERLGGSVLGQIPFLQNCEDEDSDEDDELDSVQHKKQRVKLPSKALVPEMEDEDEEDDSEDAINEFDFLGSGEDGEGAPDPRRCTVDGSPHELESRRVKLQGILADLRDVDGLPPKVTGPPPGTPQPRPHEDVFIMDTIGGGEVSLGDLADLTVTNDNDLSCDLSDSKDAFKKTWNPKFTLRSHYDGIRSLAFHHSQSALLTASEDGTLKLWNLQKAVTAKKNAALDVEPIHAFRAHRGPVLAVAMGSNSEYCYSGGADACIHSWKIPDLSMDPYDGYDPSVLSHVLEGHGDAVWGLAFSPTSQRLASCSADGTVRIWDPSSSSPACLCTFPTASEHGVPTSVAFTSTEPAHIVASFRSGDTVLYDMEVGSALLTLESRGSSGPTQINQVVSHPNQPLTITAHDDRGIRFLDNRTGKPVHSMVAHLDAVTCLAVDPNGAFLMSGSHDCSLRLWSLDNKTCVQEITAHRKKHEEAIHAVACHPSKALIASAGADALAKVFV

SEQ ID NO: 37905 - protein, 257 aa, Homo sapiens
MLEYALKQERAKYHKLKFGTDLNQGEKKADVSEQVSNGPVESVTLENSPLVWKEGRQLLRQYLEEVGYTDTILDMRSKRVRSLLGRSLELNGAVEPSEGAPRAPPGPAGLSGGESLLVKQIEEQIKRNAAGKDGKERLGGSVLGQIPFLQNCEDEDSDEDDELDSVQHKKQRVKLPSKALVPEMEDEDEEDDSEDAINEFDFLGSGEDGEGAPDPRRCTVDGSPHELGPELHSPTEWQGALSVGKASPMPDWVGTAG

SEQ ID NO: 37906 - protein, 760 aa, Homo sapiens
MMEERAAAAVAAAASSCRPLGSGAGPGPTGAAPVSAPAPGPGPAGKGGGGGGSPGPTAGPEPLSLPGILHFIQHEWARFEAEKARWEAERAELQAQVAFLQGERKGQENLKTDLVRRIKMLEYALKQERAKYHKLKFGTDLNQGEKKADVSEQVSNGPVESVTLENSPLVWKEGRQLLRQYLEEVGYTDTILDMRSKRVRSLLGRSLELNGAVEPSEGAPRAPPGPAGLSGGESLLVKQIEEQIKRNAAGKDGKERLGGSVLGQIPFLQNCEDEDSDEDDELDSVQHKKQRVKLPSKALVPEMEDEDEEDDSEDAINEFDFLGSGEDGEGAPDPRRCTVDGSPHELESRRVKLQGILADLRDVDGLPPKVTGPPPGTPQPRPHEGSFGFSSDVFIMDTIGGGEVSLGDLADLTVTNDNDLSCDLSDSKDAFKKTWNPKFTLRSHYDGIRSLAFHHSQSALLTASEDGTLKLWNLQKAVTAKKNAALDVEPIHAFRAHRGPVLAVAMGSNSEYCYSGGADACIHSWKIPDLSMDPYDGYDPSVLSHVLEGHGDAVWGLAFSPTSQRLASCSADGTVRIWDPSSSSPACLCTFPTASEHGVPTSVAFTSTEPAHIVASFRSGDTVLYDMEVGSALLTLESRGSSGPTQINQVVSHPNQPLTITAHDDRGIRFLDNRTGKPVHSMVAHLDAVTCLAVDPNGAFLMSGSHDCSLRLWSLDNKTCVQEITAHRKKHEEAIHAVACHPSKALIASAGADALAKVFV

SEQ ID NO: 37907 - protein, 269 aa, Homo sapiens
MGQNDLMGTAEDFADQFLRVTKQYLPHVARLCLISTFLEDGIRMWFQWSEQRDYIDTTWNCGYLLASSFVFLNLLGQLTGCVLVLSRNFVQYACFGLFGIIALQTIAYSILWDLKFLMRNLALGGGLLLLLAESRSEGKSMFAGVPTMRESSPKQYMQLGGRVLLVLMFMTLLHFDASFFSIVQNIVGTALMILVAIGFKTKLAALTLVVWLFAINVYFNAFWTIPVYKPMHDFLKYDFFQTMSVIGGLLLVVALGPGGVSMDEKKKEW

SEQ ID NO: 37908 - protein, 159 aa, Homo sapiens
MGQNDLMGTAEDFADQFLRVTKQYLPHVARLCLISTFLEDGIRMWFQWSEQRDYIDTTWNCGYLLASSFVFLNLLGQLTGCVLVLSRNFVQYACFGLFGIIALQTIAYSILWDLKFLMRNLALGGGLLLLLAESRSEGKSMFAGVPTMRESSPKQYLPG

SEQ ID NO: 37909 - protein, 128 aa, Homo sapiens
MGQNDLMGTAEDFADQFLRVTKQYLPHVARLCLISTFLEDGIRMWFQWSEQRDYIDTTWNCGYLLASSFVFLNLLGQLTGCVLVLSRNFVQYACFGLFGIIALQTIAYSILWDLKFLMRLSRTSWAQL

SEQ ID NO: 37910 - protein, 851 aa, Homo sapiens
MAQWEMLQNLDSPFQDQLHQLYSHSLLPVDIRQYLAVWIEDQNWQEAALGSDDSKATMLFFHFLDQLNYECGRCSQDPESLLLQHNLRKFCRDIQPFSQDPTQLAEMIFNLLLEEKRILIQAQRAQLEQGEPVLETPVESQQHEIESRILDLRAMMEKLVKSISQLKDQQDVFCFRYKIQAKGKTPSLDPHQTKEQKILQETLNELDKRRKEVLDASKALLGRLTTLIELLLPKLEEWKAQQQKACIRAPIDHGLEQLETWFTAGAKLLFHLRQLLKELKGLSCLVSYQDDPLTKGVDLRNAQVTELLQRLLHRAFVVETQPCMPQTPHRPLILKTGSKFTVRTRLLVRLQEGNESLTVEVSIDRNPPQLQGFRKFNILTSNQKTLTPEKGQSQGLIWDFGYLTLVEQRSGGSGKGSNKGPLGVTEELHIISFTVKYTYQGLKQELKTDTLPVVIISNMNQLSIAWASVLWFNLLSPNLQNQQFFSNPPKAPWSLLGPALSWQFSSYVGRGLNSDQLSMLRNKLFGQNCRTEDPLLSWADFTKRESPPGKLPFWTWLDKILELVHDHLKDLWNDGRIMGFVSRSQERRLLKKTMSGTFLLRFSESSEGGITCSWVEHQDDDKVLIYSVQPYTKEVLQSLPLTEIIRHYQLLTEENIPENPLRFLYPRIPRDEAFGCYYQEKVNLQERRKYLKHRLIVVSNRQVDELQQPLELKPEPELESLELELGLVPEPELSLDLEPLLKAGLDLGPELESVLESTLEPVIEPTLCMVSQTVPEPDQGPVSQPVPEPDLPCDLRHLNTEPMEIFRNCVKIEEIMPNGDPLLAGQNTVDEVYVSRPSHFYTDGPLMPSDF

SEQ ID NO: 37911 - protein, 847 aa, Homo sapiens
MAQWEMLQNLDSPFQDQLHQLYSHSLLPVDIRQYLAVWIEDQNWQEAALGSDDSKATMLFFHFLDQLNYECGRCSQDPESLLLQHNLRKFCRDIQDPTQLAEMIFNLLLEEKRILIQAQRAQLEQGEPVLETPVESQQHEIESRILDLRAMMEKLVKSISQLKDQQDVFCFRYKIQAKGKTPSLDPHQTKEQKILQETLNELDKRRKEVLDASKALLGRLTTLIELLLPKLEEWKAQQQKACIRAPIDHGLEQLETWFTAGAKLLFHLRQLLKELKGLSCLVSYQDDPLTKGVDLRNAQVTELLQRLLHRAFVVETQPCMPQTPHRPLILKTGSKFTVRTRLLVRLQEGNESLTVEVSIDRNPPQLQGFRKFNILTSNQKTLTPEKGQSQGLIWDFGYLTLVEQRSGGSGKGSNKGPLGVTEELHIISFTVKYTYQGLKQELKTDTLPVVIISNMNQLSIAWASVLWFNLLSPNLQNQQFFSNPPKAPWSLLGPALSWQFSSYVGRGLNSDQLSMLRNKLFGQNCRTEDPLLSWADFTKRESPPGKLPFWTWLDKILELVHDHLKDLWNDGRIMGFVSRSQERRLLKKTMSGTFLLRFSESSEGGITCSWVEHQDDDKVLIYSVQPYTKEVLQSLPLTEIIRHYQLLTEENIPENPLRFLYPRIPRDEAFGCYYQEKVNLQERRKYLKHRLIVVSNRQVDELQQPLELKPEPELESLELELGLVPEPELSLDLEPLLKAGLDLGPELESVLESTLEPVIEPTLCMVSQTVPEPDQGPVSQPVPEPDLPCDLRHLNTEPMEIFRNCVKIEEIMPNGDPLLAGQNTVDEVYVSRPSHFYTDGPLMPSDF

SEQ ID NO: 37912 - protein, 1726 aa, Homo sapiens
MSDFVESEAEESEEEYNDEGEVVPRVTKKFVEEEDDDEEEEEENLDDQDEQGNLKGFINDDDDEDEGEEDEGSDSGDSEDDVGHKKRKRTSFDDRLEDDDFDLIEENLGVKVKRGQKYRRVKKMSDDEDDDEEEYGKEEHEKEAIAEEIFQDGEGEEGQEAMEAPMAPPEEEEEDDEESDIDDFIVDDDGQPLKKPKWRKKLPGYTDAALQEAQEIFGVDFDYDEFEKYNEYDEELEEEYEYEDDEAEGEIRVRPKKTTKKRVSRRSIFEMYEPSELESSHLTDQDNEIRATDLPERFQLRSIPVKGAEDDELEEEADWIYRNAFATPTISLQESCDYLDRGQPASSFSRKGPSTIQKIKEALGFMRNQHFEVPFIAFYRKEYVEPELHINDLWRVWQWDEKWTQLRIRKENLTRLFEKMQAYQYEQISADPDKPLADGIRALDTTDMERLKDVQSMDELKDVYNHFLLYYGRDIPKMQNAAKASRKKLKRVREEGDEEGEGDEAEDEEQRGPELKQASRRDMYTICQSAGLDGLAKKFGLTPEQFGENLRDSYQRHETEQFPAEPLELAKDYVCSQFPTPEAVLEGARYMVALQIAREPLVRQVLRQTFQERAKLNITPTKKGRKDVDEAHYAYSFKYLKNKPVKELRDDQFLKICLAEDEGLLTTDISIDLKGVEGYGNDQTYFEEIKQFYYRDEFSHQVQEWNRQRTMAIERALQQFLYVQMAKELKNKLLAEAKEYVIKACSRKLYNWLRVAPYRPDQQVEEDDDFMDENQGKGIRVLGIAFSSARDHPVFCALVNGEGEVTDFLRLPHFTKRRTAWREEEREKKAQDIETLKKFLLNKKPHVVTVAGENRDAQMLIEDVKRIVHELDQGQQLSSIGVELVDNELAILYMNSKKSEAEFRDYPPVLRQAVSLARRIQDPLIEFAQVCSSDEDILCLKFHPLQEHVVKEELLNALYCEFINRVNEVGVDVNRAIAHPYSQALIQYVCGLGPRKGTHLLKILKQNNTRLESRTQLVTMCHMGPKVFMNCAGFLKIDTASLGDSTDSYIEVLDGSRVHPETYEWARKMAVDALEYDESAEDANPAGALEEILENPERLKDLDLDAFAEELERQGYGDKHITLYDIRAELSCRYKDLRTAYRSPNTEEIFNMLTKETPETFYIGKLIICNVTGIAHRRPQGESYDQAIRNDETGLWQCPFCQQDNFPELSEVWNHFDSGSCPGQAIGVKTRLDNGVTGFIPTKFLSDKVVKRPEERVKVGMTVHCRIMKIDIEKFSADLTCRTSDLMDRNNEWKLPKDTYYDFDAEAADHKQEEDMKRKQQRTTYIKRVIAHPSFHNINFKQAEKMMETMDQGDVIIRPSSKGENHLTVTWKVSDGIYQHVDVREEGKENAFSLGATLWINSEEFEDLDEIVARYVQPMASFARDLLNHKYYQDCSGGDRKKLEELLIKTKKEKPTFIPYFICACKELPGKFLLGYQPRGKPRIEYVTVTPEGFRYRGQIFPTVNGLFRWFKDHYQDPVPGITPSSSSRTRTPASINATPANINLADLTRAVNALPQNMTSQMFSAIAAVTGQGQNPNATPAQWASSQYGYGGSGGGSSAYHVFPTPAQQPVATPLMTPSYSYTTPSQPITTPQYHQLQASTTPQSAQAQPQPSSSSRQRQQQPKSNSHAAIDWGKMAEQWLQEKEAERRKQKQRLTPRPSPSPMIESTPMSIAGDATPLLDEMDR

SEQ ID NO: 37913 - protein, 545 aa, Homo sapiens
MPSRGTRPEDSSVLIPTDNSTPHKEDLSSKVWNHFDSGSCPGQAIGVKTRLDNGVTGFIPTKFLSDKVVKRPEERVKVGMTVHCRIMKIDIEKFSADLTCRTSDLMDRNNEWKLPKDTYYDFDAEAADHKQEEDMKRKQQRTTYIKRVIAHPSFHNINFKQAEKMMETMDQGDVIIRPSSKGENHLTVTWKVSDGIYQHVDVREEGKENAFSLGATLWINSEEFEDLDEIVARYVQPMASFARDLLNHKYYQDCSGGDRKKLEELLIKTKKEKPTFIPYFICACKELPGKFLLGYQPRGKPRIEYVTVTPEGFRYRGQIFPTVNGLFRWFKDHYQDPVPGITPSSSSRTRTPASINATPANINLADLTRAVNALPQNMTSQMFSAIAAVTGQGQNPNATPAQWASSQYGYGGSGGGSSAYHVFPTPAQQPVATPLMTPSYSYTTPSQPITTPQYHQLQASTTPQSAQAQPQPSSSSRQRQQQPKSNSHAAIDWGKMAEQWLQEKEAERRKQKQRLTPRPSPSPMIESTPMSIAGDATPLLDEMDR

SEQ ID NO: 37914 - protein, 726 aa, Homo sapiens
MSDFVESEAEESEEEYNDEGEVVPRVTKKFVEEEDDDEEEEEENLDDQDEQGNLKGFINDDDDEDEGEEDEGSDSGDSEDDVGHKKRKRTSFDDRLEDDDFDLIEENLGVKVKRGQKYRRVKKMSDDEDDDEEEYGKEEHEKEAIAEEIFQDGEGEEGQEAMEAPMAPPEEEEEDDEESDIDDFIVDDDGQPLKKPKWRKKLPGYTDAALQEAQEIFGVDFDYDEFEKYNEYDEELEEEYEYEDDEAEGEIRVRPKKTTKKRVSRRSIFEMYEPSELESSHLTDQDNEIRATDLPERFQLRSIPVKGAEDDELEEEADWIYRNAFATPTISLQESCDYLDRGQPASSFSRKGPSTIQKIKEALGFMRNQHFEVPFIAFYRKEYVEPELHINDLWRVWQWDEKWTQLRIRKENLTRLFEKMQAYQYEQISADPDKPLADGIRALDTTDMERLKDVQSMDELKDVYNHFLLYYGRDIPKMQNAAKASRKKLKRVREEGDEEGEGDEAEDEEQRGPELKQASRRDMYTICQSAGLDGLAKKFGLTPEQFGENLRDSYQRHETEQFPAEPLELAKDYVCSQFPTPEAVLEGARYMVALQIAREPLVRQVLRQTFQERAKLMTPSYSYTTPSQPITTPQYHQLQASTTPQSAQAQPQPSSSSRQRQQQPKSNSHAAIDWGKMAEQWLQEKEAERRKQKQRLTPRPSPSPMIESTPMSIAGDATPLLDEMDR

SEQ ID NO: 37915 - protein, 572 aa, Homo sapiens
MTSRDQPRPKGPPKSTSPCPGISNSESSPTLNYQGILNRLKQFPRFSPHFAAELESIYYSLHKIQQDVAEHHKQIGNVLQIVESCSQLQGFQSEEVSPAEPASPGTPQQVKDKTLQESSFEDIMATRSSDWLRRPLGEDNQPETQLFWDKEPWFWHDTLTEQLWRIFAGVHDEKAKPRDRQQAPGLGQESKAPGSCDPGTDPCPEDASTPRPPEASSSPPEGSQDRNTSWGVVQEPPGRASRFLQSISWDPEDFEDAWKRPDALPGQSKRLAVPCKLEKMRILAHGELVLATAISSFTRHVFTCGRRGIKVWSLTGQVAEDRFPESHLPIQTPGAFLRTCLLSSNSRSLLTGGYNLASVSVWDLAAPSLHVKEQLPCAGLNCQALDANLDANLAFASFTSGVVRIWDLRDQSVVRDLKGYPDGVKSIVVKGYNIWTGGPDACLRCWDQRTIMKPLEYQFKSQIMSLSHSPQEDWVLLGMANGQQWLQSTSGSQRHMVGQKDSVILSVKFSPFGQWWASVGMDDFLGVYSMPAGTKVFEVPEMSPVTCCDVSSNNRLVVTGSGEHASVYQITY

SEQ ID NO: 37916 - protein, 449 aa, Homo sapiens
MATRSSDWLRRPLGEDNQPETQLFWDKEPWFWHDTLTEQLWRIFAGVHDEKAKPRDRQQAPGLGQESKAPGSCDPGTDPCPEDASTPRPPEASSSPPEGSQDRNTSWGVVQEPPGRASRFLQSISWDPEDFEDAWKRPDALPGQSKRLAVPCKLEKMRILAHGELVLATAISSFTRHVFTCGRRGIKVWSLTGQVAEDRFPESHLPIQTPGAFLRTCLLSSNSRSLLTGGYNLASVSVWDLAAPSLHVKEQLPCAGLNCQALDANLDANLAFASFTSGVVRIWDLRDQSVVRDLKGYPDGVKSIVVKGYNIWTGGPDACLRCWDQRTIMKPLEYQFKSQIMSLSHSPQEDWVLLGMANGQQWLQSTSGSQRHMVGQKDSVILSVKFSPFGQWWASVGMDDFLGVYSMPAGTKVFEVPEMSPVTCCDVSSNNRLVVTGSGEHASVYQITY

SEQ ID NO: 37917 - protein, 381 aa, Homo sapiens
MALKAEGAALDCFEVTLKCEEGEDEEEAMVVAVIPRPEPMLRVTQQEKTPPPRPSPLEAGSDGCEEPKQQVSWEQEFLVGSSPGGSGRALCMVCGAEIRAPSADTARSHILEQHPHTLDLSPSEKSNILEAWSEGVALLQDVRAEQPSPPNSDSGQDAHPDPDANPDAARMPAEIVVLLDSEDNPSLPKRSRPRGLRPLELPAVPATEPGNKKPRGQRWKEPPGEEPVRKKRGRPMTKNLDPDPEPPSPDSPTETFAAPAEVRHFTDGSFPAGFVLQLFSHTQLRGPDSKDSPKDREVAEGGLPRAESPSPAPPPGLRGTLDLQVIRVRMEEPPAVSLLQDWSRHPQGTKRVGAGDTSDWPTVLSESSTTVAGKPEKGNGV

SEQ ID NO: 37918 - protein, 189 aa, Homo sapiens
DKQLDADVSPKPTIFLPSIAETKLQKAGTYLCLLEKFFPDIIKIHWQEKKSNTILGSQEGNTMKTNDTYMKFSWLTVPEESLDKEHRCIVRHENNKNGIDQEIIFPPIKTDVTTVDPKYNYSKDANDVITMDPKDNWSKDANDTLLLQLTNTSAYYTYLLLLLKSVVYFAIITCCLLRRTAFCCNGEKS

SEQ ID NO: 37919 - protein, 549 aa, Homo sapiens
MMCLECASAAAGGAEEEEADAERRRRRRGAQRGAGGSGCCGARGAGGAGVSAAGDEVQTLSGSVRRAPTGPPGTPGTPGCAATAKGPGAQQPKPASLGRGRGAAAAILSLGNVLNYLDRYTVAGVLLDIQQHFGVKDRGAGLLQSVFICSFMVAAPIFGYLGDRFNRKVILSCGIFFWSAVTFSSSFIPQQYFWLLVLSRGLVGIGEASYSTIAPTIIGDLFTKNTRTLMLSVFYFAIPLGSGLGYITGSSVKQAAGDWHWALRVSPVLGMITGTLILILVPATKRGHADQLGDQLKARTSWLRDMKALIRNRSYVFSSLATSAVSFATGALGMWIPLYLHRAQVVQKTAETCNSPPCGAKDSLIFGAITCFTGFLGVVTGAGATRWCRLKTQRADPLVCAVGMLGSAIFICLIFVAAKSSIVGAYICIFVGETLLFSNWAITADILMYVVIPTRRATAVALQSFTSHLLGDAGSPYLIGFISDLIRQSTKDSPLWEFLSLGYALMLCPFVVVLGGMFFLATALFFVSDRARAEQQVNQLAMPPASVKV

SEQ ID NO: 37920 - protein, 567 aa, Homo sapiens
MSASTGGGGDSGGSGGSSSSSQASCGPESSGSELALATPVPQMLQGLLGSDDEEQEDPKDYCKGGYHPVKIGDVFNGRYHVVRKLGWGHFSTVWLCWDIQRKRFVALKVVKSAGHYTETAVDEIKLLKCVRDSDPSDPKRETIVQLIDDFRISGVNGVHVCMVLEVLGHQLLKWIIKSNYQGLPVPCVKSIVRQVLHGLDYLHTKCKIIHTDIKPENILLCVGDAYIRRLAAEATEWQQAGAPPPSRSIVSTAPQEVLQTGKLSKNKRKKMRRKRKQQKRLLEERLRDLQRLEAMEAATQAEDSGLRLDGGSGSTSSSGCHPGGARAGPSPASSSPAPGGGRSLSAGSQTSGFSGSLFSPASCSILSGSSNQRETGGLLSPSTPFGASNLLVNPLEPQNADKIKIKIADLGNACWVHKHFTEDIQTRQYRAVEVLIGAEYGPPADIWSTACMAFELATGDYLFEPHSGEDYSRDEDHIAHIVELLGDIPPAFALSGRYSREFFNRRGELRHIHNLKHWGLYEVLMEKYEWPLEQATQFSAFLLPMMEYIPEKRASAADCLQHPWLNP

SEQ ID NO: 37921 - protein, 491 aa, Homo sapiens
MLQGLLGSDDEEQEDPKDYCKGGYHPVKIGDVFNGRYHVVRKLGWGHFSTVWLCWDIQRKRFVALKVVKSAGHYTETAVDEIKLLKCVRDSDPSDPKRETIVQLIDDFRISGVNGVHVCMVLEVLGHQLLKWIIKSNYQGLPVPCVKSIVRQVLHGLDYLHTKCKIIHTDIKPENILLCVGDAYIRRLAAEATEWQQAGAPPPSRSIVSTAPQEVLTGKLSKNKRKKMRRKRKQQKRLLEERLRDLQRLEAMEAATQAEDSGLRLDGGSGSTSSSGFSGSLFSPASCSILSGSSNQRETGGLLSPSTPFGASNLLVNPLEPQNADKIKIKIADLGNACWVHKHFTEDIQTRQYRAVEVLIGAEYGPPADIWSTACMAFELATGDYLFEPHSGEDYSRDEDHIAHIVELLGDIPPAFALSGRYSREFFNRRGELRHIHNLKHWGLYEVLMEKYEWPLEQATQFSAFLLPMMEYIPEKRASAADCLQHPWLNP

SEQ ID NO: 37922 - protein, 533 aa, Homo sapiens
MSASTGGGGDSGGSGGSSSSSQASCGPESSGSELALATPVPQMLQGLLGSDDEEQEDPKDYCKGGYHPVKIGDVFNGRYHVVRKLGWGHFSTVWLCWDIQRKRFVALKVVKSAGHYTETAVDEIKLLKCVRDSDPSDPKRETIVQLIDDFRISGVNGVHVCMVLEVLGHQLLKWIIKSNYQGLPVPCVKSIVRQVLHGLDYLHTKCKIIHTDIKPENILLCVGDAYIRRLAAEATEWQQAGAPPPSRSIVSTAPQEVLTGKLSKNKRKKMRRKRKQQKRLLEERLRDLQRLEAMEAATQAEDSGLRLDGGSGSTSSSGFSGSLFSPASCSILSGSSNQRETGGLLSPSTPFGASNLLVNPLEPQNADKIKIKIADLGNACWVHKHFTEDIQTRQYRAVEVLIGAEYGPPADIWSTACMAFELATGDYLFEPHSGEDYSRDEDHIAHIVELLGDIPPAFALSGRYSREFFNRRGELRHIHNLKHWGLYEVLMEKYEWPLEQATQFSAFLLPMMEYIPEKRASAADCLQHPWLNP

SEQ ID NO: 37923 - protein, 566 aa, Homo sapiens
MSASTGGGGDSGGSGGSSSSSQASCGPESSGSELALATPVPQMLQGLLGSDDEEQEDPKDYCKGGYHPVKIGDVFNGRYHVVRKLGWGHFSTVWLCWDIQRKRFVALKVVKSAGHYTETAVDEIKLLKCVRDSDPSDPKRETIVQLIDDFRISGVNGVHVCMVLEVLGHQLLKWIIKSNYQGLPVPCVKSIVRQVLHGLDYLHTKCKIIHTDIKPENILLCVGDAYIRRLAAEATEWQQAGAPPPSRSIVSTAPQEVLTGKLSKNKRKKMRRKRKQQKRLLEERLRDLQRLEAMEAATQAEDSGLRLDGGSGSTSSSGCHPGGARAGPSPASSSPAPGGGRSLSAGSQTSGFSGSLFSPASCSILSGSSNQRETGGLLSPSTPFGASNLLVNPLEPQNADKIKIKIADLGNACWVHKHFTEDIQTRQYRAVEVLIGAEYGPPADIWSTACMAFELATGDYLFEPHSGEDYSRDEDHIAHIVELLGDIPPAFALSGRYSREFFNRRGELRHIHNLKHWGLYEVLMEKYEWPLEQATQFSAFLLPMMEYIPEKRASAADCLQHPWLNP

SEQ ID NO: 37924 - protein, 151 aa, Homo sapiens
MNWAPATCWALLLAAAFLCDSGAAKGGRGGARGSARGGVRGGARGASRVRVRPAQRYGAPGSSLRVAAAGAAAGAAAGAAAGLAAGSGWRRAAGPGERGLEDEEDGVPGGNGTGPGIYSYRAWTSGAGPTRGPRLCLVLGGALGALGLLRP

SEQ ID NO: 37925 - protein, 489 aa, Homo sapiens
MDDDLMLALRLQEEWNLQEAERDHAQESLSLVDASWELVDPTPDLQALFVQFNDQFFWGQLEAVEVKWSVRMTLCAGICSYEGKGGMCSIRLSEPLLKLRPRKDLVETLLHEMIHAYLFVTNNDKDREGHGPEFCKHMHRINSLTGANITVYHTFHDEVDEYRRHWWRCNGPCQHRPPYYGYVKRATNREPSAHDYWWAEHQKTCGGTYIKIKEPENYSKKGKGKAKLGKEPVLAAENKDKPNRGEAQLVIPFSGKGYVLGETSNLPSPGKLITSHAINKTQDLLNQNHSANAVRPNSKIKVKFEQNGSSKNSHLVSPAVSNSHQNVLSNYFPRVSFANQKAFRGVNGSPRISVTVGNIPKNSVSSSSQRRVSSSKISLRNSSKVTESASVMPSQDVSGSEDTFPNKRPRLEDKTVFDNFFIKKEQIKSSGNDPKYSTTTAQNSSSSSSQSKMVNCPVCQNEVLESQINEHLDWCLEGDSIKVKSEESL

SEQ ID NO: 37926 - protein, 250 aa, Homo sapiens
MDDDLMLALRLQEEWNLQEAERDHAQESLSLVDASWELVDPTPDLQALFVQFNDQFFWGQLEAVEVKWSVRMTLCAGICSYEGKGGMCSIRLSEPLLKLRPRKDLVETLLHEMIHAYLFVTNNDKDREGHGPEFCKHMHRINSLTGANITVYHTFHDEVDEYRRHWWRCNGPCQHRPPYYGYVKRATNREPSAHDYWWAEHQKTCGGTYIKIKEPENYSKKGKGKAKLGKEPVLAAENKGTFVYILLIFM

SEQ ID NO: 37927 - protein, 207 aa, Homo sapiens
MDDDLMLALRLQEEWNLQEAERDHAQESLSLVDASWELVDPTPDLQALFVQFNDQFFWGQLEAVEVKWSVRMTLCAGICSYEGKGGMCSIRLSEPLLKLRPRKDLVEVYHTFHDEVDEYRRHWWRCNGPCQHRPPYYGYVKRATNREPSAHDYWWAEHQKTCGGTYIKIKEPENYSKKGKGKAKLGKEPVLAAENKGTFVYILLIFM

SEQ ID NO: 37928 - protein, 430 aa, Homo sapiens
MASSAKSAEMPTISKTVNPTPDPHQEYLDPRITIALFEIGSHSPSSWGSLPFLKNSSHQVTEQQTAQKFNNLLKEIKDILKNMAGFEEKITEAKELFEETNITEDVSAHKENIRGLDKINEMLSTNLPVSLAPEKEDNEKKQEMILETNITEDVSAHKENIRGLDKINEMLSTNLPVSLAPEKEDNEKKQQMIMENQNSENTAQVFARDLVNRLEEKKVLNETQQSQEKAKNRLNVQEETMKIRNNMEQLLQEAEHWSKQHTELSKLIKSYQKSQKDISETLGNNGVGFQTQPNNEVSAKHELEEQVKKLSHDTYSLQLMAALLENECQILQQRVEILKELHHQKQGTLQEKPIQINYKQDKKNQKPSEAKKVEMYKQNKQAMKGTFWKKDRSCRSLDVCLNKKACNTQFNIHVARKALRGKMRSASSLR

SEQ ID NO: 37929 - protein, 180 aa, Homo sapiens
MAESGKEKIKWTTTIIISSSLKSYEVATALENRSHKVRYSDSVENGSIIFSLSGVAFLLMDTKECLLSTEEIFLAKIEKFINIHQNSFLVLSAALHGPEEWKLMFRIQQRFLGCNLRILPVHNTVNAINLMCTIAKTTSKPYIDSICYRMITAKAYIIEQSPVWKTLQKIKLNSDSVNPN

SEQ ID NO: 37930 - protein, 158 aa, Homo sapiens
MMQKLLKCSRLVLALALILVLESSVQGYPTRRARYQWVRCNPDSNSANCLEEKGPMFELLPGESNKIPRLRTDLFPKTRIQDLNRIFPLSEDYSGSGFGSGSGSGSGSGSGFLTEMEQDYQLVDESDAFHDNLRSLDRNLPSDSQDLGQHGLEEDFML

SEQ ID NO: 37931 - protein, 288 aa, Homo sapiens
MDAAVTDDFQQILPIEQLRSTHASNDYVERPPAPCKQALSSPSLIVQTHKSDWSLATMPTSLPRSLSQCHQLQPLPQHLSQSSIASSMSHSTTASDQRLLASITPSPSGQSIIRTQPGAGVHPKADGALKGEAEQSAGHPSEHLFICEECGRCKCVPCTAARPLPSCWLCNQRCLCSAESLLDYGTCLCCVKGLFYHCSTDDEDNCADEPCSCGPSSCFVRWAAMSLISLFLPCLCCYLPTRGCLHLCQQGYDSLRRPGCRCKRHTNTVCRKISSGSAPFPKAQEKSV

SEQ ID NO: 37932 - protein, 659 aa, Homo sapiens
MALVTVSRSPPGSGASTPVGPWDQAVQRRSRLQRRQSFAVLRGAVLGLQDGGDNDDAAEASSEPTEKAPSEEELHGDQTDFGQGSQSPQKQEEQRQHLHLMVQLLRPQDDIRLAAQLEAPRPPRLRYLLVVSTREGEGLSQDETVLLGVDFPDSSSPSCTLGLVLPLWSDTQVYLDGDGGFSVTSGGQSRIFKPISIQTMWATLQVLHQACEAALGSGLVPGGSALTWASHYQERLNSEQSCLNEWTAMADLESLRPPSAEPGGSSEQEQMEQAIRAELWKVLDVSDLESVTSKEIRQALELRLGLPLQQYRDFIDNQMLLLVAQRDRASRIFPHLYLGSEWNAANLEELQRNRVTHILNMAREIDNFYPERFTYHNVRLWDEESAQLLPHWKETHRFIEAARAQGTHVLVHCKMGVSRSAATVLAYAMKQYECSLEQALRHVQELRPIARPNPGFLRQLQIYQGILTASRQSHVWEQKVGGVSPEEHPAPEVSTPFPPLPPEPEGGGEEKVVGMEESQAAPKEEPGPRPRINLRGVMRSISLLEPSLELESTSETSDMPEVFSSHESSHEEPLQPFPQLARTKGGQQVDRGPQPALKSRQSVVTLQGSAVVANRTQAFQEQEQGQGQGQGEPCISSTPRFRKVVRQASVHDSGEEGEA

SEQ ID NO: 37933 - protein, 471 aa, Homo sapiens
MALVTVSRSPPGSGASTPVGPWDQAVQRRSRLQRRQSFAVLRGAVLGLQDGGDNDDAAEASSEPTEKAPSEEELHGDQTDFGQGSQSPQKQEEQRQHLHLMVQLLRPQDDIRLAAQLEAPRPPRLRYLLVVSTREGEGLSQDETVLLGVDFPDSSSPSCTLGLVLPLWSDTQVYLDGDGGFSVTSGGQSRIFKPISIQTMWATLQVLHQACEAALGSGLVPGGSALTWASHYQERLNSEQSCLNEWTAMADLESLRPPSAEPGGSSEQEQMEQAIRAELWKVLDVSDLESVTSKEIRQALELRLGLPLQQYRDFIDNQMLLLVAQRDRASRIFPHLYLGSEWNAANLEELQRNRVTHILNMAREIDNFYPERFTYHNVRLWDEESAQLLPHWKETHRFIEAARAQGTHVLVHCKMGVSRSAATVLAYAMKQYECSLEQALRHVQELRPIARPNPGFLRQLQIYQGILTART

SEQ ID NO: 37934 - protein, 513 aa, Homo sapiens
MAFPLSPASSPSCTLGLVLPLWSDTQVYLDGDGGFSVTSGGQSRIFKPISIQTMWATLQVLHQACEAALGSGLVPGGSALTWASHYQERLNSEQSCLNEWTAMADLESLRPPSAEPGGSSEQEQMEQAIRAELWKVLDVSDLESVTSKEIRQALELRLGLPLQQYRDFIDNQMLLLVAQRDRASRIFPHLYLGSEWNAANLEELQRNRVTHILNMAREIDNFYPERFTYHNVRLWDEESAQLLPHWKETHRFIEAARAQGTHVLVHCKMGVSRSAATVLAYAMKQYECSLEQALRHVQELRPIARPNPGFLRQLQIYQGILTASRQSHVWEQKVGGVSPEEHPAPEVSTPFPPLPPEPEGGGEEKVVGMEESQAAPKEEPGPRPRINLRGVMRSISLLEPSLELESTSETSDMPEVFSSHESSHEEPLQPFPQLARTKGGQQVDRGPQPALKSRQSVVTLQGSAVVANRTQAFQEQEQGQGQGQGEPCISSTPRFRKVVRQASVHDSGEEGEA

SEQ ID NO: 37935 - protein, 394 aa, Homo sapiens
MALVTVSRSPPGSGASTPVGPWDQAVQRRSRLQRRQSFAVLRGAVLGLQDGGDNDDAAEASSEPTEKAPSEEELHGDQTDFGQGSQSPQKQEEQRQHLHLMVQLLRPQDDIRLAAQLEAPRPPRLRYLLVVSTREGEGLSQDETVLLGVDFPDSSSPSCTLGLVLPLWSDTQVYLDGDGGFSVTSGGQSRIFKPISIQTMWATLQVLHQACEAALGSGLVPGGSALTWASHYQERLNSEQSCLNEWTAMADLESLRPPSAEPGGSSEQEQMEQAIRAELWKVLELESTSETSDMPEVFSSHESSHEEPLQPFPQLARTKGGQQVDRGPQPALKSRQSVVTLQGSAVVANRTQAFQEQEQGQGQGQGEPCISSTPRFRKVVRQASVHDSGEEGEA

SEQ ID NO: 37936 - protein, 141 aa, Homo sapiens
MEGTMMMQQRPVLSQQHPSFILNSSPAHSPMAREIDNFYPERFTYHNVRLWDEESAQLLPHWKETHRFIEAARAQGTHVLVHCKMGVSRSAATVLAYAMKQYECSLEQALRHVQELRPIARPNPGFLRQLQIYQGILTART

SEQ ID NO: 37937 - protein, 370 aa, Homo sapiens
MEILMTVSKFASICTMGANASALEKEIGPEQFPVNEHYFGLVNFGNTCYCNSVLQALYFCRPFREKVLAYKSQPRKKESLLTCLADLFHSIATQKKKVGVIPPKKFITRLRKENELFDNYMQQDAHEFLNYLLNTIADILQEERKQEKQNGRLPNGNIDNENNNSTPDPTWVHEIFQGTLTNETRCLTCETISSKDEDFLDLSVDVEQNTSITHCLRGFSNTETLCSEYKYYCEECRSKQEAHKRMKVKKLPMILALHLKRFKYMDQLHRYTKLSYRVVFPLELRLFNTSGDATNPDRMYDLVAVVVHCGSGPNRGHYIAIVKSHDFWLLFDDDIVEKIDAQAIEEFYGLTSDISKNSESGYILFYQSRD

SEQ ID NO: 37938 - protein, 903 aa, Homo sapiens
MASVWQRLGFYASLLKRQLNGGPDVIKWERRVIPGCTRSIYSATGKWTKEYTLQTRKDVEKWWHQRIKEQASKISEADKSKPKFYVLSMFPYPSGKLHMGHVRVYTISDTIARFQKMRGMQVINPMGWDAFGLPAENAAVERNLHPQSWTQSNIKHMRKQLDRLGLCFSWDREITTCLPDYYKWTQYLFIKLYEAGLAYQKEALVNWDPVDQTVLANEQVDEHGCSWRSGAKVEQKYLRQWFIKTTAYAKAMQDALADLPEWYGIKGMQAHWIGDCVGCHLDFTLKVHGQATGEKLTAYTATPEAIYGTSHVAISPSHRLLHGHSSLKEALRMALVPGKDCLTPVMAVNMLTQQEVPVVILAKADLEGSLDSKIGIPSTSSEDTILAQTLGLAYSEVIETLPDGTERLSSSAEFTGMTRQDAFLALTQKARGKRVGGDVTSDKLKDWLISRQRYWGTPIPIVHCPVCGPTPVPLEDLPVTLPNIASFTGKGGPPLAMASEWVNCSCPRCKGAAKRETDTMDTFVDSAWYYFRYTDPHNPHSPFNTAVADYWMPVDLYIGGKEHAVMHLFYARFFSHFCHDQKMVKHREPFHKLLAQGLIKGQTFRLPSGQYLQREEVDLTGSVPVHAKTKEKLEVTWEKMSKSKHNGVDPEEVVEQYGIDTIRLYILFAAPPEKDILWDVKTDALPGVLRWQQRLWTLTTRFIEARASGKSPQPQLLSNKEKAEARKLWEYKNSVISQVTTHFTEDFSLNSAISQLMGLSNALSQASQSVILHSPEFEDALCALMVMAAPLAPHVTSEIWAGLALVPRKLCAHYTWDASVLLQAWPAVDPEFLQQPEVVQMAVLINNKACGKIPVPQQVARDQDKVHEFVLQSELGVRLLQGRSIKKSFLSPRTALINFLVQD

SEQ ID NO: 37939 - protein, 309 aa, Homo sapiens
MFSPADNIFIILITGEFILGILGNGYIALVNWIDWIKKKKISTVDYILTNLVIARICLISVMVVNGIVIVLNPDVYTKNKQQIVIFTFWTFANYLNMWITTCLNVFYFLKIASSSHPLFLWLKWKIDMVVHWILLGCFAISLLVSLIAAIVLSCDYRFHAIAKHKRNITEMFHVSKIPYFEPLTLFNLFAIVPFIVSLISFFLLVRSLWRHTKQIKLYATGSRDPSTEVHVRAIKTMTSFIFFFFLYYISSILMTFSYLMTKYKLAVEFGEIAAILYPLGHSLILIVLNNKLRQTFVRMLTCRKIACMI

SEQ ID NO: 37940 - protein, 414 aa, Homo sapiens
MSEYIRVTEDENDEPIEIPSEDDGTVLLSTVTAQFPGACGLRYRNPVSQCMRGVRLVEGILHAPDAGWGNLVYVVNYPKDNKRKMDETDASSAVKVKRAVQKTSDLIVLGLPWKTTEQDLKEYFSTFGEVLMVQVKKDLKTGHSKGFGFVRFTEYETQVKVMSQRHMIDGRWCDCKLPNSKQSQDEPLRSRKVFVGRCTEDMTEDELREFFSQYGDVMDVFIPKPFRAFAFVTFADDQIAQSLCGEDLIIKGISVHISNAEPKHNSNRQLERSGRFGGNPGGFGNQGGFGNSRGGGAGLGNNQGSNMGGGMNFGAFSINPAMMAAAQAALQSSWGMMGMLASQQNQSGPSGNNQNQGNMQREPNQAFGSGNNSYSGSNSGAAIGWGSASNAGSGSGFNGGFGSSMDSKSSGWGM

SEQ ID NO: 37941 - protein, 298 aa, Homo sapiens
MPQMLAGEIWCMLSTIQKVKKDLKTGHSKGFGFVRFTEYETQVKVMSQRHMIDGRWCDCKLPNSKQSQDEPLRSRKVFVGRCTEDMTEDELREFFSQYGDVMDVFIPKPFRAFAFVTFADDQIAQSLCGEDLIIKGISVHISNAEPKHNSNRQLERSGRFGGNPGGFGNQGGFGNSRGGGAGLGNNQGSNMGGGMNFGAFSINPAMMAAAQAALQSSWGMMGMLASQQNQSGPSGNNQNQGNMQREPNQAFGSGNNSYSGSNSGAAIGWGSASNAGSGSGFNGGFGSSMDSKSSGWGM

SEQ ID NO: 37942 - protein, 299 aa, Homo sapiens
MMCFLLIISSILVVFAFVLGNVANGFIALVNVIDWVNTRKISSAEQILTALVVSRIGLLWVMLFLWYATVFNSALYGLEVRIVASNAWAVTNHFSMWLAASLSIFCLLKIANFSNLISLHLKKRIKSVVLVILLGPLVFLICNLAVITMDERVWTKEYEGNVTWKIKLRNAIHLSSLTVTTLANLIPFTLSLICFLLLICSLCKHLKKMRLHSKGSQDPSTKVHIKALQTVTSFLMLFAIYFLCIITSTWNLRTQQSKLVLLLCQTVAIMYPSFHSFILIMGSRKLKQTFLSVLWQMTR

SEQ ID NO: 37943 - protein, 134 aa, Homo sapiens
MDVFMKGLSMAKEGVVAAAEKTKQGVTEAAEKTKEGVLYVGSKTREGVVQGVASVAEKTKEQASHLGGAVFSGAGNIAAATGLVKREEFPTDLKPEEVAQEAAEEPLIEPLMEPEGESYEDPPQEEYQEYEPEA

SEQ ID NO: 37944 - protein, 333 aa, Homo sapiens
MLTLTRIRTVSYEVRSTFLFISVLEFAVGFLTNAFVFLVNFWDVVKRQALSNSDCVLLCLSISRLFLHGLLFLSAIQLTHFQKLSEPLNHSYQAIIMLWMIANQANLWLAACLSLLYCSKLIRFSHTFLICLASWVSRKISQMLLGIILCSCICTVLCVWCFFSRPHFTVTTVLFMNNNTRLNWQIKDLNLFYSFLFCYLWSVPPFLLFLVSSGMLTVSLGRHMRTMKVYTRNSRDPSLEAHIKALKSLVSFFCFFVISSCAAFISVPLLILWRDKIGVMVCVGIMAACPSGHAAILISGNAKLRRAVMTILLWAQSSLKVRADHKADSRTLC

SEQ ID NO: 37945 - protein, 361 aa, Homo sapiens
MTGKAGEALSKPKSETVAKSTSGGAPARCTGFGIQEILGLNKEPPSSHPRAALDGLAPGHLLAARSVLSPAGVGGMGLLGPGGLPGFYTQPTFLEVLSDPQSVHLQPLGRASGPLDTSQTASSDSEDVSSSDRKMSKSALNQTKKRKKRRHRTIFTSYQLEELEKAFNEAHYPDVYAREMLAMKTELPEDRIQVWFQNRRAKWRKREKCWGRSSVMAEYGLYGAMVRHSIPLPESILKSAKDGIMDSCAPWLLGMHKKSLEAAAESGRKPEGERQALPKLDKMEQDERGPDAQAAISQEELRENSIAVLRAKAQEHSTKVLGTVSGPDSLARSTEKPEEEEAMDEDRPAERLSPPQLEDMA

SEQ ID NO: 37946 - protein, 2136 aa, Homo sapiens; identical to SEQ ID NO: 282

SEQ ID NO: 37947 - protein, 1651 aa, Homo sapiens
MEGSLAGSLAAPDRPQGPERLPGPAPRENIEGGAEAAEGEGGIFRSTRYLPVTKEGPRDILDGRGGISGTPDGRGPWEHPLVQEAGEGILSERRFEDSVIVRTMKPHAELEGSRRFLHHRGEPRLLEKHAQGRPRFDWLQDEDEQGSPQDAGLHLDLPAQPPPLAPFRRVFVPVEDTPKTLDMAVVGGREDLEDLEGLAQPSEWGLPTSASEVATQTWTVNSEASVERLQPLLPPIRTGPYLCELLEEVAEGVASPDEDEDEEPAVFPCIECSIYFKQKEHLLEHMSQHRRAPGQEPPADLAPLACGECGWAFADPTALEQHRQLHQASREKIIEEIQKLKQVPGDEGREARLQCPKCVFGTNSSRAYVQHAKLHMREPPGQTTKEPFGGSSGAGSPSPEASALLYQPYGAAVGLSACVFCGFPAPSESLLREHVRLVHAHPHWEEDGEAYEEDPASQPGTSQDAHACFPDTAVDYFGKAEPSLAPMWRENPAGYDPSLAFGPGCQQLSIRDFPLSKPLLHGTGQRPLGRLAFPSTLASTPYSLQLGRNKSTVHPQGLGERRRPWSEEEEEEEEEEDVVLTSEMDFSPENGVFSPLATPSLIPQAALELKQAFREALQAVEATQGQQQQLRGMVPIVLVAKLGPQVMAAARVPPRLQPEELGLAGAHPLDFLLLDAPLGGPLGLDTLLDGDPAMALKHEERKCPYCPDRFHNGIGLANHVRGHLNRVGVSYNVRHFISAEEVKAIERRFSFQKKKKKVANFDPGTFSLMRCDFCGAGFDTRAGLSSHARAHLRDFGITNWELTVSPINILQELLATSAAEQPPSPLGREPGGPPGSFLTSRRPRLPLTVPFPPTWAEDPGPAYGDAQSLTTCEVCGACFETRKGLSSHARSHLRQLGVAESESSGAPIDLLYELVKQKGLPDAHLGLPPGLAKKSSSLKEVVAGAPRPGLLSLAKPLDAPAVNKAIKSPPGFSAKGLGHPPSSPLLKKTPLALAGSPTPKNPEDKSPQLSLSPRPASPKAQWPQSEDEGPLNLTSGPEPARDIRCEFCGEFFENRKGLSSHARSHLRQMGVTEWYVNGSPIDTLREILKRRTQSRPGGPPNPPGPSPKALAKMMGGAGPGSSLEARSPSDLHISPLAKKLPPPPGSPLGHSPTASPPPTARKMFPGLAAPSLPKKLKPEQIRVEIKREMLPGALHGELHPSEGPWGAPREDMTPLNLSSRAEPVRDIRCEFCGEFFENRKGLSSHARSHLRQMGVTEWSVNGSPIDTLREILKKKSKPCLIKKEPPAGDLAPALAEDGPPTVAPGPVQSPLPLSPLAGRPGKPGAGPAQVPRELSLTPITGAKPSATGYLGSVAAKRPLQEDRLLPAEVKAKTYIQTELPFKAKTLHEKTSHSSTEACCELCGLYFENRKALASHARAHLRQFGVTEWCVNGSPIETLSEWIKHRPQKVGAYRSYIQGGRPFTKKFRSAGHGRDSDKRPSLGLAPGGLAVVGRSAGGEPGPEAGRAADGGERPLAASPPGTVKAEEHQRQNINKFERRQARPPDASAARGGEDTNDLQQKLEEVRQPPPRVRPVPSLVPRPPQTSLVKFVGNIYTLKCRFCEVEFQGPLSIQEEWVRHLQRHILEMNFSKADPPPEESQAPQAQTAAAEAP

SEQ ID NO: 37948 - protein, 794 aa, Homo sapiens
MEGSLAGSLAAPDRPQGPERLPGPAPRENIEGGAEAAEGEGGIFRSTRYLPVTKEGPRDILDGRGGISVANFDPGTFSLMRCDFCGAGFDTRAGLSSHARAHLRDFGITNWELTVSPINILQELLATSAAEQPPSPLGREPGGPPGSFLTSRRPRLPLTVPFPPTWAEDPGPAYGDASGPEPARDIRCEFCGEFFENRKGLSSHARSHLRQMGVTEWYVNGSPIDTLREILKRRTQSRPGGPPNPPGPSPKALAKMMGGAGPGSSLEARSPSDLHISPLAKKLPPPPGSPLGHSPTASPPPTARKMFPGLAAPSLPKKLKPEQIRVEIKREMLPGALHGELHPSEGPWGAPREDMTPLNLSSRAEPVRDIRCEFCGEFFENRKGLSSHARSHLRQMGVTEWSVNGSPIDTLREILKKKSKPCLIKKEPPAGDLAPALAEDGPPTVAPGPVQSPLPLSPLAGRPGKPGAGPAQVPRELSLTPITGAKPSATGYLGSVAAKRPLQEDRLLPAEVKAKTYIQTELPFKAKTLHEKTSHSSTEACCELCGLYFENRKALASHARAHLRQFGVTEWCVNGSPIETLSEWIKHRPQKVGAYRSYIQGGRPFTKKFRSAGHGRDSDKRPSLGLAPGGLAVVGRSAGGEPGPEAGRAADGGERPLAASPPGTVKAEEHQRQNINKFERRQARPPDASAARGGEDTNDLQQKLEEVRQPPPRVRPVPSLVPRPPQTSLVKFVGNIYTLKCRFCEVEFQGPLSIQEEWVRHLQRHILEMNFSKADPPPEESQAPQAQTAAAEAP

SEQ ID NO: 37949 - protein, 965 aa, Homo sapiens
MDLGSPSLPKKSLPVPGALEQVASRLSSKVAAEVPHGSKQELQDLKAQSLTTCEVCGACFETRKGLSSHARSHLRQLGVAESESSGAPIDLLYELVKQKGLPDAHLGLPPGLAKKSSSLKEVVAGAPRPGLLSLAKPLDAPAVNKAIKSPPGFSAKGLGHPPSSPLLKKTPLALAGSPTPKNPEDKSPQLSLSPRPASPKAQWPQSEDEGPLNLTLDSDGGRELDCQLCGAWFETRKGLSSHARAHLRHLGVSDPDAKGSPIDVLHGLIRRDGVQIRLPPRRGALAHPGRPPPTSAALSLLPPPPPAKKAKLKAAGMASPWGKQDLSAAAAAGIFWASDVEPSPLNLSSGPEPARDIRCEFCGEFFENRKGLSSHARSHLRQMGVTEWYVNGSPIDTLREILKRRTQSRPGGPPNPPGPSPKALAKMMGGAGPGSSLEARSPSDLHISPLAKKLPPPPGSPLGHSPTASPPPTARKMFPGLAAPSLPKKLKPEQIRVEIKREMLPGALHGELHPSEGPWGAPREDMTPLNLSSRAEPVRDIRCEFCGEFFENRKGLSSHARSHLRQMGVTEWSVNGSPIDTLREILKKKSKPCLIKKEPPAGDLAPALAEDGPPTVAPGPVQSPLPLSPLAGRPGKPGAGPAQVPRELSLTPITGAKPSATGYLGSVAAKRPLQEDRLLPAEVKAKTYIQTELPFKAKTLHEKTSHSSTEACCELCGLYFENRKALASHARAHLRQFGVTEWCVNGSPIETLSEWIKHRPQKVGAYRSYIQGGRPFTKKFRSAGHGRDSDKRPSLGLAPGGLAVVGRSAGGEPGPEAGRAADGGERPLAASPPGTVKAEEHQRQNINKFERRQARPPDASAARGGEDTNDLQQKLEEVRQPPPRVRPVPSLVPRPPQTSLVKFVGNIYTLKCRFCEVEFQGPLSIQEEWVRHLQRHILEMNFSKADPPPEESQAPQAQTAAAEAP

SEQ ID NO: 37950 - protein, 835 aa, Homo sapiens
MVAMDLGSPSLPKKSLPVPGALEQVASRLSSKVAAEVPHGSKQELQDLKAQSLTTCEVCGACFETRKGLSSHARSHLRQLGVAESESSGAPIDLLYELVKQKGLPDAHLGLPPGLAKKSSSLKEVVAGAPRPGLLSLAKPLDAPAVNKAIKSPPGFSAKGLGHPPSSPLLKKTPLALAGSPTPKNPEDKSPQLSLSPRPASPKAQWPQSEDEGPLNLTSGPEPARDIRCEFCGEFFENRKGLSSHARSHLRQMGVTEWYVNGSPIDTLREILKRRTQSRPGGPPNPPGPSPKALAKMMGGAGPGSSLEARSPSDLHISPLAKKLPPPPGSPLGHSPTASPPPTARKMFPGLAAPSLPKKLKPEQIRVEIKREMLPGALHGELHPSEGPWGAPREDMTPLNLSSRAEPVRDIRCEFCGEFFENRKGLSSHARSHLRQMGVTEWSVNGSPIDTLREILKKKSKPCLIKKEPPAGDLAPALAEDGPPTVAPGPVQSPLPLSPLAGRPGKPGAGPAQVPRELSLTPITGAKPSATGYLGSVAAKRPLQEDRLLPAEVKAKTYIQTELPFKAKTLHEKTSHSSTEACCELCGLYFENRKALASHARAHLRQFGVTEWCVNGSPIETLSEWIKHRPQKVGAYRSYIQGGRPFTKKFRSAGHGRDSDKRPSLGLAPGGLAVVGRSAGGEPGPEAGRAADGGERPLAASPPGTVKAEEHQRQNINKFERRQARPPDASAARGGEDTNDLQQKLEEVRQPPPRVRPVPSLVPRPPQTSLVKFVGNIYTLKCRFCEVEFQGPLSIQEEWVRHLQRHILEMNFSKADPPPEESQAPQAQTAAAEAP

SEQ ID NO: 37951 - protein, 1795 aa, Homo sapiens
MSQFQVPLAVQPDLPGLYDFPQRQVMVGSFPGSGLSMAGSESQLRGGGDGRKKRKRCGTCEPCRRLENCGACTSCTNRRTHQICKLRKCEVLKKKVGLLKEVEIKAGEGAGPWGQGAAVKTGSELSPVDGPVPGQMDSGPVYHGDSRQLSASGVPVNGAREPAGPSLLGTGGPWRVDQKPDWEAAPGPAHTARLEDAHDLVAFSAVAEAVSSYGALSTRLYETFNREMSREAGNNSRGPRPGPEGCSAGSEDLDTLQTALALARHGMKPPNCNCDGPECPDYLEWLEGKIKSVVMEGGEERPRLPGPLPPGEAGLPAPSTRPLLSSEVPQISPQEGLPLSQSALSIAKEKNISLQTAIAIEALTQLSSALPQPSHSTPQASCPLPEALSPPAPFRSPQSYLRAPSWPVVPPEEHSSFAPDSSAFPPATPRTEFPEAWGTDTPPATPRSSWPMPRPSPDPMAELEQLLGSASDYIQSVFKRPEALPTKPKVKVEAPSSSPAPAPSPVLQREAPTPSSEPDTHQKAQTALQQHLHHKRSLFLEQVHDTSFPAPSEPSAPGWWPPPSSPVPRLPDRPPKEKKKKLPTPAGGPVGTEKAAPGIKPSVRKPIQIKKSRPREAQPLFPPVRQIVLEGLRSPASQEVQAHPPAPLPASQGSAVPLPPEPSLALFAPSPSRDSLLPPTQEMRSPSPMTALQPGSTGPLPPADDKLEELIRQFEAEFGDSFGLPGPPSVPIQDPENQQTCLPAPESPFATRSPKQIKIESSGAVTVLSTTCFHSEEGGQEATPTKAENPLTPTLSGFLESPLKYLDTPTKSLLDTPAKRAQAEFPTCDCVEQIVEKDEGPYYTHLGSGPTVASIRELMEERYGEKGKAIRIEKVIYTGKEGKSSRGCPIAKWVIRRHTLEEKLLCLVRHRAGHHCQNAVIVILILAWEGIPRSLGDTLYQELTDTLRKYGNPTSRRCGLNDDRTCACQGKDPNTCGASFSFGCSWSMYFNGCKYARSKTPRKFRLAGDNPKEEEVLRKSFQDLATEVAPLYKRLAPQAYQNQVTNEEIAIDCRLGLKEGRPFAGVTACMDFCAHAHKDQHNLYNGCTVVCTLTKEDNRCVGKIPEDEQLHVLPLYKMANTDEFGSEENQNAKVGSGAIQVLTAFPREVRRLPEPAKSCRQRQLEARKAAAEKKKIQKEKLSTPEKIKQEALELAGITSDPGLSLKGGLSQQGLKPSLKVEPQNHFSSFKYSGNAVVESYSVLGNCRPSDPYSMNSVYSYHSYYAQPSLTSVNGFHSKYALPSFSYYGFPSSNPVFPSQFLGPGAWGHSGSSGSFEKKPDLHALHNSLSPAYGGAEFAELPSQAVPTDAHHPTPHHQQPAYPGPKEYLLPKAPLLHSVSRDPSPFAQSSNCYNRSIKQEPVDPLTQAEPVPRDAGKMGKTPLSEVSQNGGPSHLWGQYSGGPSMSPKRTNGVGGSWGVFSSGESPAIVPDKLSSFGASCLAPSHFTDGQWGLFPGEGQQAASHSGGRLRGKPWSPCKFGNSTSALAGPSLTEKPWALGAGDFNSALKGSPGFQDKLWNPMKGEEGRIPAAGASQLDRAWQSFGLPLGSSEKLFGALKSEEKLWDPFSLEEGPAEEPPSKGAVKEEKGGGGAEEEEEELWSDSEHNFLDENIGGVAVAPAHGSILIECARRELHATTPLKKPNRCHPTRISLVFYQHKNLNQPNHGLALWEAKMKQLAERARARQEEAARLGLGQQEAKLYGKKRKWGGTVVAEPQQKEKKGVVPTRQALAVPTDSAVTVSSYAYTKVTGPYSRWI

SEQ ID NO: 37952 - protein, 1679 aa, Homo sapiens
MSQFQVPLAVQPDLPGLYDFPQRQVMVGSFPGSGLSMAGSESQLRGGGDGRKKRKRCGTCEPCRRLENCGACTSCTNRRTHQICKLRKCEVLKKKVGLLKEVEIKAGEGAGPWGQGAAVKTGSELSPVDGPVPGQMDSGPVYHGDSRQLSASGVPVNGAREPAGPSLLGTGGPWRVDQKPDWEAAPGPAHTARLEDAHDLVAFSAVAEAVSSYGALSTRLYETFNREMSREAGNNSRGPRPGPEGCSAGSEDLDTLQTALALARHGMKPPNCNCDGPECPDYLEWLEGKIKSVVMEGGEERPRLPGPLPPGEAGLPAPSTRPLLSSEVPQISPQEGLPLSQSALSIAKEKNISLQTAIAIEALTQLSSALPQPSHSTPQASCPLPEALSPPAPFRSPQSYLRAPSWPVVPPEEHSSFAPDSSAFPPATPRTEFPEAWGTDTPPATPRSSWPMPRPSPDPMAELEQLLGSASDYIQSVFKRPEALPTKPKVKVEAPSSSPAPAPSPVLQREAPTPSSEPDTHQKAQTALQQHLHHKRSLFLEQVHDTSFPAPSEPSAPGWWPPPSSPVPRLPDRPPKEKKKKLPTPAGGPVGTEKAAPGIKPSVRKPIQIKKSRPREAQPLFPPVRQIVLEGLRSPASQEVQAHPPAPLPASQGSAVPLPPEPSLALFAPSPSRDSLLPPTQEMRSPSPMTALQPGSTGPLPPADDKLEELIRQFEAEFGDSFGLPGPPSVPIQDPENQQTCLPAPESPFATRSPKQIKIESSGAVTVLSTTCFHSEEGGQEATPTKAENPLTPTLSGFLESPLKYLDTPTKSLLDTPAKRAQAEFPTCDCVEQIVEKDEGPYYTHLGSGPTVASIRELMEERYGEKGKAIRIEKVIYTGKEGKSSRGCPIAKWVIRRHTLEEKLLCLVRHRAGHHCQNAVIVILILAWEGIPRSLGDTLYQELTDTLRKYGNPTSRRCGLNDDRTCACQGKDPNTCGASFSFGCSWSMYFNGCKYARSKTPRKFRLAGDNPKEEEVLRKSFQDLATEVAPLYKRLAPQAYQNQVTNEEIAIDCRLGLKEGRPFAGVTACMDFCAHAHKDQHNLYNGCTVVCTLTKEDNRCVGKIPEDEQLHVLPLYKMANTDEFGSEENQNAKVGSGAIQVLTAFPREVRRLPEPAKSCRQRQLEARKAAAEKKKIQKEKLSTPEKIKQEALELAGITSDPGLSLKGGLSQQGLKPSLKVEPQNHFSSFKYSGNAVVESYSVLGNCRPSDPYSMNSVYSYHSYYAQPSLTSVNGFHSKYALPSFSYYGFPSSNPVFPSQFLGPGAWGHSGSSGSFEKKPDLHALHNSLSPAYGGAEFAELPSQAVPTDAHHPTPHHQQPAYPGPKEYLLPKAPLLHSVSRDPSPFAQSSNCYNRSIKQEPVDPLTQAEPVPRDAGKMGKTPLSEVSQNGGPSHLWGQYSGGPSMSPKRTNGVGGSWGVFSSGESPAIVPDKLSSFGASCLAPSHFTDGQWGLFPGEGQQAASHSGGRLRGKPWSPCKFGNSTSALAGPSLTEKPWALGAGDFNSALKGSPGFQDKLWNPMKGEEGRIPAAGASQLVFYQHKNLNQPNHGLALWEAKMKQLAERARARQEEAARLGLGQQEAKLYGKKRKWGGTVVAEPQQKEKKGVVPTRQALAVPTDSAVTVSSYAYTKVTGPYSRWI

SEQ ID NO: 37953 - protein, 862 aa, Homo sapiens
MSQFQVPLAVQPDLPGLYDFPQRQVMVGSFPGSGLSMAGSESQLRGGGDGRKKRKRCGTCEPCRRLENCGACTSCTNRRTHQICKLRKCEVLKKKVGLLKEVEIKAGEGAGPWGQGAAVKTGSELSPVDGPVPGQMDSGPVYHGDSRQLSASGVPVNGAREPAGPSLLGTGGPWRVDQKPDWEAAPGPAHTARLEDAHDLVAFSAVAEAVSSYGALSTRLYETFNREMSREAGNNSRGPRPGPEGCSAGSEDLDTLQTALALARHGMKPPNCNCDGPECPDYLEWLEGKIKSVVMEGGEERPRLPGPLPPGEAGLPAPSTRPLLSSEVPQISPQEGLPLSQSALSIAKEKNISLQTAIAIEALTQLSSALPQPSHSTPQASCPLPEALSPPAPFRSPQSYLRAPSWPVVPPEEHSSFAPDSSAFPPATPRTEFPEAWGTDTPPATPRSSWPMPRPSPDPMAELEQLLGSASDYIQSVFKRPEALPTKPKVKVEAPSSSPAPAPSPVLQREAPTPSSEPDTHQKAQTALQQHLHHKRSLFLEQVHDTSFPAPSEPSAPGWWPPPSSPVPRLPDRPPKEKKKKLPTPAGGPVGTEKAAPGIKPSVRKPIQIKKSRPREAQPLFPPVRQIVLEGLRSPASQEVQAHPPAPLPASQGSAVPLPPEPSLALFAPSPSRDSLLPPTQEMRSPSPMTALQPGSTGPLPPADDKLEELIRQFEAEFGDSFGLPGPPSVPIQDPENQQTCLPAPESPFATRSPKQIKIESSGAVTVLSTTCFHSEEGGQEATPTKAENPLTPTLSGFLESPLKYLDTPTKSLLDTPAKRAQAEFPTCDCVEQIVEKDEGPYYTHLGSGPTVASIRELMEER

SEQ ID NO: 37954 - protein, 1138 aa, Homo sapiens
MVWRVPPFLLPILFLASHVGAAVDLTLLANLRLTDPQRFFLTCVSGEAGAGRGSDAWGPPLLLEKDDRIVRTPPGPPLRLARNGSHQVTLRGFSKPSDLVGVFSCVGGAGARRTRVIYVHNSPGAHLLPDKVTHTVNKGDTAVLSARVHKEKQTDVIWKSNGSYFYTLDWHEAQDGRFLLQLPNVQPPSSGIYSATYLEASPLGSAFFRLIVRGCGAGRWGPGCTKECPGCLHGGVCHDHDGECVCPPGFTGTRCEQACREGRFGQSCQEQCPGISGCRGLTFCLPDPYGCSCGSGWRGSQCQEACAPGHFGADCRLQCQCQNGGTCDRFSGCVCPSGWHGVHCEKSDRIPQILNMASELEFNLETMPRINCAAAGNPFPVRGSIELRKPDGTVLLSTKAIVEPEKTTAEFEVPRLVLADSGFWECRVSTSGGQDSRRFKVNVKVPPVPLAAPRLLTKQSRQLVVSPLVSFSGDGPISTVRLHYRPQDSTMDWSTIVVDPSENVTLMNLRPKTGYSVRVQLSRPGEGGEGAWGPPTLMTTDCPEPLLQPWLEGWHVEGTDRLRVSWSLPLVPGPLVGDGFLLRLWDGTRGQERRENVSSPQARTALLTGLTPGTHYQLDVQLYHCTLLGPASPPAHVLLPPSGPPAPRHLHAQALSDSEIQLTWKHPEALPGPISKYVVEVQVAGGAGDPLWIDVDRPEETSTIIRGLNASTRYLFRMRASIQGLGDWSNTVEESTLGNGLQAEGPVQESRAAEEGLDQQLILAVVGSVSATCLTILAALLTLVCIRRSCLHRRRTFTYQSGSGEETILQFSSGTLTLTRRPKLQPEPLSYPVLEWEDITFEDLIGEGNFGQVIRAMIKKDGLKMNAAIKMLKEYASENDHRDFAGELEVLCKLGHHPNIINLLGACKNRGYLYIAIEYAPYGNLLDFLRKSRVLETDPAFAREHGTASTLSSRQLLRFASDAANGMQYLSEKQFIHRDLAARNVLVGENLASKIADFGLSRGEEVYVKKTMGRLPVRWMAIESLNYSVYTTKSDVWSFGVLLWEIVSLGGTPYCGMTCAELYEKLPQGYRMEQPRNCDDEVYELMRQCWRDRPYERPPFAQIALQLGRMLEARKAYVNMSLFENFTYAGIDATAEEA

SEQ ID NO: 37955 - protein, 379 aa, Homo sapiens
MVWRVPPFLLPILFLASHVGAAVDLTLLANLRLTDPQRFFLTCVSGEAGAGRGSDAWGPPLLLEKDDRIVRTPPGPPLRLARNGSHQVTLRGFSKPSDLVGVFSCVGGAGARRTRVIYVHNSPGAHLLPDKVTHTVNKGDTAVLSARVHKEKQTDVIWKSNGSYFYTLDWHEAQDGRFLLQLPNVQPPSSGIYSATYLEASPLGSAFFRLIVRGCGAGRWGPGCTKECPGCLHGGVCHDHDGECVCPPGFTGTRCEQACREGRFGQSCQEQCPGISGCRGLTFCLPDPYGCSCGSGWRGSQCQEACAPGHFGADCRLQCQCQNGGTCDRFSGCVCPSGWHGVHCEKSGWRDWVDTSTEKQNTDEGRFGGHVSAPVGAPG

SEQ ID NO: 37956 - protein, 317 aa, Homo sapiens
MVWRVPPFLLPILFLASHVGAAVDLTLLANLRLTDPQRFFLTCVSGEAGAGRGSDAWGPPLLLEKDDRIVRTPPGPPLRLARNGSHQVTLRGFSKPSDLVGVFSCVGGAGARRTRVIYVHNSPGAHLLPDKVTHTVNKGDTAVLSARVHKEKQTDVIWKSNGSYFYTLDWHEAQDGRFLLQLPNVQPPSSGIYSATYLEASPLGSAFFRLIVRGCGAGRWGPGCTKECPGCLHGGVCHDHDGECVCPPGFTGTRCEQACREGRFGQSCQEQCPGISGCRGLTFCLPDPYGCSCGSGWRGSQCQEVHQGHCGAREDHS

SEQ ID NO: 37957 - protein, 403 aa, Homo sapiens
MAGAATQASLESAPRIMRLVAECSRSRARAGELWLPHGTVATPVFMPVGTQATMKGITTEQLDALGCRICLGNTYHLGLRPGPELIQKANGLHGFMNWPHNLLTDSGGFQMVSLVSLSEVTEEGVRFRSPYDGNETLLSPEKSVQIQNALGSDIIMQLDDVVSSTVTGPRVEEAMYRSIRWLDRCIAAHQRPDKQNLFAIIQGGLDADLRATCLEEMTKRDVPGFAIGGLSGGESKSQFWRMVALSTSRLPKDKPRYLMGVGYATDLVVCVALGCDMFDCVFPTRTARFGSALVPTGNLQLRKKVFEKDFGPIDPECTCPTCQKHSRAFLHALLHSDNTAALHHLTVHNIAYQLQLMSAVRTSIVEKRFPDFVRDFMGAMYGDPTLCPTWATDALASVGITLG

SEQ ID NO: 37958 - protein, 225 aa, Homo sapiens
MAGAATQASLESAPRIMRLVAECSRSRARAGELWLPHGTVATPVFMPVGTQATMKGITTEQLDALGCRICLGNTYHLGLRPGPELIQKANGLHGFMNWPHNLLTDSGGFQMVSLVSLSEVTEEGVRFRSPYDGNETLLSPEKSVQIQNALGSDIIMQLDDVVSSTVTGPRVEEAMYRPLGLVTGALLQVNPLAGPVHCSPSAAGQAEPLRHYPGWAGRRSPGHLP

SEQ ID NO: 37959 - protein, 184 aa, Homo sapiens
MTSFEDADTEETVTCLQMTVYHPGQLQCGIFQSISFNREKLPSSEVVKFGRNSNICHYTFQDKQVSRVQFSLQLFKKFNSSVLSFEIKNMSKKTNLIVDSRELGYLNKMDLPYRCMVRFGEYQFLMEKEDGESLEFFETQFILSPRSLLQENNWPPHRPIPEYGTYSLCSSQSSSPTEMDENES

SEQ ID NO: 37960 - protein, 253 aa, Homo sapiens
MSFSVHNQKGSKRPLPLEPLLFLQVPRSNYLHFQEEKQRLHLKKFLLDRMFLVAKIQANVERKDVADYYEQMFQSVLKHHLGEAVTGLLLIYPTSILHILESSSDTLYKVLLDYIGHVKDETVFFIQQMKIIVISHNIPMRLFMQWHVSVIKVPVMYLDDVTQSQSLKEVITDFLTQTHKLSLYLCQTMKVGTKGPGDNLHQVAPDLLLPEQIIKYLCKSEEFMDPATFINMYNRPIHITLDSEVVWPAPSRF

SEQ ID NO: 37961 - protein, 442 aa, Homo sapiens
MAEGEGYFAMSEDELACSPYIPLGGDFGGGDFGGGDFGGGDFGGGGSFGGHCLDYCESPTAHCNVLNWEQVQRLDGILSETIPIHGRGNFPTLELQPSLIVKVVRRRLAEKRIGVRDVRLNGSAASHVLHQDSGLGYKDLDLIFCADLRGEGEFQTVKDVVLDCLLDFLPEGVNKEKITPLTLKEAYVQKMVKVCNDSDRWSLISLSNNSGKNVELKFVDSLRRQFEFSVDSFQIKLDSLLLFYECSENPMTETFHPTIIGESVYGDFQEAFDHLCNKIIATRNPEEIRGGGLLKYCNLLVRGFRPASDEIKTLQRYMCSRFFIDFSDIGEQQRKLESYLQNHFVGLEDRKYEYLMTLHGVVNESTVCLMGHERRQTLNLITMLAIRVLADQNVIPNVANVTCYYQPAPYVADANFSNYYIAQVQPVFTCQQQTYSTWLPCN

SEQ ID NO: 37962 - protein, 461 aa, Homo sapiens
MHQRYFWTDQGQVALGGHYMAEGEGYFAMSEDELACSPYIPLGGDFGGGDFGGGDFGGGDFGGGGSFGGHCLDYCESPTAHCNVLNWEQVQRLDGILSETIPIHGRGNFPTLELQPSLIVKVVRRRLAEKRIGVRDVRLNGSAASHVLHQDSGLGYKDLDLIFCADLRGEGEFQTVKDVVLDCLLDFLPEGVNKEKITPLTLKEAYVQKMVKVCNDSDRWSLISLSNNSGKNVELKFVDSLRRQFEFSVDSFQIKLDSLLLFYECSENPMTETFHPTIIGESVYGDFQEAFDHLCNKIIATRNPEEIRGGGLLKYCNLLVRGFRPASDEIKTLQRYMCSRFFIDFSDIGEQQRKLESYLQNHFVGLEDRKYEYLMTLHGVVNESTVCLMGHERRQTLNLITMLAIRVLADQNVIPNVANVTCYYQPAPYVADANFSNYYIAQVQPVFTCQQQTYSTWLPCN

SEQ ID NO: 37963 - protein, 244 aa, Homo sapiens
MRWCLLLIWAQGLRQAPLASGMMTGTIETTGNISAEKGGSIILQCHLSSTTAQVTQVNWEQQDQLLAICNADLGWHISPSFKDRVAPGPGLGLTLQSLTVNDTGEYFCIYHTYPDGTYTGRIFLEVLESSVAEHGARFQIPLLGAMAATLVVICTAVIVVVALTRKKKALRIHSVEGDLRRKSAGQEEWSPSAPSPPGSCVQAEAAPAGLCGEQRGEDCAELHDYFNVLSYRSLGNCSFFTETG

SEQ ID NO: 37964 - protein, 170 aa, Homo sapiens
MRWCLLLIWAQGLRQAPLASGMMTGTIETTGNISAEKGGSIILQCHLSSTTAQVTQVNWEQQDQLLAICNADLGWHISPSFKDRVAPGPGLGLTLQSLTVNDTGEYFCIYHTYPDGTYTGRIFLEVLESSVAEHGARFQIPLLGAMAATLVVICTAVIVVVALTRKFVCF

SEQ ID NO: 37965 - protein, 297 aa, Homo sapiens
MVHQVLYRALVSTKWLAESIRTGKLGPGLRVLDASWYSPGTREARKEYLERHVPGASFFDIEECRDTASPYEMMLPSEAGFAEYVGRLGISNHTHVVVYDGEHLGSFYAPRVWWMFRVFGHRTVSVLNGGFRNWLKEGHPVTSEPSRPEPAVFKATLDRSLLKTYEQVLENLESKRFQLVDSRSQGRFLGTEPEPDAVGLDSGHIRGAVNMPFMDFLTEDGFEKGPEELRALFQTKKVDLSQPLIATCRKGVTACHVALAAYLCGKPDVAVYDGSWSEWFRRAPPESRVSQGKSEKA

SEQ ID NO: 37966 - protein, 424 aa, Homo sapiens
MDQPSGRSFMQVLCEKYSPENFPYRRGPGMGVHVPATPQGSPMKDRLNLPSVLVLNSCGITCAGDEKEIAAFCAHVSELDLSDNKLEDWHEVSKIVSNVPQLEFLNLSSNPLNLSVLERTCAGSFSGVRKLVLNNSKASWETVHMILQELPDLEELFLCLNDYETVSCPSICCHSLKLLHITDNNLQDWTEIRKLGVMFPSLDTLVLANNHLNAIEEPDDSLARLFPNLRSISLHKSGLQSWEDIDKLNSFPKLEEVRLLGIPLLQPYTTEERRKLVIARLPSVSKLNGSVVTDGEREDSERFFIRYYVDVPQEEVPFRYHELITKYGKLEPLAEVDLRPQSSAKVEVHFNDQVEEMSIRLDQTVAELKKQLKTLVQLPTSNMLLYYFDHEAPFGPEEMKYSSRALHSFGIRDGDKIYVESKTK

SEQ ID NO: 37967 - protein, 501 aa, Homo sapiens
MAAASVTPPGSLELLQPGFSKTLLGTKLEAKYLCSACRNVLRRPFQAQCGHRYCSFCLASILSSGPQNCAACVHEGIYEEGISILESSSAFPDNAARREVESLPAVCPSDGCTWKGTLKEYESCHEGRCPLMLTECPACKGLVRLGEKERHLEHECPERSLSCRHCRAPCCGADVKAHHEVCPKFPLTCDGCGKKKIPREKFQDHVKTCGKCRVPCRFHAIGCLETVEGEKQQEHEVQWLREHLAMLLSSVLEAKPLLGDQSHAGSELLQRCESLEKKTATFENIVCVLNREVERVAMTAEACSRQHRLDQDKIEALSSKVQQLERSIGLKDLAMADLEQKVLEMEASTYDGVFIWKISDFARKRQEAVAGRIPAIFSPAFYTSRYGYKMCLRIYLNGDGTGRGTHLSLFFVVMKGPNDALLRWPFNQKVTLMLLDQNNREHVIDAFRPDVTSSSFQRPVNDMNIASGCPLFCPVSKMEAKNSYVRDDAIFIKAIVDLTGL

SEQ ID NO: 37968 - protein, 553 aa, Homo sapiens
MAAASVTPPGSLELLQPGFSKTLLGTKLEAKYLCSACRNVLRRPFQAQCGHRYCSFCLASILSSGPQNCAACVHEGIYEEGISILESSSAFPDNAARREVESLPAVCPSDGCTWKGTLKEYEVKMPACGMVTEAPAVGSRPRSPSSYDLVLHVPLTGAEACLMSVEEETELLLRSCHEGRCPLMLTECPACKGLVRLGEKERHLEHECPERSLSCRHCRAPCCGADVKAHHEVCPKFPLTCDGCGKKKIPREKFQDHVKTCGKCRVPCRFHAIGCLETVEGEKQQEHEVQWLREHLAMLLSSVLEAKPLLGDQSHAGSELLQRCESLEKKTATFENIVCVLNREVERVAMTAEACSRQHRLDQDKIEALSSKVQQLERSIGLKDLAMADLEQKVLEMEASTYDGVFIWKISDFARKRQEAVAGRIPAIFSPAFYTSRYGYKMCLRIYLNGDGTGRGTHLSLFFVVMKGPNDALLRWPFNQKVTLMLLDQNNREHVIDAFRPDVTSSSFQRPVNDMNIASGCPLFCPVSKMEAKNSYVRDDAIFIKAIVDLTGL

SEQ ID NO: 37969 - protein, 490 aa, Homo sapiens
MAAASVTPPGSLELLQPGFSKTLLGTKLEAKYLCSACRNVLRRPFQAQCGHRSGPQNCAACVHEGIYEEGISILESSSAFPDNAARREVESLPAVCPSDGCTWKGTLKEYESCHEGRCPLMLTECPACKGLVRLGEKERHLEHECPERSLSCRHCRAPCCGADVKAHHEVCPKFPLTCDGCGKKKIPREKFQDHVKTCGKCRVPCRFHAIGCLETVEGEKQQEHEVQWLREHLAMLLSSVLEAKPLLGDQSHAGSELLQRCESLEKKTATFENIVCVLNREVERVAMTAEACSRQHRLDQDKIEALSSKVQQLERSIGLKDLAMADLEQKVLEMEASTYDGVFIWKISDFARKRQEAVAGRIPAIFSPAFYTSRYGYKMCLRIYLNGDGTGRGTHLSLFFVVMKGPNDALLRWPFNQKVTLMLLDQNNREHVIDAFRPDVTSSSFQRPVNDMNIASGCPLFCPVSKMEAKNSYVRDDAIFIKAIVDLTGL

SEQ ID NO: 37970 - protein, 476 aa, Homo sapiens
MAAASVTPPGSLELLQPGFSKTLLGTKLEAKYLCSACRNVLRRPFQAQCGHRYCSFCLASILSSGPQNCAACVHEGIYEEGISILESSSAFPDNAARREVESLPAVCPSDGCTWKGTLKEYESCHEGRCPLMLTECPACKGLVRLGEKERHLEHECPERSLSCRHCRAPCCGADVKFQDHVKTCGKCRVPCRFHAIGCLETVEGEKQQEHEVQWLREHLAMLLSSVLEAKPLLGDQSHAGSELLQRCESLEKKTATFENIVCVLNREVERVAMTAEACSRQHRLDQDKIEALSSKVQQLERSIGLKDLAMADLEQKVLEMEASTYDGVFIWKISDFARKRQEAVAGRIPAIFSPAFYTSRYGYKMCLRIYLNGDGTGRGTHLSLFFVVMKGPNDALLRWPFNQKVTLMLLDQNNREHVIDAFRPDVTSSSFQRPVNDMNIASGCPLFCPVSKMEAKNSYVRDDAIFIKAIVDLTGL

SEQ ID NO: 37971 - protein, 458 aa, Homo sapiens
MAALSKSIPHNCYEIGHTWHPSCRVSFLQITGGALEESLKIYAPLYLIAAILRKRKLDYYLHKLLPEILQSASFLTANGALYMAFFCILRKILGKFYSWTPGFGAALPASYVAILIERKSRRGLLTIYMANLATETLFRMGVARGTITTLRNGEVLLFCITAAMYMFFFRCKDGLKGFTFSALRFIVGKEEIPTHSFSPEAAYAKVEQKREQHEEKPGRMNMIGLVRKFVDSICKHGPRHRCCKHYEDNCISYCIKGFIRMFSVGYLIQCCLRIPSAFRHLFTQPSRLLSLFYNKENFQLGAFLGSFVSIYKGTSCFLRWIRNLDDELHAIIAGFLAGISMMFYKSTTISMYLASKLVETMYFKGIEAGKVPYFPHADTIIYSISTAICFQAAVMEVQTLRPSYWKFLLRLTKGKFAVMNRKVLDVFGTGASKHFQDFIPRLDPRYTTVTPELPTEFS

SEQ ID NO: 37972 - protein, 436 aa, Homo sapiens
MAALSKSIPHNCYEIGHTWHPSCRVSFLQITGGALEESLKIYAPLYLIAAILRKRKLDYYLHKLLPEILQSASFLTANGALYMAFFCILRKILGKFYSWTPGFGAALPASYVAILIERKSRRGLLTIYMANLVLLFCITAAMYMFFFRCKDGLKGFTFSALRFIVGKEEIPTHSFSPEAAYAKVEQKREQHEEKPGRMNMIGLVRKFVDSICKHGPRHRCCKHYEDNCISYCIKGFIRMFSVGYLIQCCLRIPSAFRHLFTQPSRLLSLFYNKENFQLGAFLGSFVSIYKGTSCFLRWIRNLDDELHAIIAGFLAGISMMFYKSTTISMYLASKLVETMYFKGIEAGKVPYFPHADTIIYSISTAICFQAAVMEVQTLRPSYWKFLLRLTKGKFAVMNRKVLDVFGTGASKHFQDFIPRLDPRYTTVTPELPTEFS

SEQ ID NO: 37973 - protein, 99 aa, Homo sapiens
MDLIGFGYAALVTFGSIFGYKRRGGVPSLIAGLFVGCLAGYGAYRVSNDKRDVKVSLFTAFFLATIMGVRFKRSKKIMPAGLVAGLSLMMILRLVLLLL

SEQ ID NO: 37974 - protein, 452 aa, Homo sapiens
MNSGILQVFQGELICPLCMNYFIDPVTIDCGHSFCRPCFYLNWQDIPFLVQCSECTKSTEQINLKTNIHLKKMASLARKVSLWLFLSSEEQMCGTHRETKKIFCEVDRSLLCLLCSSSQEHRYHRHRPIEWAAEEHREKLLQKMQSLWEKACENHRNLNVETTRTRCWKDYVNLRLEAIRAEYQKMPAFHHEEEKHNLEMLKKKGKEIFHRLHLSKAKMAHRMEILRGMYEELNEMCHKPDVELLQAFGDILHRSESVLLHMPQPLNPELSAGPITGLRDRLNQFRVHITLHHEEANNDIFLYEILRSMCIGCDHQDVPYFTATPRSFLAWGVQTFTSGKYYWEVHVGDSWNWAFGVCNMYRKEKNQNEKIDGKAGLFLLGCVKNDIQCSLFTTSPLMLQYIPKPTSRVGLFLDCEAKTVSFVDVNQSSLIYTIPNCSFSPPLRPIFCCIHF

SEQ ID NO: 37975 - protein, 315 aa, Homo sapiens
MTIRLLCYMGFYFLGAGLMEADIYQTPRYLVIGTGKKITLECSQTMGHDKMYWYQQDPGMELHLIHYSYGVNSTEKGDLSSESTVSRIRTEHFPLTLESARPSHTSQYLCASSEARGLAEFTDTQYFGPGTRLTVLEDLKNVFPPEVAVFEPSEAEISHTQKATLVCLATGFYPDHVELSWWVNGKEVHSGVSTDPQPLKEQPALNDSRYCLSSRLRVSATFWQNPRNHFRCQVQFYGLSENDEWTQDRAKPVTQIVSAEAWGRADCGFTSESYQQGVLSATILYEILLGKATLYAVLVSALVLMAMVKRKDSRG

SEQ ID NO: 37976 - protein, 249 aa, Homo sapiens
MAPSRKFFVGGNWKMNGRKQSLGELIGTLNAAKVPADTEVVCAPPTAYIDFARQKLDPKIAVAAQNCYKVTNGAFTGEISPGMIKDCGATWVVLGHSERRHVFGESDELIGQKVAHALAEGLGVIACIGEKLDEREAGITEKVVFEQTKVIADNVKDWSKVVLAYEPVWAIGTGKTATPQQAQEVHEKLRGWLKSNVSDAVAQSTRIIYGGSVTGATCKELASQPDVDGFLVGGASLKPEFVDIINAKQ

SEQ ID NO: 37977 - protein, 286 aa, Homo sapiens
MAEDGEEAEFHFAALYISGQWPRLRADTDLQRLGSSAMAPSRKFFVGGNWKMNGRKQSLGELIGTLNAAKVPADTEVVCAPPTAYIDFARQKLDPKIAVAAQNCYKVTNGAFTGEISPGMIKDCGATWVVLGHSERRHVFGESDELIGQKVAHALAEGLGVIACIGEKLDEREAGITEKVVFEQTKVIADNVKDWSKVVLAYEPVWAIGTGKTATPQQAQEVHEKLRGWLKSNVSDAVAQSTRIIYGGSVTGATCKELASQPDVDGFLVGGASLKPEFVDIINAKQ

SEQ ID NO: 37978 - protein, 167 aa, Homo sapiens
MIKDCGATWVVLGHSERRHVFGESDELIGQKVAHALAEGLGVIACIGEKLDEREAGITEKVVFEQTKVIADNVKDWSKVVLAYEPVWAIGTGKTATPQQAQEVHEKLRGWLKSNVSDAVAQSTRIIYGGSVTGATCKELASQPDVDGFLVGGASLKPEFVDIINAKQ

SEQ ID NO: 37979 - protein, 209 aa, Homo sapiens
MARGPLAARGLRLLLPLLPLLPLLPLPQVALGFADGSCDPSDQCPPQARWSSLWHVGLILLAVLLLLLCGVTAGCVRFCCLRKQAQAQPHLPPARQPCDVAVIPMDSDSPVHSTVTSYSSVQYPLGMRLPLPFGELDLDSMAPPAYSLYTPEPPPSYDEAVKMAKPREEGPALSQKPSPLLGASGLETTPVPQESGPNTQLPPCSPGAP

SEQ ID NO: 37980 - protein, 194 aa, Homo sapiens
MERHCLLFILLTCLRWLCHDIPQGAGARWPRVSPVVEPCSPRLILLAVLLLLLCGVTAGCVRFCCLRKQAQAQPHLPPARQPCDVAVIPMDSDSPVHSTVTSYSSVQYPLGMRLPLPFGELDLDSMAPPAYSLYTPEPPPSYDEAVKMAKPREEGPALSQKPSPLLGASGLETTPVPQESGPNTQLPPCSPGAP

SEQ ID NO: 37981 - protein, 231 aa, Homo sapiens
MAVFLEAKDAHSVLKRFPRANEFLEELRQGTIERECMEEICSYEEVKEVFENKEKTMEFWKGYPNAVYSVRDPSQSSDAMYVVVPLLGVALLIVIALFIIWRCQLQKATRHHPSYAQNRYLASRAGHTLPRVMVYRGTVHSQGEPSGHREAANSPQVVLGPSRGGRTTVRLESTLYLPELSLSRLSSTTPPPSYEEVTAPQESSSEEASVSYSDPPPKYEEIVAANPGADK

SEQ ID NO: 37982 - protein, 673 aa, Homo sapiens
MDHSCTRFIHRRGPPTRTRAGFKRGKRPRIQQRPRARVSGTIPASRLHPAPASQPGPCPAPGHCPVGPAHERPMGSSQEEGLRCQPSQPDHDADGHCGPDLEGAERASATPGPPGLLNSHRPADSDDTNAAGPSAALLEGLLLGGGKPSPHSTRPGPFFYIGGSNGATIISSYCKSKGWQRIHDSRRDDYTLKWCEVKSRDSYGSFREGEQLLYQLPNNKLLTTKIGLLSTLRGRARAMSKASKVPGGVQARLEKDAAAPALEDLPWTSPGYLRPQRVLRMEEFFPETYRLDLKHEREAFFTLFDETQIWICKPTASNQGKGIFLLRNQEEVAALQAKTRSMEDDPIHHKTPFRGPQARVVQRYIQNPLLVDGRKFDVRSYLLIACTTPYMIFFGHGYARLTLSLYDPHSSDLGGHLTNQFMQKKSPLYMLLKEHTVWSMEHLNRYISDTFWKARGLAKDWVFTTLKKRMQQIMAHCFLAAKPKLDCKLGYFDLIGCDFLIDDNFKVWLLEMNSNPALHTNCEVLKEVIPGVVIETLDLVLETFRKSLRGQKMLPLLSQRRFVLLHNGEADPRPHLGGSCSLRRWPPLPTRQAKSSGPPMPHAPDQPGARRPAPPPLVPQRPRPPGPDLDSAHDGEPQAPGTEQSGTGNRHPAQEPSPGTAKEEREEPENARP

SEQ ID NO: 37983 - protein, 600 aa, Homo sapiens
MGSSQEEGLRCQPSQPDHDADGHCGPDLEGAERASATPGPPGLLNSHRPADSDDTNAAGPSAALLEGLLLGGGKPSPHSTRPGPFFYIGGSNGATIISSYCKSKGWQRIHDSRRDDYTLKWCEVKSRDSYGSFREGEQLLYQLPNNKLLTTKIGLLSTLRGRARAMSKASKVPGGVQARLEKDAAAPALEDLPWTSPGYLRPQRVLRMEEFFPETYRLDLKHEREAFFTLFDETQIWICKPTASNQGKGIFLLRNQEEVAALQAKTRSMEDDPIHHKTPFRGPQARVVQRYIQNPLLVDGRKFDVRSYLLIACTTPYMIFFGHGYARLTLSLYDPHSSDLGGHLTNQFMQKKSPLYMLLKEHTVWSMEHLNRYISDTFWKARGLAKDWVFTTLKKRMQQIMAHCFLAAKPKLDCKLGYFDLIGCDFLIDDNFKVWLLEMNSNPALHTNCEVLKEVIPGVVIETLDLVLETFRKSLRGQKMLPLLSQRRFVLLHNGEADPRPHLGGSCSLRRWPPLPTRQAKSSGPPMPHAPDQPGARRPAPPPLVPQRPRPPGPDLDSAHDGEPQAPGTEQSGTGNRHPAQEPSPGTAKEEREEPENARP

SEQ ID NO: 37984 - protein, 404 aa, Homo sapiens
MGSSQEEGLRCQPSQPDHDADGHCGPDLEGAERASATPGPPGLLNSHRPADSDDTNAAGPSAALLEGLLLGGGKPSPHSTRPGPFFYIGGSNGATIISSYCKSKGWQRIHDSRRDDYTLKWCEVKSRDSYGSFREGEQLLYQLPNNKLLTTKIGLLSTLRGRARAMSKASKVPGGVQARLEKDAAAPALEDLPWTSPGYLRPQRVLRMEEFFPETYRLDLKHEREAFFTLFDETQIWICKPTASNQGKGIFLLRNQEEVAALQAKTRSMEDDPIHHKTPFRGPQARVVQRYIQNPLLVDGRKFDVRSYLLIACTTPYMIFFGHGYARLTLSLYDPHSSDLGGHLTNQFMQKKSPLYMLLKEHTVWSMEHLNRYISDTFWKARGLAKDWVFTTLKVRPLCPPVWE

SEQ ID NO: 37985 - protein, 239 aa, Homo sapiens
MQRGALSPVLMLSAAPEPPPRPPPALSPPGSGPGSGSRHGSARPGPTPEPSGSLGAALDSSLRAAVAFKAEGQRCYREKKFREAIGKYHRALLQLKAAQGARPSGLPAPAPGPTSSPGPARLSEEQRRLVESTEVECYDSLTACLLQSELVNYERVREYCLKVLEKQQGNFKATYRAGIAFYHLGDYARALRYLQEARSREPTDTNVLRYIQLTQLKMNRCSLQREDSGAGSQTRDVIG

SEQ ID NO: 37986 - protein, 192 aa, Homo sapiens
MQRGALSPVLMLSAAPEPPPRPPPALSPPGSGPGSGSRHGSARPGPTPEPSGSLGAALDSSLRAAVAFKAEGQRCYREKKFREAIGKYHRALLQLKAAQGARPSGLPAPAPGPTSSPGPARLSEEQRRLVESTEVECYDSLTGTPSGGGGMGHEGRGQSGELGDLGARGPGAEGSRAVGFSGSLQSLIKERD

SEQ ID NO: 37987 - protein, 523 aa, Homo sapiens
MAGVSYAAPWWVSLLHRLPHFDLSWEATSSQFRPEDTDYQQALLLLGAAALACLALDLLFLLFYSFWLCCRRRKSEEHLDADCCCTAWCVIIATLVCSAGIAVGFYGNGETSDGIHRATYSLRHANRTVAGVQDRVWDTAVGLNHTAEPSLQTLERQLAGRPEPLRAVQRLQGLLETLLGYTAAIPFWRNTAVSLEVLAEQVDLYDWYRWLGYLGLLLLDVIICLLVLVGLIRSSKGILVGVCLLGVLALVISWGALGLELAVSVGSSDFCVDPDAYVTKMVEEYSVLSGDILQYYLACSPRAANPFQQKLSGSHKALVEMQDVVAELLRTVPWEQPATKDPLLRVQEVLNGTEVNLQHLTALVDCRSLHLDYVQALTGFCYDGVEGLIYLALFSFVTALMFSSIVCSVPHTWQQKRGPDEDGEEEAAPGPRQAHDSLYRVHMPSLYSCGSSYGSETSIPAAAHTVSNAPVTEYMSQNANFQNPRCENTPLIGRESPPPSYTSSMRAKYLATSQPRPDSSGSH

SEQ ID NO: 37988 - protein, 491 aa, Homo sapiens
MAGVSYAAPWWVSLLHRLPHFDLSWEATSSQFRPEDTDYQQALLLLGAAALACLALDLLFLLFYSFWLCCRRRKSEEHLDADCCCTAWCVIIATLVCSAGIAVGFYGNGETSDGIHRATYSLRHANRTVAGVQDRVWDTAVGLNHTAEPSLQTLERQLAGRPEPLRAVQRLQGLLETLLGYTAAIPFWRNTAVSLEVLAEQVDLYDWYRVCLLGVLALVISWGALGLELAVSVGSSDFCVDPDAYVTKMVEEYSVLSGDILQYYLACSPRAANPFQQKLSGSHKALVEMQDVVAELLRTVPWEQPATKDPLLRVQEVLNGTEVNLQHLTALVDCRSLHLDYVQALTGFCYDGVEGLIYLALFSFVTALMFSSIVCSVPHTWQQKRGPDEDGEEEAAPGPRQAHDSLYRVHMPSLYSCGSSYGSETSIPAAAHTVSNAPVTEYMSQNANFQNPRCENTPLIGRESPPPSYTSSMRAKYLATSQPRPDSSGSH

SEQ ID NO: 37989 - protein, 352 aa, Homo sapiens
MPSGVPGCWPQLPLKGPWRPTPRPRVPVPWRTPRFACRWLGYLGLLLLDVIICLLVLVGLIRSSKGILVGVCLLGVLALVISWGALGLELAVSVGSSDFCVDPDAYVTKMVEEYSVLSGDILQYYLACSPRAANPFQQKLSGSHKALVEMQDVVAELLRTVPWEQPATKDPLLRVQEVLNGTEVNLQHLTALVDCRSLHLDYVQALTGFCYDGVEGLIYLALFSFVTALMFSSIVCSVPHTWQQKRGPDEDGEEEAAPGPRQAHDSLYRVHMPSLYSCGSSYGSETSIPAAAHTVSNAPVTEYMSQNANFQNPRCENTPLIGRESPPPSYTSSMRAKYLATSQPRPDSSGSH

SEQ ID NO: 37990 - protein, 526 aa, Homo sapiens
MAGVSYAAPWWVSLLHRLPHFDLSWEATSSQFRPEDTDYQQALLLLGAAALACLALDLLFLLFYSFWLCCRRRKSEEHLDADCCCTAWCVIIATLVCSAGIAVGFYGNGETSDGIHRATYSLRHANRTVAGVQDRVWDTAVGLNHTAEPSLQTLERQLAGRPEPLRAVQRLQGLLETLLGYTAAIPFWRNTAVSLEVLAEQVDLYDWYRWLGYLGLLLLDVIICLLVLVGLIRSSKGILVGVCLLGVLALVISWGALGLELAVSVGSSDFCVDPDAYVTKMVEEYSVLSGDILQYYLACSPRAANPFQQKLSGSHKALVEMQDVVAELLRTVPWEQPATKDPLLRVQEVLNGTEVNLQHLTALVDCRSLHLDYVQALTGFCYDGVEGLIYLALFSFVTALMFSSIVCSVPHTWQQKRGPDEDGEEEAAPGPRQAHDSLYRVHMPSLYSCGSSYGSETSIPAAAHTVSNAPVTEYMSQNANFQNPRCENTPLIGRESPPPSRYLAALDSGSHAGWQFKPMDSARTLW

SEQ ID NO: 37991 - protein, 1318 aa, Homo sapiens
MSGGASATGPRRGPPGLEDTTSKKKQKDRANQESKDGDPRKETGSRYVAQAGLEPLASGDPSASASHAAGITGSRHRTRLFFPSSSGSASTPQEEQTKEGACEDPHDLLATPTPELLLDWRQSAEEVIVKLRVGVGPLQLEDVDAAFTDTDCVVRFAGGQQWGGVFYAEIKSSCAKVQTRKGSLLHLTLPKKVPMLTWPSLLVEADEQLCIPPLNSQTCLLGSEENLAPLAGEKAVPPGNDPVSPAMVRSRNPGKDDCAKEEMAVAADAATLVDEPESMVNLAFVKNDSYEKGPDSVVVHVYVKEICRDTSRVLFREQDFTLIFQTRDGNFLRLHPGCGPHTTFRWQVKLRNLIEPEQCTFCFTASRIDICLRKRQSQRWGGLEAPAARVGGAKVAVPTGPTPLDSTPPGGAPHPLTGQEEARAVEKDKSKARSEDTGLDSVATRTPMEHVTPKPETHLASPKPTCMVPPMPHSPVSGDSVEEEEEEEKKVCLPGFTGLVNLGNTCFMNSVIQSLSNTRELRDFFHDRSFEAEINYNNPLGTGGRLAIGFAVLLRALWKGTHHAFQPSKLKAIVASKASQFTGYAQHDAQEFMAFLLDGLHEDLNRIQNKPYTETVDSDGRPDEVVAEEAWQRHKMRNDSFIVDLFQGQYKSKLVCPVCAKVSITFDPFLYLPVPLPQKQKVLPVFYFAREPHSKPIKFLVSVSKENSTASEVLDSLSQSVHVKPENLRLAEVIKNRFHRVFLPSHSLDTVSPSDTLLCFELLSSELAKERVVVLEVQQRPQVPSVPISKCAACQRKQQSEDEKLKRCTRCYRVGYCNQLCQKTHWPDHKGLCRPENIGYPFLVSVPASRLTYARLAQLLEGYARYSVSVFQPPFQPGRMALESQSPGCTTLLSTGSLEAGDSERDPIQPPELQLVTPMAEGDTGLPRVWAAPDRGPVPSTSGISSEMLASGPIEVGSLPAGERVSRPEAAVPGYQHPSEAMNAHTPQFFIYKIDSSNREQRLEDKGDTPLELGDDCSLALVWRNNERLQEFVLVASKELECAEDPGSAGEAARAGHFTLDQCLNLFTRPEVLAPEEAWYCPQCKQHREASKQLLLWRLPNVLIVQLKRFSFRSFIWRDKINDLVEFPVRNLDLSKFCIGQKEEQLPSYDLYAVINHYGGMIGGHYTACARLPNDRSSQRSDVGWRLFDDSTVTTVDESQVVTRYAYVLFYRRRNSPVERPPRAGHSEHHPDLGPAAEAAASQASRIWQELEAEEEPVPEGSGPLGPWGPQDWVGPLPRGPTTPDEGCLRYFVLGTVAALVALVLNVFYPLVSQSRWR

SEQ ID NO: 37992 - protein, 660 aa, Homo sapiens
MSGGASATGPRRGPPGLEDTTSKKKQKDRANQESKDGDPRKETGSRYVAQAGLEPLASGDPSASASHAAGITGSRHRTRLFFPSSSGSASTPQEEQTKEELLLDWRQSAEEVIVKLRVGVGPLQLEDVDAAFTDTDCVVRFAGGQQWGGVFYAEIKSSCAKVQTRKGSLLHLTLPKKVPMLTWPSLLKKPLGTQELVPGLRCQENGQELSPIALEPGPEPHRAKQEARNQKRAQGRGEVGAGAGPGAQAGPSAKRAVHLCRGPEGDGSRDDPGPRGDAPPFVADPATQVEADEQLCIPPLNSQTCLLGSEENLAPLAGEKAVPPGNDPVSPAMVRSRNPGKDDCAKEEMAVAADAATLVDEPESMVNLAFVKNDSYEKGPDSVVVHVYVKEICRDTSRVLFREQDFTLIFQTRDGNFLRLHPGCGPHTTFRWQVKLRNLIEPEQCTFCFTASRIDICLRKRQSQRWGGLEAPAARVGGAKVAVPTGPTPLDSTPPGGAPHPLTGQEEARAVEKDKSKARSEDTGLDSVATRTPMEHVTPKPETHLASPKPTCMVPPMPHSPVSGDSVEEEEEEEKKVCLPGFTGLVNLGNTCFMNSVIQSLSNTRELRDFFHDRSFEAEINYNNPLGTGGRLAIGFAVLLRALWKGTHHAFQPSKLKARL

SEQ ID NO: 37993 - protein, 1281 aa, Homo sapiens
MSGGASATGPRRGPPGLEDTTSKKKQKDRANQESKDGDPRKETGSRYVAQAGLEPLASGDPSASASHAAGITGSRHRTRLFFPSSSGSASTPQEEQTKEGACEDPHDLLATPTPELLLDWRQSAEEVIVKLRVGVGPLQLEDVDAAFTDTDCVVRFAGGQQWGGVFYAEIKSSCAKVQTRKGSLLHLTLPKKVPMLTWPSLLVEADEQLCIPPLNSQTCLLGSEENLAPLAGEKAVPPGNDPVSPAMVRSRNPGKDDCAKEEMAVAADAATLVDEPESMVNLAFVKNDSYEKGPDSVVVHVYVKEICRDTSRVLFREQDFTLIFQTRDGNFLRLHPGCGPHTTFRWQVKLRNLIEPEQCTFCFTASRIDICLRKRQSQRWGGLEAPAARVGGAKVAVPTGPTPLDSTPPGGAPHPLTGQEEARAVEKDKSKARSEDTGLDSVATRTPMEHVTPKPETHLASPKPTCMVPPMPHSPVSGDSVEEEEEEEKKVCLPGFTGLVNLGNTCFMNSVIQSLSNTRELRDFFHDRSFEAEINYNNPLGTGGRLAIGFAVLLRALWKGTHHAFQPSKLKAIVASKASQFTGYAQHDAQEFMAFLLDGLHEDLNRIQNKPYTETVDSDGRPDEVVAEEAWQRHKMRNDSFIVDLFQGQYKSKLVCPVCAKVSITFDPFLYLPVPLPQKQKVLPVFYFAREPHSKPIKFLVSVSKENSTASEVLDSLSQSVHVKPENLRLAEVIKNRFHRVFLPSHSLDTVSPSDTLLCFELLSSELAKERVVVLEVQQRPQVPSVPISKCAACQRKQQSEDEKLKRCTRCYRVGYCNQLCQKTHWPDHKGLCRPENIGYPFLVSVPASRLTYARLAQLLEGYARYSVSVFQPPFQPGRMALESQSPGCTTLLSTGSLEAGDSERDPIQPPELQLVTPMAEGDTGLPRVWAAPDRGPVPSTSGISSEMLASGPIEVGSLPAGERVSRPEAAVPGYQHPSEAMNAHTPQFFIYKIDSSNREQRLEDKGDTPLELGDDCSLALVWRNNERLQEFVLVASKELECAEDPGSAGEAARAGHFTLDQCLNLFTRPEVLAPEEAWYCPQCKQHREASKQLLLWRLPNVLIVQLKRFSFRSFIWRDKINDLVEFPVRNLDLSKFCIGQKEEQLPSYDLYAVINHYGGMIGGHYTACARLPNDRSSQRSDVGWRLFDDSTVTTVDESQVVTRYAYVLFYRRRNSPVERPPRAGHSEHHPDLGPAAEAAASQGLGPGQAPEVAPTRTAPERFAPPVDRPAPTYSNMEEVD

SEQ ID NO: 37994 - protein, 1268 aa, Homo sapiens
MSGGASATGPRRGPPGLEDTTSKKKQKDRANQESKDGDPRKETGSRYVAQAGLEPLASGDPSASASHAAGITGSRHRTRLFFPSSSGSASTPQEEQTKEELLLDWRQSAEEVIVKLRVGVGPLQLEDVDAAFTDTDCVVRFAGGQQWGGVFYAEIKSSCAKVQTRKGSLLHLTLPKKVPMLTWPSLLVEADEQLCIPPLNSQTCLLGSEENLAPLAGEKAVPPGNDPVSPAMVRSRNPGKDDCAKEEMAVAADAATLVDEPESMVNLAFVKNDSYEKGPDSVVVHVYVKEICRDTSRVLFREQDFTLIFQTRDGNFLRLHPGCGPHTTFRWQVKLRNLIEPEQCTFCFTASRIDICLRKRQSQRWGGLEAPAARGAVGGAKVAVPTGPTPLDSTPPGGAPHPLTGQEEARAVEKDKSKARSEDTGLDSVATRTPMEHVTPKPETHLASPKPTCMVPPMPHSPVSGDSVEEEEEEEKKVCLPGFTGLVNLGNTCFMNSVIQSLSNTRELRDFFHDRSFEAEINYNNPLGTGGRLAIGFAVLLRALWKGTHHAFQPSKLKAIVASKASQFTGYAQHDAQEFMAFLLDGLHEDLNRIQNKPYTETVDSDGRPDEVVAEEAWQRHKMRNDSFIVDLFQGQYKSKLVCPVCAKVSITFDPFLYLPVPLPQKQKVLPVFYFAREPHSKPIKFLVSVSKENSTASEVLDSLSQSVHVKPENLRLAEVIKNRFHRVFLPSHSLDTVSPSDTLLCFELLSSELAKERVVVLEVQQRPQVPSVPISKCAACQRKQQSEDEKLKRCTRCYRVGYCNQLCQKTHWPDHKGLCRPENIGYPFLVSVPASRLTYARLAQLLEGYARYSVSVFQPPFQPGRMALESQSPGCTTLLSTGSLEAGDSERDPIQPPELQLVTPMAEGDTGLPRVWAAPDRGPVPSTSGISSEMLASGPIEVGSLPAGERVSRPEAAVPGYQHPSEAMNAHTPQFFIYKIDSSNREQRLEDKGDTPLELGDDCSLALVWRNNERLQEFVLVASKELECAEDPGSAGEAARAGHFTLDQCLNLFTRPEVLAPEEAWYCPQCKQHREASKQLLLWRLPNVLIVQLKRFSFRSFIWRDKINDLVEFPVRNLDLSKFCIGQKEEQLPSYDLYAVINHYGGMIGGHYTACARLPNDRSSQRSDVGWRLFDDSTVTTVDESQVVTRYAYVLFYRRRNSPVERPPRAGHSEHHPDLGPAAEAAASQGLGPGQAPEVAPTRTAPERFAPPVDRPAPTYSNMEEVD

SEQ ID NO: 37995 - protein, 1419 aa, Homo sapiens
MSGGASATGPRRGPPGLEDTTSKKKQKDRANQESKDGDPRKETGSRYVAQAGLEPLASGDPSASASHAAGITGSRHRTRLFFPSSSGSASTPQEEQTKEGACEDPHDLLATPTPELLLDWRQSAEEVIVKLRVGVGPLQLEDVDAAFTDTDCVVRFAGGQQWGGVFYAEIKSSCAKVQTRKGSLLHLTLPKKVPMLTWPSLLKKPLGTQELVPGLRCQENGQELSPIALEPGPEPHRAKQEARNQKRAQGRGEVGAGAGPGAQAGPSAKRAVHLCRGPEGDGSRDDPGPRGDAPPFVADPATQVEADEQLCIPPLNSQTCLLGSEENLAPLAGEKAVPPGNDPVSPAMVRSRNPGKDDCAKEEMAVAADAATLVDEPESMVNLAFVKNDSYEKGPDSVVVHVYVKEICRDTSRVLFREQDFTLIFQTRDGNFLRLHPGCGPHTTFRWQVKLRNLIEPEQCTFCFTASRIDICLRKRQSQRWGGLEAPAARVGGAKVAVPTGPTPLDSTPPGGAPHPLTGQEEARAVEKDKSKARSEDTGLDSVATRTPMEHVTPKPETHLASPKPTCMVPPMPHSPVSGDSVEEEEEEEKKVCLPGFTGLVNLGNTCFMNSVIQSLSNTRELRDFFHDRSFEAEINYNNPLGTGGRLAIGFAVLLRALWKGTHHAFQPSKLKAIVASKASQFTGYAQHDAQEFMAFLLDGLHEDLNRIQNKPYTETVDSDGRPDEVVAEEAWQRHKMRNDSFIVDLFQGQYKSKLVCPVCAKVSITFDPFLYLPVPLPQKQKVLPVFYFAREPHSKPIKFLVSVSKENSTASEVLDSLSQSVHVKPENLRLAEVIKNRFHRVFLPSHSLDTVSPSDTLLCFELLSSELAKERVVVLEVQQRPQVPSVPISKCAACQRKQQSEDEKLKRCTRCYRVGYCNQLCQKTHWPDHKGLCRPENIGYPFLVSVPASRLTYARLAQLLEGYARYSVSVFQPPFQPGRMALESQSPGCTTLLSTGSLEAGDSERDPIQPPELQLVTPMAEGDTGLPRVWAAPDRGPVPSTSGISSEMLASGPIEVGSLPAGERVSRPEAAVPGYQHPSEAMNAHTPQFFIYKIDSSNREQRLEDKGDTPLELGDDCSLALVWRNNERLQEFVLVASKELECAEDPGSAGEAARAGHFTLDQCLNLFTRPEVLAPEEAWYCPQCKQHREASKQLLLWRLPNVLIVQLKRFSFRSFIWRDKINDLVEFPVRNLDLSKFCIGQKEEQLPSYDLYAVINHYGGMIGGHYTACARLPNDRSSQRSDVGWRLFDDSTVTTVDESQVVTRYAYVLFYRRRNSPVERPPRAGHSEHHPDLGPAAEAAASQASRIWQELEAEEEPVPEGSGPLGPWGPQDWVGPLPRGPTTPDEGCLRYFVLGTVAALVALVLNVFYPLVSQSRWR

SEQ ID NO: 37996 - protein, 1384 aa, Homo sapiens
MSGGASATGPRRGPPGLEDTTSKKKQKDRANQESKDGDPRKETGSRYVAQAGLEPLASGDPSASASHAAGITGSRHRTRLFFPSSSGSASTPQEEQTKEGACEDPHDLLATPTPELLLDWRQSAEEVIVKLRVGVGPLQLEDVDAAFTDTDCVVRFAGGQQWGGVFYAEIKSSCAKVQTRKGSLLHLTLPKKVPMLTWPSLLKKPLGTQELVPGLRCQENGQELSPIALEPGPEPHRAKQEARNQKRAQGRGEVGAGAGPGAQAGPSAKRAVHLCRGPEGDGSRDDPGPRGDAPPFVADPATQVEADEQLCIPPLNSQTCLLGSEENLAPLAGEKAVPPGNDPVSPAMVRSRNPGKDDCAKEEMAVAADAATLVDEPESMVNLAFVKNDSYEKGPDSVVVHVYVKEICRDTSRVLFREQDFTLIFQTRDGNFLRLHPGCGPHTTFRWQVKLRNLIEPEQCTFCFTASRIDICLRKRQSQRWGGLEAPAARGAVGGAKVAVPTGPTPLDSTPPGGAPHPLTGQEEARAVEKDKSKARSEDTGLDSVATRTPMEHVTPKPETHLASPKPTCMVPPMPHSPVSGDSVEEEEEEEKKVCLPGFTGLVNLGNTCFMNSVIQSLSNTRELRDFFHDRSFEAEINYNNPLGTGGRLAIGFAVLLRALWKGTHHAFQPSKLKAIVASKASQFTGYAQHDAQEFMAFLLDGLHEDLNRIQNKPYTETVDSDGRPDEVVAEEAWQRHKMRNDSFIVDLFQGQYKSKLVCPVCAKVSITFDPFLYLPVPLPQKQKVLPVFYFAREPHSKPIKFLVSVSKENSTASEVLDSLSQSVHVKPENLRLAEVIKNRFHRVFLPSHSLDTVSPSDTLLCFELLSSELAKERVVVLEVQQRPQVPSVPISKCAACQRKQQSEDEKLKRCTRCYRVGYCNQLCQKTHWPDHKGLCRPENIGYPFLVSVPASRLTYARLAQLLEGYARYSVSVFQPPFQPGRMALESQSPGCTTLLSTGSLEAGDSERDPIQPPELQLVTPMAEGDTGLPRVWAAPDRGPVPSTSGISSEMLASGPIEVGSLPAGERVSRPEAAVPGYQHPSEAMNAHTPQFFIYKIDSSNREQRLEDKGDTPLELGDDCSLALVWRNNERLQEFVLVASKELECAEDPGSAGEAARAGHFTLDQCLNLFTRPEVLAPEEAWYCPQCKQHREASKQLLLWRLPNVLIVQLKRFSFRSFIWRDKINDLVEFPVRNLDLSKFCIGQKEEQLPSYDLYAVINHYGGMIGGHYTACARLPNDRSSQRSDVGWRLFDDSTVTTVDESQVVTRYAYVLFYRRRNSPVERPPRAGHSEHHPDLGPAAEAAASQGLGPGQAPEVAPTRTAPERFAPPVDRPAPTYSNMEEVD

SEQ ID NO: 37997 - protein, 1372 aa, Homo sapiens
MSGGASATGPRRGPPGLEDTTSKKKQKDRANQESKDGDPRKETGSRYVAQAGLEPLASGDPSASASHAAGITGSRHRTRLFFPSSSGSASTPQEEQTKEGACEDPHDLLATPTPELLLDWRQSAEEVIVKLRVGVGPLQLEDVDAAFTDTDCVVRFAGGQQWGGVFYAEIKSSCAKVQTRKGSLLHLTLPKKKKPLGTQELVPGLRCQENGQELSPIALEPGPEPHRAKQEARNQKRAQGRGEVGAGAGPGAQAGPSAKRAVHLCRGPEGDGSRDDPGPRGDAPPFVADPATQVEADEQLCIPPLNSQTCLLGSEENLAPLAGEKAVPPGNDPVSPAMVRSRNPGKDDCAKEEMAVAADAATLVDEPESMVNLAFVKNDSYEKGPDSVVVHVYVKEICRDTSRVLFREQDFTLIFQTRDGNFLRLHPGCGPHTTFRWQVKLRNLIEPEQCTFCFTASRIDICLRKRQSQRWGGLEAPAARVGGAKVAVPTGPTPLDSTPPGGAPHPLTGQEEARAVEKDKSKARSEDTGLDSVATRTPMEHVTPKPETHLASPKPTCMVPPMPHSPVSGDSVEEEEEEEKKVCLPGFTGLVNLGNTCFMNSVIQSLSNTRELRDFFHDRSFEAEINYNNPLGTGGRLAIGFAVLLRALWKGTHHAFQPSKLKAIVASKASQFTGYAQHDAQEFMAFLLDGLHEDLNRIQNKPYTETVDSDGRPDEVVAEEAWQRHKMRNDSFIVDLFQGQYKSKLVCPVCAKVSITFDPFLYLPVPLPQKQKVLPVFYFAREPHSKPIKFLVSVSKENSTASEVLDSLSQSVHVKPENLRLAEVIKNRFHRVFLPSHSLDTVSPSDTLLCFELLSSELAKERVVVLEVQQRPQVPSVPISKCAACQRKQQSEDEKLKRCTRCYRVGYCNQLCQKTHWPDHKGLCRPENIGYPFLVSVPASRLTYARLAQLLEGYARYSVSVFQPPFQPGRMALESQSPGCTTLLSTGSLEAGDSERDPIQPPELQLVTPMAEGDTGLPRVWAAPDRGPVPSTSGISSEMLASGPIEVGSLPAGERVSRPEAAVPGYQHPSEAMNAHTPQFFIYKIDSSNREQRLEDKGDTPLELGDDCSLALVWRNNERLQEFVLVASKELECAEDPGSAGEAARAGHFTLDQCLNLFTRPEVLAPEEAWYCPQCKQHREASKQLLLWRLPNVLIVQLKRFSFRSFIWRDKINDLVEFPVRNLDLSKFCIGQKEEQLPSYDLYAVINHYGGMIGGHYTACARLPNDRSSQRSDVGWRLFDDSTVTTVDESQVVTRYAYVLFYRRRNSPVERPPRAGHSEHHPDLGPAAEAAASQGLGPGQAPEVAPTRTAPERFAPPVDRPAPTYSNMEEVD

SEQ ID NO: 37998 - protein, 123 aa, Homo sapiens
MTPASGATASLGRLRARPRSRWDAAYLPAVAAVCVARASHVPNGTLRFGVCKARRTMRPLPRRIEVRTKRGPQRPAAPERSPQPRLPPSRHPSRRGPRRHLSGCSAPACRIPTGCRCPCGRPS

SEQ ID NO: 37999 - protein, 1036 aa, Homo sapiens
MEVVGDFEYSKRDLVGHGAFAVVFRGRHRQKTDWEVAIKSINKKNLSKSQILLGKEIKILKELQHENIVALYDVQELPNSVFLVMEYCNGGDLADYLQAKGTLSEDTIRVFLHQIAAAMRILHSKGIIHRDLKPQNILLSYANRRKSSVSGIRIKIADFGFARYLHSNMMAATLCGSPMYMAPEVIMSQHYDAKADLWSIGTVIYQCLVGKPPFQANSPQDLRMFYEKNRSLMPSIPRETSPYLANLLLGLLQRNQKDRMDFEAFFSHPFLEQGPVKKSCPVPVPMYSGSVSGSSCGSSPSCRFASPPSLPDMQHIQEENLSSPPLGPPNYLQVSKDSASTSSKNSSCDTDDFVLVPHNISSDHSCDMPVGTAGRRASNEFLVCGGQCQPTVSPHSETAPIPVPTQIRNYQRIEQNLTSTASSGTNVHGSPRSAVVRRSNTSPMGFLRPGSCSPVPADTAQTVGRRLSTGSSRPYSPSPLVGTIPEQFSQCCCGHPQGHDSRSRNSSGSPVPQAQSPQSLLSGARLQSAPTLTDIYQNKQKLRKQHSDPVCPSHTGAGYSYSPQPSRPGSLGTSPTKHLGSSPRSSDWFFKTPLPTIIGSPTKTTAPFKIPKTQASSNLLALVTRHGPAEEQSKDGNEPRECAHCLLVQGSERQRAEQQSKAVFGRSVSTGKLSDQQGKTPICRHQGSTDSLNTERPMDIAPAGACGGVLAPPAGTAASSKAVLFTVGSPPHSAAAPTCTHMFLRTRTTSVGPSNSGGSLCAMSGRVCVGSPPGPGFGSSPPGAEAAPSLRYVPYGASPPSLEGLITFEAPELPEETLMEREHTDTLRHLNVMLMFTECVLDLTAMRGGNPELCTSAVSLYQIQESVVVDQISQLSKDWGRVEQLVLYMKAAQLLAASLHLAKAQIKSGKLSPSTAVKQVVKNLNERYKFCITMCKKLTEKLNRFFSDKQRFIDEINSVTAEKLIYNCAVEMVQSAALDEMFQQTEDIVYRYHKAALLLEGLSRILQDPADIENVHKYKCSIERRLSALCHSTATV

SEQ ID NO: 38000 - protein, 480 aa, Homo sapiens
MAVARAALGPLVTGLYDVQAFKFGDFVLKSGLSSPIYIDLRGIVSRPRLLSQVADILFQTAQNAGISFDTVCGVPYTALPLATVICSTNQIPMLIRRKETKDYGTKRLVEGTINPGETCLIIEDVVTSGSSVLETVEVLQKEGLKVTDAIVLLDREQGGKDKLQAHGIRLHSVCTLSKMLEILEQQKKVDAETVGRVKRFIQENVFVAANHNGSPLSIKEAPKELSFGARAELPRIHPVASKLLRLMQKKETNLCLSADVSLARELLQLADALGPSICMLKTHVDILNDFTLDVMKELITLAKCHEFLIFEDRKFADIGNTVKKQYEGGIFKIASWADLVNAHVVPGSGVVKGLQEVGLPLHRGCLLIAEMSSTGSLATGDYTRAAVRMAEEHSEFVVGFISGSRVSMKPEFLHLTPGVQLEAGGDNLGQQYNSPQEVIGKRGSDIIIVGRGIISAADRLEAAEMYRKAAWEAYLSRLGV

SEQ ID NO: 38001 - protein, 302 aa, Homo sapiens
MLEILEQQKKVDAETVGRVKRFIQENVFVAANHNGSPLSIKEAPKELSFGARAELPRIHPVASKLLRLMQKKETNLCLSADVSLARELLQLADALGPSICMLKTHVDILNDFTLDVMKELITLAKCHEFLIFEDRKFADIGNTVKKQYEGGIFKIASWADLVNAHVVPGSGVVKGLQEVGLPLHRGCLLIAEMSSTGSLATGDYTRAAVRMAEEHSEFVVGFISGSRVSMKPEFLHLTPGVQLEAGGDNLGQQYNSPQEVIGKRGSDIIIVGRGIISAADRLEAAEMYRKAAWEAYLSRLGV

SEQ ID NO: 38002 - protein, 388 aa, Homo sapiens
MLIRRKETKDYGTKRLVEGTINPGETCLIIEDVVTSGSSVLETVEVLQKEGLKVTDAIVLLDREQGGKDKLQAHGIRLHSVCTLSKMLEILEQQKKVDAETVGRVKRFIQENVFVAANHNGSPLSIKEAPKELSFGARAELPRIHPVASKLLRLMQKKETNLCLSADVSLARELLQLADALGPSICMLKTHVDILNDFTLDVMKELITLAKCHEFLIFEDRKFADIGNTVKKQYEGGIFKIASWADLVNAHVVPGSGVVKGLQEVGLPLHRGCLLIAEMSSTGSLATGDYTRAAVRMAEEHSEFVVGFISGSRVSMKPEFLHLTPGVQLEAGGDNLGQQYNSPQEVIGKRGSDIIIVGRGIISAADRLEAAEMYRKAAWEAYLSRLGV

SEQ ID NO: 38003 - protein, 205 aa, Homo sapiens
MLEILEQQKKVDAETVGRVKRFIQENVFVAANHNGSPLSIKEAPKELSFGARAELPRIHPVASKLLRLMQKKETNLCLSADVSLARELLQLADALGPSICMLKTHVDILNDFTLDVMKELITLAKCHEFLIFEDRKFADIGNTVKKQYEGDNLGQQYNSPQEVIGKRGSDIIIVGRGIISAADRLEAAEMYRKAAWEAYLSRLGV

SEQ ID NO: 38004 - protein, 1324 aa, Homo sapiens
MTIVDKASESSDPSAYQNQPGSSEAVSPGDMDAGSASWGAVSSLNDVSNHTLSLGPVPGAVVYSSSSVPDKSKPSPQKDQALGDGIAPPQKVLFPSEKICLKWQQTHRVGAGLQNLGNTCFANAALQCLTYTPPLANYMLSHEHSKTCHAEGFCMMCTMQAHITQALSNPGDVIKPMFVINEMRRIARHFRFGNQEDAHEFLQYTVDAMQKACLNGSNKLDRHTQATTLVCQIFGGYLRSRVKCLNCKGVSDTFDPYLDITLEIKAAQSVNKALEQFVKPEQLDGENSYKCSKCKKMVPASKRFTIHRSSNVLTLSLKRFANFTGGKIAKDVKYPEYLDIRPYMSQPNGEPIVYVLYAVLVHTGFNCHAGHYFCYIKASNGLWYQMNDSIVSTSDIRSVLSQQAYVLFYIRSHDVKNGGELTHPTHSPGQSSPRPVISQRVVTNKQAAPGFIGPQLPSHMIKNPPHLNGTGPLKDTPSSSMSSPNGNSSVNRASPVNASASVQNWSVNRSSVIPEHPKKQKITISIHNKLPVRQCQSQPNLHSNSLENPTKPVPSSTITNSAVQSTSNASTMSVSSKVTKPIPRSESCSQPVMNGKSKLNSSVLVPYGAESSEDSDEESKGLGKENGIGTIVSSHSPGQDAEDEEATPHELQEPMTLNGANSADSDSDPKENGLAPDGASCQGQPALHSENPFAKANGLPGKLMPAPLLSLPEDKILETFRLSNKLKGSTDEMSAPGAERGPPEDRDAEPQPGSPAAESLEEPDAAAGLSSTKKAPPPRDPGTPATKEGAWEAMAVAPEEPPPSAGEDIVGDTAPPDLCDPGSLTGDASPLSQDAKGMIAEGPRDSALAEAPEGLSPAPPARSEEPCEQPLLVHPSGDHARDAQDPSQSLGAPEAAERPPAPVLDMAPAGHPEGDAEPSPGERVEDAAAPKAPGPSPAKEKIGSLRKVDRGHYRSRRERSSSGEPARESRSKTEGHRHRRRRTCPRERDRQDRHAPEHHPGHGDRLSPGERRSLGRCSHHHSRHRSGVELDWVRHHYTEGERGWGREKFYPDRPRWDRCRYYHDRYALYAARDWKPFHGGREHERAGLHERPHKDHNRGRRGCEPARERERHRPSSPRAGAPHALAPHPDRFSHDRTALVAGDNCNLSDRFHEHENGKSRKRRHDSVENSDSHVEKKARRSEQKDPLEEPKAKKHKKSKKKKKSKDKHRDRDSRHQQDSDLSAACSDADLHRHKKKKKKKKRHSRKSEDFVKDSELHLPRVTSLETVAQFRRAQGGFPLSGGPPLEGVGPFREKTKHLRMESRDDRCRLFEYGQGKRRYLELGR

SEQ ID NO: 38005 - protein, 1316 aa, Homo sapiens
MTIVDKASESSDPSAYQNQPGSSEAVSPGDMDAGSASWGAVSSLNDVSNHTLSLGPVPGAVVYSSSSVPDKSKPSPQKDQALGDGIAPPQKVLFPSEKICLKWQQTHRVGAGLQNLGNTCFANAALQCLTYTPPLANYMLSHEHSKTCHAEGFCMMCTMQAHITQALSNPGDVIKPMFVINEMRRIARHFRFGNQEDAHEFLQYTVDAMQKACLNGSNKLDRHTQATTLVCQIFGGYLRSRVKCLNCKGVSDTFDPYLDITLEIKAAQSVNKALEQFVKPEQLDGENSYKCSKCKKMVPASKRFTIHRSSNVLTLSLKRFANFTGGKIAKDVKYPEYLDIRPYMSQPNGEPIVYVLYAVLVHTGFNCHAGHYFCYIKASNGLWYQMNDSIVSTSDIRSVLSQQAYVLFYIRSHDVKNGGELTHPTHSPGQSSPRPVISQRVVTNKQAAPGFIGPQLPSHMIKNPPHLNGTGPLKDTPSSSMSSPNGNSSVNRASPVNASASVQNWSVNRSSVIPEHPKKQKITISIHNKLPVRQCQSQPNLHSNSLENPTKPVPSSTITNSAVQSTSNASTMSVSSKVTKPIPRSESCSQPVMNGKSKLNSSVLVPYGAESSEDSDEESKGLGKENGIGTIVSSHSPGQDAEDEEATPHELQEPMTLNGANSADSDSDPKENGLAPDGASCQGQPALHSENPFAKANGLPGKLMPAPLLSLPEDKILETFRLSNKLKGSTDEMSAPGAERGPPEDRDAEPQPGSPAAESLEEPDAAAGLSSTKKAPPPRDPGTPATKEGAWEAMAVAPEEPPPSAGEDIVGDTAPPDLCDPGSLTGDASPLSQDAKGMIAEGPRDSALAEAPEGLSPAPPARSEEPCEQPLLVHPSGDHARDAQDPSQSLGAPEAAERPPAPVLDMAPAGHPEGDAEPSPGERVEDAAAPKAPGPSPAKEKIGSLRKVDRGHYRSRRERSSSGEPARESRSKTEGHRHRRRRTCPRERDRQDRHAPEHHPGHGDRLSPGERRSLGRCSHHHSRHRSGVELDWVRHHYTEGERGWGREKFYPDRPRWDRCRYYHDRYALYAARDWKPFHGGREHERAGLHERPHKDHNRGRRGCEPARERERHRPSSPRAGAPHALAPHPDRFSHDRTALVAGDNCNLSDRFHEHENGKSRKRRHDSVENSDSHVEKKARRSEQKDPLEEPKAKKHKKSKKKKKSKDKHRDRDSRHQQDSDLSAACSDADLHRHKKKKKKKKRHSRKSEDFVKDSELHLPRVTSLETVAQFRRAQGGFPLSGGPPLEGVGPFREKTKHLRMESRDDRCRLFEYGQGD

SEQ ID NO: 38006 - protein, 684 aa, Homo sapiens
MEANHSEQLSAERQSTPPGDSSSLPSHNGLEKEDGQDSPTPVQPPEKEASVHPDISEELNRQLEDIINTYGSAASTAGKEGSARASEQPENAESPDNEDGDCEETTEEAGREPVASGEPPTVKEPVSNKEQKLEKKILKGLGKEANLLMQNLNKLQTPEEKFDFLFKKYAELLDEHRTEQKKLKLLQKKQVQIQKEKDQLQGEHSRAILARSKLESLCRELQRHNKTLKEEALQRAREEEEKRKEITSHFQSTLTDIQGQIEQQSERNMKLCQENTELAEKLKSIIDQYELREEHLDKIFKHRELQQKLVDAKLEQAQEMMKEAEERHKREKEYLLNQAAEWKLQAKVLKEQETVLQAQLTLYSGRFEEFQSTLTKSNEVFATFKQEMDKTTKKMKKLEKDTATWKARFENCNKALLDMIEEKALRAKEYECFVMKIGRLENLCRALQEERNELHKKIRDAEISEKDDQSQHNSDEEPESNVSVDQEIDAEEVNSVQTAVKNLATAFMIIHHPESTPHQSKETQPEIGSSQESADAALKEPEQPPLIPSRDSESPLPPLTPQAEAEGGSDAEPPSKASNSPAGLGAETQCEGLPVGAQADQASWKPEAEASGQAPQAPTEASLQKMEADVPAPACAAEEHVAAMVPACEPSRQPPRAAAEELPVGASAGPQPRNVADTNLEGVD

SEQ ID NO: 38007 - protein, 153 aa, Homo sapiens
MMASMRVVKELEDLQKKPPPYLRNLSSDDANVLVWHALLLPDQPPYHLKAFNLRISFPPEYPFKPPMIKFTTKIYHPNVDENGQICLPIISSENWKPCTKTCQVLEALNVLVNRPNIREPLRMDLADLLTQNPELFRKNAEEFTLRFGVDRPS

SEQ ID NO: 38008 - protein, 87 aa, Homo sapiens
MIKFTTKIYHPNVDENGQICLPIISSENWKPCTKTCQVLEALNVLVNRPNIREPLRMDLADLLTQNPELFRKNAEEFTLRFGVDRPS

SEQ ID NO: 38009 - protein, 102 aa, Homo sapiens
MRGRRRAWRGAWRGGGAADLSLLCPQVAYVRARELHTLEVTGLETVAQSKAHVASLEGLIPEDKVVLLAGSPLQNEATLGQCGVEALTTLEVVGRRLGVHNV

SEQ ID NO: 38010 - protein, 873 aa, Homo sapiens
MFWKFDLHSSSHIDTLLEREDVTLKELMDEEDVLQECKAQNRKLIEFLLKAECLEDLVSFIIEEPPQDMDEKIRYKYPNISCELLTSDVSQMNDRLGEDESLLMKLYSFLLNDSPLNPLLASFFSKVLSILISRKPEQIVDFLKKKHDFVDLIIKHIGTSAIMDLLLRLLTCIEPPQPRQDVLNWLNEEKIIQRLVEIVHPSQEEDRHSNASQSLCEIVRLSRDQMLQIQNSTEPDPLLATLEKQEIIEQLLSNIFHKEKNESAIVSAIQILLTLLETRRPTFEGHIEICPPGMSHSACSVNKSVLEAIRGRLGSFHELLLEPPKKSVMKTTWGVLDPPVGNTRLNVIRLISSLLQTNTSSINGDLMELNSIGVILNMFFKYTWNNFLHTQVEICIALILASPFENTENATITDQDSTGDNLLLKHLFQKCQLIERILEAWEMNEKKQAEGGRRHGYMGHLTRIANCIVHSTDKGPNSALVQQLIKDLPDEVRERWETFCTSSLGETNKRNTVDLVTTCHIHSSSDDEIDFKETGFSQDSSLQQAFSDYQMQQMTSNFIDQFGFNDEKFADQDDIGNVSFDRVSDINFTLNTNESGNIALFEACCKERIQQFDDGGSDEEDIWEEKHIAFTPESQRRSSSGSTDSEESTDSEEEDGAKQDLFEPSSANTEDKMEVDLSEPPNWSANFDVPMETTHGAPLDSVGSDVWSTEEPMPTKETGWASFSEFTSSLSTKDSLRSNSPVEMETSTEPMDPLTPSAAALAVQPEAAGSVAMEASSDGEEDAESTDKVTETVMNGGMKETLSLTVDAKTETAVFKSEEGKLSTSQDAACKDAEECPETAEAKCAAPRPPSSSPEQRTGQPSAPGDTSVNGPV

SEQ ID NO: 38011 - protein, 867 aa, Homo sapiens
MFWKFDLHSSSHIDTLLEREDVTLKELMDEEDVLQECKAQNRKLIEFLLKAECLEDLVSFIIEEPPQDMDEKIRYKYPNISCELLTSDVSQMNDRLGEDESLLMKLYSFLLNDSPLNPLLASFFSKVLSILISRKPEQIVDFLKKKHDFVDLIIKHIGTSAIMDLLLRLLTCIEPPQPRQDVLNWLNEEKIIQRLVEIVHPSQEEDRHSNASQSLCEIVRLSRDQMLQIQNSTEPDPLLATLEKQEIIEQLLSNIFHKEKNESAIVSAIQILLTLLETRRPTFEGHIEICPPGMSHSACSVNKSVLEAIRGRLGSFHELLLEPPKKSVMKTTWGVLDPPVGNTRLNVIRLISSLLQTNTSSINGDLMELNSIGVILNMFFKYTWNNFLHTQVEICIALILASPFENTENATITDQDSTGDNLLLKHLFQKCQLIERILEAWEMNEKKQAEGGRRHGYMGHLTRIANCIVHSTDKGPNSALVQQLIKDLPDEVRERWETFCTSSLGETNKRNTVDLVTTCHIHSSSDDEIDFKETGFSQDSSLQQMQQMTSNFIDQFGFNDEKFADQDDIGNVSFDRVSDINFTLNTNESGNIALFEACCKERIQQFDDGGSDEEDIWEEKHIAFTPESQRRSSSGSTDSEESTDSEEEDGAKQDLFEPSSANTEDKMEVDLSEPPNWSANFDVPMETTHGAPLDSVGSDVWSTEEPMPTKETGWASFSEFTSSLSTKDSLRSNSPVEMETSTEPMDPLTPSAAALAVQPEAAGSVAMEASSDGEEDAESTDKVTETVMNGGMKETLSLTVDAKTETAVFKSEEGKLSTSQDAACKDAEECPETAEAKCAAPRPPSSSPEQRTGQPSAPGDTSVNGPV

SEQ ID NO: 38012 - protein, 791 aa, Homo sapiens
MFWKFDLHSSSHIDTLLEREDVTLKELMDEEDVLQECKAQNRKLIEFLLKAECLEDLVSFIIEEPPQDMDEKIRYKYPNISCELLTSDVSQMNDRLGEDESLLMKLYSFLLNDSPLNPLLASFFSKVLSILISRKPEQIVDFLKKKHDFVDLIIKHIGTSAIMDLLLRLLTCIEPPQPRQDVLNWLNEEKIIQRLVEIVHPSQEEDRHSNASQSLCEIVRLSRDQMLQIQNSTEPDPLLATLEKQEIIEQLLSNIFHKEKNESAIVSAIQILLTLLETRRPTFEGHIEICPPGMSHSACSVNKSVLEAIRGRLGSFHELLLEPPKNMFFKYTWNNFLHTQVEICIALILASPFENTENATITDQDSTGDNLLLKHLFQKCQLIERILEAWEMNEKKQAEGGRRHGYMGHLTRIANCIVHSTDKGPNSALVQQLIKDLPDEVRERWETFCTSSLGETNKRNTVDLAFSDYQMQQMTSNFIDQFGFNDEKFADQDDIGNVSFDRVSDINFTLNTNESGNIALFEACCKERIQQFDDGGSDEEDIWEEKHIAFTPESQRRSSSGSTDSEESTDSEEEDGAKQDLFEPSSANTEDKMEVDLSEPPNWSANFDVPMETTHGAPLDSVGSDVWSTEEPMPTKETGWASFSEFTSSLSTKDSLRSNSPVEMETSTEPMDPLTPSAAALAVQPEAAGSVAMEASSDGEEDAESTDKVTETVMNGGMKETLSLTVDAKTETAVFKSEEGKLSTSQDAACKDAEECPETAEAKCAAPRPPSSSPEQSGVEIPALPGQWSQQ

SEQ ID NO: 38013 - protein, 793 aa, Homo sapiens
MFWKFDLHSSSHIDTLLEREDVTLKELMDEEDVLQECKAQNRKLIEFLLKAECLEDLVSFIIEEPPQDMDEKIRYKYPNISCELLTSDVSQMNDRLGEDESLLMKLYSFLLNDSPLNPLLASFFSKVLSILISRKPEQIVDFLKKKHDFVDLIIKHIGTSAIMDLLLRLLTCIEPPQPRQDVLNWLNEEKIIQRLVEIVHPSQEEDRHSNASQSLCEIVRLSRDQMLQIQNSTEPDPLLATLEKQEIIEQLLSNIFHKEKNESAIVSAIQILLTLLETRRPTFEGHIEICPPGMSHSACSVNKSVLEAIRGRLGSFHELLLEPPKNMFFKYTWNNFLHTQVEICIALILASPFENTENATITDQDSTGDNLLLKHLFQKCQLIERILEAWEMNEKKQAEGGRRHGYMGHLTRIANCIVHSTDKGPNSALVQQLIKDLPDEVRERWETFCTSSLGETNKRNTVDLAFSDYQMQQMTSNFIDQFGFNDEKFADQDDIGNVSFDRVSDINFTLNTNESGNIALFEACCKERIQQFDDGGSDEEDIWEEKHIAFTPESQRRSSSGSTDSEESTDSEEEDGAKQDLFEPSSANTEDKMEVDLSEPPNWSANFDVPMETTHGAPLDSVGSDVWSTEEPMPTKETGWASFSEFTSSLSTKDSLRSNSPVEMETSTEPMDPLTPSAAALAVQPEAAGSVAMEASSDGEEDAESTDKVTETVMNGGMKETLSLTVDAKTETAVFKSEEGKLSTSQDAACKDAEECPETAEAKCAAPRPPSSSPEQRTGQPSAPGDTSVNGPV

SEQ ID NO: 38014 - protein, 879 aa, Homo sapiens
MFWKFDLHSSSHIDTLLEREDVTLKELMDEEDVLQECKAQNRKLIEFLLKAECLEDLVSFIIEEPPQDMDEKIRYKYPNISCELLTSDVSQMNDRLGEDESLLMKLYSFLLNDSPLNPLLASFFSKVLSILISRKPEQIVDFLKKKHDFVDLIIKHIGTSAIMDLLLRLLTCIEPPQPRQDVLNWLNEEKIIQRLVEIVHPSQEEDRHSNASQSLCEIVRLSRDQMLQIQNSTEPDPLLATLEKQEIIEQLLSNIFHKEKNESAIVSAIQILLTLLETRRPTFEGHIEICPPGMSHSACSVNKSVLEAIRGRLGSFHELLLEPPKKSVMKTTWGVLDPPVGNTRLNVIRLISSLLQTNTSSINGDLMELNSIGVILNMFFKYTWNNFLHTQVEICIALILASPFENTENATITDQDSTGDNLLLKHLFQKCQLIERILEAWEMNEKKQAEGGRRHGYMGHLTRIANCIVHSTDKGPNSALVQQLIKDLPDEVRERWETFCTSSLGETNKRNTVDLVTTCHIHSSSDDEIDFKETGFSQDSSLQQAFSDYQMQQMTSNFIDQFGFNDEKFADQDDIGNVSFDRVSDINFTLNTNESGNIALFEACCKERIQQFDDGGSDEEDIWEEKHIAFTPESQRRSSSGSTDSEESTDSEEEDGAKQDLFEPSSANTEDKMEVDLSEPPNWSANFDVPMETTHGAPLDSVGSDVWSTEEPMPTKETGWASFSEFTSSLSTKDSLRSNSPVEMETSTEPMDPLTPSAAALAVQPEAAGSVAMEASSDGEEDAESTDKVTETVMNGGMKETLSLTVDAKTETAVFKRVLKSYREEGKLSTSQDAACKDAEECPETAEAKCAAPRPPSSSPEQRTGQPSAPGDTSVNGPV

SEQ ID NO: 38015 - protein, 844 aa, Homo sapiens
MFWKFDLHSSSHIDTLLEREDVTLKELMDEEDVLQECKAQNRKLIEFLLKAECLEDLVSFIIEEPPQDMDEKIRYKYPNISCELLTSDVSQMNDRLGEDESLLMKLYSFLLNDSPLNPLLASFFSKVLSILISRKPEQIVDFLKKKHDFVDLIIKHIGTSAIMDLLLRLLTCIEPPQPRQDVLNWLNEEKIIQRLVEIVHPSQEEDRHSNASQSLCEIVRLSRDQMLQIQNSTEPDPLLATLEKQEIIEQLLSNIFHKEKNESAIVSAIQILLTLLETRRPTFEGHIEICPPGMSHSACSVNKSVLEAIRGRLGSFHELLLEPPKKSVMKTTWGVLDPPVGNTRLNVIRLISSLLQTNTSSINGDLMELNSIGVILNMFFKYTWNNFLHTQVEICIALILASPFENTENATITDQDSTGDNLLLKHLFQKCQLIERILEAWEMNEKKQAEGGRRHGYMGHLTRIANCIVHSTDKGPNSALVQQLIKDLPDEVRERWETFCTSSLGETNKRNTVDLAFSDYQMQQMTSNFIDQFGFNDEKFADQDDIGNVSFDRVSDINFTLNTNESGNIALFEACCKERIQQFDDGGSDEEDIWEEKHIAFTPESQRRSSSGSTDSEESTDSEEEDGAKQDLFEPSSANTEDKMEVDLSEPPNWSANFDVPMETTHGAPLDSVGSDVWSTEEPMPTKETGWASFSEFTSSLSTKDSLRSNSPVEMETSTEPMDPLTPSAAALAVQPEAAGSVAMEASSDGEEDAESTDKVTETVMNGGMKETLSLTVDAKTETAVFKSEEGKLSTSQDAACKDAEECPETAEAKCAAPRPPSSSPEQRTGQPSAPGDTSVNGPV

SEQ ID NO: 38016 - protein, 123 aa, Homo sapiens
MEGLVVAAGGDVSLHNFSARLWEQLVHFHVMRLTDSLFLWVGATPHLRNLAVAMCSRYDSIPVSTSLLGDTSDTTSTGLAQRLARKTNKQVFVSYNLQNTDSNFALLVENRIKEEMEAFPEKF

SEQ ID NO: 38017 - protein, 162 aa, Homo sapiens
MEGLVVAAGGDVSLHNFSARLWEQLVHFHVMRLTDSLFLWVGATPHLRNLAVAMCSRYDSIPVSTSLLGDTSDTTSTGLAQRLGLGGKTGLACECGVEWGLSKGHEAECSTLPTPQHTSCGPARKTNKQVFVSYNLQNTDSNFALLVENRIKEEMEAFPEKF

SEQ ID NO: 38018 - protein, 104 aa, Homo sapiens
MEGLVVAAGGDVSLHNFSARLWEQLVHFHVMRLTDSLFLWVGATPHLRNLAVAMCSRYDSIPVSTSLLGDTSDTTSTGLAQRLGMYPQLALHGQPGGAHSLMEP

SEQ ID NO: 38019 - protein, 115 aa, Homo sapiens
MIPAKDMAKVMIVMLAICFLTKSDGKSVKKRSVSEIQLMHNLGKHLNSMERVEWLRKKLQDVHNFVALGAPLAPRDAGSQRPRKKEDNVLVESHEKSLGEADKADVNVLTKAKSQ

SEQ ID NO: 38020 - protein, 307 aa, Homo sapiens
MAEISDLDRQIEQLRRCELIKESEVKALCAKAREILVEESNVQRVDSPVTVCGDIHGQFYDLKELFRVGGDVPETNYLFMGDFVDRGFYSVETFLLLLALKVRYPDRITLIRGNHESRQITQVYGFYDECLRKYGSVTVWRYCTEIFDYLSLSAIIDGKIFCVHGGLSPSIQTLDQIRTIDRKQEVPHDGPMCDLLWSDPEDTTGWGVSPRGAGYLFGSDVVAQFNAANDIDMICRAHQLVMEGYKWHFNETVLTVWSAPNYCYRCGNVAAILELDEHLQKDFIIFEAAPQETRGIPSKKPVADYFL

SEQ ID NO: 38021 - protein, 1439 aa, Homo sapiens
MDTTAAAALPAFVALLLLSPWPLLGSAQGQFSAGGCTFDDGPGACDYHQDLYDDFEWVHVSAQEPHYLPPEMPQGSYMIVDSSDHDPGEKARLQLPTMKENDTHCIDFSYLLYSQKGLNPGTLNILVRVNKGPLANPIWNVTGFTGRDWLRAELAVSTFWPNEYQVIFEAEVSGGRSGYIAIDDIQVLSYPCDKSPHFLRLGDVEVNAGQNATFQCIATGRDAVHNKLWLQRRNGEDIPVAQTKNINHRRFAASFRLQEVTKTDQDLYRCVTQSERGSGVSNFAQLIVREPPRPIAPPQLLGVGPTYLLIQLNANSIIGDGPIILKEVEYRMTSGSWTETHAVNAPTYKLWHLDPDTEYEIRVLLTRPGEGGTGLPGPPLITRTKCAEPMRTPKTLKIAEIQARRIAVDWESLGYNITRCHTFNVTICYHYFRGHNESKADCLDMDPKAPQHVVNHLPPYTNVSLKMILTNPEGRKESEETIIQTDEDVPGPVPVKSLQGTSFENKIFLNWKEPLDPNGIITQYEISYSSIRSFDPAVPVAGPPQTVSNLWNSTHHVFMHLHPGTTYQFFIRASTVKGFGPATAINVTTNISAPTLPDYEGVDASLNETATTITVLLRPAQAKGAPISAYQIVVEELHPHRTKREAGAMECYQVPVTYQNAMSGGAPYYFAAELPPGNLPEPAPFTVGDNRTYQGFWNPPLAPRKGYNIYFQAMSSVEKETKTQCVRIATKAATEEPEVIPDPAKQTDRVVKIAGISAGILVFILLLLVVILIVKKSKLAKKRKDAMGNTRQEMTHMVNAMDRSYADQSTLHAEDPLSITFMDQHNFSPRYENHSATAESSRLLDVPRYLCEGTESPYQTGQLHPAIRVADLLQHINLMKTSDSYGFKEEYESFFEGQSASWDVAKKDQNRAKNRYGNIIAYDHSRVILQPVEDDPSSDYINANYIDGYQRPSHYIATQGPVHETVYDFWRMIWQEQSACIVMVTNLVEVGRVKCYKYWPDDTEVYGDFKVTCVEMEPLAEYVVRTFTLERRGYNEIREVKQFHFTGWPDHGVPYHATGLLSFIRRVKLSNPPSAGPIVVHCSAGAGRTGCYIVIDIMLDMAEREGVVDIYNCVKALRSRRINMVQTEEQYIFIHDAILEACLCGETAIPVCEFKAAYFDMIRIDSQTNSSHLKDEFQTLNSVTPRLQAEDCSIACLPRNHDKNRFMDMLPPDRCLPFLITIDGESSNYINAALMDSYRQPAAFIVTQYPLPNTVKDFWRLVYDYGCTSIVMLNEVDLSQGCPQYWPEEGMLRYGPIQVECMSCSMDCDVINRIFRICNLTRPQEGYLMVQQFQYLGWASHREVPGSKRSFLKLILQVEKWQEECEEGEGRTIIHCLNGGGRSGMFCAIGIVVEMVKRQNVVDVFHAVKTLRNSKPNMVEAPEQYRFCYDVALEYLESS

SEQ ID NO: 38022 - protein, 1440 aa, Homo sapiens
MDTTAAAALPAFVALLLLSPWPLLGSAQGQFSAGGCTFDDGPGACDYHQDLYDDFEWVHVSAQEPHYLPPEMPQGSYMIVDSSDHDPGEKARLQLPTMKENDTHCIDFSYLLYSQKGLNPGTLNILVRVNKGPLANPIWNVTGFTGRDWLRAELAVSTFWPNEYQVIFEAEVSGGRSGYIAIDDIQVLSYPCDKSPHFLRLGDVEVNAGQNATFQCIATGRDAVHNKLWLQRRNGEDIPVAQTKNINHRRFAASFRLQEVTKTDQDLYRCVTQSERGSGVSNFAQLIVREPPRPIAPPQLLGVGPTYLLIQLNANSIIGDGPIILKEVEYRMTSGSWTETHAVNAPTYKLWHLDPDTEYEIRVLLTRPGEGGTGLPGPPLITRTKCAEPMRTPKTLKIAEIQARRIAVDWESLGYNITRCHTFNVTICYHYFRGHNESKADCLDMDPKAPQHVVNHLPPYTNVSLKMILTNPEGRKESEETIIQTDEDVPGPVPVKSLQGTSFENKIFLNWKEPLDPNGIITQYEISYSSIRSFDPAVPVAGPPQTVSNLWNSTHHVFMHLHPGTTYQFFIRASTVKGFGPATAINVTTNISAPTLPDYEGVDASLNETATTITVLLRPAQAKGAPISAYQIVVEELHPHRTKREAGAMECYQVPVTYQNAMSGGAPYYFAAELPPGNLPEPAPFTVGDNRTYQGFWNPPLAPRKGYNIYFQAMSSVEKETKTQCVRIATKAAATEEPEVIPDPAKQTDRVVKIAGISAGILVFILLLLVVILIVKKSKLAKKRKDAMGNTRQEMTHMVNAMDRSYADQSTLHAEDPLSITFMDQHNFSPRYENHSATAESSRLLDVPRYLCEGTESPYQTGQLHPAIRVADLLQHINLMKTSDSYGFKEEYESFFEGQSASWDVAKKDQNRAKNRYGNIIAYDHSRVILQPVEDDPSSDYINANYIDGYQRPSHYIATQGPVHETVYDFWRMIWQEQSACIVMVTNLVEVGRVKCYKYWPDDTEVYGDFKVTCVEMEPLAEYVVRTFTLERRGYNEIREVKQFHFTGWPDHGVPYHATGLLSFIRRVKLSNPPSAGPIVVHCSAGAGRTGCYIVIDIMLDMAEREGVVDIYNCVKALRSRRINMVQTEEQYIFIHDAILEACLCGETAIPVCEFKAAYFDMIRIDSQTNSSHLKDEFQTLNSVTPRLQAEDCSIACLPRNHDKNRFMDMLPPDRCLPFLITIDGESSNYINAALMDSYRQPAAFIVTQYPLPNTVKDFWRLVYDYGCTSIVMLNEVDLSQGCPQYWPEEGMLRYGPIQVECMSCSMDCDVINRIFRICNLTRPQEGYLMVQQFQYLGWASHREVPGSKRSFLKLILQVEKWQEECEEGEGRTIIHCLNGGGRSGMFCAIGIVVEMVKRQNVVDVFHAVKTLRNSKPNMVEAPEQYRFCYDVALEYLESS

SEQ ID NO: 38023 - protein, 1446 aa, Homo sapiens
MDTTAAAALPAFVALLLLSPWPLLGSAQGQFSAGGCTFDDGPGACDYHQDLYDDFEWVHVSAQEPHYLPPEMPQGSYMIVDSSDHDPGEKARLQLPTMKENDTHCIDFSYLLYSQKGLNPGTLNILVRVNKGPLANPIWNVTGFTGRDWLRAELAVSTFWPNEYQVIFEAEVSGGRSGYIAIDDIQVLSYPCDKSPHFLRLGDVEVNAGQNATFQCIATGRDAVHNKLWLQRRNGEDIPVAQTKNINHRRFAASFRLQEVTKTDQDLYRCVTQSERGSGVSNFAQLIVREPPRPIAPPQLLGVGPTYLLIQLNANSIIGDGPIILKEVEYRMTSGSWTETHAVNAPTYKLWHLDPDTEYEIRVLLTRPGEGGTGLPGPPLITRTKCAEPMRTPKTLKIAEIQARRIAVDWESLGYNITRCHTFNVTICYHYFRGHNESKADCLDMDPKAPQHVVNHLPPYTNVSLKMILTNPEGRKESEETIIQTDEDVPGPVPVKSLQGTSFENKIFLNWKEPLDPNGIITQYEISYSSIRSFDPAVPVAGPPQTVSNLWNSTHHVFMHLHPGTTYQFFIRASTVKGFGPATAINVTTNISAPTLPDYEGVDASLNETATTITVLLRPAQAKGAPISAYQIVVEELHPHRTKREAGAMECYQVPVTYQNAMSGGAPYYFAAELPPGNLPEPAPFTVGDNRTYQGFWNPPLAPRKGYNIYFQAMSSVEKETKTQCVRIATKAAATEEPEVIPDPAKQTDRVVKIAGISAGILVFILLLLVVILIVKKSKLAKKRKDAMGNTRQEMTHMVNAMDRSYADQSTLHAEDPLSITFMDQHNFSPRYENHSATAESSRLLDVPRYLCEGTESPYQTGQLHPAIRVADLLQHINLMKTSDSYGFKEEYESFFEGQSASWDVAKKDQNRAKNRYGNIIAYDHSRVILQPVEDDPSSDYINANYIDIWLYRDGYQRPSHYIATQGPVHETVYDFWRMIWQEQSACIVMVTNLVEVGRVKCYKYWPDDTEVYGDFKVTCVEMEPLAEYVVRTFTLERRGYNEIREVKQFHFTGWPDHGVPYHATGLLSFIRRVKLSNPPSAGPIVVHCSAGAGRTGCYIVIDIMLDMAEREGVVDIYNCVKALRSRRINMVQTEEQYIFIHDAILEACLCGETAIPVCEFKAAYFDMIRIDSQTNSSHLKDEFQTLNSVTPRLQAEDCSIACLPRNHDKNRFMDMLPPDRCLPFLITIDGESSNYINAALMDSYRQPAAFIVTQYPLPNTVKDFWRLVYDYGCTSIVMLNEVDLSQGCPQYWPEEGMLRYGPIQVECMSCSMDCDVINRIFRICNLTRPQEGYLMVQQFQYLGWASHREVPGSKRSFLKLILQVEKWQEECEEGEGRTIIHCLNGGGRSGMFCAIGIVVEMVKRQNVVDVFHAVKTLRNSKPNMVEAPEQYRFCYDVALEYLESS

SEQ ID NO: 38024 - protein, 1462 aa, Homo sapiens
MDTTAAAALPAFVALLLLSPWPLLGSAQGQFSAGGCTFDDGPGACDYHQDLYDDFEWVHVSAQEPHYLPPEMPQGSYMIVDSSDHDPGEKARLQLPTMKENDTHCIDFSYLLYSQKGLNPGTLNILVRVNKGPLANPIWNVTGFTGRDWLRAELAVSTFWPNEYQVIFEAEVSGGRSGYIAIDDIQVLSYPCDKSPHFLRLGDVEVNAGQNATFQCIATGRDAVHNKLWLQRRNGEDIPVAQTKNINHRRFAASFRLQEVTKTDQDLYRCVTQSERGSGVSNFAQLIVREPPRPIAPPQLLGVGPTYLLIQLNANSIIGDGPIILKEVEYRMTSGSWTETHAVNAPTYKLWHLDPDTEYEIRVLLTRPGEGGTGLPGPPLITRTKCAEPMRTPKTLKIAEIQARRIAVDWESLGYNITRCHTFNVTICYHYFRGHNESKADCLDMDPKAPQHVVNHLPPYTNVSLKMILTNPEGRKESEETIIQTDEDVPGPVPVKSLQGTSFENKIFLNWKEPLDPNGIITQYEISYSSIRSFDPAVPVAGPPQTVSNLWNSTHHVFMHLHPGTTYQFFIRASTVKGFGPATAINVTTNISAPTLPDYEGVDASLNETATTITVLLRPAQAKGAPISAYQIVVEELHPHRTKREAGAMECYQVPVTYQNAMSGGAPYYFAAELPPGNLPEPAPFTVGDNRTYQGFWNPPLAPRKGYNIYFQAMSSVEKETKTQCVRIATKAAATEEPEVIPDPAKQTDRVVKIAGISAGILVFILLLLVVILIVKKSKLAKKRKDAMGNTRQEMTHMVNAMDRSYADQSTLHAEDPLSITFMDQHNFSPRLPNDPLVPTAVLVPITDENHSATAESSRLLDVPRYLCEGTESPYQTGQLHPAIRVADLLQHINLMKTSDSYGFKEEYESFFEGQSASWDVAKKDQNRAKNRYGNIIAYDHSRVILQPVEDDPSSDYINANYIDIWLYRDGYQRPSHYIATQGPVHETVYDFWRMIWQEQSACIVMVTNLVEVGRVKCYKYWPDDTEVYGDFKVTCVEMEPLAEYVVRTFTLERRGYNEIREVKQFHFTGWPDHGVPYHATGLLSFIRRVKLSNPPSAGPIVVHCSAGAGRTGCYIVIDIMLDMAEREGVVDIYNCVKALRSRRINMVQTEEQYIFIHDAILEACLCGETAIPVCEFKAAYFDMIRIDSQTNSSHLKDEFQTLNSVTPRLQAEDCSIACLPRNHDKNRFMDMLPPDRCLPFLITIDGESSNYINAALMDSYRQPAAFIVTQYPLPNTVKDFWRLVYDYGCTSIVMLNEVDLSQGCPQYWPEEGMLRYGPIQVECMSCSMDCDVINRIFRICNLTRPQEGYLMVQQFQYLGWASHREVPGSKRSFLKLILQVEKWQEECEEGEGRTIIHCLNGGGRSGMFCAIGIVVEMVKRQNVVDVFHAVKTLRNSKPNMVEAPEQYRFCYDVALEYLESS

SEQ ID NO: 38025 - protein, 771 aa, Homo sapiens
MEEDKLLSAVPEEGDATRDPGPEPEEEPGVRNGMASEGLNSSLCSPGHERRGTPADTEEPTKDPDVAFHGLSLGLSLTNGLALGPDLNILEDSAESRPWRAGVLAEGDNASRSLYPDAEDPQLGLDGPGEPDVRDGFSATFEKILESELLRGTQYSSLDSLDGLSLTDESDSCVSFEAPLTPLIQQRARDSPEPGAGLGIGDMAFEGDMGAAGGDGELGSPLRRSISSSRSENVLSRLSLMAMPNGFHEDGPQGPGGDEDDDEEDTDKLLNSASDPSLKDGLSDSDSELSSSEGLEPGSADPLANGCQGVSEAAHRLARRLYHLEGFQRCDVARQLGKNNEFSRLVAGEYLSFFDFSGLTLDGALRTFLKAFPLMGETQERERVLTHFSRRYCQCNPDDSTSEDGIHTLTCALMLLNTDLHGHNIGKKMSCQQFIANLDQLNDGQDFAKDLLKTLYNSIKNEKLEWAIDEDELRKSLSELVDDKFGTGTKKVTRILDGGNPFLDVPQALSATTYKHGVLTRKTHADMDGKRTPRGRRGWKKFYAVLKGTILYLQKDEYRPDKALSEGDLKNAIRVHHALATRASDYSKKSNVLKLKTADWRVFLFQAPSKEEMLSWILRINLVAAIFSAPAFPAAVSSMKKFCRPLLPSCTTRLCQEEQLRSHENKLRQLTAELAEHRCHPVERGIKSKEAEEYRLKEHYLTFEKSRYETYIHLLAMKIKVGSDDLERIEARLATLEGDDPSLRKTHSSPALSQGHVTGSKTTKDATGPDT

SEQ ID NO: 38026 - protein, 1066 aa, Homo sapiens
MGFELDRFDGDVDPDLKCALCHKVLEDPLTTPCGHVFCAGCVLPWVVQEGSCPARCRGRLSAKELNHVLPLKRLILKLDIKCAYATRGCGRVVKLQQLPEHLERCDFAPARCRHAGCGQVLLRRDVEAHMRDACDARPVGRCQEGCGLPLTHGEQRAGGHCCARALRAHNGALQARLGALHKALKKEALRAGKREKSLVAQLAAAQLELQMTALRYQKKFTEYSARLDSLSRCVAAPPGGKGEETKSLTLVLHRDSGSLGFNIIGGRPSVDNHDGSSSEGIFVSKIVDSGPAAKEGGLQIHDRIIEVNGRDLSRATHDQAVEAFKTAKEPIVVQVLRRTPRTKMFTPPSESQLVDTGTQTDITFEHIMALTKMSSPSPPVLDPYLLPEEHPSAHEYYDPNDYIGDIHQEMDREELELEEVDLYRMNSQDKLGLTVCYRTDDEDDIGIYISEIDPNSIAAKDGRIREGDRIIQINGIEVQNREEAVALLTSEENKNFSLLIARPELQLDEGWMDDDRNDFLDDLHMDMLEEQHHQAMQFTASVLQQKKHDEDGGTTDTATILSNQHEKDSGVGRTDESTRNDESSEQENNGDDATASSNPLAGQRKLTCSQDTLGSGDLPFSNESFISADCTDADYLGIPVDECERFRELLELKCQVKSATPYGLYYPSGPLDAGKSDPESVDKELELLNEELRSIELECLSIVRAHKMQQLKEQYRESWMLHNSGFRNYNTSIDVRRHELSDITELPEKSDKDSSSAYNTGESCRSTPLTLEISPDNSLRRAAEGISCPSSEGAVGTTEAYGPASKNLLSITEDPEVGTPTYSPSLKELDPNQPLESKERRASDGSRSPTPSQKLGSAYLPSYHHSPYKHAHIPAHAQHYQSYMQLIQQKSAVEYAQSQMSLVSMCKDLSSPTPSEPRMEWKVKIRSDGTRYITKRPVRDRLLRERALKIREERSGMTTDDDAVSEMKMGRYWSKEERKQHLVKAKEQRRRREFMMQSRLDCLKEQQAADDRKEMNILELSHKKMMKKRNKKIFDNWMTIQELLTHGTKSPDGTRVYNSFLSVTTV

SEQ ID NO: 38027 - protein, 360 aa, Homo sapiens
MGFELDRFDGDVDPDLKCALCHKVLEDPLTTPCGHVFCAGCVLPWVVQEGSCPARCRGRLSAKELNHVLPLKRLILKLDIKCAYATRGCGRVVKLQQLPEHLERCDFAPARCRHAGCGQVLLRRDVEAHMRDACDARPVGRCQEGCGLPLTHGEQRAGGHCCARALRAHNGALQARLGALHKALKKEALRAGKREKSLVAQLAAAQLELQMTALRYQKKFTEYSARLDSLSRCVAAPPGGKGEETKSLTLVLHRDSGSLGFNIIGGRPSVDNHDGSSSEGIFVSKIVDSGPAAKEGGLQIHDRIIEMRKLELRTVKLPKAHSQDSNAGFIPQLLSLHTPPLSCEKGGGHLACGGAYLNCI

SEQ ID NO: 38028 - protein, 729 aa, Homo sapiens
MGFELDRFDGDVDPDLKCALCHKVLEDPLTTPCGHVFCAGCVLPWVVQEGSCPARCRGRLSAKELNHVLPLKRLILKLDIKCAYATRGCGRVVKLQQLPEHLERCDFAPARCRHAGCGQVLLRRDVEAHMRDACDARPVGRCQEGCGLPLTHGEQRAGGHCCARALRAHNGALQARLGALHKALKKEALRAGKREKSLVAQLAAAQLELQMTALRYQKKFTEYSARLDSLSRCVAAPPGGKGEETKSLTLVLHRDSGSLGFNIIGGRPSVDNHDGSSSEGIFVSKIVDSGPAAKEGGLQIHDRIIEVNGRDLSRATHDQAVEAFKTAKEPIVVQVLRRTPRTKMFTPPSESQLVDTGTQTDITFEHIMALTKMSSPSPPVLDPYLLPEEHPSAHEYYDPNDYIGDIHQEMDREELELEEVDLYRMNSQDKLGLTVCYRTDDEDDIGIYISEIDPNSIAAKDGRIREGDRIIQINGIEVQNREEAVALLTSEENKNFSLLIARPELQLDEGWMDDDRNDFLDDLHMDMLEEQHHQAMQFTASVLQQKKHDEDGGTTDTATILSNQHEKDSGVGRTDESTRNDESSEQENNGDDATASSNPLAGQRKLTCSQDTLGSGDLPFSNESFISADCTDADYLGIPVEGEDPQRRDALHHQEARAGPPAAGARPEDPGRAQRHDHRRRRGERDEDGALLEQGGEEAAPGEGQGAAAAARVHDAEQVGLSQGAASSR

SEQ ID NO: 38029 - protein, 457 aa, Homo sapiens
MSGTRASNDRPPGAGGVKRGRLQQEAAATGSRVTVVLGAQWGDEGKGKVVDLLATDADIISRCQGGNNAGHTVVVDGKEYDFHLLPSGIINTKAVSFIGNGVVIHLPGLFEEAEKNEKKGLKDWEKRLIISDRAHLVFDFHQAVDGLQEVQRQAQEGKNIGTTKKGIGPTYSSKAARTGLRICDLLSDFDEFSSRFKNLAHQHQSMFPTLEIDIEGQLKRLKGFAERIRPMVRDGVYFMYEALHGPPKKILVEGANAALLDIDFGTYPFVTSSNCTVGGVCTGLGIPPQNIGDVYGVVKAYTTRVGIGAFPTEQINEIGGLLQTRGHEWGVTTGRKRRCGWLDLMILRYAHMVNGFTALALTKLDILDVLGEVKVGVSYKLNGKRIPYFPANQEMLQKVEVEYETLPGWKADTTGARRWEDLPPQAQNYIRFVENHVGVAVKWVGVGKSRESMIQLF

SEQ ID NO: 38030 - protein, 500 aa, Homo sapiens
MVGRSCGVATQRQGGGQRPTNLALTLSSSPAHSTALPWLPPRSLQLLSGHSVPAQPTPHLPSACGGPTRVTLGEERAWRSHGSNAGGHTCLPRRTAGAGSLTPGGERGGNNAGHTVVVDGKEYDFHLLPSGIINTKAVSFIGNGVVIHLPGLFEEAEKNEKKGLKDWEKRLIISDRAHLVFDFHQAVDGLQEVQRQAQEGKNIGTTKKGIGPTYSSKAARTGLRICDLLSDFDEFSSRFKNLAHQHQSMFPTLEIDIEGQLKRLKGFAERIRPMVRDGVYFMYEALHGPPKKILVEGANAALLDIDFGTYPFVTSSNCTVGGVCTGLGIPPQNIGDVYGVVKAYTTRVGIGAFPTEQINEIGGLLQTRGHEWGVTTGRKRRCGWLDLMILRYAHMVNGFTALALTKLDILDVLGEVKVGVSYKLNGKRIPYFPANQEMLQKVEVEYETLPGWKADTTGARRWEDLPPQAQNYIRFVENHVGVAVKWVGVGKSRESMIQLF

SEQ ID NO: 38031 - protein, 530 aa, Homo sapiens
MDDLQSQNLSMDMTDSPPALANNRLENGMAQLITTEAWNINSTDLVKKALVTVPAPSILNPPAESQSGMALKVAATVLQPLCLGESPVVMPIHMQVEGSSAPELNPNGNATYVMTTQGPVQLPVVLEQHVFQHLNSPLVLPQEAPCSSSTIHNNLFQGAEDPEAQPQLLDLRIPSQPQEPTLPFEAVLQNLFPSQGTLGPPPCQPPPGYAPVPPQPFSSPLSPLVPPATLLVPYPVIVPLPVPVPIPIPIPMPQSSESKFSSSFPKPPSSFGLHPFKGTQTPLEKDELKPFDILQPKEYFQLSRHTVIKMGSENEALDLSMKSVPWLKAGEVSPPIFQEDAALDLSVAAHRKSEPPPETLYDSGASVDSSGHTVMEKLPSGMEISFAPATSHEAPAMMDSHISSSDAATEMLSQPNHPSGEVKAENNIEMVGESQAAKVIVSVEDAVPTIFCGKIKGLSGVSTKNFSFKREDSVLQGYDINSQGEESMGNAEPLRKPIKNRSIKLKKVNSQEIHMLPIKKQRLATFFPRK

SEQ ID NO: 38032 - protein, 480 aa, Homo sapiens
MDDLQSQNLSMDMTDSPPALANNRLENGMAQLITTEAWNINSTDLVEGSSAPELNPNGNATYVMTTQGPVQLPVVLEQHVFQHLNSPLVLPQEAPCSSSTIHNNLFQGAEDPEAQPQLLDLRIPSQPQEPTLPFEAVLQNLFPSQGTLGPPPCQPPPGYAPVPPQPFSSPLSPLVPPATLLVPYPVIVPLPVPVPIPIPIPMPQSSESKFSSSFPKPPSSFGLHPFKGTQTPLEKDELKPFDILQPKEYFQLSRHTVIKMGSENEALDLSMKSVPWLKAGEVSPPIFQEDAALDLSVAAHRKSEPPPETLYDSGASVDSSGHTVMEKLPSGMEISFAPATSHEAPAMMDSHISSSDAATEMLSQPNHPSGEVKAENNIEMVGESQAAKVIVSVEDAVPTIFCGKIKGLSGVSTKNFSFKREDSVLQGYDINSQGEESMGNAEPLRKPIKNRSIKLKKVNSQEIHMLPIKKQRLATFFPRK

SEQ ID NO: 38033 - protein, 373 aa, Homo sapiens
MATQAHSLSYAGCNFLRQRLVLSTLSGRPVKIRKIRARDDNPGLRDFEASFIRLLDKITNGSRIEINQTGTTLYYQPGLLYGGSVEHDCSVLRGIGYYLESLLCLAPFMKHPLKIVLRGVTNDQVDPSVDVLKATALPLLKQFGIDGESFELKIVRRGMPPGGGGEVVFSCPVRKVLKPIQLTDPGKIKRIRGMAYSVRVSPQMANRIVDSARSILNKFIPDIYIYTDHMKGVNSGKSPGFGLSLVAETTSGTFLSAELASNPQGQGAAVLPEDLGRNCARLLLEEIYRGGCVDSTNQSLALLLMTLGQQDVSKVLLGPLSPYTIEFLRHLKSFFQIMFKIETKPCGEELKGGDKVLMTCVGIGFSNLSKTLK

SEQ ID NO: 38034 - protein, 187 aa, Homo sapiens
MTSLTPGCRYSVRVSPQMANRIVDSARSILNKFIPDIYIYTDHMKGVNSGKSPGFGLSLVAETTSGTFLSAELASNPQGQGAAVLPEDLGRNCARLLLEEIYRGGCVDSTNQSLALLLMTLGQQDVSKVLLGPLSPYTIEFLRHLKSFFQIMFKIETKPCGEELKGGDKVLMTCVGIGFSNLSKTLK

SEQ ID NO: 38035 - protein, 803 aa, Homo sapiens
MAKRSSLYIRIVEGKNLPAKDITGSSDPYCIVKVDNEPIIRTATVWKTLCPFWGEEYQVHLPPTFHAVAFYVMDEDALSRDDVIGKVCLTRDTIASHPKGFSGWAHLTEVDPDEEVQGEIHLRLEVWPGARACRLRCSVLEARDLAPKDRNGTSDPFVRVRYKGRTRETSIVKKSCYPRWNETFEFELQEGAMEALCVEAWDWDLVSRNDFLGKVVIDVQRLRVVQQEEGWFRLQPDQSKSRRHDEGNLGSLQLEVRLRDETVLPSSYYQPLVHLLCHEVKLGMQGPGQLIPLIEETTSTECRQDVATNLLKLFLGQGLAKDFLDLLFQLELSRTSETNTLFRSNSLASKSVESFLKVAGMQYLHGVLGPIINKVFEEKKYVELDPSKVEVKDVGCSGLHRPQTEAEVLEQSAQTLRAHLGALLSALSRSVRACPAVVRATFRQLFRRVRERFPGAQHENVPFIAVTSFLCLRFFSPAIMSPKLFHLRERHADARTSRTLLLLAKAVQNVGNMDTPASRAKEAWMEPLQPTVHQGVAQLKDFITKLVDIEEKDELDLQRTLSLQAPPVKEGPLFIHRTKGKGPLMSSSFKKLYFSLTTEALSFAKTPSSKKSALIKLANIRAAEKVEEKSFGGSHVMQVIYTDDAGRPQTAYLQCKCVNELNQWLSALRKVSINNTGLLGSYHPGVFRGDKWSCCHQKEKTGQGCDKTRSRVTLQEWNDPLDHDLEAQLIYRHLLGVEAMLWERHRELSGGAEAGTVPTSPGKVPEDSLARLLRVLQDLREAHSSSPAGSPPSEPNCLLELQT

SEQ ID NO: 38036 - protein, 197 aa, Homo sapiens [sequence omitted]

SEQ ID NO: 38037 - protein, 243 aa, Homo sapiens
MRGESYFIGMRSPGQQGHVPEDGGLFLLCCIDRDWAVTRCFAEEAFQAITDFNDLPNSLFACNVHQSVFEGEESKEKFEGLFRTYDDCVTFQLFKSFRRVRINFSNPKSAARARIELHETQFRGKKLKLYFAQVQTPETDGDKLHLAPPQPAKQFLISPPSSPPVGWQPINDATPVLNYDLLYAVAKLGPGEKYELHAGTESTPSVVVHVCDSDIEEEEDPKTSPKPKIIQTRRPGLPPSVSN

SEQ ID NO: 38038 - protein, 792 aa, Homo sapiens
MQQESERCRVRARRPDMALYVPKARRGAVLLKTGDEEESCGSPNSVVKEKQKESSLSQKEVFKDKPEARRLNINPDRKEHNCREEKKSSTKLRMDTCLQKTNRVCSKRGTTESKEVLSQGQQQGAPNAGVITNAPLQRHFKPKKVECLEVETTDVTGHERILLSQACLEISEAQVPSKPFQNVEFCDFSRHEPDGEAFEDKDLEGRIETDTKVLEILYEFPRVFSSVMKPENMIVPIKLSSDSEIVQQSMQTSDGILNPSSGGITTTSVPGSPDGVFDQTCVDFEVESVGGIANSTGFILDQKDTDSIPATMGHISLSESTNDTVSPVMIRECEKNDSTADELHVKHEPPDTAVLAHETHRDSGFKNVGDITNKACMMDTTGMSCSDHVTVDSPYVVAVRIADETSINTRSFSKFVGMSADATPLHVARSGNDTEDFSNPSACSDIYGESISSHFTESTGKLIESLSDCASSLPIKKIAGSNYNTFLDSELSMLNGTKVLSDSAVGIDLGSTGDTTEALHELRTAEEFKTEEQDDSGSIEFGVSFPDRESSSMETSIEPKATETSHTEGITAIEESWESMFNDDGDCLDPRLLQEGILMHIKPENHCSKLSGNTKSRESIQEPRSDYYNHEVPDIDLSDCEFPHVIEIYDFPQEFHTEDLLRVFCSYQKKGFDIKWVDDTHALGVFSSPITARDALGIKHTMVKIRPLSQATRAAKAKARAYAEFLQPAKERPETSAALARRLVISALGVRSKQSKTEREAELKKLQEARERKRLEAKQREDIWEGRDQSTV

SEQ ID NO: 38039 - protein, 778 aa, Homo sapiens
MQQESERCRVRARRPDMALYVPKARRGAVLLKTGDEEESCGSPNSVVKEKQKESSLSQKEVFKDKPEARRLNINPDRKEHNCREEKKSSTKLRMDTCLQKTNRVCSKRGTTESKEVLSQGQQQGAPNAGVITNAPLQRHFKPKKVECLEVETTDVTGHERILLSQACLEISEAQVPSKPFQNVEFCDFSRHEPDGEAFEDKDLEGRIETDTKVLEILYEFPRVFSSVMKPENMIVPIKLSSDSEIVQQSMQTSDGILNPSSGGITTTSVPGSPDGVFDQTCVDFEVESVGGIANSTGFILDQKDTDSIPATMGHISLSESTNDTVSPVMIRECEKNDSTADELHVKHEPPDTAVLAHETHRDSGFKNVGDITNKACMMDTTGMSCSDHVTVDSPYVVAVRIADETSINTRSFSKFVGMSADATPLHVARSGNDTEDFSNPSACSDIYGESISSHFTESTGKLIESLSDCASSLPIKKIAGSNYNTFLDSELSMLNGTKVLSDSAVGIDLGSTGDTTEALHELRTAEEFKTEEQDDSGSIEFGVSFPDRESSSMETSIEPKATETSHTEGITAIEESWESMFNDDGDCLDPRLLQKLSGNTKSRESIQEPRSDYYNHEVPDIDLSDCEFPHVIEIYDFPQEFHTEDLLRVFCSYQKKGFDIKWVDDTHALGVFSSPITARDALGIKHTMVKIRPLSQATRAAKAKARAYAEFLQPAKERPETSAALARRLVISALGVRSKQSKTEREAELKKLQEARERKRLEAKQREDIWEGRDQSTV

SEQ ID NO: 38040 - protein, 184 aa, Homo sapiens
MLSGNTKSRESIQEPRSDYYNHEVPDIDLSDCEFPHVIEIYDFPQEFHTEDLLRVFCSYQKKGFDIKWVDDTHALGVFSSPITARDALGIKHTMVKIRPLSQATRAAKAKARAYAEFLQPAKERPETSAALARRLVISALGVRSKQSKTEREAELKKLQEARERKRLEAKQREDIWEGRDQSTV

SEQ ID NO: 38041 - protein, 175 aa, Homo sapiens
MLPPMALPSVSWMLLSCLMLLSQVQGEEPQRELPSARIRCPKGSKAYGSHCYALFLSPKSWTDADLACQKRPSGNLVSVLSGAEGSFVSSLVKSIGNSYSYVWIGLHDPTQGTEPNGEGWEWSSSDVMNYFAWERNPSTISSPGHCASLSRSTAFLRWKDYNCNVRLPYVCKFTD

SEQ ID NO: 38042 - protein, 391 aa, Homo sapiens
MAAVVENVVKLLGEQYYKDAMEQCHNYNARLCAERSVRLPFLDSQTGVAQSNCYIWMEKRHRGPGLASGQLYSYPARRWRKKRRAHPPEDPRLSFPSIKPDTDQTLKKEGLISQDGSSLEALLRTDPLEKRGAPDPRVDDDSLGEFPVTNSRARKRILEPDDFLDDLDDEDYEEDTPKRRGKGKSKGKGVGSARKKLDASILEDRDKPYACDICGKRYKNRPGLSYHYAHSHLAEEEGEDKEDSQPPTPVSQRSEEQKSKKGPDGLALPNNYCDFCLGDSKINKKTGQPEELVSCSDCGRSGHPSCLQFTPVMMAAVKTYRWQCIECKCCNICGTSENDDQLLFCDDCDRGYHMYCLTPSMSEPPEGSWSCHLCLDLLKEKASIYQNQNSS

SEQ ID NO: 38043 - protein, 207 aa, Homo sapiens
MAAVVENVVKLLGEQYYKDAMEQCHNYNARLCAERSVRLPFLDSQTGVAQSNCYIWMEKRHRGPGLASGQLYSYPARRWRKKRRAHPPEDPRLSFPSIKPDTDQTLKKEGLISQDGSSLEALLRTDPLEKRGAPDPRVDDDSLGEFPVTNSRARKDQLLFCDDCDRGYHMYCLTPSMSEPPEGSWSCHLCLDLLKEKASIYQNQNSS

SEQ ID NO: 38044 - protein, 1097 aa, Homo sapiens
MATQVMGQSSGGGGLFTSSGNIGMALPNDMYDLHDLSKAELAAPQLIMLANVALTGEVNGSCCDYLVGEERQMAELMPVGDNNFSDSEEGEGLEESADIKGEPHGLENMELRSLELSVVEPQPVFEASGAPDIYSSNKDLPPETPGAEDKGKSSKTKPFRCKPCQYEAESEEQFVHHIRVHSAKKFFVEESAEKQAKARESGSSTAEEGDFSKGPIRCDRCGYNTNRYDHYTAHLKHHTRAGDNERVYKCIICTYTTVSEYHWRKHLRNHFPRKVYTCGKCNYFSDRKNNYVQHVRTHTGERPYKCELCPYSSSQKTHLTRHMRTHSGEKPFKCDQCSYVASNQHEVTRHARQVHNGPKPLNCPHCDYKTADRSNFKKHVELHVNPRQFNCPVCDYAASKKCNLQYHFKSKHPTCPNKTMDVSKVKLKKTKKREADLPDNITNEKTEIEQTKIKGDVAGKKNEKSVKAEKRDVSKEKKPSNNVSVIQVTTRTRKSVTEVKEMDVHTGSNSEKFSKTKKSKRKLEVDSHSLHGPVNDEESSTKKKKKVESKSKNNSQEVPKGDSKVEENKKQNTCMKKSTKKKTLKNKSSKKSSKPPQKEPVEKGSAQMDPPQMGPAPTEAVQKGPVQVEPPPPMEHAQMEGAQIRPAPDEPVQMEVVQEGPAQKELLPPVEPAQMVGAQIVLAHMELPPPMETAQTEVAQMGPAPMEPAQMEVAQVESAPMQVVQKEPVQMELSPPMEVVQKEPVQIELSPPMEVVQKEPVKIELSPPIEVVQKEPVQMELSPPMGVVQKEPAQREPPPPREPPLHMEPISKKPPLRKDKKEKSNMQSERARKEQVLIEVGLVPVKDSWLLKESVSTEDLSPPSPPLPKENLREEASGDQKLLNTGEGNKEAPLQKVGAEEADESLPGLAANINESTHISSSGQNLNTPEGETLNGKHQTDSIVCEMKMDTDQNTRENLTGINSTVEEPVSPMLPPSAVEEREAVSKTALASPPATMAANESQEIDEDEGIHSHEGSDLSDNMSEGSDDSGLHGARPVPQESSRKNAKEALAVKAAKGDFVCIFCDRSFRKGKDYSKHLNRHLVNVYYLEEAAQGQE

SEQ ID NO: 38045 - protein, 313 aa, Homo sapiens
MATQVMGQSSGGGGLFTSSGNIGMALPNDMYDLHDLSKAELAAPQLIMLANVALTGEVNGSCCDYLVGEERQMAELMPVGDNNFSDSEEGEGLEESADIKGEPHGLENMELRSLELSVVEPQPVFEASGAPDIYSSNKDLPPETPGAEDKGKSSKTKPFRCKPCQYEAESEEQFVHHIRVHSAKKFFVEESAEKQAKARESGSSTAEEGDFSKGPIRCDRCGYNTNRYDHYTAHLKHHTRAGDNERVYKCIICTYTTVSEYHWRKHLRNHFPRKVYTCGKCNYFSDRKNNYVQHVRTHTGKRSFLVHKFSSLF

SEQ ID NO: 38046 - protein, 329 aa, Homo sapiens
MATQVMGQSSGGGGLFTSSGNIGMALPNDMYDLHDLSKAELAAPQLIMLANVALTGEVNGSCCDYLVGEERQMAELMPVGDNNFSDSEEGEGLEESADIKGEPHGLENMELRSLELSVVEPQPVFEASGAPDIYSSNKDLPPETPGAEDKGKSSKTKPFRCKPCQYEAESEEQFVHHIRVHSAKKFFVEESAEKQAKARESGSSTAEEGDFSKGPIRCDRCGYNTNRYDHYTAHLKHHTRAGDNERVYKCIICTYTTVSEYHWRKHLRNHFPRKVYTCGKCNYFSDRKNNYVQHVRTHTGERPYKCELCPYSSSQKTHLTRHMRTHSGW

SEQ ID NO: 38047 - protein, 1074 aa, Homo sapiens
MATQVMGQSSGGGGLFTSSGNIGMALPNDMYDLHDLSKAELAAPQLIMLANVALTGEVNGSCCDYLVGEERQMAELMPVGDNNFSDSEEGEGLEESADIKGEPHGLENMELRSLELSVVEPQPVFEASGAPDIYSSNKDLPPETPGAEDKGKSSKTKPFRCKPCQYEAESEEQFVHHIRVHSAKKFFVEESAEKQAKARESGSSTAEEGDFSKGPIRCDRCGYNTNRYDHYTAHLKHHTRAGDNERVYKCIICTYTTVSEYHWRKHLRNHFPRKVYTCGKCNYFSDRKNNYVQHVRTHTGERPSGEKPFKCDQCSYVASNQHEVTRHARQVHNGPKPLNCPHCDYKTADRSNFKKHVELHVNPRQFNCPVCDYAASKKCNLQYHFKSKHPTCPNKTMDVSKVKLKKTKKREADLPDNITNEKTEIEQTKIKGDVAGKKNEKSVKAEKRDVSKEKKPSNNVSVIQVTTRTRKSVTEVKEMDVHTGSNSEKFSKTKKSKRKLEVDSHSLHGPVNDEESSTKKKKKVESKSKNNSQEVPKGDSKVEENKKQNTCMKKSTKKKTLKNKSSKKSSKPPQKEPVEKGSAQMDPPQMGPAPTEAVQKGPVQVEPPPPMEHAQMEGAQIRPAPDEPVQMEVVQEGPAQKELLPPVEPAQMVGAQIVLAHMELPPPMETAQTEVAQMGPAPMEPAQMEVAQVESAPMQVVQKEPVQMELSPPMEVVQKEPVQIELSPPMEVVQKEPVKIELSPPIEVVQKEPVQMELSPPMGVVQKEPAQREPPPPREPPLHMEPISKKPPLRKDKKEKSNMQSERARKEQVLIEVGLVPVKDSWLLKESVSTEDLSPPSPPLPKENLREEASGDQKLLNTGEGNKEAPLQKVGAEEADESLPGLAANINESTHISSSGQNLNTPEGETLNGKHQTDSIVCEMKMDTDQNTRENLTGINSTVEEPVSPMLPPSAVEEREAVSKTALASPPATMAANESQEIDEDEGIHSHEGSDLSDNMSEGSDDSGLHGARPVPQESSRKNAKEALAVKAAKGDFVCIFCDRSFRKGKDYSKHLNRHLVNVYYLEEAAQGQE

SEQ ID NO: 38048 - protein, 228 aa, Homo sapiens
MAVDVEFGVAGWWEAAAPLSPSAVAATFTETWPGSERAEPGRIQHPLWPGSSEGLQLLVCFLLLNSCPGGCSDTSAHDGQDQVGVGQLWPLQGFATPVFQHLQVVLQQIIPQGLFWKDDITQDAMIQKMEHASRLHPQEPCLKDGKALFPTKTTESPLAKVNRDQCFTSEVVSKALKQEVANPVKITYRCSYGGLDMMQAPGPSKEEIIYKIMRLLWATSYCGPQPCG

SEQ ID NO: 38049 - protein, 91 aa, Homo sapiens
MIQKMEHASRLHPQEPCLKDGKALFPTKTTEQEEKLQLLFPSETHSPLAKVNRDQCFTSEVVSKALKQEVANPVKGFSGPLPTVGRNPVAD

SEQ ID NO: 38050 - protein, 168 aa, Homo sapiens
MWKALARFLADTTILPLDGQDQVGVGQLWPLQGFATPVFQHLQVVLQQIIPQGLFWKDDITQDAMIQKMEHASRLHPQEPCLKDGKALFPTKTTESPLAKVNRDQCFTSEVVSKALKQEVANPVKITYRCSYGGLDMMQAPGPSKEEIIYKIMRLLWATSYCGPQPCG

SEQ ID NO: 38051 - protein, 1747 aa, Homo sapiens
MNWNEKPKSATLPPLYPKSQPPFLHQSLINQITTTSQSSFSYPGSNQEACMYPGNSNPISQPLLNIQNYPQQISVSDMHNGTVVASHTSVERITYANVNGPKQLTHNLQMSSGVTQNVWLNSPMRNPVHSHIGATVSHQTDFGANVPNMPALQSQLITSDTYSMQMQMIPSNSTRLPVAYQGNQGLNQSFSEQQVDWTQQCISKGLTYPDYRPPPKLYRYSPQSFLPDSTIQKQNFIPHTSLQVKNSQLLNSVLTLPSRQTSAVPSQQYATQTDKRPPPPPYNCRYGSQPLQSTQHITKHLSMEVPQSREMLSSEIRTSFQQQWQNPNENVSTIGNFTNLKVNTNSKQPFNSPIRSSVDGVQTLAQTNEEKIMDSCNPTSNQVLDTSVAKEKLVRDIKTLVEIKQKFSELARKIKINKDLLMAAGCIKMTNTSYSEPAQNSKLSLKQTAKIQSGPQITPVMPENAERQTPTVVESAETNKTQCMLNSDIQEVNCRRFNQVDSVLPNPVYSEKRPMPDSSHDVKVLTSKTSAVEMTQAVLNTQLSSENVTKVEQNSPAVCETISVPKSMSTEEYKSKIQNENMLLLALLSQARKTQKTVLKDANQTIQDSKPDSCEMNPNTQMTGNQLNLKNMETPSTSNVSGRVLDNSFCSGQESSTKGMPAKSDSSCSMEVLATCLSLWKKQPSDTAKEKECDKLRTNTTAVGISKPANIHVKSPCSVVGNSNSQNKISNPSQQTALSMVMHNYESSGINITKGTELQIAVVSPLVLSEVKTLSVKGITPAVLPETVYPVIKEGSVCSLQNQLAENAKATAALKVDVSGPVASTATSTKIFPLTQKEKQNESTNGNSEVTPNVNQGKHNKLESAIHSPMNDQQISQESRNSTVVSSDTLQIDNICSLVEGDTSYNSQIAKIFSSLPLKMVEPQKPSLPNQQGIGSREPEKQLDNTTENKDFGFQKDKPVQCTDVSHKICDQSKSEPPLESSFNNLETNRVILEKSSLEHATEKSTANDTCSSAAIQEDIYPQEIDASSNYTPQDPARNEIHSDKAPVLYLHDQLSELLKEFPYGIEAVNTREGSVGQQTTYQTSEDQTADKTSSDSKDPADQIQITILSSEQMKEIFPEQDDQPYVVDKLAEPQKEEPITEVVSQCDLQAPAAGQSRDSVILDSEKDDIHCCALGWLSMVYEGVPQCQCNSIKNSSSEEEKQKEQCSPLDTNSCKQGERTSDRDVTVVQFKSLVNNPKTPPDGKSHFPELQDDSRKDTPKTKHKSLPRTEQELVAGQFSSKCDKLNPLQNHKRKKLRFHEVTFHSSNKMTASYEQASQETRQKKHVTQNSRPLKTKTAFLPNKDVYKKHSSLGQSLSPEKIKLKLKSVSFKQKRKLDQGNVLDMEVKKKKHDKQEQKGSVGATFKLGDSLSNPNERAIVKEKMVSNTKSVDTKASSSKFSRILTPKEYLQRQKHKEALSNKASKKICVKNVPCDSEHMRPSKLAVQVESCGKSNEKHSSGVQTSKESLNGLTSHGKNLKIHHSQESKTYNILRNVKEKVGGKQPDKIWIDKTKLDKLTNISNEAQFSQMPPQVKDQKKLYLNRVGFKCTERESISLTKLESSPRKLHKDKRQENKHKTFLPVKGNTEKSNMLEFKLCPDILLKNTNSVEERKDVKPHPRKEQAPLQVSGIKSTKEDWLKFVATKKRTQKDSQERDNVNSRLSKRSFSADGFEMLQNPVKDSKEMFQTYKQMYLEKRSRSLGSSPVK

SEQ ID NO: 38052 - protein, 288 aa, Homo sapiens
MEPPDQCSQYMTSLLSPAVDDEKELQDMNAMVLSLTEEVKEEEEDAQPEPEQGTAAGEKLKSAGAQGGEEKDGGGEEKDGGGAGVPGHLWEGDLEGTSGSDGNVEDSDQSEKEPGQQYSRPQGAVGGLEPGNAQQPNVHAFTPLQLQELERIFQREQFPSEFLRRRLARSMNVTELAVQIWFENRRAKWRRHQRALMARNMLPFMAVGQPVMVTAAEAITAPLFISGMRDDYFWDHSHSSSLCFPMPPFPPPSLPLPLMLLPPMPPAGQAEFGPFPFVIVPSFTFPNV

SEQ ID NO: 38053 - protein, 622 aa, Homo sapiens
MDQLPQKNLLRLHPAGSAGCSTGVESSSMDGFWMEVEQIQQRDELREEDSGGNEGQLPEEGEAESQWLQDTGLSGLLGGLGLDGDHQELLSTLTQTQVAAVCRRLDIYARSVRRQHKTPVRDVRDVFGVFNSGKMSSENGDSGMKGAQLSSGASKFPPAAEPGGLQEQAGREEAFNMDSAYSEQAAVLLQRSRPSRGGTSAWGKCSLPKFTVPKGRLGVTRIGDLSLQDMRKVPSLALIELTALCDILGLDLKRSKAGKWKAAETRLFGVPLDSLLEADHKVLPSTQVPLVLQALLSCLEKRGLDMEGILRVPGSQARVKGLEQKLERDFYAGLFSWDEVHHNDASDLLKRFIRKLPTPLLTAEYLPAFAVVPNIPNLKQRLQVLHLLILILPEPNRNALKALLEFLRKVVAREQHNKMTLRNVSTVMAPNLFLHQGRPPKLPKGKEKQLAEGAAEVVQIMVHYQDLLWTVASFLVAQVRKLNDSSSRRPQLCDAGLKTWLRRMHADRDKAGDGLEATPKVAKIQVVWPIKDPLKVPLTPSTKVAHVLRQFTEHLSPGSKGQEDSEDMDSLLLHHRSMESANILLYEVGGNINEHRLDPDAYLLDLYRANPHGEWVLKQNPT

SEQ ID NO: 38054 - protein, 150 aa, Homo sapiens
MVLCFPLLLLLLVLWGPVCPLHAWPKRLTKAHWFEIQHIQPSPLQCNRAMSGINNYTQHCKHQNTFLHDSFQNVAAVCDLLSIVCKNRRHNCHQSSKPVNMTDCRLTSGKYPQCRYSAAAQYKFFIVACDPPQKSDPPYKLVPVHLDSIL

SEQ ID NO: 38055 - protein, 201 aa, Homo sapiens
MITETAAEPTVPAVPAAEEATEARGREEPAWPWKDAPIRTLVQRIHQLQAERAQGFRRLEEWLAPVQGLRAWGRGLRVPTCRRGHRQYLRSGPDYDFARYRSTVHGVTQAFAAASREVLAVEAELGGPRRQPLLAGHVRSLQELEQTRLGTVALLQLMETPELAGQEDAVRMQQLKMKVIKTMEAISEVLQDLRFDAESAE

SEQ ID NO: 38056 - protein, 190 aa, Homo sapiens
MGRGFRGTGSSPSRERPHSTSPLPDDSLFVASLSSPRAGVGLSRVPLRESGSVLPTYQSSPLVSGDTSWGPFRWLAPVQGLRAWGRGLRVPTCRRGHRQYLRSGPDYDFARYRSTVHGVTQAFAAASREVLAVEAELGGPRRQPLLAGHVRSLQELEQTRLGTVALLQLMETPELAGQEDAVRMQQLKMK

SEQ ID NO: 38057 - protein, 179 aa, Homo sapiens
MITETAAEPTVPAVPAAEEATEARGREEPAWPWKDAPIRTLVQRIHQLQAERAQGFRRLEEGHRQYLRSGPDYDFARYRSTVHGVTQAFAAASREVLAVEAELGGPRRQPLLAGHVRSLQELEQTRLGTVALLQLMETPELAGQEDAVRMQQLKMKVIKTMEAISEVLQDLRFDAESAE

SEQ ID NO: 38058 - protein, 317 aa, Homo sapiens
MKRLSLVTTNRLSPQGNFLPLCTFPLAVDMAALFQEASSCPVCSDYLEKPMSLECGCTVCLKCINSLQKEPHGEDLLCCCCSMVSQRNKIRPNRQLERLVSHIKELEPKLKKILQMNPRMRKFQVDMTLDADTANNFLLISDDLRSVRSGLITQNRQDLAERFDVSVCILGSPRFTCGRHYWEVDVGTSTEWDLGVCRESVHCKGKIQLTTELGFWTVSLRDGSRLSASTVPLTFLLVDRKLQRVGIFLDMGMQNVSFFDAESGSHVYTFRSVSAEEPLRPFLAPSIPPNGDQGVLSICPLMNSGTTDAPVRPGEAK

SEQ ID NO: 38059 - protein, 288 aa, Homo sapiens
MAALFQEASSCPVCSDYLEKPMSLECGCTVCLKCINSLQKEPHGEDLLCCCCSMVSQRNKIRPNRQLERLVSHIKELEPKLKKILQMNPRMRKFQVDMTLDADTANNFLLISDDLRSVRSGLITQNRQDLAERFDVSVCILGSPRFTCGRHYWEVDVGTSTEWDLGVCRESVHCKGKIQLTTELGFWTVSLRDGSRLSASTVPLTFLLVDRKLQRVGIFLDMGMQNVSFFDAESGSHVYTFRSVSAEEPLRPFLAPSIPPNGDQGVLSICPLMNSGTTDAPVRPGEAK

SEQ ID NO: 38060 - protein, 354 aa, Homo sapiens
MEVEAVCGGAGEVEAQDSDPAPAFSKAPGSAGHYELPWVEKYRPVKLNEIVGNEDTVSRLEVFAREGNVPNIIIAGPPGTGKTTSILCLARALLGPALKDAMLELNASNDRGIDVVRNKIKMFAQQKVTLPKGRHKIIILDEADSMTDGAQQALRRTMEIYSKTTRFALACNASDKIIEPIQSRCAVLRYTKLTDAQILTRLMNVIEKERVPYTDDGLEAIIFTAQGDMRQALNNLQSTFSGFGFINSENVFKVCDEPHPLLVKEMIQHCVNANIDEAYKILAHLWHLGYSPEDIIGNIFRVCKTFQMAEYLKLEFIKEIGYTHMKIAEGVNSLLQMAGLLARLCQKTMAPVAS

SEQ ID NO: 38061 - protein, 320 aa, Homo sapiens
MEVEAVCGGAGEVEAQDSDPAPAFSKAPGSAGHYELPWVEKYRPVKLNEIVGNEDTVSRLEVFAREGNVPNIIIAGPPGTGKTTSILCLARALLGPALKDAMLELNASNDSMTDGAQQALRRTMEIYSKTTRFALACNASDKIIEPIQSRCAVLRYTKLTDAQILTRLMNVIEKERVPYTDDGLEAIIFTAQGDMRQALNNLQSTFSGFGFINSENVFKVCDEPHPLLVKEMIQHCVNANIDEAYKILAHLWHLGYSPEDIIGNIFRVCKTFQMAEYLKLEFIKEIGYTHMKIAEGVNSLLQMAGLLARLCQKTMAPVAS

SEQ ID NO: 38062 - protein, 552 aa, Homo sapiens
MGKVNVAKLRYMSRDDFRVLTAVEMGMKNHEIVPGSLIASIASLKHGGCNKVLRELVKHKLIAWERTKTVQGYRLTNAGYDYLALKTLSSRQVVESVGNQMGVGKESDIYIVANEEGQQFALKLHRLGRTSFRNLKNKRDYHKHRHNVSWLYLSRLSAMKEFAYMKALYERKFPVPKPIDYNRHAVVMELINGYPLCQIHHVEDPASVYDEAMELIVKLANHGLIHGDFNEFNLILDESDHITMIDFPQMVSTSHPNAEWYFDRDVKCIKDFFMKRFSYESELFPTFKDIRREDTLDVEVSASGYTKEMQADDELLHPLGPDDKNIETKEGSEFSFSDGEVAEKAEVYGSENESERNCLEESEGCYCRSSGDPEQIKEDSLSEESADARSFEMTEFNQALEEIKGQVVENNSVTEFSEEKNRTENYNRQDGQRVQGGVPAGSDEYEDECPHLIALSSLNREFRPFRDEENVGAMNQYRTRTLSITSSGSAVSCSTIPPELVKQKVKRQLTKQQKSAVRRRLQKGEANIFTKQRRENMQNIKSSLEAASFWGE

SEQ ID NO: 38063 - protein, 474 aa, Homo sapiens
MGKVNVAKLRYMSRDDFRVLTAVEMGMKNHEIVPGSLIASIASLKHGGCNKVLRELVKHKLIAWERTKTVQGYRLTNAGYDYLALKTLSSRQVVESVGNQMGVGKESDIYIVANEEGQQFALKLHRLGRTSFRNLKNKRDYHKHRHNVSWLYLSRLSAMKEFAYMKALYERKFPVPKPIDYNRHAVVMELINGYPLCQIHHVEDPASVYDEAMELIVKLANHGLIHGDFNEFNLILDESDHITMIDFPQMVSTSHPNAEWYFDRDVKCIKDFFMKRFSYESELFPTFKDIRREDTLDVEVSASGYTKEMQADDELLHPLGPDDKNIETKEGSEFSFSDGEVAEKAEVYGSENESERNCLEESEGCYCRSSGDPEQIKEDSLSEESADARSFEMTEFNQALEEIKGQVVENNSVTEFSEEKNRTENYNRQDGQRVQGGVPAGSDEYEDECPHLIALSSLNREFRPFRYRLLSIAF

SEQ ID NO: 38064 - protein, 641 aa, Homo sapiens
MDGLQASAGPLRRGRPKRRRKPQPHSGSVLALPLRSRKIRKQLRSVVSRMAALRTQTLPSENSEESRVESTADDLGDALPGGAAVAAVPDAARREPYGHLGPAELLEASPAARSLQTPSARLVPASAPPARLVEVPAAPVRVVETSALLCTAQHLAAVQSSGAPATASGPQVDNTGGEPAWDSPLRRVLAELNRIPSSRRRAARLFEWLIAPMPPDHFYRRLWEREAVLVRRQDHTYYQGLFSTADLDSMLRNEEVQFGQHLDAARYINGRRETLNPPGRALPAAAWSLYQAGCSLRLLCPQAFSTTVWQFLAVLQEQFGSMAGSNVYLTPPNSQGFAPHYDDIEAFVLQLEGRKLWRVYRPRVPTEELALTSSPNFSQDDLGEPVLQTVLEPGDLLYFPRGFIHQAECQDGVHSLHLTLSTYQRNTWGDFLEAILPLAVQAAMEENVEFRRGLPRDFMDYMGAQHSDSKDPRRTAFMEKVRVLVARLGHFAPVDAVADQRAKDFIHDSLPPVLTDRERALSVYGLPIRWEAGEPVNVGAQLTTETEVHMLQDGIARLVGEGGHLFLYYTVENSRVYHLEEPKCLEIYPQQADAMELLLGSYPEFVRVGDLPCDSVEDQLSLATTLYDKGLLLTKMPLALN

SEQ ID NO: 38065 - protein, 429 aa, Homo sapiens
MPPDHFYRRLWEREAVLVRRQDHTYYQGLFSTADLDSMLRNEEVQFGQHLDAARYINGRRETLNPPGRALPAAAWSLYQAGCSLRLLCPQAFSTTVWQFLAVLQEQFGSMAGSNVYLTPPNSQGFAPHYDDIEAFVLQLEGRKLWRVYRPRVPTEELALTSSPNFSQDDLGEPVLQTVLEPGDLLYFPRGFIHQAECQDGVHSLHLTLSTYQRNTWGDFLEAILPLAVQAAMEENVEFRRGLPRDFMDYMGAQHSDSKDPRRTAFMEKVRVLVARLGHFAPVDAVADQRAKDFIHDSLPPVLTDRERALSVYGLPIRWEAGEPVNVGAQLTTETEVHMLQDGIARLVGEGGHLFLYYTVENSRVYHLEEPKCLEIYPQQADAMELLLGSYPEFVRVGDLPCDSVEDQLSLATTLYDKGLLLTKMPLALN

SEQ ID NO: 38066 - protein, 946 aa, Homo sapiens
MSVRLRFLSPGDTGAVGVVGRSASFAGFSSAQSRRIAKSINRNSVRSRMPAKSSKMYGTLRKGSVCADPKPQQVKKIFEALKRGLKEYLCVQQAELDHLSGRHKDTRRNSRLAFYYDLDKQTRCVERHIRKMEFHISKVDELYEDYCIQCRLRDGASSMQRAFARCPPSRAARESLQELGRSLHECAEDMWLIEGALEVHLGEFHIRMKGLVGYARLCPGDHYEVLMRLGRQRWKLKGRIESDDSQTWDEEEKAFIPTLHENLDIKVTELRGLGSLAVGAVTCDIADFFTTRPQVIVVDITELGTIKLQLEVQWNPFDTESFLVSPSPTGKFSMGSRKGSLYNWTPPSTPSFRERYYLSVLQQPTQQALLLGGPRATSILSYLSDSDLRGPSLRSQSQELPEMDSFSSEDPRDTETSTSASTSDVGFLPLTFGPHASIEEEAREDPLPPGLLPEMAHLSGGPFAEQPGWRNLGGESPSLPQGSLFHSGTASSSQNGHEEGATGDREDGPGVALEGPLQEVLELLRPTDSTQPQLRELEYQVLGFRDRLKPCRARQEHTSAESLMECILESFAFLNADFALDELSLFGGSQGLRKDRPLPPPSSLKASSRELTAGAPELDVLLMVHLQVCKALLQKLASPNLSRLVQECLLEEVAQQKHVLETLSVLDFEKVGKATSIEEIIPQASRTKGCLKLWRGCTGPGRVLSCPATTLLNQLKKTFQHRVRGKYPGQLEIACRRLLEQVVSCGGLLPGAGLPEEQIITWFQFHSYLQRQSVSDLEKHFTQLTKEVTLIEELHCAGQAKVVRKLQGKRLGQLQPLPQTLRAWALLQLDGTPRVCRAASARLAGAVRNRSFREKALLFYTNALAENDARLQQAACLALKHLKGIESIDQTASLCQSDLEAVRAAARETTLSFGEKGRLAFEKMDKLCSEQREVFCQEADVEITIF

SEQ ID NO: 38067 - protein, 593 aa, Homo sapiens
MSVRLRFLSPGDTGAVGVVGRSASFAGFSSAQSRRIAKSINRNSVRSRMPAKSSKMYGTLRKGSVCADPKPQQVKKIFEALKRGLKEYLCVQQAELDHLSGRHKDTRRNSRLAFYYDLDKQTRCVERHIRKMEFHISKVDELYEDYCIQCRLRDGASSMQRAFARCPPSRAARESLQELGRSLHECAEDMWLIEGALEVHLGEFHIRMKGLVGYARLCPGDHYEVLMRLGRQRWKLKGRIESDDSQTWDEEEKAFIPTLHENLDIKVTELRGLGSLAVGAVTCDIADFFTTRPQVIVVDITELGTIKLQLEVQWNPFDTESFLVSPSPTGKFSMGSRKGSLYNWTPPSTPSFRERYYLSVLQQPTQQALLLGGPRATSILSYLSDSDLRGPSLRSQSQELPEMDSFSSEDPRDTETSTSASTSDVGFLPLTFGPHASIEEEAREDPLPPGLLPEMAHLSGGPFAEQPGWRNLGGESPSLPQGSLFHSGTASSSQNGHEEGATGDREDGPGVALEGPLQEVLELLRPTDSTQPQLRELEYQVLGFRDRLKPCRARQEHTSAESLMECILESFAFLNADFALDELSLFGGSQGLR

SEQ ID NO: 38068 - protein, 568 aa, Homo sapiens
MDYRRLLMSRVVPGQFDDADSSDSENRDLKTVKEKDDILFEDLQDNVNENGEGEIEDEEEEGYDDDDDDWDWDEGVGKLAKGYVWNGGSNPQANRQTSDSSSAKMSTPADKVLRKFENKINLDKLNVTDSVINKVTEKSRQKEADMYRIKDKADRATVEQVLDPRTRMILFKMLTRGIITEINGCISTGKEANVYHASTANGESRAIKIYKTSILVFKDRDKYVSGEFRFRHGYCKGNPRKMVKTWAEKEMRNLIRLNTAEIPCPEPIMLRSHVLVMSFIGKDDMPAPLLKNVQLSESKARELYLQVIQYMRRMYQDARLVHADLSEFNMLYHGGGVYIIDVSQSVEHDHPHALEFLRKDCANVNDFFMRHSVAVMTVRELFEFVTDPSITHENMDAYLSKAMEIASQRTKEERSSQDHVDEEVFKRAYIPRTLNEVKNYERDMDIIMKLKEEDMAMNAQQDNILYQTVTGLKKDLSGVQKVPALLENQVEERTCSDSEDIGSSECSDTDSEEQGDHARPKKHTTDPDIDKKERKKMVKEAQREKRKNKIPKHVKKRKEKTAKTKKGK

SEQ ID NO: 38069 - protein, 196 aa, Homo sapiens [sequence omitted]

SEQ ID NO: 38070 - protein, 192 aa, Homo sapiens [sequence omitted]

SEQ ID NO: 38071 - protein, 95 aa, Homo sapiens
MHKQPKLLPPPATPPPPPQSSSWSGNIVFTIKINIWLRVFSHSSPTGLPKPHSPMPSPPEPEHSVGKPANVQIPQVSSPEFCNQKSVLATEHAQT

SEQ ID NO: 38072 - protein, 408 aa, Homo sapiens
MASKKFAVKCGNFAVLVDLHILPQGSNKDTSWFSEQKKEEVCLLLKETIDSRVQEYLEVRKQHRPSNAEFTRSNPLSLKGYGFQITAYFLKRGIRLRCIRSTQNAELCVFPDRFVVCVSQLAFSRDLLASQNEDLTERVLHGVSDYFAECAESSLPPSAKLRRNALKEIVKRTETKSSVTSKSQTRRDTVETSSDSVIAEIARRRNDGQASSSPPSESMGQAKDSIKAAESHWGLPVQKLEKVNQTQPEDTSGQQKPHPGERLKTGLLSRSPVCSCESASPCPKQSPRVAKTQQKRRNCSSAEDFDHHGRVSLGSDRLVPREIIVEKSKAVRVLPASELSDPGLLLKQDLAKTTSKEELHVLESLSSRHLMKNNPGQAQQTGLATNTERLSTIQNSPTKKRKKYERGH

SEQ ID NO: 38073 - protein, 1804 aa, Homo sapiens
MTSLKRSQTERPLATDRASVVGTDGTPKVHTDDFYMRRFRSQNGSLGSSVMAPVGPPRSEGSHHITSTPGVPKMGVRARIADWPPRKENIKESSRSSQEIETSSCLDSLSSKSSPVSQGSSVSLNSNDSAMLKSIQNTLKNKTRPSENMDSRFLMPEAYPSSPRKALRRIRQRSNSDITISELDVDSFDECISPTYKTGPSLHREYGSTSSIDKQGTSGESFFDLLKGYKDDKSDRGPTPTKLSDFLITGGGKGSGFSLDVIDGPISQRENLRLFKEREKPLKRRSKSETGDSSIFRKLRNAKGEELGKSSDLEDNRSEDSVRPWTCPKCFAHYDVQSILFDLNEAIMNRHNVIKRRNTTTGASAAAVASLVSGPLSHSASFSSPMGSTEDLNSKGSLSMDQGDDKSNELVMSCPYFRNEIGGEGERKISLSKSNSGSFSGCESASFESTLSSHCTNAGVAVLEVPKENLVLHLDRVKRYIVEHVDLGAYYYRKFFYQKEHWNYFGADENLGPVAVSIRREKPDEMKENGSPYNYRIIFRTSELMTLRGSVLEDAIPSTAKHSTARGLPLKEVLEHVVPELNVQCLRLAFNTPKVTEQLMKLDEQGLNYQQKVGIMYCKAGQSTEEEMYNNESAGPAFEEFLQLLGERVRLKGFEKYRAQLDTKTDSTGTHSLYTTYKDYEIMFHVSTMLPYTPNNKQQLLRKRHIGNDIVTIVFQEPGAQPFSPKNIRSHFQHVFVIVRVHNPCSDSVCYSVAVTRSRDVPSFGPPIPKGVTFPKSNVFRDFLLAKVINAENAAHKSEKFRAMATRTRQEYLKDLAEKNVTNTPIDPSGKFPFISLASKKKEKSKPYPGAELSSMGAIVWAVRAEDYNKAMELDCLLGISNEFIVLIEQETKSVVFNCSCRDVIGWTSTDTSLKIFYERGECVSVGSFINIEEIKEIVKRLQFVSKGCESVEMTLRRNGLGQLGFHVNYEGIVADVEPYGYAWQAGLRQGSRLVEICKVAVATLSHEQMIDLLRTSVTVKVVIIPPHDDCTPRRSCSETYRMPVMEYKMNEGVSYEFKFPFRNNNKWQRNASKGPHSPQVPSQVQSPMTSRLNAGKGDGKMPPPERAANIPRSISSDGRPLERRLSPGSDIYVTVSSMALARSQCRNSPSNLSSSSDTGSVGGTYRQKSMPEGFGVSRRSPASIDRQNTQSDIGGSGKSTPSWQRSEDSIADQMAYSYRGPQDFNSFVLEQHEYTEPTCHLPAVSKVLPAFRESPSGRLMRQDPVVHLSPNKQGHSDSHYSSHSSSNTLSSNASSAHSDEKWYDGDRTESELNSYNYLQGTSADSGIDTTSYGPSHGSTASLGAATSSPRSGPGKEKVAPLWHSSSEVISMADRTLETESHGLDRKTESSLSLDIHSKSQAGSTPLTRENSTFSINDAASHTSTMSSRHSASPVVFTSARSSPKEELHPAAPSQLAPSFSSSSSSSSGPRSFYPRQGATSKYLIGWKKPEGTINSVGFMDTRKRHQSDGNEIAHTRLRASTRDLRASPKPTSKSTIEEDLKKLIDLESPTPESQKSFKFHALSSPQSPFPSTPTSRRALHRTLSDESIYNSQREHFFTSRASLLDQALPNDVLFSSTYPSLPKSLPLRRPSYTLGMKSLHGEFSASDSSLTDIQETRRQPMPDPGLMPLPDTAADLDWSNLVDAAKAYEVQRASFFAASDENHRPLSAASNSDQLEDQALAQMKPYSSSKDSSPTLASKVDQLEGMLKMLREDLKKEKEDKAHLQAEVQHLREDNLRLQEESQNASDKLKKFTEWVFNTIDMS

SEQ ID NO: 38074 - protein, 1783 aa, Homo sapiens
MTSLKRSQTERPLATDRASVVGTDGTPKVHTDDFYMRRFRSQNGSLGSSVMAPVGPPRSEGSHHITSTPGVPKMGVRARIADWPPRKENIKESSRSSQEIETSSCLDSLSSKSSPVSQGSSVSLNSNDSAMLKSIQNTLKNKTRPSENMDSRFLMPEAYPSSPRKALRRIRQRSNSDITISELDVDSFDECISPTYKTGPSLHREYGSTSSIDKQGTSGESFFDLLKGYKDDKSDRGPTPTKLSDFLITGGGKGSGFSLDVIDGPISQRENLRLFKEREKPLKRRSKSETGDSSIFRKLRNAKGEELGKSSDLEDNRSEDSVRPWTCPKCFAHYDVQSILFDLNEAIMNRHNVIKRRNTTTGASAAAVASLVSGPLSHSASFSSPMGSTEDLNSKGSLSMDQGDDKSNELVMSCPYFRNEIGGEGERKISLSKSNSGSFSGCESASFESTLSSHCTNAGVAVLEVPKENLVLHLDRVKRYIVEHVDLGAYYYRKFFYQKEHWNYFGADENLGPVAVSIRREKPDEMKENGSPYNYRIIFRTSELMTLRGSVLEDAIPSTAKHSTARGLPLKEVLEHVVPELNVQCLRLAFNTPKVTEQLMKLDEQGLNYQQKVGIMYCKAGQSTEEEMYNNESAGPAFEEFLQLLGERVRLKGFEKYRAQLDTKTDSTGTHSLYTTYKDYEIMFHVSTMLPYTPNNKQQLLRKRHIGNDIVTIVFQEPGAQPFSPKNIRSHFQHVFVIVRVHNPCSDSVCYSVAVTRSRDVPSFGPPIPKGVTFPKSNVFRDFLLAKVINAENAAHKSEKFRAMATRTRQEYLKDLAEKNVTNTPIDPSGKFPFISLASKKKEKSKPYPGAELSSMGAIVWAVRAEDYNKAMELDCLLGISNEFIVLIEQETKSVVFNCSCRDVIGWTSTDTSLKIFYERGECVSVGSFINIEEIKEIVKRLQFVSKGCESVEMTLRRNGLGQLGFHVNYEGIVADVEPYGYAWQAGLRQGSRLVEICKVAVATLSHEQMIDLLRTSVTVKVVIIPPHDDCTPRRSCSETYRMPVMEYKMNEGVSYEFKFPFRNNNKWQRNASKGPHSPQVPSQVQSPMTSRLNAGKGDGKMPPPERAANIPRSISSDGRPLERRLSPGSDIYVTVSSMALARSQCRNSPSNLSSSSDTGSVGGTYRQKSMPEGFGVSRRSPASIDRQNTQSDIGGSGKSTPSWQRSEDSIADQMEPTCHLPAVSKVLPAFRESPSGRLMRQDPVVHLSPNKQGHSDSHYSSHSSSNTLSSNASSAHSDEKWYDGDRTESELNSYNYLQGTSADSGIDTTSYGPSHGSTASLGAATSSPRSGPGKEKVAPLWHSSSEVISMADRTLETESHGLDRKTESSLSLDIHSKSQAGSTPLTRENSTFSINDAASHTSTMSSRHSASPVVFTSARSSPKEELHPAAPSQLAPSFSSSSSSSSGPRSFYPRQGATSKYLIGWKKPEGTINSVGFMDTRKRHQSDGNEIAHTRLRASTRDLRASPKPTSKSTIEEDLKKLIDLESPTPESQKSFKFHALSSPQSPFPSTPTSRRALHRTLSDESIYNSQREHFFTSRASLLDQALPNDVLFSSTYPSLPKSLPLRRPSYTLGMKSLHGEFSASDSSLTDIQETRRQPMPDPGLMPLPDTAADLDWSNLVDAAKAYEVQRASFFAASDENHRPLSAASNSDQLEDQALAQMKPYSSSKDSSPTLASKVDQLEGMLKMLREDLKKEKEDKAHLQAEVQHLREDNLRLQEESQNASDKLKKFTEWVFNTIDMS

SEQ ID NO: 38075 - protein, 1782 aa, Homo sapiens
MTSLKRSQTERPLATDRASVVGTDGTPKVHTDDFYMRRFRSQNGSLGSSVMAPVGPPRSEGSHHITSTPGVPKMGVRARIADWPPRKENIKESSRSSQEIETSSCLDSLSSKSSPVSQGSSVSLNSNDSAMLKSIQNTLKNKTRPSENMDSRFLMPEAYPSSPRKALRRIRQRSNSDITISELDVDSFDECISPTYKTGPSLHREYGSTSSIDKQGTSGESFFDLLKGYKDDKSDRGPTPTKLSDFLITGGGKGSGFSLDVIDGPISQRENLRLFKEREKPLKRRSKSETGDSSIFRKLRNAKGEELGKSSDLEDNRSEDSVRPWTCPKCFAHYDVQSILFDLNEAIMNRHNVIKRRNTTTGASAAAVASLVSGPLSHSASFSSPMGSTEDLNSKGSLSMDQGDDKSNELVMSCPYFRNEIGGEGERKISLSKSNSGSFSGCESASFESTLSSHCTNAGVAVLEVPKENLVLHLDRVKRYIVEHVDLGAYYYRKFFYQKEHWNYFGADENLGPVAVSIRREKPDEMKENGSPYNYRIIFRTSELMTLRGSVLEDAIPSTAKHSTARGLPLKEVLEHVVPELNVQCLRLAFNTPKVTEQLMKLDEQGLNYQQKVGIMYCKAGQSTEEEMYNNESAGPAFEEFLQLLGERVRLKGFEKYRAQLDTKTDSTGTHSLYTTYKDYEIMFHVSTMLPYTPNNKQQLLRKRHIGNDIVTIVFQEPGAQPFSPKNIRSHFQHVFVIVRVHNPCSDSVCYSVAVTRSRDVPSFGPPIPKGVTFPKSNVFRDFLLAKVINAENAAHKSEKFRAMATRTRQEYLKDLAEKNVTNTPIDPSGKFPFISLASKKKEKSKPYPGAELSSMGAIVWAVRAEDYNKAMELDCLLGISNEFIVLIEQETKSVVFNCSCRDVIGWTSTDTSLKIFYERGECVSVGSFINIEEIKEIVKRLQFVSKGCESVEMTLRRNGLGQLGFHVNYEGIVADVEPYGYAWQAGLRQGSRLVEICKVAVATLSHEQMIDLLRTSVTVKVVIIPPHDDCTPRRSCSETYRMPVMEYKMNEGVSYEFKFPFRNNNKWQRNASKGPHSPQVPSQVQSPMTSRLNAGKGDGKMPPPERAANIPRSISSDGRPLERRLSPGSDIYVTVSSMALARSQCRNSPSNLSSSSDTGSVGGTYRQKSMPEGFGVSRRSPASIDRQNTQSDIGGSGKSTPSWQRSEDSIADQMEPTCHLPAVSKVLPAFRESPSGRLMRQDPVVHLSPNKQGHSDSHYSSHSSSNTLSSNASSAHSDEKWYDGDRTESELNSYNYLQGTSADSGIDTTSYGPSHGSTASLGAATSSPRSGPGKEKVAPLWHSSSEVISMADRTLETESHGLDRKTESSLSLDIHSKSQAGSTPLTRENSTFSINDAASHTSTMSSRHSASPVVFTSARSSPKEELHPAAPSQLAPSFSSSSSSSSGPRSFYPRQGATSKYLIGWKKPEGTINSVGFMDTRKRHQSDGNEIAHTRLRASTRDLRASPKPTSKSTIEEDLKKLIDLESPTPESQKSFKFHALSSPQSPFPSTPTSRRALHRTLSDESIYNSQREHFFTSRASLLDQALPNDVLFSSTYPSLPKSLPLRRPSYTLGMKSLHGEFSASDSSLTDIQETRRQPMPDPGLMPLPDTAADLDWSNLVDAAKAYEVQRASFFAASDENHRPLSAASNSDQLEDQALAQMKPYSSKDSSPTLASKVDQLEGMLKMLREDLKKEKEDKAHLQAEVQHLREDNLRLQEESQNASDKLKKFTEWVFNTIDMS

SEQ ID NO: 38076 - protein, 1834 aa, Homo sapiens
MKLSVNEAQLGFYLGSLSHLSACPGIDPRSSEDQPESLKTGQMMDESDEDFKELCASFFQRVKKHGIKEVSGERKTQKAASNGTQIRSKLKRTKQTATKTKTLQGPAEKKPPSGSQAPRTKKQRVTKWQASEPAHSVNGEGGVLASAPDPPVLRETAQNTQTGNQQEPSPNLSREKTRENVPNSDSQPPPSCLTTAVPSPSKPRTAQLVLQRMQQFKRADPERLRHASEECSLEAAREENVPKDPQEEMMAGNVYGLGPPAPESDAAVALTLQQEFARVGASAHDDSLEEKGLFFCQICQKNLSAMNVTRREQHVNRCLDEAEKTLRPSVPQIPECPICGKPFLTLKSRTSHLKQCAVKMEVGPQLLLQAVRLQTAQPEGSSSPPMFSFSDHSRGLKRRGPTSKKEPRKRRKVDEAPSEDLLVAMALSRSEMEPGAAVPALRLESAFSERIRPEAENKSRKKKPPVSPPLLLVQDSETTGRQIEDRVALLLSEEVELSSTPPLPASRILKEGWERAGQCPPPPERKQSFLWEGSALTGAWAMEDFYTARLVPPLVPQRPAQGLMQEPVPPLVPPEHSELSERRSPALHGTPTAGCGSRGPSPSASQREHQALQDLVDLAREGLSASPWPGSGGLAGSEGTAGLDVVPGGLPLTGFVVPSQDKHPDRGGRTLLSLGLLVADFGAMVNNPHLSDVQFQTDSGEVLYAHKFVLYARCPLLIQYVNNEGFSAVEDGVLTQRVLLGDVSTEAARTFLHYLYTADTGLPPGLSSELSSLAHRFGVSELVHLCEQVPIATDSEGKPWEEKEAENCESRAENFQELLRSMWADEEEEAETLLKSKDHEEDQENVNEAEMEEIYEFAATQRKLLQEERAAGAGEDADWLEGGSPVSGQLLAGVQVQKQWDKVEEMEPLEPGRDEAATTWEKMGQCALPPPQGQHSGARGAEAPEQEAPEEALGHSSCSSPSRDCQAERKEGSLPHSDDAGDYEQLFSSTQGEISEPSQITSEPEEQSGAVRERGLEVSHRLAPWQASPPHPCRFLLGPPQGGSPRGSHHTSGSSLSTPRSRGGTSQVGSPTLLSPAVPSKQKRDRSILTLSKEPGHQKGKERRSVLECRNKGVLMFPEKSPSIDLTQSNPDHSSSRSQKSSSKLNEEDEVILLLDSDEELELEQTKMKSISSDPLEEKKALEISPRSCELFSIIDVDADQEPSQSPPRSEAVLQQEDEGALPENRGSLGRRGAPWLFCDRESSPSEASTTDTSWLVPATPLASRSRDCSSQTQISSLRSGLAVQAVTQHTPRASVGNREGNEVAQKFSVIRPQTPPPQTPSSCLTPVSPGTSDGRRQGHRSPSRPHPGGHPHSSPLAPHPISGDRAHFSRRFLKHSPPGPSFLNQTPAGEVVEVGDSDDEQEVASHQANRSPPLDSDPPIPIDDCCWHMEPLSPIPIDHWNLERTGPLSTSSPSRRMNEAADSRDCRSPGLLDTTPIRGSCTTQRKLQEKSSGAGSLGNSRPSFLNSALWDVWDGEEQRPPETPPPAQMPSAGGAQKPEGLETPKGANRKKNLPPKVPITPMPQYSIMETPVLKKELDRFGVRPLPKRQMVLKLKEIFQYTHQTLDSDSEDESQSSQPLLQAPHCQTLASQTYKPSRAGVHAQQEATTGPGAHRPKGPAKTKGPRHQRKHHESITPPSRSPTKEAPPGLNDDAQIPASQESVATSVDGSDSSLSSQSSSSCEFGAAFESAGEEEGEGEVSASQAAVQAADTDEALRCYIRSKPALYQKVLLYQPFELRELQAELRQNGLRVSSRRLLDFLDTHCITFTTAATRREKLQGRRRQPRGKKKVERN

SEQ ID NO: 38077 - protein, 1522 aa, Homo sapiens
MFSFRCLDEAEKTLRPSVPQIPECPICGKPFLTLKSRTSHLKQCAVKMEVGPQLLLQAVRLQTAQPEGSSSPPMFSFSDHSRGLKRRGPTSKKEPRKRRKVDEAPSEDLLVAMALSRSEMEPGAAVPALRLESAFSERIRPEAENKSRKKKPPVSPPLLLVQDSETTGRQIEDRVALLLSEEVELSSTPPLPASRILKEGWERAGQCPPPPERKQSFLWEGSALTGAWAMEDFYTARLVPPLVPQRPAQGLMQEPVPPLVPPEHSELSERRSPALHGTPTAGCGSRGPSPSASQREHQALQDLVDLAREGLSASPWPGSGGLAGSEGTAGLDVVPGGLPLTGFVVPSQDKHPDRGGRTLLSLGLLVADFGAMVNNPHLSDVQFQTDSGEVLYAHKFVLYARCPLLIQYVNNEGFSAVEDGVLTQRVLLGDVSTEAARTFLHYLYTADTGLPPGLSSELSSLAHRFGVSELVHLCEQVPIATDSEGKPWEEKEAENCESRAENFQELLRSMWADEEEEAETLLKSKDHEEDQENVNEAEMEEIYEFAATQRKLLQEERAAGAGEDADWLEGGSPVSGQLLAGVQVQKQWDKVEEMEPLEPGRDEAATTWEKMGQCALPPPQGQHSGARGAEAPEQEAPEEALGHSSCSSPSRDCQAERKEGSLPHSDDAGDYEQLFSSTQGEISEPSQITSEPEEQSGAVRERGLEVSHRLAPWQASPPHPCRFLLGPPQGGSPRGSHHTSGSSLSTPRSRGGTSQVGSPTLLSPAVPSKQKRDRSILTLSKEPGHQKGKERRSVLECRNKGVLMFPEKSPSIDLTQSNPDHSSSRSQKSSSKLNEEDEVILLLDSDEELELEQTKMKSISSDPLEEKKALEISPRSCELFSIIDVDADQEPSQSPPRSEAVLQQEDEGALPENRGSLGRRGAPWLFCDRESSPSEASTTDTSWLVPATPLASRSRDCSSQTQISSLRSGLAVQAVTQHTPRASVGNREGNEVAQKFSVIRPQTPPPQTPSSCLTPVSPGTSDGRRQGHRSPSRPHPGGHPHSSPLAPHPISGDRAHFSRRFLKHSPPGPSFLNQTPAGEVVEVGDSDDEQEVASHQANRSPPLDSDPPIPIDDCCWHMEPLSPIPIDHWNLERTGPLSTSSPSRRMNEAADSRDCRSPGLLDTTPIRGSCTTQRKLQEKSSGAGSLGNSRPSFLNSALWDVWDGEEQRPPETPPPAQMPSAGGAQKPEGLETPKGANRKKNLPPKVPITPMPQYSIMETPVLKKELDRFGVRPLPKRQMVLKLKEIFQYTHQTLDSDSEDESQSSQPLLQAPHCQTLASQTYKPSRAGVHAQQEATTGPGAHRPKGPAKTKGPRHQRKHHESITPPSRSPTKEAPPGLNDDAQIPASQESVATSVDGSDSSLSSQSSSSCEFGAAFESAGEEEGEGEVSASQAAVQAADTDEALRCYIRSKPALYQKVLLYQPFELRELQAELRQNGLRVSSRRLLDFLDTHCITFTTAATRREKLQGRRRQPRGKKKVERN

SEQ ID NO: 38078 - protein, 793 aa, Homo sapiens
MPAGPVQAVPPPPPVPTEPKQPTEEEASSKEDSAPSKPVVGIIYPPPEVRNIVDKTASFVARNGPEFEARIRQNEINNPKFNFLNPNDPYHAYYRHKVSEFKEGKAQEPSAAIPKVMQQQQQTTQQQLPQKVQAQVIQETIVPKEPPPEFEFIADPPSISAFDLDVVKLTAQFVARNGRQFLTQLMQKEQRNYQFDFLRPQHSLFNYFTKLVEQYTKILIPPKGLFSKLKKEAENPREVLDQVCYRVEWAKFQERERKKEEEEKEKERVAYAQIDWHDFVVVETVDFQPNEQGNFPPPTTPEELGARILIQERYEKFGESEEVEMEVESDEEDDKQEKAEEPPSQLDQDTQVQDMDEGSDDEEEGQKVPPPPETPMPPPLPPTPDQVIVRKDYDPKASKPLPPAPAPDEYLVSPITGEKIPASKMQEHMRIGLLDPRWLEQRDRSIREKQSDDEVYAPGLDIESSLKQLAERRTDIFGVEETAIGKKIGEEEIQKPEEKVTWDGHSGSMARTQQAAQANITLQEQIEAIHKAKGLVPEDDTKEKIGPSKPNEIPQQPPPPSSATNIPSSAPPITSVPRPPTMPPPVRTTVVSAVPVMPRPPMASVVRLPPGSVIAPMPPIIHAPRINVVPMPPSAPPIMAPRPPPMIVPTAFVPAPPVAPVPAPAPMPPVHPPPPMEDEPTSKKLKTEDSLMPEEEFLRRNKGPVSIKVQVPNMQDKTEWKLNGQVLVFTLPLTDQVSVIKVKIHEATGMPAGKQKLQYEGIFIKDSNSLAYYNMANGAVIHLALKERGGRKK

SEQ ID NO: 38079 - protein, 728 aa, Homo sapiens
MPAGPVQAVPPPPPVPTEPKQPTEEEASSKEDSAPSKPVVGIIYPPPEVRNIVDKTASFVARNGPEFEARIRQNEINNPKFNFLNPNDPYHAYYRHKVSEFKEGKAQFVARNGRQFLTQLMQKEQRNYQFDFLRPQHSLFNYFTKLVEQYTKILIPPKGLFSKLKKEAENPREVLDQVCYRVEWAKFQERERKKEEEEKEKERVAYAQIDWHDFVVVETVDFQPNEQGNFPPPTTPEELGARILIQERYEKFGESEEVEMEVESDEEDDKQEKAEEPPSQLDQDTQVQDMDEGSDDEEEGQKVPPPPETPMPPPLPPTPDQVIVRKDYDPKASKPLPPAPAPDEYLVSPITGEKIPASKMQEHMRIGLLDPRWLEQRDRSIREKQSDDEVYAPGLDIESSLKQLAERRTDIFGVEETAIGKKIGEEEIQKPEEKVTWDGHSGSMARTQQAAQANITLQEQIEAIHKAKGLVPEDDTKEKIGPSKPNEIPQQPPPPSSATNIPSSAPPITSVPRPPTMPPPVRTTVVSAVPVMPRPPMASVVRLPPGSVIAPMPPIIHAPRINVVPMPPSAPPIMAPRPPPMIVPTAFVPAPPVAPVPAPAPMPPVHPPPPMEDEPTSKKLKTEDSLMPEEEFLRRNKGPVSIKVQVPNMQDKTEWKLNGQVLVFTLPLTDQVSVIKVKIHEATGMPAGKQKLQYEGIFIKDSNSLAYYNMANGAVIHLALKERGGRKK

SEQ ID NO: 38080 - protein, 1722 aa, Homo sapiens
MSDPRQSQEEKHKLGRASSKFKDPPRIMQSDDYFARKFKAINGNMGPTTSLNASNSNETGGGGPANGTPAVPKMGVRARVSEWPPKKDCSKELTCKALWESRSQTSYESITSVLQNGQSDQSEGQQDEQLDLDFVEAKYTIGDIFVHSPQRGLHPIRQRSNSDVTISDIDAEDVLDQNAVNPNTGAALHREYGSTSSIDRQGLSGENFFAMLRGYRVENYDHKAMVPFGFPEFFRCDPAISPSLHAAAQISRGEFVRISGLDYVDSALLMGRDRDKPFKRRLKSESVETSLFRKLRTVKSEHETFKFTSELEESRLERGIRPWNCQRCFAHYDVQSILFNINEAMATRANVGKRKNITTGASAASQTQMPTGQTGNCESPLGSKEDLNSKENLDADEGDGKSNDLVLSCPYFRNETGGEGDRRIALSRANSSSFSSGESCSFESSLSSHCTNAGVSVLEVPRENQPIHREKVKRYIIEHIDLGAYYYRKFFYGKEHQNYFGIDENLGPVAVSIRREKVEDAKEKEGSQFNYRVAFRTSELTTLRGAILEDAIPSTARHGTARGLPLKEVLEYVIPELSIQCLRQASNSPKVSEQLLKLDEQGLSFQHKIGILYCKAGQSTEEEMYNNETAGPAFEEFLDLLGQRVRLKGFSKYRAQLDNKTDSTGTHSLYTTYKDYELMFHVSTLLPYMPNNRQQLLRKRHIGNDIVTIVFQEPGALPFTPKSIRSHFQHVFVIVKVHNPCTENVCYSVGVSRSKDVPPFGPPIPKGVTFPKSAVFRDFLLAKVINAENAAHKSEKFRAMATRTRQEYLKDLAENFVTTATVDTSVKFSFITLGAKKKEKVKPRKDAHLFSIGAIMWHVIARDFGQSADIECLLGISNEFIMLIEKDSKNVVFNCSCRDVIGWTSGLVSIKVFYERGECVLLSSVDNCAEDIREIVQRLVIVTRGCETVEMTLRRNGLGQLGFHVNFEGIVADVEPFGFAWKAGLRQGSRLVEICKVAVATLTHEQMIDLLRTSVTVKVVIIQPHDDGSPRRGCSELCRIPMVEYKLDSEGTPCEYKTPFRRNTTWHRVPTPALQPLSRASPIPGTPDRLPCQQLLQQAQAAIPRSTSFDRKLPDGTRSSPSNQSSSSDPGPGGSGPWRPQVGYDGCQSPLLLEHQGSGPLECDGAREREDTMEASRHPETKWHGPPSKVLGSYKERALQKDGSCKDSPNKLSHIGDKSCSSHSSSNTLSSNTSSNSDDKHFGSGDLMDPELLGLTYIKGASTDSGIDTAPCMPATILGPVHLAGSRSLIHSRAEQWADAADVSGPDDEPAKLYSVHGYASTISAGSAAEGSMGDLSEISSHSSGSHHSGSPSAHCSKSSGSLDSSKVYIVSHSSGQQVPGSMSKPYHRQGAVNKYVIGWKKSEGSPPPEEPEVTECPGMYSEMDVMSTATQHQTVVGDAVAETQHVLSKEDFLKLMLPDSPLVEEGRRKFSFYGNLSPRRSLYRTLSDESICSNRRGSSFGSSRSSVLDQALPNDILFSTTPPYHSTLPPRAHPAPSMGSLRNEFWFSDGSLSDKSKCADPGLMPLPDTATGLDWTHLVDAARAFEGLDSDEELGLLCHHTSYLDQRVASFCTLTDMQHGQDLEGAQELPLCVDPGSGKEFMDTTGERSPSPLTGKVNQLELILRQLQTDLRKEKQDKAVLQAEVQHLRQDNMRLQEESQTATAQLRKFTEWFFTTIDKKS

SEQ ID NO: 38081 - protein, 778 aa, Homo sapiens
MSPCFSFIGCKLCSIVTRGCETVEMTLRRNGLGQLGFHVNFEGIVADVEPFGFAWKAGLRQGSRLVEICKVAVATLTHEQMIDLLRTSVTVKVVIIQPHDDGSPRRGCSELCRIPMVEYKLDSEGTPCEYKTPFRRNTTWHRVPTPALQPLSRASPIPGTPDRLPCQQLLQQAQAAIPRSTSFDRKLPDGTRSSPSNQSSSSDPGPGGSGPWRPQVGYDGCQSPLLLEHQGSGPLECDGAREREDTMEASRHPETKWHGPPSKVLGSYKERALQKDGSCKDSPNKLSHIGDKSCSSHSSSNTLSSNTSSNSDDKHFGSGDLMDPELLGLTYIKGASTDSGIDTAPCMPATILGPVHLAGSRSLIHSRAEQWADAADVSGPDDEPAKLYSVHGYASTISAGSAAEGSMGDLSEISSHSSGSHHSGSPSAHCSKSSGSLDSSKVYIVSHSSGQQVPGSMSKPYHRQGAVNKYVIGWKKSEGSPPPEEPEVTECPGMYSEMDVMSTATQHQTVVGDAVAETQHVLSKEDFLKLMLPDSPLVEEGRRKFSFYGNLSPRRSLYRTLSDESICSNRRGSSFGSSRSSVLDQALPNDILFSTTPPYHSTLPPRAHPAPSMGSLRNEFWFSDGSLSDKSKCADPGLMPLPDTATGLDWTHLVDAARAFEDQRVASFCTLTDMQHGQDLEGAQELPLCVDPGSGKEFMDTTGERSPSPLTGKVNQLELILRQLQTDLRKEKQDKAVLQAEVQHLRQDNMRLQEESQTATAQLRKFTEWFFTTIDKKS

SEQ ID NO: 38082 - protein, 1781 aa, Homo sapiens
MTTYRAIPSDGVDLAASCGARVGDVLPGPHTGDYAPLGFWAQNGSMSQPLGESPATATATATATTRPSPTTPAMPKMGVRARVADWPPKREALREHSNPSPSQDTDGTKATKMAHSMRSIQNGQPPTSTPASSGSKAFHRLSRRRSKDVEFQDGWPRSPGRAFLPLRHRSSSEITLSECDAEDAGEPRGARHTGALPLFREYGSTSSIDVQGMPEQSFFDILNEFRSEQPDARGCQALTELLRADPGPHLMGGGGGAKGDSHNGQPAKDSLLPLQPTKEKEKARKKPARGLGGGDTVDSSIFRKLRSSKPEGEAGRSPGEADEGRSPPEASRPWVCQKSFAHFDVQSMLFDLNEAAANRVSVSQRRNTTTGASAASAASAMASLTASRAHSLGGLDPAFTSTEDLNCKENLEQDLGDDNSNDLLLSCPHFRNEIGGECERNVSFSRASVGSPSSGEGHLAEPALSAYRTNASISVLEVPKEQQRTQSRPRQYSIEHVDLGARYYQDYFVGKEHANYFGVDEKLGPVAVSIKREKLEDHKEHGPQYQYRIIFRTRELITLRGSILEDATPTATKHGTGRGLPLKDALEYVIPELNIHCLRLALNTPKVTEQLLKLDEQGLCRKHKVGILYCKAGQSSEEEMYNNEEAGPAFEEFLSLIGEKVCLKGFTKYAAQLDVKTDSTGTHSLYTMYQDYEIMFHVSTLLPYTPNNRQQLLRKRHIGNDIVTIIFQEPGALPFTPKNIRSHFQHVFIIVRVHNPCTDNVCYSMAVTRSKDAPPFGPPIPSGTTFRKSDVFRDFLLAKVINAENAAHKSDKFHTMATRTRQEYLKDLAENCVSNTPIDSTGKFNLISLTSKKKEKTKARAGAEQHSAGAIAWRVVAQDYAQGVEIDCILGISNEFVVLLDLRTKEVVFNCYCGDVIGWTPDSSTLKIFYGRGDHIFLQATEGSVEDIREIVQRLKVMTSGWETVDMTLRRNGLGQLGFHVKYDGTVAEVEDYGFAWQAGLRQGSRLVEICKVAVVTLTHDQMIDLLRTSVTVKVVIIPPFEDGTPRRGWPETYDMNTSEPKTEQESITPGGRPPYRSNAPWQWSGPASHNSLPASKWATPTTPGHAQSLSRPLKQTPIVPFRESQPLHSKRPVSFPETPYTVSPAGADRVPPYRQPSGSFSTPGSATYVRYKPSPERYTAAPHPLLSLDPHFSHDGTSSGDSSSGGLTSQESTMERQKPEPLWHVPAQARLSAIAGSSGNKHPSRQDAAGKDSPNRHSKGEPQYSSHSSSNTLSSNASSSHSDDRWFDPLDPLEPEQDPLSKGGSSDSGIDTTLYTSSPSCMSLAKAPRPAKPHKPPGSMGLCGGGREAAGRSHHADRRREVSPAPAVAGQSKGYRPKLYSSGSSTPTGLAGGSRDPPRQPSDMGSRVGYPAQVYKTASAETPRPSQLAQPSPFQLSASVPKSFFSKQPVRNKHPTGWKRTEEPPPRPLPFSDPKKQVDTNTKNVFGQPRLRASLRDLRSPRKNYKSTIEDDLKKLIIMDNLGPEQERDTGQSPQKGLQRTLSDESLCSGRREPSFASPAGLEPGLPSDVLFTSTCAFPSSTLPARRQHQHPHPPVGPGATPAAGSGFPEKKSTISASELSLADGRDRPLRRLDPGLMPLPDTAAGLEWSSLVNAAKAYEVQRAVSLFSLNDPALSPDIPPAHSPVHSHLSLERGPPTPRTTPTMSEEPPLDLTGKVYQLEVMLKQLHTDLQKEKQDKVVLQSEVASLRQNNQRLQEESQAASEQLRKFAEIFCREKKEL

SEQ ID NO: 38083 - protein, 464 aa, Homo sapiens
MDFQHRPGGKTGSGGVASSSESNRDRRERLRQLALETIDINKDPYFMKNHLGSYECKLCLTLHNNEGSYLAHTQGKKHQTNLARRAAKEAKEAPAQPAPEKVKVEVKKFVKIGRPGYKVTKQRDSEMGQQSLLFQIDYPEIAEGIMPRHRFMSAYEQRIEPPDRRWQYLLMAAEPYETIAFKVPSREIDKAEGKFWTHWNRETKQFFLQFHFKMEKPPAPPSLPAGPPGVKRPPPPLMNGLPPRPPLPESLPPPPPGGLPLPPMPPTGPAPSGPPGPPQLPPPAPGVHPPAPVVHPPASGVHPPAPGVHPPAPGVHPPAPGVHPPTSGVHPPAPGVHPPAPGVHPPAPGVHPPAPGVHPPAPGVHPPPSAGVHPQAPGVHPAAPAVHPQAPGVHPPAPGMHPQAPGVHPQPPGVHPSAPGVHPQPPGVHPSNPGVHPPTPMPPMLRPPLPSEGPGNIPPPPPTN

SEQ ID NO: 38084 - protein, 331 aa, Homo sapiens
MRGYLVAIFLSAVFLYYVLHCILWGTNVYWVAPVEMKRRNKIQPCLSKPAFASLLRFHQFHPFLCAADFRKIASLYGSDKFDLPYGMRTSAEYFRLALSKLQSCDLFDEFDNIPCKKCVVVGNGGVLKNKTLGEKIDSYDVIIRMNNGPVLGHEEEVGRRTTFRLFYPESVFSDPIHNDPNTTVILTAFKPHDLRWLLELLMGDKINTNGFWKKPALNLIYKPYQIRILDPFIIRTAAYELLHFPKVFPKNQKPKHPTTGIIAITLAFYICHEVHLAGFKYNFSDLKSPLHYYGNATMSLMNKNAYHNVTAEQLFLKDIIEKNLVINLTQD

SEQ ID NO: 38085 - protein, 213 aa, Homo sapiens
MRTSAEYFRLALSKLQSCDLFDEFDKMNNGPVLGHEEEVGRRTTFRLFYPESVFSDPIHNDPNTTVILTAFKPHDLRWLLELLMGDKINTNGFWKKPALNLIYKPYQIRILDPFIIRTAAYELLHFPKVFPKNQKPKHPTTGIIAITLAFYICHEVHLAGFKYNFSDLKSPLHYYGNATMSLMNKNAYHNVTAEQLFLKDIIEKNLVINLTQD

SEQ ID NO: 38086 - protein, 501 aa, Homo sapiens
METILEQQRRYHEEKERLMDVMAKEMLTKKSTLRDQINSDHRTRAMQDRYMEVSGNLRDLYDDKDGLRKEELNAISGPNEFAEFYNRLKQIKEFHRKHPNEICVPMSVEFEELLKARENPSEEAQNLVEFTDEEGYGRYLDLHDCYLKYINLKASEKLDYITYLSIFDQLFDIPKERKNAEYKRYLEMLLEYLQDYTDRVKPLQDQNELFGKIQAEFEKKWENGTFPGWPKETSSALTHAGAHLDLSAFSSWEELASLGLDRLKSALLALGLKCGGTLEERAQRLFSTKGKSLESLDTSLFAKNPKSKGTKRDTERNKDIAFLEAQIYEYVEILGEQRHLTHENVQRKQARTGEEREEEEEEQISESESEDEENEIIYNPKNLPLGWDGKPIPYWLYKLHGLNINYNCEICGNYTYRGPKAFQRHFAEWRHAHGMRCLGIPNTAHFANVTQIEDAVSLWAKLKLQKASERWQPDTEEEYEDSSGNVVNKKTYEDLKRQGLL

SEQ ID NO: 38087 - protein, 1058 aa, Homo sapiens
MEDGTPKHIIQMTGFKMEEKEALVKLLLKLDCTFIKSEKYKNCTHLIAERLCKSEKFLAACAAGKWILTKDYIIHSAKSGRWLDETTYEWGYKIEKDSRYSPQMQSAPKRWREELKRTGAPGAFHRWKVVLLVRTDKRSDSLIRVLEAGKANVILPKSSPSGITHVIASNARIKAEKEKDNFKAPFYPIQYLGDFLLEKEIQNDEDSQTNSVWTEHSNEETNKDFRKDAGFLEMKGALRETMYRTQKEMQNHEDVNVGSILIQHHKKEKFSGSSKDLKFVKMRNTFGSHTYENQKEIKKKDEDIQRSYTLRRKRKKGKESNCKKGVEHEKIKSTLRRHIYNRDQKEMKNSIFAEYAKESKAMAIKTDVDVVEIKNTLRKHIYRAQAVRYNCIRIDKQPVYNVEVKNAEFPRGVLNLIESLIEGHFFKEAIEELSTLQAHYIPPVCVLHALLENVLQDNIDTFSGRYFHILSALLHLHPPWKSPAMSRYYLELFQCPTCMKGAWSLVEVLIRSCLFNESFCHQISENIGSKVLHLTLLKFFFNLIESEVQHLSQKLYDWSDSQNLKITGKAMLLEIFWSGSETSGLLTKPVNMLLEWTIYSHKEKFKSNDVFKHELAYLLAGILGAAIDYWIFLGLKMGRNVMRHMSDDLGSYVSLSCDDFSSQELEIFICSFSSSWLQMFVAEAVFKKLCLQSSGSVSSEPLSLQKMVYSYLPALGKTGVLGSGKIQVSKKIGQRPCFDSQRTLLMLNGTKQKQVEGLPELLDLNLAKCSSSLKKLKKKSEGELSCSKENCPSVVKKMNFHKTNLKGETALHRACINNQVEKLILLLSLPGIDINVKDNAGWTPLHEACNYGNTVCVQEILQRCPEVDLLTQVDGVTPLHDALSNGHVEIGKLLLQHGGPVLLQQRNAKGELPLDYVVSPQIKEELFAITKIEDTVENFHAQAEKHFHYQQLEFGSFLLSRMLLNFCSIFDLSSEFILASKGLTHLNELLMACKSHKETTSVHTDWLLDLYAGNIKTLQKLPHILKELPENLKVCPGVHTEALMITLEMMCRSVMEFS

SEQ ID NO: 38088 - protein, 179 aa, Homo sapiens
MEDGTPKHIIQMTGFKMEEKEALVKLLLKLDCTFIKSEKYKNCTHLIAERLCKSEKFLAACAAGKWILTKDYIIHSAKSGRWLDETTYEWGYKIEKDSRYSPQMQSAPKRWREELKRTGAPGAFHRWKVVLLVRTDKRSDSLIRKKFRMMKIPKPILFGLNIAMKKQTKISGKMQDFLK

SEQ ID NO: 38089 - protein, 1304 aa, Homo sapiens
MAKIAKTHEDIEAQIREIQGKKAALDEAQGVGLDSTGYYDQEIYGGSDSRFAGYVTSIAATELEDDDDDYSSSTSLLGQKKPGYHAPVALLNDIPQSTEQYDPFAEHRPPKIADREDEYKKHRRTMIISPERLDPFADGGKTPDPKMNARTYMDVMREQHLTKEEREIRQQLAEKAKAGELKVVNGAAASQPPSKRKRRWDQTADQTPGATPKKLSSWDQAETPGHTPSLRWDETPGRAKGSETPGATPGSKIWDPTPSHTPAGAATPGRGDTPGHATPGHGGATSSARKNRWDETPKTERDTPGHGSGWAETPRTDRGGDSIGETPTPGASKRKSRWDETPASQMGGSTPVLTPGKTPIGTPAMNMATPTPGHIMSMTPEQLQAWRWEREIDERNRPLSDEELDAMFPEGYKVLPPPAGYVPIRTPARKLTATPTPLGGMTGFHMQTEDRTMKSVNDQPSGNLPFLKPDDIQYFDKLLVDVDESTLSPEEQKERKIMKLLLKIKNGTPPMRKAALRQITDKAREFGAGPLFNQILPLLMSPTLEDQERHLLVKVIDRILYKLDDLVRPYVHKILVVIEPLLIDEDYYARVEGREIISNLAKAAGLATMISTMRPDIDNMDEYVRNTTARAFAVVASALGIPSLLPFLKAVCKSKKSWQARHTGIKIVQQIAILMGCAILPHLRSLVEIIEHGLVDEQQKVRTISALAIAALAEAATPYGIESFDSVLKPLWKGIRQHRGKGLAAFLKAIGYLIPLMDAEYANYYTREVMLILIREFQSPDEEMKKIVLKVVKQCCGTDGVEANYIKTEILPPFFKHFWQHRMALDRRNYRQLVDTTVELANKVGAAEIISRIVDDLKDEAEQYRKMVMETIEKIMGNLGAADIDHKLEEQLIDGILYAFQEQTTEDSVMLNGFGTVVNALGKRVKPYLPQICGTVLWRLNNKSAKVRQQAADLISRTAVVMKTCQEEKLMGHLGVVLYEYLGEEYPEVLGSILGALKAIVNVIGMHKMTPPIKDLLPRLTPILKNRHEKVQENCIDLVGRIADRGAEYVSAREWMRICFELLELLKAHKKAIRRATVNTFGYIAKAIGPHDVLATLLNNLKVQERQNRVCTTVAIAIVAETCSPFTVLPALMNEYRVPELNVQNGVLKSLSFLFEYIGEMGKDYIYAVTPLLEDALMDRDLVHRQTASAVVQHMSLGVYGFGCEDSLNHLLNYVWPNVFETSPHVIQAVMGALEGLRVAIGPCRMLQYCLQGLFHPARKVRDVYWKIYNSIYIGSQDALIAHYPRIYNDDKNTYIRYELDYIL

SEQ ID NO: 38090 - protein, 144 aa, Homo sapiens
MAKIAKTHEDIEAQIREIQGKKAALDEAQGVGLDSTGYYDQEIYGGSDSRFAGYVTSIAATELEDDDDDYSSSTSLLGQKKPGYHAPVALLNDIPQSTEQYDPFAEHRPPKIADREDEYKKHRRTMIISPERLDPFADGFYSAA

SEQ ID NO: 38091 - protein, 312 aa, Homo sapiens
MSAFSEAALEKKLSELSNSQQSVQTLSLWLIHHRKHSRPIVTVWERELRKAKPNRKLTFLYLANDVIQNSKRKGPEFTKDFAPVIVEAFKHVSSETDESCKKHLGRVLSIWEERSVYENDVLEQLKQALYGDKKPRKRTYEQIKVDENENCSSLGSPSEPPQTLDLVRALQDLENAASGDAAVHQRIASLPVEVQEVSLLDKITDKESGERLSKMVEDACMLLADYNGRLAAEIDDRKQLTRMLADFLRCQKEALAEKEHKLEEYKRKLARVSLVRKELRSRIQSLPDLSRLPNVTGSHMHLPFAGDIYSED

SEQ ID NO: 38092 - protein, 276 aa, Homo sapiens
MRNSNWRFCQTGIYSKPNRKLTFLYLANDVIQNSKRKGPEFTKDFAPVIVEAFKHVSSETDESCKKHLGRVLSIWEERSVYENDVLEQLKQALYGDKKPRKRTYEQIKVDENENCSSLGSPSEPPQTLDLVRALQDLENAASGDAAVHQRIASLPVEVQEVSLLDKITDKESGERLSKMVEDACMLLADYNGRLAAEIDDRKQLTRMLADFLRCQKEALAEKEHKLEEYKRKLARVSLVRKELRSRIQSLPDLSRLPNVTGSHMHLPFAGDIYSED

SEQ ID NO: 38093 - protein, 326 aa, Homo sapiens
MSSFSESALEKKLSELSNSQQSVQTLSLWLIHHRKHAGPIVSVWHRELRKAKSNRKLTFLYLANDVIQNSKRKGPEFTREFESVLVDAFSHVAREADEGCKKPLERLLNIWQERSVYGGEFIQQLKLSMEDSKSPPPKATEEKKSLKRTFQQIQEEEDDDYPGSYSPQDPSAGPLLTEELIKALQDLENAASGDATVRQKIASLPQEVQDVSLLEKITDKEAAERLSKTVDEACLLLAEYNGRLAAELEDRRQLARMLVEYTQNQKDVLSEKEKKLEEYKQKLARVTQVRKELKSHIQSLPDLSLLPNVTGGLAPLPSAGDLFSTD

SEQ ID NO: 38094 - protein, 340 aa, Homo sapiens
MVTLRKRTLKVLTFLVLFIFLTSFFLNYSHTMVATTWFPKQMVLELSENLKRLIKHRPCTCTHCIGQRKLSAWFDERFNQTMQPLLTAQNALLEDDTYRWWLRLQREKKPNNLNDTIKELFRVVPGNVDPMLEKRSVGCRRCAVVGNSGNLRESSYGPEIDSHDFVLRMNKAPTAGFEADVGTKTTHHLVYPESFRELGDNVSMILVPFKTIDLEWVVSAITTGTISHTYIPVPAKIRVKQDKILIYHPAFIKYVFDNWLQGHGRYPSTGILSVIFSMHVCDEVDLYGFGADSKGNWHHYWENNPSAGAFRKTGVHDADFESNVTATLASINKIRIFKGR

SEQ ID NO: 38095 - protein, 328 aa, Homo sapiens
MASRCSEPYPEVSRIPTVRGCNGSLSGALSCCEDSARGSGPPKAPTVAEGPSSCLRRNVISERERRKRMSLSCERLRALLPQFDGRREDMASVLEMSVQFLRLASALGPSQEQHAILASSKEMWHSLQEDVLQLTLSSQIQAGVPDPGTGASSGTRTPDVKAFLESPWSLDPASASPEPVPHILASSRQWDPASCTSLGTDKCEALLGLCQVRGGLPPFSEPSSLVPWPPGRSLPKAVRPPLSWPPFSQQQTLPVMSGEALGWLGQAGPLAMGAAPLGEPAKEDPMLAQEAGSALGSDVDDGTSFLLTAGPSSWPGEWGPGFRAGPPA

SEQ ID NO: 38096 - protein, 387 aa, Homo sapiens
MASRCSEPYPEVSRIPTVRGCNGSLSGALSCCEDSARGSGPPKAPTVAEGPSSCLRRNVISERERRKRMSLSCERLRALLPQFDGRREDMASVLEMSVQFLRLASALGPSQEQHAILASSKEMWHSLQEDVLQLTLSSQIQAGVPDPGTGASSGTRTPDVKAFLESPWSLDPASASPEPVPHILASSRQWDPASCTSLGTDKCEALLGLCQVRGGLPPFSEPSSLVPWPPGRSLPKAVRPPLSWPPFSQQQTLPVMSGEALGWLGQAGPLAMGAAPLGEPAKEDPMLAQEAGSALGSDVDDGTSFLLTAGPSSWPGSLEGRGGSGPAWAPAESSPLDVGEPGFLGDPELGSQELQDSPLEPWGLDVDCAGLALKDEVESIFPDFFAC

SEQ ID NO: 38097 - protein, 145 aa, Homo sapiens [sequence omitted]

SEQ ID NO: 38098 - protein, 1179 aa, Homo sapiens
MKLKELERPAVQAWSPASQYPLYLATGTSAQQLDSSFSTNGTLEIFEVDFRDPSLDLKHRGVLSALSRFHKLVWGSFGSGLLESSGVIVGGGDNGMLILYNVTHILSSGKEPVIAQKQKHTGAVRALDLNPFQGNLLASGASDSEIFIWDLNNLNVPMTLGSKSQQPPEDIKALSWNRQAQHILSSAHPSGKAVVWDLRKNEPIIKVSDHSNRMHCSGLAWHPDIATQLVLCSEDDRLPVIQLWDLRFASSPLKVLESHSRGILSVSWSQADAELLLTSAKDSQILCRNLGSSEVVYKLPTQSSWCFDVQWCPRDPSVFSAASFNGWISLYSVMGRSWEVQHMRQADKISSSFSKGQPLPPLQVPEQVAQAPLIPPLKKPPKWIRRPTGVSFAFGGKLVTFGLPSTPAHLVPQPCPRLVFISQVTTESEFLMRSAELQEALGSGNLLNYCQNKSQQALLQSEKMLWQFLKVTLEQDSRMKFLKLLGYSKDELQKKVATWLKSDVGLGESPQPKGNDLNSDRQQAFCSQASKHTTKEASASSAFFDELVPQNMTPWEIPITKDIDGLLSQALLLGELGPAVELCLKEERFADAIILAQAGGTDLLKQTQERYLAKKKTKISSLLACVVQKNWKDVVCTCSLKNWREALALLLTYSGTEKFPELCDMLGTRMEQEGSRALTSEARLCYVCSGSVERLVECWAKCHQALSPMALQDLMEKVMVLNRSLEQLRGPHGVSPGPATTYRVTQYANLLAAQGSLATAMSFLPRDCAQPPVQQLRDRLFHAQGSAVLGQQSPPFPFPRIVVGATLHSKETSSYRLGSQPSHQVPTPSPRPRVFTPQSSPAMPLAPSHPSPYQGPRTQNISDYRAPGPQAIQPLPLSPGVRPASSQPQLLGGQRVQVPNPVGFPGTWPLPGSPLPMACPGIMRPGSTSLPETPRLFPLLPLRPLGPGRMVSHTPAPPASFPVPYLPGDPGAPCSSVLPTTGILTPHPGPQDSWKEAPAPRGNLQRNKLPETFMPPAPITAPVMSLTPELQGILPSQPPVSSVSHAPPGVPGELSLQLQHLPPEKMERKELPPEHQSLKSSFEALLQRCSLSATDLKTKRKLEEAAQRLEYLYEKLCEGTLSPHVVAGLHEVARCVDAGSFEQGLAVHAQVAGCSSFSEVSSFMPILKAVLIIAHKLLV

SEQ ID NO: 38099 - protein, 348 aa, Homo sapiens
MKLKELERPAVQAWSPASQYPLYLATGTSAQQLDSSFSTNGTLEIFEVDFRDPSLDLKHRGVLSALSRFHKLVWGSFGSGLLESSGVIVGGGDNGMLILYNVTHILSSGKEPVIAQKQKHTGAVRALDLNPFQGNLLASGASDSEIFIWDLNNLNVPMTLGSKSQPPEDIKALSWNRQAQHILSSAHPSGKAVVWDLRKNEPIIKVSDHSNRMHCSGLAWHPDIATQLVLCSEDDRLPVIQLWDLRFASSPLKVLESHSRGILSVSWSQADAELLLTSAKDSQILCRNLGSSEVVYKLPTQSSWCFDVQWCPRDPSVFSAASFNGWISLYSVMGRSWEVQHMRQADKV

SEQ ID NO: 38100 - protein, 85 aa, Homo sapiens
MKLKELERPAVQAWSPASQYPLYLATGTSAQQLDSSFSTNGTLEIFEVDFRDPSLDLKHRGVLSALSRATSWLQGPAILKSSLGI

SEQ ID NO: 38101 - protein, 480 aa, Homo sapiens
MKLKELERPAVQAWSPASQYPLYLATGTSAQQLDSSFSTNGTLEIFEVDFRDPSLDLKHRGVLSALSRFHKLVWGSFGSGLLESSGVIVGGGDNGMLILYNVTHILSSGKEPVIAQKQKHTGAVRALDLNPFQGNLLASGASDSEIFIWDLNNLNVPMTLGSKSQQPPEDIKALSWNRQAQHILSSAHPSGKAVVWDLRKNEPIIKVSDHSNRMHCSGLAWHPDIATQLVLCSEDDRLPVIQLWDLRFASSPLKVLESHSRGILSVSWSQADAELLLTSAKDSQILCRNLGSSEVVYKLPTQSSWCFDVQWCPRDPSVFSAASFNGWISLYSVMGRSWEVQHMRQADKISSSFSKGQPLPPLQVPEQVAQAPLIPPLKKPPKWIRRPTGVSFAFGGKLVTFGLPSTPAHLVPQPCPRLVFISQVTTESEFLMRSAELQEALGSGNLLNYCQNKSQQALLQSEKMLWQFLKPARDSSGARR

SEQ ID NO: 38102 - protein, 1178 aa, Homo sapiens
MKLKELERPAVQAWSPASQYPLYLATGTSAQQLDSSFSTNGTLEIFEVDFRDPSLDLKHRGVLSALSRFHKLVWGSFGSGLLESSGVIVGGGDNGMLILYNVTHILSSGKEPVIAQKQKHTGAVRALDLNPFQGNLLASGASDSEIFIWDLNNLNVPMTLGSKSQPPEDIKALSWNRQAQHILSSAHPSGKAVVWDLRKNEPIIKVSDHSNRMHCSGLAWHPDIATQLVLCSEDDRLPVIQLWDLRFASSPLKVLESHSRGILSVSWSQADAELLLTSAKDSQILCRNLGSSEVVYKLPTQSSWCFDVQWCPRDPSVFSAASFNGWISLYSVMGRSWEVQHMRQADKISSSFSKGQPLPPLQVPEQVAQAPLIPPLKKPPKWIRRPTGVSFAFGGKLVTFGLPSTPAHLVPQPCPRLVFISQVTTESEFLMRSAELQEALGSGNLLNYCQNKSQQALLQSEKMLWQFLKVTLEQDSRMKFLKLLGYSKDELQKKVATWLKSDVGLGESPQPKGNDLNSDRQQAFCSQASKHTTKEASASSAFFDELVPQNMTPWEIPITKDIDGLLSQALLLGELGPAVELCLKEERFADAIILAQAGGTDLLKQTQERYLAKKKTKISSLLACVVQKNWKDVVCTCSLKNWREALALLLTYSGTEKFPELCDMLGTRMEQEGSRALTSEARLCYVCSGSVERLVECWAKCHQALSPMALQDLMEKVMVLNRSLEQLRGPHGVSPGPATTYRVTQYANLLAAQGSLATAMSFLPRDCAQPPVQQLRDRLFHAQGSAVLGQQSPPFPFPRIVVGATLHSKETSSYRLGSQPSHQVPTPSPRPRVFTPQSSPAMPLAPSHPSPYQGPRTQNISDYRAPGPQAIQPLPLSPGVRPASSQPQLLGGQRVQVPNPVGFPGTWPLPGSPLPMACPGIMRPGSTSLPETPRLFPLLPLRPLGPGRMVSHTPAPPASFPVPYLPGDPGAPCSSVLPTTGILTPHPGPQDSWKEAPAPRGNLQRNKLPETFMPPAPITAPVMSLTPELQGILPSQPPVSSVSHAPPGVPGELSLQLQHLPPEKMERKELPPEHQSLKSSFEALLQRCSLSATDLKTKRKLEEAAQRLEYLYEKLCEGTLSPHVVAGLHEVARCVDAGSFEQGLAVHAQVAGCSSFSEVSSFMPILKAVLIIAHKLLV

SEQ ID NO: 38103 - protein, 590 aa, Homo sapiens
  MOD_RES (127)..(127): Selenocysteine
  MOD_RES (462)..(462): Selenocysteine
MGRARPGQRGPPSPGPAAQPPAPPRRRARSLALLGALLAAAAAAAVRVCARHAEAQAAARQELALKTLGTDGLFLFSSLDTDGDMYISPEEFKPIAEKLTGSCSVTQTGVQWCSHSSLQPQLPWLNXSSCLSLLRSTPAASCEEEELPPDPSEETLTIEARFQPLLPETMTKSKDGFLGVSRLALSGLRNWTAAASPSAVFATRHFQPFLPPPGQELGEPWWIIPSELSMFTGYLSNNRFYPPPPKGKEVIIHRLLSMFHPRPFVKTRFAPQGAVACLTAISDFYYTVMFRIHAEFQLSEPPDFPFWFSPAQFTGHIILSKDATHVRDFRLFVPNHRSLNVDMEWLYGASESSNMEVDIGYIPQMELEATGPSVPSVILDEDGSMIDSHLPSGEPLQFVFEEIKWQQELSWEEAARRLEVAMYPFKKVSYLPFTEAFDRAKAENKLVHSILLWGALDDQSCXGSGRTLRETVLESSPILTLLNESFISTWSLVKELEELQNNQENSSHQKLAGLHLEKYSFPVEMMICLPNGTVVHHINANYFLDITSVKPEEIESNLFSFSSTFEDPSTATYMQFLKEGLRRGLPLLQP

SEQ ID NO: 38104 - protein, 556 aa, Homo sapiens
  MOD_RES (428)..(428): Selenocysteine
MGRARPGQRGPPSPGPAAQPPAPPRRRARSLALLGALLAAAAAAAVRVCARHAEAQAAARQELALKTLGTDGLFLFSSLDTDGDMYISPEEFKPIAEKLTGSTPAASCEEEELPPDPSEETLTIEARFQPLLPETMTKSKDGFLGVSRLALSGLRNWTAAASPSAVFATRHFQPFLPPPGQELGEPWWIIPSELSMFTGYLSNNRFYPPPPKGKEVIIHRLLSMFHPRPFVKTRFAPQGAVACLTAISDFYYTVMFRIHAEFQLSEPPDFPFWFSPAQFTGHIILSKDATHVRDFRLFVPNHRSLNVDMEWLYGASESSNMEVDIGYIPQMELEATGPSVPSVILDEDGSMIDSHLPSGEPLQFVFEEIKWQQELSWEEAARRLEVAMYPFKKVSYLPFTEAFDRAKAENKLVHSILLWGALDDQSCXGSGRTLRETVLESSPILTLLNESFISTWSLVKELEELQNNQENSSHQKLAGLHLEKYSFPVEMMICLPNGTVVHHINANYFLDITSVKPEEIESNLFSFSSTFEDPSTATYMQFLKEGLRRGLPLLQP

SEQ ID NO: 38105 - protein, 580 aa, Homo sapiens
MAFHVEGLIAIIVFYLLILLVGIWAAWRTKNSGSAEERSEAIIVGGRDIGLLVGGFTMTATWVGGGYINGTAEAVYVPGYGLAWAQAPIGYSLSLILGGLFFAKPMRSKGYVTMLDPFQQIYGKRMGGLLFIPALMGEMFWAAAIFSALGATISVIIDVDMHISVIISALIATLYTLVGGLYSVAYTDVVQLFCIFVGLWISVPFALSHPAVADIGFTAVHAKYQKPWLGTVDSSEVYSWLDSFLLLMLGGIPWQAYFQRVLSSSSATYAQVLSFLAAFGCLVMAIPAILIGAIGASTDWNQTAYGLPDPKTTEEADMILPIVLQYLCPVYISFFGLGAVSAAVMSSADSSILSASSMFARNIYQLSFRQNASDKEIVWVMRITVFVFGASATAMALLTKTVYGLWYLSSDLVYIVIFPQLLCVLFVKGTNTYGAVAGYVSGLFLRITGGEPYLYLQPLIFYPGYYPDDNGIYNQKFPFKTLAMVTSFLTNICISYLAKYLFESGTLPPKLDVFDAVVARHSEENMDKTILVKNENIKLDELALVKPRQSMTLSSTFTNKEAFLDVDSSPEGSGTEDNLQ

SEQ ID NO: 38106 - protein, 307 aa, Homo sapiens
MGEQNHSPGKELQHRTRAEAPGKKSWHSQAYALGAVSNFMSTFLTFPIYKVVFRQQIHAMAVSEAVRQLWHEGPQYFYRGIYPPLLSKTLQGTLLFGTYDSLLCFLSPVGPHTLGHRWAAGLMSGVVEAVALSPFERVQNVLQDGRKQARFPSTFSILKEFNSYGLWGRLSLGYYRGFWPVLARNSLGSALYFSFKDPIQDGLAEQGLPHWVPALVSGSVNGTITCLVLYPLIVLVANMQSHIGWQNMPSLWASAQDVWNTRGRKLLLIYRGGSLVILRSSVTWGLTTAIHDFLQRKSHSRKELKTD

SEQ ID NO: 38107 - protein, 98 aa, Homo sapiens
MKLMVLVFTIGLTLLLGVQAMPANRLSCYRKILKDHNCHNLPEGVADLTQIDVNVQDHFWDGKGCEMICYCNFSELLCCPKDVFFGPKISFVIPCNNQ

SEQ ID NO: 38108 - protein, 635 aa, Homo sapiens
MSVGVSTSAPLSPTSGTSVGMSTFSIMDYVVFVLLLVLSLAIGLYHACRGWGRHTVGELLMADRKMGCLPVALSLLATFQSAVAILGVPSEIYRFGTQYWFLGCCYFLGLLIPAHIFIPVFYRLHLTSAYEYLELRFNKTVRVCGTVTFIFQMVIYMGVVLYAPSLALNAVTGFDLWLSVLALGIVCTVYTALGGLKAVIWTDVFQTLVMFLGQLAVIIVGSAKVGGLGRVWAVASQHGRISGFELDPDPFVRHTFWTLAFGGVFMMLSLYGVNQAQVQRYLSSRTEKAAVLSCYAVFPFQQVSLCVGCLIGLVMFAYYQEYPMSIQQAQAAPDQFVLYFVMDLLKGLPGLPGLFIACLFSGSLSTISSAFNSLATVTMEDLIRPWFPEFSEARAIMLSRGLAFGYGLLCLGMAYISSQMGPVLQAAISIFGMVGGPLLGLFCLGMFFPCANPPGAVVGLLAGLVMAFWIGIGSIVTSMGSSMPPSPSNGSSFSLPTNLTVATVTTLMPLTTFSKPTGLQRFYSLSYLWYSAHNSTTVIVVGLIVSLLTGRMRGRSLNPATIYPVLPKLLSLLPLSCQKRLHCRSYGQDHLDTGLFPEKPRNGVLGDSRDKEAMALDGTAYQGSSSTCILQETSL

SEQ ID NO: 38109 - protein, 460 aa, Homo sapiens
MAPGRAVAGLLLLAAAGLGGVAEGPGLAFSEDVLSVFGANLSLSAAQLQHLLEQMGAASRVGVPEPGQLHFNQCLTAEEIFSLHGFSNATQITSSKFSVICPAVLQQLNFHPCEDRPKHKTRPSHSEVWGYGFLSVTIINLASLLGLILTPLIKKSYFPKILTFFVGLAIGTLFSNAIFQLIPEAFGFDPKVDSYVEKAVAVFGGFYLLFFFERMLKMLLKTYGQNGHTHFGNDNFGPQEKTHQPKALPAINGVTCYANPAVTEANGHIHFDNVSVVSLQDGKKEPSSCTCLKGPKLSEIGTIAWMITLCDALHNFIDGLAIGASCTLSLLQGLSTSIAILCEEFPHELGDFVILLNAGMSTRQALLFNFLSACSCYVGLAFGILVGNNFAPNIIFALAGGMFLYISLADMFPEMNDMLREKVTGRKTDFTFFMIQNAGMLTGFTAILLITLYAGEIELE

SEQ ID NO: 38110 - protein, 393 aa, Homo sapiens
MHQHAQCLTAEEIFSLHGFSNATQITSSKFSVICPAVLQQLNFHPCEDRPKHKTRPSHSEVWGYGFLSVTIINLASLLGLILTPLIKKSYFPKILTFFVGLAIGTLFSNAIFQLIPEAFGFDPKVDSYVEKAVAVFGGFYLLFFFERMLKMLLKTYGQNGHTHFGNDNFGPQEKTHQPKALPAINGVTCYANPAVTEANGHIHFDNVSVVSLQDGKKEPSSCTCLKGPKLSEIGTIAWMITLCDALHNFIDGLAIGASCTLSLLQGLSTSIAILCEEFPHELGDFVILLNAGMSTRQALLFNFLSACSCYVGLAFGILVGNNFAPNIIFALAGGMFLYISLADMFPEMNDMLREKVTGRKTDFTFFMIQNAGMLTGFTAILLITLYAGEIELE

SEQ ID NO: 38111 - protein, 444 aa, Homo sapiens
MAPGRAVAGLLLLAAAGLGGVAEGPGLAFSEDVLSVFGANLSLSAAQLQHLLEQMGAASRVGVPEPGQLHFNQCLTAEEIFSLHGFSNATQITSSKFSVICPAVLQQLNFHPCEDRPKHKTRPSHSEVWGYGFLSVTIINLASLLGLILTPLIKKSYFPKILTFFVGLAIGTLFSNAIFQLIPEAFGFDPKVDSYVEKAVAVFGGFYLLFFFERMLKMLLKTYGQNGHTHFGNDNFGPQEKTHQPKALPAINGVTCYANPAVTEANGHIHFDNVSVVSLQDGKKEPSSCTCLKGPKLSEIGTIAWMITLCDALHNFIDGLAIGASCTLSLLQGLSTSIAILCEEFPHELGDFVILLNAGMSTRQALLFNFLSACSCYVGLAFGILVGNNFAPNIIFALAGGMFLYISLADMFPEMNDMLREKIIKWATDDIKSQLHLLWIYTAR

SEQ ID NO: 38112 - protein, 342 aa, Homo sapiens
MLQGHSSVFQALLGTFFTWGMTAAGAALVFVFSSGQRRILDGSLGFAAGVMLAASYWSLLAPAVEMATSSGGFGAFAFFPVAVGFTLGAAFVYLADLLMPHLGAAEDPQTTLALNFGSTLMKKKSDPEGPALLFPESELSIRIGRAGLLSDKSENGEAYQRKKAAATGLPEGPAVPVPSRGNLAQPGGSSWRRIALLILAITIHNVPEGLAVGVGFGAIEKTASATFESARNLAIGIGIQNFPEGLAVSLPLRGAGFSTWRAFWYGQLSGMVEPLAGVFGAFAVVLAEPILPYALAFAAGAMVYVVMDDIIPEAQISGNGKLASWASILGFVVMMSLDVGLG

SEQ ID NO: 38113 - protein, 335 aa, Homo sapiens
MLQGHSSVFQALLGTFFTWGMTAAGAALVFVFSSGQRRILDGSLGFAAGVMLAASYWSLLAPAVEMATSSGGFGAFAFFPVAVGFTLGAAFVYLADLLMPHLGAAEDPQTTLALNFGSTLMKKKSDPEGPALLFPESELSIRIDKSENGEAYQRKKAAATGLPEGPAVPVPSRGNLAQPGGSSWRRIALLILAITIHNVPEGLAVGVGFGAIEKTASATFESARNLAIGIGIQNFPEGLAVSLPLRGAGFSTWRAFWYGQLSGMVEPLAGVFGAFAVVLAEPILPYALAFAAGAMVYVVMDDIIPEAQISGNGKLASWASILGFVVMMSLDVGLG

SEQ ID NO: 38114 - protein, 381 aa, Homo sapiens
  MOD_RES (59)..(59): Selenocysteine
  MOD_RES (300)..(300): Selenocysteine
  MOD_RES (318)..(318): Selenocysteine
  MOD_RES (330)..(330): Selenocysteine
  MOD_RES (345)..(345): Selenocysteine
  MOD_RES (352)..(352): Selenocysteine
  MOD_RES (367)..(367): Selenocysteine
  MOD_RES (369)..(369): Selenocysteine
  MOD_RES (376)..(376): Selenocysteine
  MOD_RES (378)..(378): Selenocysteine
MWRSLGLALALCLLPSGGTESQDQSSLCKQPPAWSIRDQDPMLNSNGSVTVVALLQASXYLCILQASKLEDLRVKLKKEGYSNISYIVVNHQGISSRLKYTHLKNKVSEHIPVYQQEENQTDVWTLLNGSKDDFLIYDRCGRLVYHLGLPFSFLTFPYVEEAIKIAYCEKKCGNCSLTTLKDEDFCKRVSLATVDKTVETPSPHYHHEHHHNHGHQHLGSSELSENQQPGAPNAPTHPAPPGLHHHHKHKGQHRQGHPENRDMPASEDLQDLQKKLCRKRCINQLLCKLPTDSELAPRSXCCHCRHLIFEKTGSAITXQCKENLPSLCSXQGLRAEENITESCQXRLPPAAXQISQQLIPTEASASXRXKNQAKKXEXPSN

SEQ ID NO: 38115 - protein, 911 aa, Homo sapiens
MDTCGVGYVALGEAGPVGNMTVVDSPGQEVLNQLDVKTSSEMTSAEASVEMSLPTPLPGFEDSPDQRRLPPEQESLSRLEQPDLSSEMSKVSKPRASKPGRKRGGRTRKGPKRPQQPNPPSAPLVPGLLDQSNPLSTPMPKKRGRKSKAELLLLKLSKDLDRPESQSPKRPPEDFETPSGERPRRRAAQVALLYLQELAEELSTALPAPVSCPEGPKVSSPTKPKKIRQPAACPGGEEVDGAPRDEDFFLQVEAEDVEESEGPSESSSEPEPVVPRSTPRGSTSGKQKPHCRGMAPNGLPNHIMAPVWKCLHLTKDFREQKHSYWEFAEWIPLAWKWHLLSELEAAPYLPQEEKSPLFSVQREGLPEDGTLYRINRFSSITAHPERWDVSFFTGGPLWALDWCPVPEGAGASQYVALFSSPDMNETHPLSQLHSGPGLLQLWGLGTLQQESCPGNRAHFVYGIACDNGCIWDLKFCPSGAWELPGTPRKAPLLPRLGLLALACSDGKVLLFSLPHPEALLAQQPPDAVKPAIYKVQCVATLQVGSMQATDPSECGQCLSLAWMPTRPHQHLAAGYYNGMVVFWNLPTNSPLQRIRLSDGSLKLYPFQCFLAHDQAVRTLQWCKANSHFLVSAGSDRKIKFWDLRRPYEPINSIKRFLSTELAWLLPYNGVTVAQDNCYASYGLCGIHYIDAGYLGFKAYFTAPRKGTVWSLSGSDWLGTIAAGDISGELIAAILPDMALNPINVKRPVERRFPIYKADLIPYQDSPEGPDHSSASSGVPNPPKARTYTETVNHHYLLFQDTDLGSFHDLLRREPMLRMQEGEGHSQLCLDRLQLEAIHKVRFSPNLDSYGWLVSGGQSGLVRIHFVRGLASPLGHRMQLESRAHFNAMFQPSSPTRRPGFSPTSHRLLPTP

SEQ ID NO: 38116 - protein, 585 aa, Homo sapiens
MDTCGVGYVALGEAGPVGNMTVVDSPGQEVLNQLDVKTSSEMTSAEASVEMSLPTPLPGFEDSPDQRRLPPEQESLSRLEQPDLSSEMSKVSKPRASKPGRKRGGRTRKGPKRPQQPNPPSAPLVPGLLDQSNPLSTPMPKKRGRKSKAELLLLKLSKDLDRPESQSPKRPPEDFETPSGERPRRRAAQVALLYLQELAEELSTALPAPVSCPEGPKVSSPTKPKKIRQPAACPGGEEVDGAPRDEDFFLQVEAEDVEESEGPSESSSEPEPVVPRSTPRGSTSGKQKPHCRGMAPNGLPNHIMAPVWKCLHLTKDFREQKHSYWEFAEWIPLAWKWHLLSELEAAPYLPQEEKSPLFSVQREGLPEDGTLYRINRFSSITAHPERWDVSFFTGGPLWALDWCPVPEGAGASQYVALFSSPDMNETHPLSQLHSGPGLLQLWGLGTLQQESCPGNRAHFVYGIACDNGCIWDLKFCPSGAWELPGTPRKAPLLPRLGLLALACSDGKVLLFSLPHPEALLAQQPPDAVKPAIYKVQCVATLQVGSMQATDPSECGQCLSLAWMPTRPHQHLAAGYYNGKKNQNKT

SEQ ID NO: 38117 - protein, 309 aa, Homo sapiens
MPRHCSAAGCCTRDTRETRNRGISFHRLPKKDNPRRGLWLANCQRLDPSGQGLWDPASEYIYFCSKHFEEDCFELVGISGYHRLKEGAVPTIFESFSKLRRTTKTKGHSYPPGPAEVSRLRRCRKRCSEGRGPTTPFSPPPPADVTCFPVEEASAPATLPASPAGRLEPGLSSPFSDLLGPLGAQADEAGCSAQPSPERQPSPLEPRPVSPSAYMLRLPPPAGAYIQNEHSYQVGSALLWKRRAEAALDALDKAQRQLQACKRREQRLRLRLTKLQQERAREKRAQADARQTLKEHVQDFAMQLSSSMA

SEQ ID NO: 38118 - protein, 1024 aa, Homo sapiens
MPAARPPAAGLRGISLFLALLLGSPAAALERDALPEGDASPLGPYLLPSGAPERGSPGKEHPEERVVTAPPSSSQSAEVLGELVLDGTAPSAHHDIPALSPLLPEEARPKHALPPKKKLPSLKQVNSARKQLRPKATSAATVQRAGSQPASQGLDLLSSSTEKPGPPGDPDPIVASEEASEVPLWLDRKESAVPTTPAPLQISPFTSQPYVAHTLPQRPEPGEPGPDMAQEAPQEDTSPMALMDKGENELTGSASEESQETTTSTIITTTVITTEQAPALCSVSFSNPEGYIDSSDYPLLPLNNFLECTYNVTVYTGYGVELQVKSVNLSDGELLSIRGVDGPTLTVLANQTLLVEGQVIRSPTNTISVYFRTFQDDGLGTFQLHYQAFMLSCNFPRRPDSGDVTVMDLHSGGVAHFHCHLGYELQGAKMLTCINASKPHWSSQEPICSAPCGGAVHNATIGRVLSPSYPENTNGSQFCIWTIEAPEGQKLHLHFERLLLHDKDRMTVHSGQTNKSALLYDSLQTESVPFEGLLSEGNTIRIEFTSDQARAASTFNIRFEAFEKGHCYEPYIQNGNFTTSDPTYNIGTIVEFTCDPGHSLEQGPAIIECINVRDPYWNDTEPLCRAMCGGELSAVAGVVLSPNWPEPYVEGEDCIWKIHVGEEKRIFLDIQFLNLSNSDILTIYDGDEVMPHILGQYLGNSGPQKLYSSTPDLTIQFHSDPAGLIFGKGQGFIMNYIEVSRNDSCSDLPEIQNGWKTTSHTELVRGARITYQCDPGYDIVGSDTLTCQWDLSWSSDPPFCEKIMYCTDPGEVDHSTRLISDPVLLVGTTIQYTCNPGFVLEGSSLLTCYSRETGTPIWTSRLPHCVSEESLACDNPGLPENGYQILYKRLYLPGESLTFMCYEGFELMGEVTIRCILGQPSHWNGPLPVCKVNQDSFEHALEVAEAAAETSLEGGNMALAIFIPVLIISLLLGGAYIYITRCRYYSNLRLPLMYSHPYSQITVETEFDNPIYETGETREYEVSI

SEQ ID NO: 38119 - protein, 716 aa, Homo sapiens
MAQEAPQEDTSPMALMDKGENELTGSASEESQETTTSTIITTTVITTEQAPALCSVSFSNPEGYIDSSDYPLLPLNNFLECTYNVTVYTGYGVELQVKSVNLSDGELLSIRGVDGPTLTVLANQTLLVEGQVIRSPTNTISVYFRTFQDDGLGTFQLHYQAFMLSCNFPRRPDSGDVTVMDLHSGGVAHFHCHLGYELQGAKMLTCINASKPHWSSQEPICSAPCGGAVHNATIGRVLSPSYPENTNGSQFCIWTIEAPEGQKLHLHFERLLLHDKDRMTVHSGQTNKSALLYDSLQTESVPFEGLLSEGNTIRIEFTSDQARAASTFNIRFEAFEKGHCYEPYIQNGNFTTSDPTYNIGTIVEFTCDPGHSLEQGPAIIECINVRDPYWNDTEPLCRAMCGGELSAVAGVVLSPNWPEPYVEGEDCIWKIHVGEEKRIFLDIQFLNLSNSDILTIYDGDEVMPHILGQYLGNSGPQKLYSSTPDLTIQFHSDPAGLIFGKGQGFIMNYIEVSRNDSCSDLPEIQNGWKTTSHTELVRGARITYQCDPGYDIVGSDTLTCQWDLSWSSDPPFCEKIMYCTDPGEVDHSTRLISDPVLLVGTTIQYTCNPGFVLEGSSLLTCYSRETGTPIWTSRLPHCVSEAAAETSLEGGNMALAIFIPVLIISLLLGGAYIYITRCRYYSNLRLPLMYSHPYSQITVETEFDNPIYETGGTQKV

SEQ ID NO: 38120 - protein, 792 aa, Homo sapiens
MAQEAPQEDTSPMALMDKGENELTGSASEESQETTTSTIITTTVITTEQAPALCSVSFSNPEGYIDSSDYPLLPLNNFLECTYNVTVYTGYGVELQVKSVNLSDGELLSIRGVDGPTLTVLANQTLLVEGQVIRSPTNTISVYFRTFQDDGLGTFQLHYQAFMLSCNFPRRPDSGDVTVMDLHSGGVAHFHCHLGYELQGAKMLTCINASKPHWSSQEPICSAPCGGAVHNATIGRVLSPSYPENTNGSQFCIWTIEAPEGQKLHLHFERLLLHDKDRMTVHSGQTNKSALLYDSLQTESVPFEGLLSEGNTIRIEFTSDQARAASTFNIRFEAFEKGHCYEPYIQNGNFTTSDPTYNIGTIVEFTCDPGHSLEQGPAIIECINVRDPYWNDTEPLCRAMCGGELSAVAGVVLSPNWPEPYVEGEDCIWKIHVGEEKRIFLDIQFLNLSNSDILTIYDGDEVMPHILGQYLGNSGPQKLYSSTPDLTIQFHSDPAGLIFGKGQGFIMNYIEVSRNDSCSDLPEIQNGWKTTSHTELVRGARITYQCDPGYDIVGSDTLTCQWDLSWSSDPPFCEKIMYCTDPGEVDHSTRLISDPVLLVGTTIQYTCNPGFVLEGSSLLTCYSRETGTPIWTSRLPHCVSEESLACDNPGLPENGYQILYKRLYLPGESLTFMCYEGFELMGEVTIRCILGQPSHWNGPLPVCKVNQDSFEHALEAEAAAETSLEGGNMALAIFIPVLIISLLLGGAYIYITRCRYYSNLRLPLMYSHPYSQITVETEFDNPIYETGGTQKV

SEQ ID NO: 38121 - protein, 949 aa, Homo sapiens
MPAARPPAAGLRGISLFLALLLGSPAAALERDALPEGDASPLGPYLLPSGAPERGSPGKEHPEERVVTAPPSSSQSAEVLGELVLDGTAPSAHHDIPALSPLLPEEARPKHALPPKKKLPSLKQVNSARKQLRPKATSAATVQRAGSQPASQGLDLLSSSTEKPGPPGDPDPIVASEEASEVPLWLDRKESAVPTTPAPLQISPFTSQPYVAHTLPQRPEPGEPGPDMAQEAPQEDTSPMALMDKGENELTGSASEESQETTTSTIITTTVITTEQAPALCSVSFSNPEGYIDSSDYPLLPLNNFLECTYNVTVYTGYGVELQVKSVNLSDGELLSIRGVDGPTLTVLANQTLLVEGQVIRSPTNTISVYFRTFQDDGLGTFQLHYQAFMLSCNFPRRPDSGDVTVMDLHSGGVAHFHCHLGYELQGAKMLTCINASKPHWSSQEPICSAPCGGAVHNATIGRVLSPSYPENTNGSQFCIWTIEAPEGQKLHLHFERLLLHDKDRMTVHSGQTNKSALLYDSLQTESVPFEGLLSEGNTIRIEFTSDQARAASTFNIRFEAFEKGHCYEPYIQNGNFTTSDPTYNIGTIVEFTCDPGHSLEQGPAIIECINVRDPYWNDTEPLCRAMCGGELSAVAGVVLSPNWPEPYVEGEDCIWKIHVGEEKRIFLDIQFLNLSNSDILTIYDGDEVMPHILGQYLGNSGPQKLYSSTPDLTIQFHSDPAGLIFGKGQGFIMNYIEVSRNDSCSDLPEIQNGWKTTSHTELVRGARITYQCDPGYDIVGSDTLTCQWDLSWSSDPPFCEKTEESLACDNPGLPENGYQILYKRLYLPGESLTFMCYEGFELMGEVTIRCILGQPSHWNGPLPVCKVAEAAAETSLEGGNMALAIFIPVLIISLLLGGAYIYITRCRYYSNLRLPLMYSHPYSQITVETEFDNPIYETGETREYEVSI

SEQ ID NO: 38122 - protein, 948 aa, Homo sapiens
MPAARPPAAGLRGISLFLALLLGSPAAALERDALPEGDASPLGPYLLPSGAPERGSPGKEHPEERVVTAPPSSSQSAEVLGELVLDGTAPSAHHDIPALSPLLPEEARPKHALPPKKKLPSLKQVNSARKQLRPKATSAATVQRAGSQPASQGLDLLSSSTEKPGPPGDPDPIVASEEASEVPLWLDRKESAVPTTPAPLQISPFTSQPYVAHTLPQRPEPGEPGPDMAQEAPQEDTSPMALMDKGENELTGSASEESQETTTSTIITTTVITTEQAPALCSVSFSNPEGYIDSSDYPLLPLNNFLECTYNVTVYTGYGVELQVKSVNLSDGELLSIRGVDGPTLTVLANQTLLVEGQVIRSPTNTISVYFRTFQDDGLGTFQLHYQAFMLSCNFPRRPDSGDVTVMDLHSGGVAHFHCHLGYELQGAKMLTCINASKPHWSSQEPICSAPCGGAVHNATIGRVLSPSYPENTNGSQFCIWTIEAPEGQKLHLHFERLLLHDKDRMTVHSGQTNKSALLYDSLQTESVPFEGLLSEGNTIRIEFTSDQARAASTFNIRFEAFEKGHCYEPYIQNGNFTTSDPTYNIGTIVEFTCDPGHSLEQGPAIIECINVRDPYWNDTEPLCRAMCGGELSAVAGVVLSPNWPEPYVEGEDCIWKIHVGEEKRIFLDIQFLNLSNSDILTIYDGDEVMPHILGQYLGNSGPQKLYSSTPDLTIQFHSDPAGLIFGKGQGFIMNYIEVSRNDSCSDLPEIQNGWKTTSHTELVRGARITYQCDPGYDIVGSDTLTCQWDLSWSSDPPFCEKIMYCTDPGEVDHSTRLISDPVLLVGTTIQYTCNPGFVLEGSSLLTCYSRETGTPIWTSRLPHCVLAEAAAETSLEGGNMALAIFIPVLIISLLLGGAYIYITRCRYYSNLRLPLMYSHPYSQITVETEFDNPIYETGETREYEVSI

SEQ ID NO: 38123 - protein, 1023 aa, Homo sapiens
MPAARPPAAGLRGISLFLALLLGSPAAALERDALPEGDASPLGPYLLPSGAPERGSPGKEHPEERVVTAPPSSSQSAEVLGELVLDGTAPSAHHDIPALSPLLPEEARPKHALPPKKKLPSLKQVNSARKQLRPKATSAATVQRAGSQPASQGLDLLSSSTEKPGPPGDPDPIVASEEASEVPLWLDRKESAVPTTPAPLQISPFTSQPYVAHTLPQRPEPGEPGPDMAQEAPQEDTSPMALMDKGENELTGSASEESQETTTSTIITTTVITTEQAPALCSVSFSNPEGYIDSSDYPLLPLNNFLECTYNVTVYTGYGVELQVKSVNLSDGELLSIRGVDGPTLTVLANQTLLVEGQVIRSPTNTISVYFRTFQDDGLGTFQLHYQAFMLSCNFPRRPDSGDVTVMDLHSGGVAHFHCHLGYELQGAKMLTCINASKPHWSSQEPICSAPCGGAVHNATIGRVLSPSYPENTNGSQFCIWTIEAPEGQKLHLHFERLLLHDKDRMTVHSGQTNKSALLYDSLQTESVPFEGLLSEGNTIRIEFTSDQARAASTFNIRFEAFEKGHCYEPYIQNGNFTTSDPTYNIGTIVEFTCDPGHSLEQGPAIIECINVRDPYWNDTEPLCRAMCGGELSAVAGVVLSPNWPEPYVEGEDCIWKIHVGEEKRIFLDIQFLNLSNSDILTIYDGDEVMPHILGQYLGNSGPQKLYSSTPDLTIQFHSDPAGLIFGKGQGFIMNYIEVSRNDSCSDLPEIQNGWKTTSHTELVRGARITYQCDPGYDIVGSDTLTCQWDLSWSSDPPFCEKIMYCTDPGEVDHSTRLISDPVLLVGTTIQYTCNPGFVLEGSSLLTCYSRETGTPIWTSRLPHCVSEESLACDNPGLPENGYQILYKRLYLPGESLTFMCYEGFELMGEVTIRCILGQPSHWNGPLPVCKVNQDSFEHALEAEAAAETSLEGGNMALAIFIPVLIISLLLGGAYIYITRCRYYSNLRLPLMYSHPYSQITVETEFDNPIYETGETREYEVSI

SEQ ID NO: 38124 - protein, 1013 aa, Homo sapiens
MPAARPPAAGLRGISLFLALLLGSPAAALERDALPEGDASPLGPYLLPSGAPERGSPGKEHPEERVVTAPPSSSQSAEVLGELVLDGTAPSAHHDIPALSPLLPEEARPKHALPPKKKLPSLKQVNSARKQLRPKATSAATVQRAGSQPASQGLDLLSSSTEKPGPPGDPDPIVASEEASEVPLWLDRKESAVPTTPAPLQISPFTSQPYVAHTLPQRPEPGEPGPDMAQEAPQEDTSPMALMDKGENELTGSASEESQETTTSTIITTTVITTEQAPALCSVSFSNPEGYIDSSDYPLLPLNNFLECTYNVTVYTGYGVELQVKSVNLSDGELLSIRGVDGPTLTVLANQTLLVEGQVIRSPTNTISVYFRTFQDDGLGTFQLHYQAFMLSCNFPRRPDSGDVTVMDLHSGGVAHFHCHLGYELQGAKMLTCINASKPHWSSQEPICSAPCGGAVHNATIGRVLSPSYPENTNGSQFCIWTIEAPEGQKLHLHFERLLLHDKDRMTVHSGQTNKSALLYDSLQTESVPFEGLLSEGNTIRIEFTSDQARAASTFNIRFEAFEKGHCYEPYIQNGNFTTSDPTYNIGTIVEFTCDPGHSLEQGPAIIECINVRDPYWNDTEPLCRAMCGGELSAVAGVVLSPNWPEPYVEGEDCIWKIHVGEEKRIFLDIQFLNLSNSDILTIYDGDEVMPHILGQYLGNSGPQKLYSSTPDLTIQFHSDPAGLIFGKGQGFIMNYIEVSRNDSCSDLPEIQNGWKTTSHTELVRGARITYQCDPGYDIVGSDTLTCQWDLSWSSDPPFCEKIMYCTDPGEVDHSTRLISDPVLLVGTTIQYTCNPGFVLEGSSLLTCYSRETGTPIWTSRLPHCVSEESLACDNPGLPENGYQILYKRLYLPGESLTFMCYEGFELMGEVTIRCILGQPSHWNGPLPVCKVAEAAAETSLEGGNMALAIFIPVLIISLLLGGAYIYITRCRYYSNLRLPLMYSHPYSQITVETEFDNPIYETGETREYEVSI

SEQ ID NO: 38125 - protein, 397 aa, Homo sapiens
MDSLATSINQFALELSKKLAESAQGKNIFFSSWSISTSLTIVYLGAKGTTAAQMAQVLQFNRDQGVKCDPESEKKRKMEFNLSNSEEIHSDFQTLISEILKPNDDYLLKTANAIYGEKTYAFHNKYLEDMKTYFGAEPQPVNFVEASDQIRKDINSWVERQTEGKIQNLLPDDSVDSTTRMILVNALYFKGIWEHQFLVQNTTEKPFRINETTSKPVQMMFMKKKLHIFHIEKPKAVGLQLYYKSRDLSLLILLPEDINGLEQLEKAITYEKLNEWTSADMMELYEVQLHLPKFKLEDSYDLKSTLSSMGMSDAFSQSKADFSGMSSARNLFLSNVFHKAFVEINEQGTEAAAGSGSEIDIRIRVPSIEFNANHPFLFFIRHNKTNTILFYGRLCSP

SEQ ID NO: 38126 - protein, 531 aa, Homo sapiens
MAAVKTLNPKAEVARAQAALAVNISAARGLQDVLRTNLGPKGTMKMLVSGAGDIKLTKDGNVLLHEMQIQHPTASLIAKVATAQDDITGDGTTSNVLIIGELLKQADLYISEGLHPRIITEGFEAAKEKALQFLEEVKVSREMDRETLIDVARTSLRTKVHAELADVLTEAVVDSILAIKKQDEPIDLFMIEIMEMKHKSETDTSLIRGLVLDHGARHPDMKKRVEDAYILTCNVSLEYEKTEVNSGFFYKSAEEREKLVKAERKFIEDRVKKIIELKRKVCGDSDKGFVVINQKGIDPFSLDALSKEGIVALRRAKRRNMERLTLACGGVALNSFDDLSPDCLGHAGLVYEYTLGEEKFTFIEKCNNPRSVTLLIKGPNKHTLTQIKDAVRDGLRAVKNAIDDGCVVPGAGAVEVAMAEALIKHKPSVKGRAQLGVQAFADALLIIPKVLAQNSGFDLQETLVKIQAEHSESGQLVGVDLNTGEPMVAAEVGVWDNYCVKKQLLHSCTVIATNILLVDEIMRAGMSSLKG

SEQ ID NO: 38127 - protein, 486 aa, Homo sapiens
MAAVKTLNPKAEVARAQAALAVNISAARGLQDVLRTNLGPKGTMKMLVSGAGDIKLTKDGNVLLHEMGLHPRIITEGFEAAKEKALQFLEEVKVSREMDRETLIDVARTSLRTKVHAELADVLTEAVVDSILAIKKQDEPIDLFMIEIMEMKHKSETDTSLIRGLVLDHGARHPDMKKRVEDAYILTCNVSLEYEKTEVNSGFFYKSAEEREKLVKAERKFIEDRVKKIIELKRKVCGDSDKGFVVINQKGIDPFSLDALSKEGIVALRRAKRRNMERLTLACGGVALNSFDDLSPDCLGHAGLVYEYTLGEEKFTFIEKCNNPRSVTLLIKGPNKHTLTQIKDAVRDGLRAVKNAIDDGCVVPGAGAVEVAMAEALIKHKPSVKGRAQLGVQAFADALLIIPKVLAQNSGFDLQETLVKIQAEHSESGQLVGVDLNTGEPMVAAEVGVWDNYCVKKQLLHSCTVIATNILLVDEIMRAGMSSLKG

SEQ ID NO: 38128 - protein, 622 aa, Homo sapiens
MSMRSPISAQLALDGVGTMVNCTIKSEEKKEPCHEAPQGSATAAEPQPGDPARASQDSADPQAPAQGNFRGSWDCSSPEGNGSPEPKRPGVSEAASGSQEKLDFNRNLKEVVPAIEKLLSSDWKERFLGRNSMEAKDVKGTQESLAEKELQLLVMIHQLSTLRDQLLTAHSEQKNMAAMLFEKQQQQMELARQQQEQIAKQQQQLIQQQHKINLLQQQIQQVNMPYVMIPAFPPSHQPLPVTPDSQLALPIQPIPCKPVEYPLQLLHSPPAPVVKRPGAMATHHPLQEPSQPLNLTAKPKAPELPNTSSSPSLKMSSCVPRPPSHGGPTRDLQSSPPSLPLGFLGEGDAVTKAIQDARQLLHSHSGALDGSPNTPFRKDLISLDSSPAKERLEDGCVHPLEEAMLSCDMDGSRHFPESRNSSHIKRPMNAFMVWAKDERRKILQAFPDMHNSSISKILGSRWKSMTNQEKQPYYEEQARLSRQHLEKYPDYKYKPRPKRTCIVEGKRLRVGEYKALMRTRRQDARQSYVIPPQAGQVQMSSSDVLYPRAAGMPLAQPLVEHYVPRSLDPNMPVIVNTCSLREEGEGTDDRHSVADGEMYRYSEDEDSEGEEKSDGELVVLTD

SEQ ID NO: 38129 - protein, 411 aa, Homo sapiens
MAEGSRGGPTCSGVGGRQDPVSGSGGCNFPEYELPELNTRAFHVGAFGELWRGRLRGAGDLSLREPPASALPGSQAADSDREDAAVARDLDCSLEAAAELRAVCGLDKLKCLEDGEDPEVIPENTDLVTLGVRKRFLEHREETITIDRACRQETFVYEMESHAIGKKPENSADMIEEGELILSVNILYPVIFHKHKEHKPYQTMLVLGSQKLTQLRDSIRCVSDLQIGGEFSNTPDQAPEHISKDLYKSAFFYFEGTFYNDKRYPECRDLSRTIIEWSESHDRGYGKFQTARMEDFTFNDLCIKLGFPYLYCHQGDCEHVIVITDIRLVHHDDCLDRTLYPLLIKKHWLWTRKCFVCKMYTARWVTNNDSFAPEDPCFFCDVCFRMLHYDSEGNKLGEFLAYPYVDPGTFN

SEQ ID NO: 38130 - protein, 441 aa, Homo sapiens
MVQQAESLEAESNLPREALDTEEGEFMACSPVALDESDPDWCKTASGHIKRPMNAFMVWSKIERRKIMEQSPDMHNAEISKRLGKRWKMLKDSEKIPFIREAERLRLKHMADYPDYKYRPRKKPKMDPSAKPSASQSPEKSAAGGGGGSAGGGAGGAKTSKGSSKKCGKLKAPAAAGAKAGAGKAAQSGDYGGAGDDYVLGSLRVSGSGGGGAGKTVKCVFLDEDDDDDDDDDELQLQIKQEPDEEDEEPPHQQLLQPPGQQPSQLLRRYNVAKVPASPTLSSSAESPEGASLYDEVRAGATSGAGGGSRLYYSFKNITKQHPPPLAQPALSPASSRSVSTSSSSSSGSSSGSSGEDADDLMFDLSLNFSQSAHSASEQQLGGGAAAGNLSLSLVDKDLDSFSEGSLGSHFEFPDYCTPELSEMIAGDWLEANFSDLVFTY

SEQ ID NO: 38131 - protein, 391 aa, Homo sapiens
MYSMMMETDLHSPGGAQAPTNLSGPAGAGGGGGGGGGGGGGGGAKANQDRVKRPMNAFMVWSRGQRRKMAQENPKMHNSEISKRLGAEWKVMSEAEKRPFIDEAKRLRALHMKEHPDYKYRPRRKTKTLLKKDKYSLAGGLLAAGAGGGGAAVAMGVGVGVGAAAVGQRLESPGGAAGGGYAHVNGWANGAYPGSVAAAAAAAAMMQEAQLAYGQHPGAGGAHPHAHPAHPHPHHPHAHPHNPQPMHRYDMGALQYSPISNSQGYMSASPSGYGGLPYGAAAAAAAAAGGAHQNSAVAAAAAAAAASSGALGALGSLVKSEPSGSPPAPAHSRAPCPGDLREMISMYLPAGEGGDPAAAAAAAAQSRLHSLPQHYQGAGAGVNGTVPLTHI

SEQ ID NO: 38132 - protein, 643 aa, Homo sapiens [sequence omitted]

SEQ ID NO: 38133 - protein, 539 aa, Homo sapiens
MGTEGPPPPAASRGRQGCLLVPARTKTTIALLYDEESENAYDIRLKLTKEVLTIQKQDVVCVGGSHQGRNRRTVTLRRQPVGGLGLSIKGGSEHNVPVVISKIFEDQAADQTGMLFVGDAVLQVNGIHVENATHEEVVHLLRNAGDEVTITVEYLREAPAFLKLPLGSPGPSSDHSSGASSPLFDSGLHLNGNSSTTAPSSPSSPIAKDPRYEKRWLDTLSVPLSMARISRYKAGTEKLRWNAFEVLALDGVSSGILRFYTAQDGTDWLRAVSANIRELTLQNMKMANKCCSPSDQVVHMGWVNEKLQGADSSQTFRPKFLALKGPSFYVFSTPPVSTFDWVRAERTYHLCEVLFKVHKFWLTEDCWLQANLYLGLQDFDFEDQRPYCFSIVAGHGKSHVFNVELGSELAMWEKSFQRATFMEVQRTGSRTYMCSWQGEMLCFTVDFALGFTCFESKTKNVLWRFKFSQLKGSSDDGKTRVKLLFQNLDTKQIETKELEFQDLRAVLHCIHSFIAAKVASVDPGFMDSQSLARKYMYSS

SEQ ID NO: 38134 - protein, 412 aa, Homo sapiens
MGTEGPPPPAASRGRQGCLLVPARTKTTIALLYDEESENAYDIRLKLTKEVLTIQKQDVVCVGGSHQGRNAPSSPSSPIAKDPRYEKRWLDTLSVPLSMARISRYKAGTEKLRWNAFEVLALDGVSSGILRFYTAQDGTDWLRAVSANIRELTLQNMKMANKCCSPSDQVVHMGWVNEKLQGADSSQTFRPKFLALKGPSFYVFSTPPVSTFDWVRAERTYHLCEVLFKVHKFWLTEDCWLQANLYLGLQDFDFEDQRPYCFSIVAGHGKSHVFNVELGSELAMWEKSFQRATFMEVQRTGSRTYMCSWQGEMLCFTVDFALGFTCFESKTKNVLWRFKFSQLKGSSDDGKTRVKLLFQNLDTKQIETKELEFQDLRAVLHCIHSFIAAKVASVDPGFMDSQSLARKYMYSS

SEQ ID NO: 38135 - protein, 423 aa, Homo sapiens
MQKAGAGGRRASDCGLAPHRPRCITKFAQYVGSFPVDDLDTQESVWLVQQQLWALKDCPRRRAVILKFSLQGLKIYSGEGEVLLMAHALRRILYSTWCPADCQFAFMARNPRSPASKLFCHLFVGSQPGEVQILHLLLCRSFQLAYLLQHPEERAQPEPCPGPTGEVPLKPLSSSGGLVREPFGRDQLSQNVHALVSFRRLPAEGLVGSGKELPESEGRARHARLGNPYCSPTLVRKKAIRSKVIRSGAYRGCTYETQLQLSAREAFPAAWEAWPRGPGGHSCLVESEGSLTENIWAFAGISRPCALALLRRDVLGAFLLWPELGASGQWCLSVRTQCGVVPHQVFRNHLGRYCLEHLPAEFPSLEALVENHAVTERSLFCPLDMGRLNPTYEEQDCGPPGRPPRTLRPLSHAKSEAELQGLG

SEQ ID NO: 38136 - protein, 339 aa, Homo sapiens
MAHALRRILYSTWCPADCQFAFMARNPRSPASKLFCHLFVGSQPGEVQILHLLLCRSFQLAYLLQHPEERAQPEPCPGPTGEVPLKPLSSSGGLVREPFGRDQLSQNVHALVSFRRLPAEGLVGSGKELPESEGRARHARLGNPYCSPTLVRKKAIRSKVIRSGAYRGCTYETQLQLSAREAFPAAWEAWPRGPGGHSCLVESEGSLTENIWAFAGISRPCALALLRRDVLGAFLLWPELGASGQWCLSVRTQCGVVPHQVFRNHLGRYCLEHLPAEFPSLEALVENHAVTERSLFCPLDMGRLNPTYEEQDCGPPGRPPRTLRPLSHAKSEAELQGLG

SEQ ID NO: 38137 - protein, 240 aa, Homo sapiens
MLALLCSCLLLAAGASDAWTGEDSAEPNSDSAEWIRDMYAKVTEIWQEVMQRRDDDGALHAACQVQPSATLDAAQPRVTGVVLFRQLAPRAKLDAFFALEGFPTEPNSSSRAIHVHQFGDLSQGCESTGPHYNPLAVPHPQHPGDFGNFAVRDGSLWRYRAGLAASLAGPHSIVGRAVVVHAGEDDLGRGGNQASVENGNAGRRLACCVVGVCGPGLWERQAREHSERKKRRRESECKAA

SEQ ID NO: 38138 - protein, 384 aa, Homo sapiens [sequence omitted]

SEQ ID NO: 38139 - protein, 722 aa, Homo sapiens
MPLHQLGDKPLTFPSPNSAMENGLDHTPPSRRASPGTPLSPGSLRSAAHSPLDTSKQPLCQLWAEKHGARGTHEVRYVSAGQSVACGWWAFAPPCLQVLNTPKGILFFLCAAAFLQGMTVNGFINTVITSLERRYDLHSYQSGLIASSYDIAACLCLTFVSYFGGSGHKPRWLGWGVLLMGTGSLVFALPHFTAGRYEVELDAGVRTCPANPGAVCADSTSGLSRYQLVFMLGQFLHGVGATPLYTLGVTYLDENVKSSCSPVYIAIFYTAAILGPAAGYLIGGALLNIYTEMGRRTELTTESPLWVGAWWVGFLGSGAAAFFTAVPILGYPRQLPGSQRYAVMRAAEMHQLKDSSRGEASNPDFGKTIRDLPLSIWLLLKNPTFILLCLAGATEATLITGMSTFSPKFLESQFSLSASEAATLFGYLVVPAGGGGTFLGGFFVNKLRLRGSAVIKFCLFCTVVSLLGILVFSLHCPSVPMAGVTASYGGSLLPEGHLNLTAPCNAACSCQPEHYSPVCGSDGLMYFSLCHAGCPAATETNVDGQKVYRDCSCIPQNLSSGFGHATAGKCTSTCQRKPLLLVFIFVVIFFTFLSSIPALTATLRCVRDPQRSFALGIQWIVVRILGGIPGPIAFGWVIDKACLLWQDQCGQQGSCLVYQNSAMSRYILIMGLLYKVLGVLFFAIACFLYKPLSESSDGLETCLPSQSSAPDSATDSQLQSSV

SEQ ID NO: 38140 - protein, 583 aa, Homo sapiens
MPLHQLGDKPLTFPSPNSAMENGLDHTPPSRRASPGTPLSPGSLRSAAHSPLDTSKQPLCQLWAEKHGARGTHEVRYVSAGQSVACGWWAFAPPCLQVLNTPKGILFFLCAAAFLQGMTVNGFINTVITSLERRYDLHSYQSGLIASSYDIAACLCLTFVSYFGGSGHKPRWLGWGVLLMGTGSLVFALPHFTAGRYEVELDAGVRTCPANPGAVCADSTSGLSRYQLVFMLGQFLHGVGATPLYTLGVLFFAIACFLYKPLSESQFSLSASEAATLFGYLVVPAGGGGTFLGGFFVNKLRLRGSAVIKFCLFCTVVSLLGILVFSLHCPSVPMAGVTASYGGSLLPEGHLNLTAPCNAACSCQPEHYSPVCGSDGLMYFSLCHAGCPAATETNVDGQKVYRDCSCIPQNLSSGFGHATAGKCTSTCQRKPLLLVFIFVVIFFTFLSSIPALTATLRCVRDPQRSFALGIQWIVVRILGGIPGPIAFGWVIDKACLLWQDQCGQQGSCLVYQNSAMSRYILIMGLLYKVLGVLFFAIASSRAASDHRPRPPGHGGHSAFPDDRTVPLGDAITRELLFDLQPST

SEQ ID NO: 38141 - protein, 661 aa, Homo sapiens
MPLHQLGDKPLTFPSPNSAMENGLDHTPPSRRASPGTPLSPGSLRSAAHSPLDTSKQPLCQLWAEKHGARGTHEVRYVSAGQSVACGWWAFAPPCLQVLNTPKGILFFLCAAAFLQGMTVNGFINTVITSLERRYDLHSYQSGLIASSYDIAACLCLTFVSYFGGSGHKPRWLGWGVLLMGTGSLVFALPHFTAGRYEVELDAGVRTCPANPGAVCADSTSGLSRYQLVFMLGQFLHGVGATPLYTLGVTYLDENVKSSCSPVYIAIFYTAAILGPAAGYLIGGALLNIYTEMGRRTELTTESPLWVGAWWVGFLGSGAAAFFTAVPILGYPRQLPGSQRYAVMRAAEMHQLKDSSRGEASNPDFGKTIRDLPLSIWLLLKNPTFILLCLAGATEATLITGMSTFSPKFLESQFSLSASEAATLFGYLVVPAGGGGTFLGGFFVNKLRLRGSAVIKFCLFCTVVSLLGILVFSLHCPSVPMAGVTASYGGSLLPEGHLNLTAPCNAACSCQPEHYSPVCGSDGLMYFSLCHAGCPAATETNVDGQKVSGAAAYRPCPPLDPGKGPPCLPLVIGAIVGLPRCTETVAVSLRIFPLVLAMHCREMHFNLSEKAPPSGFHIRCNFLYIPQQHSCTNGNSTVSWGRVCACPELSLQHPEAELCRS

SEQ ID NO: 38142 - protein, 722 aa, Homo sapiens
MPLHQLGDKPLTFPSPNSAMENGLDHTPPSRRASPGTPLSPGSLRSAAHSPLDTSKQPLCQLWAEKHGARGTHEVRYVSAGQSVACGWWAFAPPCLQVLNTPKGILFFLCAAAFLQGMTVNGFINTVITSLERRYDLHSYQSGLIASSYDIAACLCLTFVSYFGGSGHKPRWLGWGVLLMGTGSLVFALPHFTAGRYEVELDAGVRTCPANPGAVCADSTSGLSRYQLVFMLGQFLHGVGATPLYTLGVTYLDENVKSSCSPVYIAIFYTAAILGPAAGYLIGGALLNIYTEMGRRTELTTESPLWVGAWWVGFLGSGAAAFFTAVPILGYPRQLPGSQRYAVMRAAEMHQLKDSSRGEASNPDFGKTIRDLPLSIWLLLKNPTFILLCLAGATEATLITGMSTFSPKFLESQFSLSASEAATLFGYLVVPAGGGGTFLGGFFVNKLRLRGSAVIKFCLFCTVVSLLGILVFSLHCPSVPMAGVTASYGGSLLPEGHLNLTAPCNAACSCQPEHYSPVCGSDGLMYFSLCHAGCPAATETNVDGQKVYRDCSCIPQNLSSGFGHATAGKCTTTALCAARTASCTSHCATQGALQPRRRMWTARRCVRDPQRSFALGIQWIVVRILGGIPGPIAFGWVIDKACLLWQDQCGQQGSCLVYQNSAMSRYILIMGLLYKVLGVLFFAIACFLYKPLSESSDGLETCLPSQSSAPDSATDSQLQSSV

SEQ ID NO: 38143 - protein, 71 aa, Homo sapiens
MERARDRLHLRRTTEQHVPEVEVQVKRRRTASLSNQECQLYPRRSQQQQVPVVDFQAELRQAFLAETPRGG

SEQ ID NO: 38144 - protein, 147 aa, Homo sapiens
MGGCMHSTQDKSLHLEGDPNPSAAPTSTCAPRKMPKRISISKQLASVKALRKCSDLEKAIATTALIFRNSSDSDGKLEKAIAKDLLQTQFRNFAEGQETKPKYREILSELDEHTENKLDFEDFMILLLSITVMSDLLQNIRNVKIMK

SEQ ID NO: 38145 - protein, 107 aa, Homo sapiens
MVIRVFIASSSGFVAIKKKQQDVVRFLEANKIEFEEVDITMSEEQRQWMYKNVPPEKKPTQGNPLPPQIFNGDRYCGDYDSFFESKESNTVFSFLGLKPRLASKAEP

SEQ ID NO: 38146 - protein, 787 aa, Homo sapiens
MAAARPARGPELPLLGLLLLLLLGDPGRGAASSGNATGPGPRSAGGSARRSAAVTGPPPPLSHCGRAAPCEPLRYNVCLGSVLPYGATSTLLAGDSDSQEEAHGKLVLWSGLRNAPRCWAVIQPLLCAVYMPKCENDRVELPSRTLCQATRGPCAIVERERGWPDFLRCTPDRFPEGCTNEVQNIKFNSSGQCEVPLVRTDNPKSWYEDVEGCGIQCQNPLFTEAEHQDMHSYIAAFGAVTGLCTLFTLATFVADWRNSNRYPAVILFYVNACFFVGSIGWLAQFMDGARREIVCRADGTMRLGEPTSNETLSCVIIFVIVYYALMAGVVWFVVLTYAWHTSFKALGTTYQPLSGKTSYFHLLTWSLPFVLTVAILAVAQVDGDSVSGICFVGYKNYRYRAGFVLAPIGLVLIVGGYFLIRGVMTLFSIKSNHPGLLSEKAASKINETMLRLGIFGFLAFGFVLITFSCHFYDFFNQAEWERSFRDYVLCQANVTIGLPTKQPIPDCEIKNRPSLLVEKINLFAMFGTGIAMSTWVWTKATLLIWRRTWCRLTGQSDDEPKRIKKSKMIAKAFSKRHELLQNPGQELSFSMHTVSHDGPVAGLAFDLNEPSADVSSAWAQHVTKMVARRGAILPQDISVTPVATPVPPEEQANLWLVEAEISPELQKRLGRKKKRRKRKKEVCPLAPPPELHPPAPAPSTIPRLPQLPRQKCLVAAGAWGAGDSCRQGAWTLVSNPFCPEPSPPQDPFLPSAPAPVAWAHGRRQGLGPIHSRTNLMDTELMDADSDF

SEQ ID NO: 38147 - protein, 784 aa, Homo sapiens
MSDQKKEEEEEAAAAAAMATEGGKTSEPENNNKKPKTSGSQDSQPSPLALLAATCSKIGTPGENQATGQQQIIIDPSQGLVQLQNQPQQLELVTTQLAGNAWQLVASTPPASKENNVSQPASSSSSSSSSNNGSASPTKTKSGNSSTPGQFQVIQVQNPSGSVQYQVIPQLQTVEGQQIQINPTSSSSLQDLQGQIQLISAGNNQAILTAANRTASGNILAQNLANQTVPVQIRPGVSIPLQLQTLPGTQAQVVTTLPINIGGVTLALPVINNVAAGGGTGQVGQPAATADSGTSNGNQLVSTPTNTTTSASTMPESPSSSTTCTTTASTSLTSSDTLVSSADTGQYASTSASSSERTIEESQTPAATESEAQSSSQLQPNGMQNAQDQSNSLQQVQIVGQPILQQIQIQQPQQQIIQAIPPQSFQLQSGQTIQTIQQQPLQNVQLQAVNPTQVLIRAPTLTPSGQISWQTVQVQNIQSLSNLQVQNAGLSQQLTITPVSSSGGTTLAQIAPVAVAGAPITLNTAQLASVPNLQTVSVANLGAAGVQVQGVPVTITSVAGQQQGQDGVKVQQATIAPVTVAVGGIANATIGAVSPDQLTQVHLQQGQQTSDQEVQPGKRLRRVACSCPNCREGEGRGSNEPGKKKQHICHIEGCGKVYGKTSHLRAHLRWHTGERPFICNWMFCGKRFTRSDELQRHRRTHTGEKRFECPECSKRFMRSDHLSKHVKTHQNKKGGGTALAIVTSGELDSSVTEVLGSPRIVTVAAISQDSNPATPNVSTNMEEF

SEQ ID NO: 38148 - protein, 1101 aa, Homo sapiens
MATPSKKTSTPSPQPSKRALPRDPSSEVPSKRKNSAPQLPLLQSSGPFVEGSIVRISMENFLTYDICEVSPGPHLNMIVGANGTGKSSIVCAICLGLAGKPAFMGRADKVGFFVKRGCSRGMVEIELFRASGNLVITREIDVAKNQSFWFINKKSTTQKIVEEKVAALNIQVGNLCQFLPQDKVGEFAKLSKIELLEATEKSIGPPEMHKYHCELKNLREKEKQLETSCKEKTEYLQKMVQRNERYKQDVERFYERKRHLDLIEMLEAKRPWVEYENVRQEYEEVKLVRDRVKEEVRKLKEGQIPVTCRIEEMENERHNLEARIKEKATDIKEASQKCKQKQDVIERKDKHIEELQQALIVKQNEELDRQRRIGNTRKMIEDLQNELKTTENCENLQPQIDAITNDLRRIQDEKALCEGEIIDKRRERETLEKEKKSVDDHIVRFDNLMNQKEDKLRQRFRDTYDAVLWLRNNRDKFKQRVCEPIMLTINMKDNKNAKYIENHIPSNDLRAFVFESQEDMEVFLKEVRDNKKLRVNAVIAPKSSYADKAPSRSLNELKQYGFFSYLRELFDAPDPVMSYLCCQYHIHEVPVGTEKTRERIERVIQETRLKQIYTAEEKYVVKTSFYSNKVISSNTSLKVAQFLTVTVDLEQRRHLEEQLKEIHRKLQAVDSGLIALRETSKHLEHKDNELRQKKKELLERKTKKRQLEQKISSKLGSLKLMEQDTCNLEEEERKASTKIKEINVQKAKLVTELTNLIKICTSLHIQKVDLILQNTTVISEKNKLESDYMAASSQLRLTEQHFIELDENRQRLLQKCKELMKRARQVCNLGAEQTLPQEYQTQVPTIPNGHNSSLPMVFQDLPNTLDEIDALLTEERSRASCFTGLNPTIVQEYTKREEEIEQLTEELKGKKVELDQYRENISQVKERWLNPLKELVEKINEKFSNFFSSMQCAGEVDLHTENEEDYDKYGIRIRVKFRSSTQLHELTPHHQSGGERSVSTMLYLMALQELNRCPFRVVDEINQGMDPINERRVFEMVVNTACKENTSQYFFITPKLLQNLPYSEKMTVLFVYNGPHMLEPNTWNLKAFQRRRRRITFTQPS

SEQ ID NO: 38149 - protein, 385 aa, Homo sapiens
MAAFLSAGLGILAPSETYPLPTTSSGWEPRLGSPFPSGPCTSSTGAQAVAEPTGQGPKNPRVSRVTVQLEMKPLWEEFNQLGTEMIVTKAGRRMFPPFQVKILGMDSLADYALLMDFIPLDDKRYRYAFHSSAWLVAGKADPATPGRVHFHPDSPAKGAQWMRQIVSFDKLKLTNNLLDDNGHIILNSMHRYQPRFHVVFVDPRKDSERYAQENFKSFIFTETQFTAVTAYQNHRITQLKIASNPFAKGFRESDLDSWPVAPRPLLSVPARSHSSLSPCVLKGATDREKDPNKASASTSKTPAWLHHQLLPPPEVLLAPATYRPVTYQSLYSGAPSHLGIPRTRPAPYPLPNIRADRDQGGLPLPAGLGLLSPTVVCLGPGQDSQ

SEQ ID NO: 38150 - protein, 140 aa, Homo sapiens
MRRCLRVKTRRGQLGLASSCFEQHSCFSPRVNRILSAVQNTLCTGPSSQAPPQPPQASPPAAADHSRTPSLLASSHSASGGESLFQLYIASLAWPQNCCVLESCRRIPLGGLSSMENRRPLLRKGRLLRGQIHHSQTNEL

SEQ ID NO: 38151 - protein, 312 aa, Homo sapiens
MQKHYTVAWFLYSAPGVDPSPPCRSLGWKRKKEWSDESEEEPEKELAPEPEETWVVEMLCGLKMKLKQQRVSPILPEHHKDFNSQLAPGVDPSPPHRSFCWKRKREWWDESEESLEEEPRKVLAPEPEEIWVVEMLCGLKMKLKRRRVSLVLPEHHEAFNRLLEDPVIKRFLAWDKDLRVSDKYLLAMVIAYFSRAGLPSWQYQRIHFFLALYLANDMEEDDEDPKQNIFYFLYGKTRSRIPLVRNRRFQLCRCMNPRARKNRSQIALFQKLRFQFFCSMSGRAWVSREELEEIQAYDPEHWVWARDRARLS

SEQ ID NO: 38152 - protein, 265 aa, Homo sapiens; identical to SEQ ID NO: 4138

SEQ ID NO: 38153 - protein, 594 aa, Homo sapiens
MLPRTKYNRFRNDSVTSVDDLLHSLSVSGGGGKVSAARATPAAAPYLVSGEALRKAPDDGPGSLGHLLHKVSHLKLSSSGLRGLSSAARERAGARLSGSCSAPSLAAPDGSAPSAPRAPAMSAARKGRPGDEPLPRPPRGAPHASDQVLGPGVTYVVKYLGCIEVLRSMRSLDFSTRTQITREAISRVCEAVPGAKGAFKKRKPPSKMLSSILGKSNLQFAGMSISLTISTASLNLRTPDSKQIIANHHMRSISFASGGDPDTTDYVAYVAKDPVNRRACHILECCDGLAQDVIGSIGQAFELRFKQYLQCPTKIPALHDRMQSLDEPWTEEEGDGSDHPYYNSIPSKMPPPGGFLDTRLKPRPHAPDTAQFAGKEQTYYQGRHLGDTFGEDWQQTPLRQGSSDIYSTPEGKLHVAPTGEAPTYVNTQQIPPQAWPAAVSSAESSPRKDLFDMKPFEDALKNQPLGPVLSKAASVECISPVSPRAPDAKMLEELQAETWYQGEMSRKEAEGLLEKDGDFLVRKSTTNPGSFVLTGMHNGQAKHLLLVDPEGTIRTKDRVFDSISHLINHHLESSLPIVSAGSELCLQQPVERKQ

SEQ ID NO: 38154 - protein, 471 aa, Homo sapiens
MHARAAASVMDICRIRLLIRLTIGLERPPGQVVVKYLGCIEVLRSMRSLDFSTRTQITREAISRVCEAVPGAKGAFKKRKPPSKMLSSILGKSNLQFAGMSISLTISTASLNLRTPDSKQIIANHHMRSISFASGGDPDTTDYVAYVAKDPVNRRACHILECCDGLAQDVIGSIGQAFELRFKQYLQCPTKIPALHDRMQSLDEPWTEEEGDGSDHPYYNSIPSKMPPPGGFLDTRLKPRPHAPDTAQFAGKEQTYYQGRHLGDTFGEDWQQTPLRQGSSDIYSTPEGKLHVAPTGEAPTYVNTQQIPPQAWPAAVSSAESSPRKDLFDMKPFEDALKNQPLGPVLSKAASVECISPVSPRAPDAKMLEELQAETWYQGEMSRKEAEGLLEKDGDFLVRKSTTNPGSFVLTGMHNGQAKHLLLVDPEGTIRTKDRVFDSISHLINHHLESSLPIVSAGSELCLQQPVERKQ

SEQ ID NO: 38155 - protein, 441 aa, Homo sapiens
MSGEKEEASLRMFGAYGEPEERRDVLESSGVSSQPEPQVQQQLGSLLGVPWQPPGPPIQHSPADQETSTVTQQQWHLQGLGRSELQAAGLPDAQPGEAAESSPSFLLGSEVGQPYSSSSPSEEVLSLLRAIPPIPDEVVVRQKRAPQGSWKVGTLFHGKRVYAVAISGSTHHVYTCGSGYIRVWDESALHAGEKAPRAQLDLQHPQDRVVTCKLFPDERSLITGGASQAVTLWDLAPTPQVRAQLTSTGPTCYSLAVSSDAHICLACFHGFVEIWDLQNQILIRKHEVPVYGSRCVDITGNIFWTGGEDTILYSWDLRSYQRLHQHNLQNEILSITHDPGEEWVLAGLRTSDIVFLHTRRNEQFKALMKKYTRHHSLKFASCGSYFVTAIDTRLSGLEAPSLQKLFQIEESSGILCCDVSSDNQYLVMGSSSSATIYQLLY

SEQ ID NO: 38156 - protein, 654 aa, Homo sapiens
MSLAAYCVICCRRIGTSTSPPKSGTHWRDIRNIIKFTGSLILGGSLFLTYEVLALKKAVTLDTQVVEREKMKSYIYVHTVSLDKGENHGIAWQARKELHKAVRKVLATSAKILRNPFADPFSTVDIEDHECAVWLLLRKSKSDDKTTRLEAVREMSETHHWHDYQYRIIAQACDPKTLIGLARSEESDLRFFLLPPPLPSLKEDSSTEEELRQLLASLPQTELDECIQYFTSLALSESSQSLAAQKGGLWCFGGNGLPYAESFGEVPSATVEMFCLEAIVKHSEISTHCDKIEANGGLQLLQRLYRLHKDCPKVQRNIMRVIGNMALNEHLHSSIVRSGWVSIMAEAMKSPHIMESSHAARILANLDRETVQEKYQDGVYVLHPQYRTSQPIKADVLFIHGLMGAAFKTWRQQDSEQAVIEKPMEDEDRYTTCWPKTWLAKDCPALRIISVEYDTSLSDWRARCPMERKSIAFRSNELLRKLRAAGVGDRPVVWISHSMGGLLVKKMLLEASTKPEMSTVINNTRGIIFYSVPHHGSRLAEYSVNIRYLLFPSLEVKELSKDSPALKTLQDDFLEFAKDKNFQVLNFVETLPTYIGSMIKLHVVPVESADLGIGDLIPVDVNHLNICKPKKKDAFLYQRTLQFIREALAKDLEN

SEQ ID NO: 38157 - protein, 531 aa, Homo sapiens
MSLAAYCVICCRRIGTSTSPPKSGTHWRDIRNIIKFTGSLILGGSLFLTYEVLALKKAVTLDTQVVEREKMKSYIYVHTVSLDKGENHGIAWQARKELHKAVRKVLATSAKILRNPFADPFSTVDIEDHECAVWLLLRKSKSDDKTTRLEAVREMSETHHWHDYQYRIIAQACDPKTLIGLARSEESDLRFFLLPPPLPSLKEDSSTEEELRQLLASLPQTELDECIQYFTSLALSESSQSLAAQKGGLWCFGGNGLPYAESFGEVPSATVEMFCLEAIVKHSEISTHCDKIEANGGLQLLQRLYRLHKDCPKVQRNIMRVIGNMALNEHLHSSIVRSGWVSIMAEAMKSPHIMESSHAARILANLDRETVQEKYQDGVYVLHPQYRTSQPIKADVLFIHGLMGAAFKTWRQQDSEQAVIEKPMEDEDRYTTCWPKTWLAKDCPALRIISVEYDTSLSDWRARCPMERRSLLSISSGIVEGLESPLHSEATNFLGSSELLVLGIGQWFGYHIAWEVFLSKRCCWKPLRSQK

SEQ ID NO: 38158 - protein, 167 aa, Homo sapiens
MSLAAYCVICCRRIGTSTSPPKSGTHWRDIRNIIKFTGSLILGGSLFLTYEVLALKKAVTLDTQVVEREKMKSYIYVHTVSLDKGENHGIAWQARKELHKAVRKVLATSAKILRNPFADPFSTVDIEDHECAVWLLLRKSKSDDKTTRLEAVREMSETHHWHGNETT

SEQ ID NO: 38159 - protein, 76 aa, Homo sapiens
MDLRRVKEYFSWLYYQYQIISCCAVLEPWERSMFNTILLTIIAMVVYTAYVFIPIHIRLAWEFFSKICGYHSTISN

SEQ ID NO: 38160 - protein, 72 aa, Homo sapiens
MEKPTSSTNGEKRKSPCDSNSKNDEMQETPNRDLVLEPSLKKMKTSEYSTVLVLCYRKTKKIHSNQLENDQS

SEQ ID NO: 38161 - protein, 520 aa, Homo sapiens
MGPQRRLSPAGAALLWGFLLQLTAAQEAILHASGNGTTKDYCMLYNPYWTALPSTLENATSISLMNLTSTPLCNLSDIPPVGIKSKAVVVPWGSCHFLEKARIAQKGGAEAMLVVNNSVLFPPSGNRSEFPDVKILIAFISYKDFRDMNQTLGDNITVKMYSPSWPNFDYTMVVIFVIAVFTVALGGYWSGLVELENLKAVTTEDREMRKKKEEYLTFSPLTVVIFVVICCVMMVLLYFFYKWLVYVMIAIFCIASAMSLYNCLAALIHKIPYGQCTIACRGKNMEVRLIFLSGLCIAVAVVWAVFRNEDRWAWILQDILGIAFCLNLIKTLKLPNFKSCVILLGLLLLYDVFFVFITPFITKNGESIMVELAAGPFGNNEKLPVVIRVPKLIYFSVMSVCLMPVSILGFGDIIVPGLLIAYCRRFDVQTGSSYIYYVSSTVAYAIGMILTFVVLVLMKKGQPALLYLVPCTLITASVVAWRRKEMKKFWKGNSYQMMDHLDCATNEENPVISGEQIVQQ

SEQ ID NO: 38162 - protein, 1343 aa, Homo sapiens [sequence omitted]

SEQ ID NO: 38163 - protein, 1285 aa, Homo sapiens
MSRSRASIHRGSIPAMSYAPFRDVRGPSMHRTQYVHSPYDRPGWNPRFCIISGNQLLMLDEDEIHPLLIRDRRSESSRNKLLRRTVSVPVEGRPHGEHEYHLGRSRRKSVPGGKQYSMEGAPAAPFRPSQGFLSRRLKSSIKRTKSQPKLDRTSSFRQILPRFRSADHDRARLMQSFKESHSHESLLSPSSAAEALELNLDEDSIIKPVHSSILGQEFCFEVTTSSGTKCFACRSAAERDKWIENLQRAVKPNKDNSRRVDNVLKLWIIEARELPPKKRYYCELCLDDMLYARTTSKPRSASGDTVFWGEHFEFNNLPAVRALRLHLYRDSDKKRKKDKAGYVGLVTVPVATLAGRHFTEQWYPVTLPTGSGGSGGMGSGGGGGSGGGSGGKGKGGCPAVRLKARYQTMSILPMELYKEFAEYVTNHYRMLCAVLEPALNVKGKEEVASALVHILQSTGKAKDFLSDMAMSEVDRFMEREHLIFRENTLATKAIEEYMRLIGQKYLKDAIGEFIRALYESEENCEVDPIKCTASSLAEHQANLRMCCELALCKVVNSHCVFPRELKEVFASWRLRCAERGREDIADRLISASLFLRFLCPAIMSPSLFGLMQEYPDEQTSRTLTLIAKVIQNLANFSKFTSKEDFLGFMNEFLELEWGSMQQFLYEISNLDTLTNSSSFEGYIDLGRELSTLHALLWEVLPQLSKEALLKLGPLPRLLNDISTALRNPNIQRQPSRQSERPRPQPVVLRGPSAEMQGYMMRDLNSSIDLQSFMARGLNSSMDMARLPSPTKEKPPPPPPGGGKDLFYVSRPPLARSSPAYCTSSSDITEPEQKMLSVNKSVSMLDLQGDGPGGRLNSSSVSNLAAVGDLLHSSQASLTAALGLRPAPAGRLSQGSGSSITAAGMRLSQMGVTTDGVPAQQLRIPLSFQNPLFHMAADGPGPPGGHGGGGGHGPPSSHHHHHHHHHHRGGEPPGDTFAPFHGYSKSEDLSSGVPKPPAASILHSHSYSDEFGPSGTDFTRRQLSLQDNLQHMLSPPQITIGPQRPAPSGPGGGSGGGSGGGGGGQPPPLQRGKSQQLTVSAAQKPRPSSGNLLQSPEPSYGPARPRQQSLSKEGSIGGSGGSGGGGGGGLKPSITKQHSQTPSTLNPTMPASERTVAWVSNMPHLSADIESAHIEREEYKLKEYSKSMDESRLDRVKEYEEEIHSLKERLHMSNRKLEEYERRLLSQEEQTSKILMQYQARLEQSEKRLRQQQAEKDSQIKSIIGSPSLQADAGGGGAAPGPPRHG

SEQ ID NO: 38164 - protein, 1284 aa, Homo sapiens
MGLRPPTPSPSGGSCSGSLPPPSRCQPLRRRCSSCCFPGEYHLGRSRRKSVPGGKQYSMEGAPAAPFRPSQGFLSRRLKSSIKRTKSQPKLDRTSSFRQILPRFRSADHDRARLMQSFKESHSHESLLSPSSAAEALELNLDEDSIIKPVHSSILGQEFCFEVTTSSGTKCFACRSAAERDKWIENLQRAVKPNKDNSRRVDNVLKLWIIEARELPPKKRYYCELCLDDMLYARTTSKPRSASGDTVFWGEHFEFNNLPAVRALRLHLYRDSDKKRKKDKAGYVGLVTVPVATLAGRHFTEQWYPVTLPTGSGGSGGMGSGGGGGSGGGSGGKGKGGCPAVRLKARYQTMSILPMELYKEFAEYVTNHYRMLCAVLEPALNVKGKEEVASALVHILQSTGKAKDFLSDMAMSEVDRFMEREHLIFRENTLATKAIEEYMRLIGQKYLKDAIGEFIRALYESEENCEVDPIKCTASSLAEHQANLRMCCELALCKVVNSHCVFPRELKEVFASWRLRCAERGREDIADRLISASLFLRFLCPAIMSPSLFGLMQEYPDEQTSRTLTLIAKVIQNLANFSKFTSKEDFLGFMNEFLELEWGSMQQFLYEISNLDTLTNSSSFEGYIDLGRELSTLHALLWEVLPQLSKEALLKLGPLPRLLNDISTALRNPNIQRQPSRQSERPRPQPVVLRGPSAEMQGYMMRDLNSSIDLQSFMARGLNSSMDMARLPSPTKEKPPPPPPGGGKDLFYVSRPPLARSSPAYCTSSSDITEPEQKMLSVNKSVSMLDLQGDGPGGRLNSSSVSNLAAVGDLLHSSQASLTAALGLRPAPAGRLSQGSGSSITAAGMRLSQMGVTTDGVPAQQLRIPLSFQNPLFHMAADGPGPPGGHGGGGGHGPPSSHHHHHHHHHHRGGEPPGDTFAPFHGYSKSEDLSSGVPKPPAASILHSHSYSDEFGPSGTDFTRRQLSLQDNLQHMLSPPQITIGPQRPAPSGPGGGSGGGSGGGGGGQPPPLQRGKSQQLTVSAAQKPRPSSGNLLQSPEPSYGPARPRQQSLSKEGSIGGSGGSGGGGGGGLKPSITKQHSQTPSTLNPTMPASERTVAWVSNMPHLSADIESAHIEREEYKLKEYSKSMDESRLDRVKEYEEEIHSLKERLHMSNRKLEEYERRLLSQEEQTSKILMQYQARLEQSEKRLRQQQAEKDSQIKSIIGRLMLVEEELRRDHPAMAEPLPEPKKRLLDAQERQLPPLGPTNPRVTLAPPWNGLAPPAPPPPPRLQITENGEFRNTADH

SEQ ID NO: 38165 - protein, 1299 aa, Homo sapiens
MSRSRASIHRGSIPAMSYAPFRDVRGPSMHRTQYVHSPYDRPGWNPRFCIISGNQLLMLDEDEIHPLLIRDRRSESSRNKLLRRTVSVPVEGRPHGEHEYHLGRSRRKSVPGGKQYSMEGAPAAPFRPSQGFLSRRLKSSIKRTKSQPKLDRTSSFRQILPRFRSADHDRARLMQSFKESHSHESLLSPSSAAEALELNLDEDSIIKPVHSSILGQEFCFEVTTSSGTKCFACRSAAERDKWIENLQRAVKPNKDNSRRVDNVLKLWIIEARELPPKKRYYCELCLDDMLYARTTSKPRSASGDTVFWGEHFEFNNLPAVRALRLHLYRDSDKKRKKDKAGYVGLVTVPVATLAGRHFTEQWYPVTLPTGSGGSGGMGSGGGGGSGGGSGGKGKGGCPAVRLKARYQTMSILPMELYKEFAEYVTNHYRMLCAVLEPALNVKGKEEVASALVHILQSTGKAKDFLSDMAMSEVDRFMEREHLIFRENTLATKAIEEYMRLIGQKYLKDAIGEFIRALYESEENCEVDPIKCTASSLAEHQANLRMCCELALCKVVNSHCVFPRELKEVFASWRLRCAERGREDIADRLISASLFLRFLCPAIMSPSLFGLMQEYPDEQTSRTLTLIAKVIQNLANFSKFTSKEDFLGFMNEFLELEWGSMQQFLYEISNLDTLTNSSSFEGYIDLGRELSTLHALLWEVLPQLSKEALLKLGPLPRLLNDISTALRNPNIQRQPSRQSERPRPQPVVLRGPSAEMQGYMMRDLNSSIDLQSFMARGLNSSMDMARLPSPTKEKPPPPPPGGGKDLFYVSRPPLARSSPAYCTSSSDITEPEQKMLSVNKSVSMLDLQGDGPGGRLNSSSVSNLAAVGDLLHSSQASLTAALGLRPAPAGRLSQGSGSSITAAGMRLSQMGVTTDGVPAQQLRIPLSFQNPLFHMAADGPGPPGGHGGGGGHGPPSSHHHHHHHHHHRGGEPPGDTFAPFHGYSKSEDLSSGVPKPPAASILHSHSYSDEFGPSGTDFTRRQLSLQDNLQHMLSPPQITIGPQRPAPSGPGGGSGGGSGGGGGGQPPPLQRGKSQQLTVSAAQKPRPSSGNLLQSPEPSYGPARPRQQSLSKEGSIGGSGGSGGGGGGGLKPSITKQHSQTPSTLNPTMPASERTVAWVSNMPHLSADIESAHIEREEYKLKEYSKSMDESRLDRVKEYEEEIHSLKERLHMSNRKLEEYERRLLSQEEQTSKILMQYQARLEQSEKRLRQQQAEKDSQIKSIIGRLMLVEEELRRDHPAMAEPLPEPKKRLLDAQLLIR

SEQ ID NO: 38166 - protein, 1990 aa, Homo sapiens
MFRNSLKMLLTGGKSSRKNRSSDGGSEEPPDRRQSSVDSRQSRSGQGGISTESDCAFEPDYAVPPLPVSEGDAEQELGPPPSVDEAANTLMTRLGFLLGEKVTEVQPGDQYSMEVQDENQTSAITQRISPCSTLTSSTASPPASSPCSTLPPISTNATAKDCSYGAVTSPTSTLESRDSGIIATLTSYSENVERTKYAGESSKELGSGGNIKPWQSQKSSMDSCLYRVDENMTASTYSLNKIPERNLETVLSQSVQSIPLYLMPRPNSVAATSSAHLEDLAYLDEQRHTPLRTSLRMPRQSMGGARTQQDLRVRFAPYRPPDISLKPLLFEVPSITTESVFVGRDWVFHEIDAQLQSSNASVNQGVVIVGNIGFGKTAIISRLVALSCHGTRMRQIASDSPHASPKHVDANRELPLTQPPSAHSSITSGSCPGTPEMRRRQEEAMRRLASQVVAYHYCQADNAYTCLVPEFVHNVAALLCRSPQLTAYREQLLREPHLQSMLSLRSCVQDPMASFRRGVLEPLENLHKERKIPDEDFIILIDGLNEAEFHKPDYGDTIVSFLSKMIGKFPSWLKLIVTVRTSLQEITKLLPFHRIFLDRLEENEAIDQDLQAYILHRIHSSSEIQNNISLNGKMDNTTFGKLSSHLKTLSQGSYLYLKLTFDLIEKGYLVLKSSSYKVVPVSLSEVYLLQCNMKFPTQSSFDRVMPLLNVAVASLHPLTDEHIFQAINAGSIEGTLEWEDFQQRMENLSMFLIKRRDMTRMFVHPSFREWLIWREEGEKTKFLCDPRSGHTLLAFWFSRQEGKLNRQQTIELGHHILKAHIFKGLSKKVGVSSSILQGLWISYSTEGLSMALASLRNLYTPNIKVSRLLILGGANINYRTEVLNNAPILCVQSHLGYTEMVALLLEFGANVDASSESGLTPLGYAAAAGYLSIVVLLCKKRAKVDHLDKNGQCALVHAALRGHLEVVKFLIQCDWTMAGQQQGVFKKSHAIQQALIAAASMGYTEIVSYLLDLPEKDEEEVERAQINSFDSLWGETALTAAAGRGKLEVCRLLLEQGAAVAQPNRRGAVPLFSTVRQGHWQIVDLLLTHGADVNMADKQGRTPLMMAASEGHLGTVDFLLAQGASIALMDKEGLTALSWACLKGHLSVVRSLVDNGAATDHADKNGRTPLDLAAFYGDAEVVQFLVDHGAMIEHVDYSGMRPLDRAVGCRNTSVVVTLLKKGAKIGPATWAMATSKPDIMIILLSKLMEEGDMFYKKGKVKEAAQRYQYALKKFPREGFGEDLKTFRELKVSLLLNLSRCRRKMNDFGMAEEFATKALELKPKSYEAYYARARAKRSSRQFAAALEDLNEAIKLCPNNREIQRLLLRVEEECRQMQQPQQPPPPPQPQQQLPEEAEPEPQHEDIYSVQDIFEEEYLEQDVENVSIGLQTEARPSQGLPVIQSPPSSPPHRDSAYISSSPLGSHQVFDFRSSSSVGSPTRQTYQSTSPALSPTHQNSHYRPSPPHTSPAHQGGSYRFSPPPVGGQGKEYPSPPPSPLRRGPQYRASPPAESMSVYRSQSGSPVRYQQETSVSQLPGRPKSPLSKMAQRPYQMPQLPVAVPQQGLRLQPAKAQIVRSNQPSPAVHSSTVIPTGAYGQVAHSMASKYQSSQGDIGVSQSRLVYQGSIGGIVGDGRPVQHVQASLSAGAICQHGGLTKEDLPQRPSSAYRGGVRYSQTPQIGRSQSASYYPVCHSKLDLERSSSQLGSPDVSHLIRRPISVNPNEIKPHPPTPRPLLHSQSVGLRFSPSSNSISSTSNLTPTFRPSSSIQQMEIPLKPAYERSCDELSPVSPTQGGYPSEPTRSRTTPFMGIIDKTARTQQYPHLHQQNRTWAVSSVDTVLSPTSPGNLPQPESFSPPSSISNIAFYNKTNNAQNGHLLEDDYYSPHGMLANGSRGDLLERVSQASSYPDVKVARTLPVAQAYQDNLYRQLSRDSRQGQTSPIKPKRPFVESNV

SEQ ID NO: 38167 - protein, 2000 aa, Homo sapiens
MFRNSLKMLLTGGKSSRKNRSSDGGSEEPPDRRQSSVDSRQSRSGQGGISTESDCAFEPDYAVPPLPVSEGDAEQELGPPPSVDEAANTLMTRLGFLLGEKVTEVQPGDQYSMEVQDENQTSAITQRISPCSTLTSSTASPPASSPCSTLPPISTNATAKDCSYGAVTSPTSTLESRDSGIIATLTSYSENVERTKYAGESSKELGSGGNIKPWQSQKSSMDSCLYRVDENMTASTYSLNKIPERNLETVLSQSVQSIPLYLMPRPNSVAATSSAHLEDLAYLDEQRHTPLRTSLRMPRQSMGGARTQQDLRVRFAPYRPPDISLKPLLFEVPSITTESVFVGRDWVFHEIDAQLQSSNASVNQGVVIVGNIGFGKTAIISRLVALSCHGTRMRQIASDSPHASPKHVDANRELPLTQPPSAHSSITSGSCPGTPEMRRRQEEAMRRLASQVVAYHYCQADNAYTCLVPEFVHNVAALLCRSPQLTAYREQLLREPHLQSMLSLRSCVQDPMASFRRGVLEPLENLHKERKIPDEDFIILIDGLNEAEFHKPDYGDTIVSFLSKMIGKFPSWLKLIVTVRTSLQEITKLLPFHRIFLDRLEENEAIDQDLQAYILHRIHSSSEIQNNISLNGKMDNTTFGKLSSHLKTLSQGSYLYLKLTFDLIEKGYLVLKSSSYKVVPVSLSEVYLLQCNMKFPTQSSFDRVMPLLNVAVASLHPLTDEHIFQAINAGSIEGTLEWEDFQQRMENLSMFLIKRRDMTRMFVHPSFREWLIWREEGEKTKFLCDPRSGHTLLAFWFSRQEGKLNRQQTIELGHHILKAHIFKGLSKKVGVSSSILQGLWISYSTEGLSMALASLRNLYTPNIKVSRLLILGGANINYRTEVLNNAPILCVQSHLGYTEMVALLLEFGANVDASSESGLTPLGYAAAAGYLSIVVLLCKKRAKVDHLDKNGQCALVHAALRGHLEVVKFLIQCDWTMAGQQQGVFKKSHAIQQALIAAASMGYTEIVSYLLDLPEKDEEEVERAQINSFDSLWGETALTAAAGRGKLEVCRLLLEQGAAVAQPNRRGAVPLFSTVRQGHWQIVDLLLTHGADVNMADKQGRTPLMMAASEGHLGTVDFLLAQGASIALMDKEGLTALSWACLKGHLSVVRSLVDNGAATDHADKNGRTPLDLAAFYGDAEVVQFLVDHGAMIEHVDYSGMRPLDRAVGCRNTSVVVTLLKKGAKIGCQTLPSRPRGPATWAMATSKPDIMIILLSKLMEEGDMFYKKGKVKEAAQRYQYALKKFPREGFGEDLKTFRELKVSLLLNLSRCRRKMNDFGMAEEFATKALELKPKSYEAYYARARAKRSSRQFAAALEDLNEAIKLCPNNREIQRLLLRVEEECRQMQQPQQPPPPPQPQQQLPEEAEPEPQHEDIYSVQDIFEEEYLEQDVENVSIGLQTEARPSQGLPVIQSPPSSPPHRDSAYISSSPLGSHQVFDFRSSSSVGSPTRQTYQSTSPALSPTHQNSHYRPSPPHTSPAHQGGSYRFSPPPVGGQGKEYPSPPPSPLRRGPQYRASPPAESMSVYRSQSGSPVRYQQETSVSQLPGRPKSPLSKMAQRPYQMPQLPVAVPQQGLRLQPAKAQIVRSNQPSPAVHSSTVIPTGAYGQVAHSMASKYQSSQGDIGVSQSRLVYQGSIGGIVGDGRPVQHVQASLSAGAICQHGGLTKEDLPQRPSSAYRGGVRYSQTPQIGRSQSASYYPVCHSKLDLERSSSQLGSPDVSHLIRRPISVNPNEIKPHPPTPRPLLHSQSVGLRFSPSSNSISSTSNLTPTFRPSSSIQQMEIPLKPAYERSCDELSPVSPTQGGYPSEPTRSRTTPFMGIIDKTARTQQYPHLHQQNRTWAVSSVDTVLSPTSPGNLPQPESFSPPSSISNIAFYNKTNNAQNGHLLEDDYYSPHGMLANGSRGDLLERVSQASSYPDVKVARTLPVAQAYQDNLYRQLSRDSRQGQTSPIKPKRPFVESNV

SEQ ID NO: 38168 - protein, 971 aa, Homo sapiens
MFRNSLKMLLTGGKSSRKNRSSDGGSEEPPDRRQSSVDSRQSRSGQGGISTESDCAFEPDYAVPPLPVSEGDAEQELGPPPSVDEAANTLMTRLGFLLGEKVTEVQPGDQYSMEVQDENQTSAITQRISPCSTLTSSTASPPASSPCSTLPPISTNATAKDCSYGAVTSPTSTLESRDSGIIATLTSYSENVERTKYAGESSKELGSGGNIKPWQSQKSSMDSCLYRVDENMTASTYSLNKIPERNLETVLSQSVQSIPLYLMPRPNSVAATSSAHLEDLAYLDEQRHTPLRTSLRMPRQSMGGARTQQDLRVRFAPYRPPDISLKPLLFEVPSITTESVFVGRDWVFHEIDAQLQSSNASVNQGVVIVGNIGFGKTAIISRLVALSCHGTRMRQIASDSPHASPKHVDANRELPLTQPPSAHSSITSGSCPGTPEMRRRQEEAMRRLASQVVAYHYCQADNAYTCLVPEFVHNVAALLCRSPQLTAYREQLLREPHLQSMLSLRSCVQDPMASFRRGVLEPLENLHKERKIPDEDFIILIDGLNEAEFHKPDYGDTIVSFLSKMIGKFPSWLKLIVTVRTSLQEITKLLPFHRIFLDRLEENEAIDQDLQAYILHRIHSSSEIQNNISLNGKMDNTTFGKLSSHLKTLSQGSYLYLKLTFDLIEKGYLVLKSSSYKVVPVSLSEVYLLQCNMKFPTQSSFDRVMPLLNVAVASLHPLTDEHIFQAINAGSIEGTLEWEDFQQRMENLSMFLIKRRDMTRMFVHPSFREWLIWREEGEKTKFLCDPRSGHTLLAFWFSRQEGKLNRQQTIELGHHILKAHIFKGLSKKVGVSSSILQGLWISYSTEGLSMALASLRNLYTPNIKVSRLLILGGANINYRTEVLNNAPILCVQSHLGYTEMVALLLEFGANVDASSESGLTPLGYAAAAGYLSIVVLLCKKRAKVLAAQLCCFSSLFLYFRCILFLISSVTS

SEQ ID NO: 38169 - protein, 1010 aa, Homo sapiens
MFRNSLKMLLTGGKSSRKNRSSDGGSEEPPDRRQSSVDSRQSRSGQGGISTESDCAFEPDYAVPPLPVSEGDAEQELGPPPSVDEAANTLMTRLGFLLGEKVTEVQPGDQYSMEVQDENQTSAITQRISPCSTLTSSTASPPASSPCSTLPPISTNATAKDCSYGAVTSPTSTLESRDSGIIATLTSYSENVERTKYAGESSKELGSGGNIKPWQSQKSSMDSCLYRVDENMTASTYSLNKIPERNLETVLSQSVQSIPLYLMPRPNSVAATSSAHLEDLAYLDEQRHTPLRTSLRMPRQSMGGARTQQDLRVRFAPYRPPDISLKPLLFEVPSITTESVFVGRDWVFHEIDAQLQSSNASVNQGVVIVGNIGFGKTAIISRLVALSCHGTRMRQIASDSPHASPKHVDANRELPLTQPPSAHSSITSGSCPGTPEMRRRQEEAMRRLASQVVAYHYCQADNAYTCLVPEFVHNVAALLCRSPQLTAYREQLLREPHLQSMLSLRSCVQDPMASFRRGVLEPLENLHKERKIPDEDFIILIDGLNEAEFHKPDYGDTIVSFLSKMIGKFPSWLKLIVTVRTSLQEITKLLPFHRIFLDRLEENEAIDQDLQAYILHRIHSSSEIQNNISLNGKMDNTTFGKLSSHLKTLSQGSYLYLKLTFDLIEKGYLVLKSSSYKVVPVSLSEVYLLQCNMKFPTQSSFDRVMPLLNVAVASLHPLTDEHIFQAINAGSIEGTLEWEDFQQRMENLSMFLIKRRDMTRMFVHPSFREWLIWREEGEKTKFLCDPRSGHTLLAFWFSRQEGKLNRQQTIELGHHILKAHIFKGLSKKVGVSSSILQGLWISYSTEGLSMALASLRNLYTPNIKVSRLLILGGANINYRTEVLNNAPILCVQSHLGYTEMVALLLEFGANVDASSESGLTPLGYAAAAGYLSIVVLLCKKRAKVDHLDKNGQCALVHAALRGHLEVVKFLIQCDWTMAGQQQGVFKKSHAIQQALIAAASMGYTEVRSRQ

SEQ ID NO: 38170 - protein, 2365 aa, Homo sapiens
MEEVPGDALCEHFEANILTQNRCQNCFHPEEAHGARYQELRSPSGAEVPYCDLPRCPPAPEDPLSASTSGCQSVVDPGLRPGPKRGPSPSAGLPEEGPTAAPRSRSRELEAVPYLEGLTTSLCGSCNEDPGSDPTSSPDSATPDDTSNSSSVDWDTVERQEEEAPSWDELAVMIPRRPREGPRADSSQRAPSLLTRSPVGGDAAGQKKEDTGGGGRSAGQHWARLRGESGLSLERHRSTLTQASSMTPHSGPRSTTSQASPAQRDTAQAASTREIPRASSPHRITQRDTSRASSTQQEISRASSTQQETSRASSTQEDTPRASSTQEDTPRASSTQWNTPRASSPSRSTQLDNPRTSSTQQDNPQTSFPTCTPQRENPRTPCVQQDDPRASSPNRTTQRENSRTSCAQRDNPKASRTSSPNRATRDNPRTSCAQRDNPRASSPSRATRDNPTTSCAQRDNPRASRTSSPNRATRDNPRTSCAQRDNPRASSPSRATRDNPTTSCAQRDNPRASRTSSPNRATRDNPRTSCAQRDNPRASSPNRAARDNPTTSCAQRDNPRASRTSSPNRATRDNPRTSCAQRDNPRASSPNRATRDNPTTSCAQRDNPRASRTSSPNRATRDNPRTSCAQRDNPRASSPNRTTQQDSPRTSCARRDDPRASSPNRTIQQENPRTSCALRDNPRASSPSRTIQQENPRTSCAQRDDPRASSPNRTTQQENPRTSCARRDNPRASSRNRTIQRDNPRTSCAQRDNPRASSPNRTIQQENLRTSCTRQDNPRTSSPNRATRDNPRTSCAQRDNLRASSPIRATQQDNPRTCIQQNIPRSSSTQQDNPKTSCTKRDNLRPTCTQRDRTQSFSFQRDNPGTSSSQCCTQKENLRPSSPHRSTQWNNPRNSSPHRTNKDIPWASFPLRPTQSDGPRTSSPSRSKQSEVPWASIALRPTQGDRPQTSSPSRPAQHDPPQSSFGPTQYNLPSRATSSSHNPGHQSTSRTSSPVYPAAYGAPLTSPEPSQPPCAVCIGHRDAPRASSPPRYLQHDPFPFFPEPRAPESEPPHHEPPYIPPAVCIGHRDAPRASSPPRHTQFDPFPFLPDTSDAEHQCQSPQHEPLQLPAPVCIGYRDAPRASSPPRQAPEPSLLFQDLPRASTESLVPSMDSLHECPHIPTPVCIGHRDAPSFSSPPRQAPEPSLFFQDPPGTSMESLAPSTDSLHGSPVLIPQVCIGHRDAPRASSPPRHPPSDLAFLAPSPSPGSSGGSRGSAPPGETRHNLEREEYTVLADLPPPRRLAQRQPGPQAQCSSGGRTHSPGRAEVERLFGQERRKSEAAGAFQAQDEGRSQQPSQGQSQLLRRQSSPAPSRQVTMLPAKQAELTRRSQAEPPHPWSPEKRPEGDRQLQGSPLPPRTSARTPERELRTQRPLESGQAGPRQPLGVWQSQEEPPGSQGPHRHLERSWSSQEGGLGPGGWWGCGEPSLGAAKAPEGAWGGTSREYKESWGQPEAWEEKPTHELPRELGKRSPLTSPPENWGGPAESSQSWHSGTPTAVGWGAEGACPYPRGSERRPELDWRDLLGLLRAPGEGVWARVPSLDWEGLLELLQARLPRKDPAGHRDDLARALGPELGPPGTNDVPEQESHSQPEGWAEATPVNGHSPALQSQSPVQLPSPACTSTQWPKIKVTRGPATATLAGLEQTGPLGSRSTAKGPSLPELQFQPEEPEESEPSRGQDPLTDQKQADSADKRPAEGKAGSPLKGRLVTSWRMPGDRPTLFNPFLLSLGVLRWRRPDLLNFKKGWMSILDEPGEPPSPSLTTTSTSQWKKHWFVLTDSSLKYYRDSTAEEADELDGEIDLRSCTDVTEYAVQRNYGFQIHTKDAVYTLSAMTSGIRRNWIEALRKTVRPTSAPDVTKLSDSNKENALHSYSTQKGPLKAGEQRAGSEVISRGGPRKADGQRQALDYVELSPLTQASPQRARTPARTPDRLAKQEELERDLAQRSEERRKWFEATDSRTPEVPAGEGPRRGLGAPLTEDQQNRLSEEIEKKWQELEKLPLRENKRVPLTALLNQSRGERRGPPSDGHEALEKEVQALRAQLEAWRLQGEAPQSALRSQEDGHIPPGYISQEACERSLAEMESSHQQVMEELQRHHERELQRLQQEKEWLLAEETAATASAIEAMKKAYQEELSRELSKTRSLQQGPDGLRKQHQSDVEALKRELQVLSEQYSQKCLEIGALMRQAEEREHTLRRCQQEGQELLRHNQELHGRLSEEIDQLRGFIASQGMGNGCGRSNERSSCELEVLLRVKENELQYLKKEVQCLRDELQMMQKDKRFTSGKYQDVYVELSHIKTRSEREIEQLKEHLRLAMAALQEKESMRNSLAE

SEQ ID NO: 38171 - protein, 2267 aa, Homo sapiens
MEEVPGDALCEHFEANILTQNRCQNCFHPEEAHGARYQELRSPSGAEVPYCDLPRCPPAPEDPLSASTSGCQSVVDPGLRPGPKRGPSPSAGLPEEGPTAAPRSRSRELEAVPYLEGLTTSLCGSCNEDPGSDPTSSPDSATPDDTSNSSSVDWDTVERQEEEAPSWDELAVMIPRRPREGPRADSSQRAPSLLTRSPVGGDAAGQKKEDTGGGGRSAGQHWARLRGESGLSLERHRSTLTQASSMTPHSGPRSTTSQASPAQRDTAQAASTREIPRASSPHRITQRDTSRASSTQQEISRASSTQQETSRASSTQEDTPRASSTQEDTPRASSTQWNTPRASSPSRSTQLDNPRTSSTQQDNPQTSFPTCTPQRENPRTPCVQQDDPRASSPNRTTQRENSRTSCAQRDNPKASRTSSPNRATRDNPRTSCAQRDNPRASSPSRATRDNPTTSCAQRDNPRASRTSSPNRATRDNPRTSCAQRDNPRASSPSRATRDNPTTSCAQRDNPRASRTSSPNRATRDNPRTSCAQRDNPRASSPNRAARDNPTTSCAQRDNPRASRTSSPNRATRDNPRTSCAQRDNPRASSPNRATRDNPTTSCAQRDNPRASRTSSPNRATRDNPRTSCAQRDNPRASSPNRTTQQDSPRTSCARRDDPRASSPNRTIQQENPRTSCALRDNPRASSPSRTIQQENPRTSCAQRDDPRASSPNRTTQQENPRTSCARRDNPRASSRNRTIQRDNPRTSCAQRDNPRASSPNRTIQQENLRTSCTRQDNPRTSSPNRATRDNPRTSCAQRDNLRASSPIRATQQDNPRTCIQQNIPRSSSTQQDNPKTSCTKRDNLRPTCTQRDRTQSFSFQRDNPGTSSSQCCTQKENLRPSSPHRSTQWNNPRNSSPHRTNKDIPWASFPLRPTQSDGPRTSSPSRSKQSEVPWASIALRPTQGDRPQTSSPSRPAQHDPPQSSFGPTQYNLPSRATSSSHNPGHQSTSRTSSPVYPAAYGAPLTSPEPSQPPCAVCIGHRDAPRASSPPRYLQHDPFPFFPEPRAPESEPPHHEPPYIPPAVCIGHRDAPRASSPPRHTQFDPFPFLPDTSDAEHQCQSPQHEPLQLPAPVCIGYRDAPRASSPPRQAPEPSLLFQDLPRASTESLVPSMDSLHECPHIPTPVCIGHRDAPSFSSPPRQAPEPSLFFQDPPGTSMESLAPSTDSLHGSPVLIPQVCIGHRDAPRASSPPRHPPSDLAFLAPSPSPGSSGGSRGSAPPGETRHNLEREEYTVLADLPPPRRLAQRQPGPQAQCSSGGRTHSPGRAEVERLFGQERRTMLPAKQAELTRRSQAEPPHPWSPEKRPEGDRQLQGSPLPPRTSARTPERELRTQRPLESGQAGPRQPLGVWQSQEEPPGSQGPHRHLERSWSSQEGGLGPGGWWGCGEPSLGAAKAPEGAWGGTSREYKESWGQPEAWEEKPTHELPRELGKRSPLTSPPENWGGPAESSQSWHSGTPTAVGWGAEGACPYPRGSERRPELDWRDLLGLLRAPGEGVWARVPSLDWEGLLELLQARLPRKDPAGHRDDLARALGPELGPPGTNDVPEQESHSQPEGWAEATPVNGHSPALQSQSPVQLPSPACTSTQWPKIKVTRGPATATLAGLEQTGPLGSRSTAKGPSLPELQFQPEEPEESEPSRGQDPLTDQKQADSPDLLNFKKGWMSILDEPGEWKKHWFVLTDSSLKYYRDSTAEEADELDGEIDLRSCTDVTEYAVQRNYGFQIHTKDAVYTLSAMTSGIRRNWIEALRKTVRPTSAPDVTKLSDSNKENALHSYSTQKGPLKAGEQRAGSEVISRGGPRKADGQRQALDYVELSPLTQASPQRARTPARTPDRLAKQEELERDLAQRSEERRKWFEATDSRTPEVPAGEGPRRGLGAPLTEDQQNRLSEEIEKKWQELEKLPLRENKRVPLTALLNQSRGERRGPPSDGHEALEKEVQALRAQLEAWRLQGEAPQSALRSQEDGHIPPGYISQEACERSLAEMESSHQQVMEELQRHHERELQRLQQEKEWLLAEETAATASAIEAMKKAYQEELSRELSKTRSLQQGPDGLRKQHQSDVEALKRELQVLSEQYSQKCLEIGALMRQAEEREHTLRRCQQEGQELLRHNQELHGRLSEEIDQLRGFIASQGMGNGCGRSNERSSCELEVLLRVKENELQYLKKEVQCLRDELQMMQKDKRFTSGKYQDVYVELSHIKTRSEREIEQLKEHLRLAMAALQEKESMRNSLAE

SEQ ID NO: 38172 - protein, 2193 aa, Homo sapiens
MIPRRPREGPRADSSQRAPSLLTRSPVGGDAAGQKKEDTGGGGRSAGQHWARLRGESGLSLERHRSTLTQASSMTPHSGPRSTTSQASPAQRDTAQAASTREIPRASSPHRITQRDTSRASSTQQEISRASSTQQETSRASSTQEDTPRASSTQEDTPRASSTQWNTPRASSPSRSTQLDNPRTSSTQQDNPQTSFPTCTPQRENPRTPCVQQDDPRASSPNRTTQRENSRTSCAQRDNPKASRTSSPNRATRDNPRTSCAQRDNPRASSPSRATRDNPTTSCAQRDNPRASRTSSPNRATRDNPRTSCAQRDNPRASSPSRATRDNPTTSCAQRDNPRASRTSSPNRATRDNPRTSCAQRDNPRASSPNRAARDNPTTSCAQRDNPRASRTSSPNRATRDNPRTSCAQRDNPRASSPNRATRDNPTTSCAQRDNPRASRTSSPNRATRDNPRTSCAQRDNPRASSPNRTTQQDSPRTSCARRDDPRASSPNRTIQQENPRTSCALRDNPRASSPSRTIQQENPRTSCAQRDDPRASSPNRTTQQENPRTSCARRDNPRASSRNRTIQRDNPRTSCAQRDNPRASSPNRTIQQENLRTSCTRQDNPRTSSPNRATRDNPRTSCAQRDNLRASSPIRATQQDNPRTCIQQNIPRSSSTQQDNPKTSCTKRDNLRPTCTQRDRTQSFSFQRDNPGTSSSQCCTQKENLRPSSPHRSTQWNNPRNSSPHRTNKDIPWASFPLRPTQSDGPRTSSPSRSKQSEVPWASIALRPTQGDRPQTSSPSRPAQHDPPQSSFGPTQYNLPSRATSSSHNPGHQSTSRTSSPVYPAAYGAPLTSPEPSQPPCAVCIGHRDAPRASSPPRYLQHDPFPFFPEPRAPESEPPHHEPPYIPPAVCIGHRDAPRASSPPRHTQFDPFPFLPDTSDAEHQCQSPQHEPLQLPAPVCIGYRDAPRASSPPRQAPEPSLLFQDLPRASTESLVPSMDSLHECPHIPTPVCIGHRDAPSFSSPPRQAPEPSLFFQDPPGTSMESLAPSTDSLHGSPVLIPQVCIGHRDAPRASSPPRHPPSDLAFLAPSPSPGSSGGSRGSAPPGETRHNLEREEYTVLADLPPPRRLAQRQPGPQAQCSSGGRTHSPGRAEVERLFGQERRKSEAAGAFQAQDEGRSQQPSQGQSQLLRRQSSPAPSRQVTMLPAKQAELTRRSQAEPPHPWSPEKRPEGDRQLQGSPLPPRTSARTPERELRTQRPLESGQAGPRQPLGVWQSQEEPPGSQGPHRHLERSWSSQEGGLGPGGWWGCGEPSLGAAKAPEGAWGGTSREYKESWGQPEAWEEKPTHELPRELGKRSPLTSPPENWGGPAESSQSWHSGTPTAVGWGAEGACPYPRGSERRPELDWRDLLGLLRAPGEGVWARVPSLDWEGLLELLQARLPRKDPAGHRDDLARALGPELGPPGTNDVPEQESHSQPEGWAEATPVNGHSPALQSQSPVQLPSPACTSTQWPKIKVTRGPATATLAGLEQTGPLGSRSTAKGPSLPELQFQPEEPEESEPSRGQDPLTDQKQADSADKRPAEGKAGSPLKGRLVTSWRMPGDRPTLFNPFLLSLGVLRWRRPDLLNFKKGWMSILDEPGEPPSPSLTTTSTSQWKKHWFVLTDSSLKYYRDSTAEEADELDGEIDLRSCTDVTEYAVQRNYGFQIHTKDAVYTLSAMTSGIRRNWIEALRKTVRPTSAPDVTKLSDSNKENALHSYSTQKGPLKAGEQRAGSEVISRGGPRKADGQRQALDYVELSPLTQASPQRARTPARTPDRLAKQEELERDLAQRSEERRKWFEATDSRTPEVPAGEGPRRGLGAPLTEDQQNRLSEEIEKKWQELEKLPLRENKRVPLTALLNQSRGERRGPPSDGHEALEKEVQALRAQLEAWRLQGEAPQSALRSQEDGHIPPGYISQEACERSLAEMESSHQQVMEELQRHHERELQRLQQEKEWLLAEETAATASAIEAMKKAYQEELSRELSKTRSLQQGPDGLRKQHQSDVEALKRELQVLSEQYSQKCLEIGALMRQAEEREHTLRRCQQEGQELLRHNQELHGRLSEEIDQLRGFIASQGMGNGCGRSNERSSCELEVLLRVKENELQYLKKEVQCLRDELQMMQKDKRFTSGKYQDVYVELSHIKTRSEREIEQLKEHLRLAMAALQEKESMRNSLAE

SEQ ID NO: 38173 - protein, 1144 aa, Homo sapiens
MIPRRPREGPRADSSQRAPSLLTRSPVGGDAAGQKKEDTGGGGRSAGQHWARLRGESGLSLERHRSTLTQASSMTPHSGPRSTTSQASPAQRDTAQAASTREIPRASSPHRITQRDTSRASSTQQEISRASSTQQETSRASSTQEDTPRASSTQEDTPRASSTQWNTPRASSPSRSTQLDNPRTSSTQQDNPQTSFPTCTPQRENPRTPCVQQDDPRASSPNRTTQRENSRTSCAQRDNPKASRTSSPNRATRDNPRTSCAQRDNPRASSPSRATRDNPTTSCAQRDNPRASRTSSPNRATRDNPRTSCAQRDNPRASSPSRATRDNPTTSCAQRDNPRASRTSSPNRATRDNPRTSCAQRDNPRASSPNRAARDNPTTSCAQRDNPRASRTSSPNRATRDNPRTSCAQRDNPRASSPNRATRDNPTTSCAQRDNPRASRTSSPNRATRDNPRTSCAQRDNPRASSPNRTTQQDSPRTSCARRDDPRASSPNRTIQQENPRTSCALRDNPRASSPSRTIQQENPRTSCAQRDDPRASSPNRTTQQENPRTSCARRDNPRASSRNRTIQRDNPRTSCAQRDNPRASSPNRTIQQENLRTSCTRQDNPRTSSPNRATRDNPRTSCAQRDNLRASSPIRATQQDNPRTCIQQNIPRSSSTQQDNPKTSCTKRDNLRPTCTQRDRTQSFSFQRDNPGTSSSQCCTQKENLRPSSPHRSTQWNNPRNSSPHRTNKDIPWASFPLRPTQSDGPRTSSPSRSKQSEVPWASIALRPTQGDRPQTSSPSRPAQHDPPQSSFGPTQYNLPSRATSSSHNPGHQSTSRTSSPVYPAAYGAPLTSPEPSQPPCAVCIGHRDAPRASSPPRYLQHDPFPFFPEPRAPESEPPHHEPPYIPPAVCIGHRDAPRASSPPRHTQFDPFPFLPDTSDAEHQCQSPQHEPLQLPAPVCIGYRDAPRASSPPRQAPEPSLLFQDLPRASTESLVPSMDSLHECPHIPTPVCIGHRDAPSFSSPPRQAPEPSLFFQDPPGTSMESLAPSTDSLHGSPVLIPQVCIGHRDAPRASSPPRHPPSDLAFLAPSPSPGSSGGSRGSAPPGETRHNLEREEYTVLADLPPPRRLAQRQPGPQAQCSSGGRTHSPGRAEVERLFGQERR

SEQ ID NO: 38174 - protein, 593 aa, Homo sapiens
MTPDLLNFKKGWMSILDEPGEPPSPSLTTTSTSQWKKHWFVLTDSSLKYYRDSTAEEADELDGEIDLRSCTDVTEYAVQRNYGFQIHTKDAVYTLSAMTSGIRRNWIEALRKTVRPTSAPDVTKLSDSNKENALHSYSTQKGPLKAGEQRAGSEVISRGGPRKADGQRQALDYVELSPLTQASPQRARTPARTPDRLAKQEELERDLAQRSEERRKWFEATDSRTPEVPAGEGPRRGLGAPLTEDQQNRLSEEIEKKWQELEKLPLRENKRVPLTALLNQSRGERRGPPSDGHEALEKEVQALRAQLEAWRLQGEAPQSALRSQEDGHIPPGYISQEACERSLAEMESSHQQVMEELQRHHERELQRLQQEKEWLLAEETAATASAIEAMKKAYQEELSRELSKTRSLQQGPDGLRKQHQSDVEALKRELQVLSEQYSQKCLEIGALMRQAEEREHTLRRCQQEGQELLRHNQELHGRLSEEIDQLRGFIASQGMGNGCGRSNERSSCELEVLLRVKENELQYLKKEVQCLRDELQMMQKDKRFTSGKYQDVYVELSHIKTRSEREIEQLKEHLRLAMAALQEKESMRNSLAE

SEQ ID NO: 38175 - protein, 431 aa, Homo sapiens
MGGWKGPGQRRGKEGPEARRRAAERGGGGGGGGVPAPRSPAREPRPRSCLLLPPPWGAAMTPDLLNFKKGWMSILDEPGEPPSPSLTTTSTSQWKKHWFVLTDSSLKYYRDSTAEEADELDGEIDLRSCTDVTEYAVQRNYGFQIHTKDAVYTLSAMTSGIRRNWIEALRKTVRPTSAPDVTKLSDSNKENALHSYSTQKGPLKAGEQRAGSEVISRGGPRKADGQRQALDYVELSPLTQASPQRARTPARTPDRLAKQEELERDLAQRSEERRKWFEATDSRTPEVPAGEGPRRGLGAPLTEDQQNRLSEEIEKKWQELEKLPLRENKRVPLTALLNQSRGERRGPPSDGHEALEKEVQALRAQLEAWRLQGEAPQSALRSQEDGHIPPGYISQLVGVITVPVLQTRPLSSERLCDLPKVTPPAGLKGGI

SEQ ID NO: 38176 - protein, 652 aa, Homo sapiens
MGGWKGPGQRRGKEGPEARRRAAERGGGGGGGGVPAPRSPAREPRPRSCLLLPPPWGAAMTPDLLNFKKGWMSILDEPGEPPSPSLTTTSTSQWKKHWFVLTDSSLKYYRDSTAEEADELDGEIDLRSCTDVTEYAVQRNYGFQIHTKDAVYTLSAMTSGIRRNWIEALRKTVRPTSAPDVTKLSDSNKENALHSYSTQKGPLKAGEQRAGSEVISRGGPRKADGQRQALDYVELSPLTQASPQRARTPARTPDRLAKQEELERDLAQRSEERRKWFEATDSRTPEVPAGEGPRRGLGAPLTEDQQNRLSEEIEKKWQELEKLPLRENKRVPLTALLNQSRGERRGPPSDGHEALEKEVQALRAQLEAWRLQGEAPQSALRSQEDGHIPPGYISQEACERSLAEMESSHQQVMEELQRHHERELQRLQQEKEWLLAEETAATASAIEAMKKAYQEELSRELSKTRSLQQGPDGLRKQHQSDVEALKRELQVLSEQYSQKCLEIGALMRQAEEREHTLRRCQQEGQELLRHNQELHGRLSEEIDQLRGFIASQGMGNGCGRSNERSSCELEVLLRVKENELQYLKKEVQCLRDELQMMQKDKRFTSGKYQDVYVELSHIKTRSEREIEQLKEHLRLAMAALQEKESMRNSLAE

SEQ ID NO: 38177 - protein, 195 aa, Homo sapiens
MENHKSNNKENITIVDISRKINQLPEAERNLLENGSVYVGLNAALCGLIANSLFRRILNVTKARIAAGLPMAGIPFLTTDLTYRCFVSFPLNTGDLDCETCTITRSGLTGLVIGGLYPVFLAIPVNGGLAARYQSALLPHKGNILSYWIRTSKPVFRKMLFPILLQTMFSAYLGSEQYKLLIKALQLSEPGKEIH

SEQ ID NO: 38178 - protein, 125 aa, Homo sapiens
MAGIPFLTTDLTYRCFVSFPLNTGDLDCETCTITRSGLTGLVIGGLYPVFLAIPVNGGLAARYQSALLPHKGNILSYWIRTSKPVFRKMLFPILLQTMFSAYLGSEQYKLLIKALQLSEPGKEIH

SEQ ID NO: 38179 - protein, 468 aa, Homo sapiens
MPEDGAGDGGEVPALIPDGEPLREEQRPLKQSLGSSLCRESHWKCLLLTLLIHACGAVVAWCRLATVPRLVLGPEAALARGAGGPPPTYPASPCSDGYLYIPLAFVSLLYLLYLAECWHCHVRSCQAPRTDAHTVLALIRRLQQAPPCVWWKATSYHYVRRTRQITRYRNGDAYTTTQVYHERADSRTARGEFDYSAHGVRDVSKELVGLAEHAATRLRFTKCFSFGSAEAEASYLTQRARFFSANEGLDDYLEAREGMHLKDVDFRESLMVFADPRSPPWYARAWVFWLVSAATLSWPLRVVAAYGTAHVHYQVEKLFGASSPPPGAVPSGPPLSRVATVDFTELEWHICSNRQLVPSYSEAVVMGAGSGAYLRGCQRCRRSVSSNSLPPARPSGPRLPFSRSRLSLGAGGRATPGVFRSLSGGPLGRRGEDTEPLESPPCYEDALYFPVLIVHGDSGCQGDGQGAL

SEQ ID NO: 38180 - protein, 645 aa, Homo sapiens
MVLAMASQDVQNFFQPFSSWISRVYEALQQAGDMLSASLVNISKQDSKLSDKLDQDLDNIQIQETYFEDEEQDNDWSQEDANSLFLEVDHFSCCNSDLQDSAQNSSPSLSQHAKDSCSTMSQWPNWASDDRKLPHVLSSIAEEEHHLEKQRSGLQHGFDSQLPGTLETVNGKKQVNSFGDDEELSTSSDSDEEVIKQFEISVSRSQSFRSVTSEKGKQTGLEQKPKFSRSLLTHGEDGTEVSACEDLDGASQRRYSENLSYGEDDHIPAHSQSPCERGDAKHHGTSHQESSVVQSLRRQSTEGSLEMETAFNSRGFEDSYATDSSSMWSPEEQDRTNLQVPSGVSEPISKCGDLDVIFEYRAASQKLTVTIVRAQGLPDKDRSGVNSWQVHVVLLPGKKHRGRTNIQRGPNPVFREKVTFAKLEPRDVAACAVRFRLYAARKMTRERMMGEKLFYLSHLHPEGEMKVTLVLEPRSNISSGGSPLSPSAVSHSDSTSSTQSLSHGGAPELLVGLSYNATTGRLSVEMIKGSHFRNLAVNRAPDTYGKLFLLNSVGQEMSRCKTSIRRGQPNPVYKETFVFQVALFQLSDVTLMISVYNRRTMKRKEMIGWIALGQNSSGEEEQDHWEEMKETKGQQICRWHTLLES

SEQ ID NO: 38181 - protein, 625 aa, Homo sapiens
MVLAMASQDVQNFFQPFSSWISRVYEALQQAGDMLSASLVNISKQDSKLSDKLDQDLDNIQIQETYFEDEEQDNDWSQEDANSLFLEVDHFSCCNSDLQDSAQNSSPSLSQHAKDSCSTMSQWPNWASDDRKLPHVLSSIAEEEHHLEKQRSGLQHGFDSQLPGTLETVNGKKQVNSFGDDEELSTSSDSDEEVIKQFEISVSRSQSFRSVTSEKGKQTGLEQKPKFSRSLLTHGEDGTEVSACEDLDGASQRRYSENLSYGEDDHIPAHSQSPCERGDAKHHGTSHQESSVVQSLRRQSTEGSLEMETAFEQDRTNLQVPSGVSEPISKCGDLDVIFEYRAASQKLTVTIVRAQGLPDKDRSGVNSWQVHVVLLPGKKHRGRTNIQRGPNPVFREKVTFAKLEPRDVAACAVRFRLYAARKMTRERMMGEKLFYLSHLHPEGEMKVTLVLEPRSNISSGGSPLSPSAVSHSDSTSSTQSLSHGGAPELLVGLSYNATTGRLSVEMIKGSHFRNLAVNRAPDTYGKLFLLNSVGQEMSRCKTSIRRGQPNPVYKETFVFQVALFQLSDVTLMISVYNRRTMKRKEMIGWIALGQNSSGEEEQDHWEEMKETKGQQICRWHTLLES

SEQ ID NO: 38182 - protein, 203 aa, Homo sapiens
MTRERMMGEKLFYLSHLHPEGEMKVTLVLEPRSNISSGGSPLSPSAVSHSDSTSSTQSLSHGGAPELLVGLSYNATTGRLSVEMIKGSHFRNLAVNRAPDTYGKLFLLNSVGQEMSRCKTSIRRGQPNPVYKETFVFQVALFQLSDVTLMISVYNRRTMKRKEMIGWIALGQNSSGEEEQDHWEEMKETKGQQICRWHTLLES

SEQ ID NO: 38183 - protein, 383 aa, Homo sapiens
MVLAMASQDVQNFFQPFSSWISRVYEALQQAGDMLSASLVNISKQDSKLSDKLDQDLDNIQIQETYFEDEEQDNDWSQEDANSLFLEVDHFSCCNSDLQDSAQNSSPSLSQHAKDSCSTMSQWPNWASDDRKLPHVLSSIAEEEHHLEKQRSGLQHGFDSQLPGTLETVNGKKQVNSFGDDEELSTSSDSDEEVIKQFEISVSRSQSFRSVTSEKGKQTGLEQKPKFSRSLLTHGEDGTEVSACEDLDGASQRRYSENLSYGEDDHIPAHSQSPCERGDAKHHGTSHQESSVVQSLRRQSTEGSLEMETAFNSRGFEDSYATDSSSMWSPEANLNLKRKGYLLDVYCLSSPLLFTTSLHRRNRTGPICRCHPGSQSPSQSVVT

SEQ ID NO: 38184 - protein, 299 aa, Homo sapiens
MITFLYIFFSILIMVLFVLGNFANGFIALVNFIDWVKRKKISSADQILTALAVSRIGLLWALLLNWYLTVLNPAFYSVELRITSYNAWVVTNHFSMWLAANLSIFYLLKIANFSNLLFLHLKRRVRSVILVILLGTLIFLVCHLLVANMDESMWAEEYEGNMTGKMKLRNTVHLSYLTVTTLWSFIPFTLSLISFLMLICSLCKHLKKMQLHGEGSQDLSTKVHIKALQTLISFLLLCAIFFLFLIVSVWSPRRLRNDPVVMVSKAVGNIYLAFDSFILIWRTKKLKHTFLLILCQIRC

SEQ ID NO: 38185 - protein, 421 aa, Homo sapiens
MAVDVAEYHLSVIKSPPGWEVGVYAAGALALLGIAAVSLWKLWTSGSFPSPSPFPNYDYRYLQQKYGESCAEAREKRVPAWNAQRASTRGPPSRKGSLSIEDTFESISELGPLELMGRELDLAPYGTLRKSQSADSLNSISSVSNTFGQDFTLGQVEVSMEYDTASHTLNVAVMQGKDLLEREEASFESCFMRVSLLPDEQIVGISRIQRNAYSIFFDEKFSIPLDPTALEEKSLRFSVFGIDEDERNVSTGVVELKLSVLDLPLQPFSGWLYLQDQNKAADAVGEILLSLSYLPTAERLTVVVVKAKNLIWTNDKTTADPFVKVYLLQDGRKMSKKKTAVKRDDPNPVFNEAMIFSVPAIVLQDLSLRVTVAESSSDGRGDNVGHVIIGPSASGMGTTHWNQMLATLRRPVSMWHAVRRN

SEQ ID NO: 38186 - protein, 482 aa, Homo sapiens
MASPEPRRGGDGAAQAARKTRVEANSPLPKNSGSLNEAEALNPEVTLSSEGSLNLEDILYLEDTGDLDETLYVQETEKAEEALYIEEAMQPDEALHVEEPGNPEETVCVEETTEPDRIQFVEGPVEPGKPTSPEHVVYEGETVTRAEKSNPEESLRAEQSPSMEENLSIEDLELLEGRFQQCVQAVAQLEEERDQLIHELVLLREPALQEVQQVHQDILAAYKLHAQAELERDGLREEIRLVKQKLFKVTKECVAYQYQLECRQQDVAQFADFREVLTTRATQLSEELAQLRDAYQKQKEQLRQQLEAPPSQRDGHFLQESRRLSAQFENLMAESRQDLEEEYEPQFLRLLERKEAGTKALQRTQAEIQEMKEALRPLQAEARQLRLQNRNLEDQIALVRQKRDEEVQQYREQLEEMEERQRQLRNGVQLQQQKNKEMEQLRLSLAEELSTYKAMLLPKSLEQADAPTSQAGGMETQSQGAV

SEQ ID NO: 38187 - protein, 476 aa, Homo sapiens
MASPEPRRGGDGAAQAARKTRVEANSPLPKNSGSLNEAEALNPEVTLSSEGSLNLEDILYLEDTGDLDETLYVQETEKAEEALYIEEAMQPDEALHVEEPGNPEETVCVEETTEPDRIQFVEGPVEPGKPTSPEHVVYEGETVTRAEKSNPEESLRAEQSPSMEENLSIEDLELLEGRFQQCVQAVAQLEEERDQLIHELVLLREPALQEVQQVHQDILAAYKLHAQAELERDGLREEIRLVKQKLFKVTKECVAYQYQLECRQQDVAQFADFREVLTTRATQLSEELAQLRDAYQKQKEQLRQQLEAPPSQRDGHFLQESRRLSAQFENLMAESRQDLEEEYEPQFLRLLERKEAGTKALQRTQAEIQEMKEALRPLQAEARQLRLQNRNLEDQIALVRQKRDEEVQQYREQLEEMEERQRQLRNGVQLQQQKNKEMEQLRLSLAEELSTYKGCLEIYGQICNPETAKNFLAKDH

SEQ ID NO: 38188 - protein, 349 aa, Homo sapiens
MSKSKDDAPHELESQFILRLPPEYASTVRRAVQSGHVNLKDRLTIELHPDGRHGIVRVDRVPLASKLVDLPCVMESLKTIDKKTFYKTADICQMLVSTVDGDLYPPVEEPVASTDPKASKKKDKDKEKKFIWNHGITLPLKNVRKRRFRKTAKKKYIESPDVEKEVKRLLSTDAEAVSTRWEIIAEDETKEAENQGLDISSPGMSGHRQGHDSLEHDELREIFNDLSSSSEDEDETQHQDEEDINIIDTEEDLERQLQDKLNESDEQHQENEGTNQLVMGIQKQIDNMKGKLQETQDRAKRQEDLIMKVENLALKNRFQAVLDELKQKEDREKEQLSSLQEELESLLEK

SEQ ID NO: 38189 - protein, 718 aa, Homo sapiens
MALYQRWRCLRLQGLQACRLHTAVVSTPPRWLAERLGLFEELWAAQVKRLASMAQKEPRTIKISLPGGQKIDAVAWNTTPYQLARQISSTLADTAVAAQVNGEPYDLERPLETDSDLRFLTFDSPEGKAVFWHSSTHVLGAAAEQFLGAVLCRGPSTEYGFYHDFFLGKERTIRGSELPVLERICQELTAAARPFRRLEASRDQLRQLFKDNPFKLHLIEEKVTGPTATVYGCGTLVDLCQGPHLRHTGQIGGLKLLSNSSSLWRSSGAPETLQRVSGISFPTTELLRVWEAWREEAELRDHRRIGKEQELFFFHELSPGSCFFLPRGTRVYNALVAFIRAEYAHRGFSEVKTPTLFSTKLWEQSGHWEHYQEDMFAVQPPGSDRPPSSQSDDSTRHITDTLALKPMNCPAHCLMFAHRPRSWRELPLRLADFGALHRAEASGGLGGLTRLRCFQQDDAHIFCTTDQLEAEIQSCLDFLRSVYAVLGFSFRLALSTRPSGFLGDPCLWDQAEQVLKQALKEFGEPWDLNSGDGAFYGPKIDVHLHDALGRPHQCGTIQLDFQLPLRFDLQYKGQAGALERPVLIHRAVLGSVERLLGVLAESCGGKWPLWLSPFQVVVIPVGSEQEEYAKEAQQSLRAAGLVSDLDADSGLTLSRRIRRAQLAHYNFQFVVGQKEQSKRTVNIRTRDNRRLGEWDLPEAVQRLVELQNTRVPNAEEIF

SEQ ID NO: 38190 - protein, 588 aa, Homo sapiens
MALYQRWRCLRLQGLQACRLHTAVVSTPPRWLAERLGLFEELWAAQVKRLASMAQKEPRTIKISLPGGQKIDAVAWNTTPYQLARQISSTLADTAVAAQVNGEPYDLERPLETDSDLRFLTFDSPEGKAVFWHSSTHVLGAAAEQFLGAVLCRGPSTEYGFYHDFFLGKERTIRGSELPVLERICQELTAAARPFRRLEASRDQLRQLFKAEYAHRGFSEVKTPTLFSTKLWEQSGHWEHYQEDMFAVQPPGSDRPPSSQSDDSTRHITDTLALKPMNCPAHCLMFAHRPRSWRELPLRLADFGALHRAEASGGLGGLTRLRCFQQDDAHIFCTTDQLEAEIQSCLDFLRSVYAVLGFSFRLALSTRPSGFLGDPCLWDQAEQVLKQALKEFGEPWDLNSGDGAFYGPKIDVHLHDALGRPHQCGTIQLDFQLPLRFDLQYKGQAGALERPVLIHRAVLGSVERLLGVLAESCGGKWPLWLSPFQVVVIPVGSEQEEYAKEAQQSLRAAGLVSDLDADSGLTLSRRIRRAQLAHYNFQFVVGQKEQSKRTVNIRTRDNRRLGEWDLPEAVQRLVELQNTRVPNAEEIF

SEQ ID NO: 38191 - protein, 309 aa, Homo sapiens
MVYFLPIIFSILVVFAFVLGNFSNGFIALVNVIDWVKRQKISSADQILTALVVSRVGLLWVILLHWYANVFNSALYSLEVRIVASNISAVINHFSIWLAASLSIFYLLKIANFSNLIFLHLKKRIKSVVLVILLGPLVFLICNLAVITMDERVWTKEYEGNVTWKIKLRNAIHLSSLTVTTLANLIPFTLSLICFLLLICSLCKHLKKMQLHSKGSQDPSTKVHIKALQTVISFLMLCAIYFLSIMISVWNLRSLENKPVFMFCKAIRFSYPSIHPFILIWGNKKLKQTFLSVFWQVRYWVKGEKPSSP

SEQ ID NO: 38192 - protein, 1063 aa, Homo sapiens
MPHLPLASFRPPFWGLRHSRGLPRFHSVSTQSEPHGSPISRRNREAKQKRLREKQATLEAEIAGESKSPAESIKAWRPKELVLYEIPTKPGEKKDVSGPLPPAYSPRYVEAAWYPWWVREGFFKPEYQARLPQATGETFSMCIPPPNVTGSLHIGHALTVAIQDALVRWHRMRGDQVLWVPGSDHAGIATQAVVEKQLWKERGVRRHELSREAFLREVWQWKEAKGGEICEQLRALGASLDWDRECFTMDVGSSVAVTEAFVRLYKAGLLYRNHQLVNWSCALRSAISDIEVENRPLPGHTQLRLPGCPTPVSFGLLFSVAFPVDGEPDAEVVVGTTRPETLPGDVAVAVHPDDSRYTHLHGRQLRHPLMGQPLPLITDYAVQPHVGTGAVKVTPAHSPADAEMGARHGLSPLNVIAEDGTMTSLCGDWLQGLHRFVAREKIMSVLSEWGLFRGLQNHPMVLPICSRSGDVIEYLLKNQWFVRCQEMGARAAKAVESGALELSPSFHQKNWQHWFSHIGDWCVSRQLWWGHQIPAYLVVEDHAQGEEDCWVVGRSEAEAREVAAELTGRPGAELTLERDPDVLDTWFSSALFPFSALGWPQETPDLARFYPLSLLETGSDLLLFWVGRMVMLGTQLTGQLPFSKVLLHPMVRDRQGRKMSKSLGNVLDPRDIISGVEMQVLQEKLRSGNLDPAELAIVAAAQKKDFPHGIPECGTDALRFTLCSHGVQAGDLHLSVSEVQSCRHFCNKIWNALRFILNALGEKFVPQPAEELSPSSPMDAWILSRLALAAQECERGFLTRELSLVTHALHHFWLHNLCDVYLEAVKPVLWHSPRPLGPPQVLFSCADLGLRLLAPLMPFLAEELWQRLPPRPGCPPAPSISVAPYPSACSLEHWRQPELERRFSRVQEVVQVLRALRATYQLTKARPRVLLQSSEPGDQGLFEAFLEPLGTLGYCGAVGLLPPGAAAPSGWAQAPLSDTAQVYMELQGLVDPQIQLPLLAARRYKLQKQLDSLTARTPSEGEAGTQRQQKLSSLQLELSKLDKAASHLRQLMDEPPAPGSPEL

SEQ ID NO: 38193 - protein, 501 aa, Homo sapiens
MVFFCPVPLFCPGLAPRDPRPCSFLPPVTFGNGQRPSAVLGGPHGHVGDPAHRAAALQQVWRPEIPRHLQGNPPLLTPPCPQVLLHPMVRDRQGRKMSKSLGNVLDPRDIISGVEMQVLQEKLRSGNLDPAELAIVAAAQKKDFPHGIPECGTDALRFTLCSHGVQAGDLHLSVSEVQSCRHFCNKIWNALRFILNALGEKFVPQPAEELSPSSPMDAWILSRLALAAQECERGFLTRELSLVTHALHHFWLHNLCDVYLEAVKPVLWHSPRPLGPPQVLFSCADLGLRLLAPLMPFLAEELWQRLPPRPGCPPAPSISVAPYPSACSLEHWRQPELERRFSRVQEVVQVLRALRATYQLTKARPRVLLQSSEPGDQGLFEAFLEPLGTLGYCGAVGLLPPGAAAPSGWAQAPLSDTAQVYMELQGLVDPQIQLPLLAARRYKLQKQLDSLTARTPSEGEAGTQRQQKLSSLQLELSKLDKAASHLRQLMDEPPAPGSPEL

SEQ ID NO: 38194 - protein, 923 aa, Homo sapiens
MCIPPPNVTGSLHIGHALTVAIQDALVRWHRMRGDQVLWVPGSDHAGIATQAVVEKQLWKERGVRRHELSREAFLREVWQWKEAKGGEICEQLRALGASLDWDRECFTMDVGSSVAVTEAFVRLYKAGLLYRNHQLVNWSCALRSAISDIEVENRPLPGHTQLRLPGCPTPVSFGLLFSVAFPVDGEPDAEVVVGTTRPETLPGDVAVAVHPDDSRYTHLHGRQLRHPLMGQPLPLITDYAVQPHVGTGAVKVTPAHSPADAEMGARHGLSPLNVIAEDGTMTSLCGDWLQGLHRFVAREKIMSVLSEWGLFRGLQNHPMVLPICSRSGDVIEYLLKNQWFVRCQEMGARAAKAVESGALELSPSFHQKNWQHWFSHIGDWCVSRQLWWGHQIPAYLVVEDHAQGEEDCWVVGRSEAEAREVAAELTGRPGAELTLERDPDVLDTWFSSALFPFSALGWPQETPDLARFYPLSLLETGSDLLLFWVGRMVMLGTQLTGQLPFSKVLLHPMVRDRQGRKMSKSLGNVLDPRDIISGVEMQVLQEKLRSGNLDPAELAIVAAAQKKDFPHGIPECGTDALRFTLCSHGVQAGDLHLSVSEVQSCRHFCNKIWNALRFILNALGEKFVPQPAEELSPSSPMDAWILSRLALAAQECERGFLTRELSLVTHALHHFWLHNLCDVYLEAVKPVLWHSPRPLGPPQVLFSCADLGLRLLAPLMPFLAEELWQRLPPRPGCPPAPSISVAPYPSACSLEHWRQPELERRFSRVQEVVQVLRALRATYQLTKARPRVLLQSSEPGDQGLFEAFLEPLGTLGYCGAVGLLPPGAAAPSGWAQAPLSDTAQVYMELQGLVDPQIQLPLLAARRYKLQKQLDSLTARTPSEGEAGTQRQQKLSSLQLELSKLDKAASHLRQLMDEPPAPGSPEL

SEQ ID NO: 38195 - protein, 1093 aa, Homo sapiens
MGGKAWPRRAVGTAGGPCAEQISAPFQTLLMPHLPLASFRPPFWGLRHSRGLPRFHSVSTQSEPHGSPISRRNREAKQKRLREKQATLEAEIAGESKSPAESIKAWRPKELVLYEIPTKPGEKKDVSGPLPPAYSPRYVEAAWYPWWVREGFFKPEYQARLPQATGETFSMCIPPPNVTGSLHIGHALTVAIQDALVRWHRMRGDQVLWVPGSDHAGIATQAVVEKQLWKERGVRRHELSREAFLREVWQWKEAKGGEICEQLRALGASLDWDRECFTMDVGSSVAVTEAFVRLYKAGLLYRNHQLVNWSCALRSAISDIEVENRPLPGHTQLRLPGCPTPVSFGLLFSVAFPVDGEPDAEVVVGTTRPETLPGDVAVAVHPDDSRYTHLHGRQLRHPLMGQPLPLITDYAVQPHVGTGAVKVTPAHSPADAEMGARHGLSPLNVIAEDGTMTSLCGDWLQGLHRFVAREKIMSVLSEWGLFRGLQNHPMVLPICSRSGDVIEYLLKNQWFVRCQEMGARAAKAVESGALELSPSFHQKNWQHWFSHIGDWCVSRQLWWGHQIPAYLVVEDHAQGEEDCWVVGRSEAEAREVAAELTGRPGAELTLERDPDVLDTWFSSALFPFSALGWPQETPDLARFYPLSLLETGSDLLLFWVGRMVMLGTQLTGQLPFSKVLLHPMVRDRQGRKMSKSLGNVLDPRDIISGVEMQVLQEKLRSGNLDPAELAIVAAAQKKDFPHGIPECGTDALRFTLCSHGVQAGDLHLSVSEVQSCRHFCNKIWNALRFILNALGEKFVPQPAEELSPSSPMDAWILSRLALAAQECERGFLTRELSLVTHALHHFWLHNLCDVYLEAVKPVLWHSPRPLGPPQVLFSCADLGLRLLAPLMPFLAEELWQRLPPRPGCPPAPSISVAPYPSACSLEHWRQPELERRFSRVQEVVQVLRALRATYQLTKARPRVLLQSSEPGDQGLFEAFLEPLGTLGYCGAVGLLPPGAAAPSGWAQAPLSDTAQVYMELQGLVDPQIQLPLLAARRYKLQKQLDSLTARTPSEGEAGTQRQQKLSSLQLELSKLDKAASHLRQLMDEPPAPGSPEL

SEQ ID NO: 38196 - protein, 1222 aa, Homo sapiens
MSQPPPPPPPLPPPPPPPEAPQTPSSLASAAASGGLLKRRDRRILSGSCPDPKCQARLFFPASGSVSIECTECGQRHEQQQLLGVEEVTDPDVVLHNLLRNALLGVTGAPKKNTELVKVMGLSNYHCKLLSPILARYGMDKQTGRAKLLRDMNQGELFDCALLGDRAFLIEPEHVNTVGYGKDRSGSLLYLHDTLEDIKRANKSQECLIPVHVDGDGHCLVHAVSRALVGRELFWHALRENLKQHFQQHLARYQALFHDFIDAAEWEDIINECDPLFVPPEGVPLGLRNIHIFGLANVLHRPIILLDSLSGMRSSGDYSATFLPGLIPAEKCTGKDGHLNKPICIAWSSSGRNHYIPLVGIKGAALPKLPMNLLPKAWGVPQDLIKKYIKLEEDGGCVIGGDRSLQDKYLLRLVAAMEEVFMDKHGIHPSLVADVHQYFYRRTGVIGVQPEEVTAAAKKAVMDNRLHKCLLCGALSELHVPPEWLAPGGKLYNLAKSTHGQLRTDKNYSFPLNNLVCSYDSVKDVLVPDYGMSNLTACNWCHGTSVRKVRGDGSIVYLDGDRTNSRSTGGKCGCGFKHFWDGKEYDNLPEAFPITLEWGGRVVRETVYWFQYESDSSLNSNVYDVAMKLVTKHFPGEFGSEILVQKVVHTILHQTAKKNPDDYTPVNIDGAHAQRVGDVQGQESESQLPTKIILTGQKTKTLHKEELNMSKTERTIQQNITEQASVMQKRKTEKLKQEQKGQPRTVSPSTIRDGPSSAPATPTKAPYSPTTSKEKKIRITTNDGRQSMVTLKSSTTFFELQESIAREFNIPPYLQCIRYGFPPKELMPPQAGMEKEPVPLQHGDRITIEILKSKAEGGQSAAAHSAHTVKQEDIAVTGKLSSKELQEQAEKEMYSLCLLATLMGEDVWSYAKGLPHMFQQGGVFYSIMKKTMGMADGKHCTFPHLPGKTFVYNASEDRLELCVDAAGHFPIGPDVEDLVKEAVSQVRAEATTRSRESSPSHGLLKLGSGGVVKKKSEQLHNVTAFQGKGHSLGTASGNPHLDPRARETSVVRKHNTGTDFSNSSTKTEPSVFTASSSNSELIRIAPGVVTMRDGRQLDPDLVEAQRKKLQEMVSSIQASMDRHLRDQSTEQSPSDLPQRKTEVVSSSAKSGSLQTGLPESFPLTGGTENLNTETTDGCVADALGAAFATRSKAQRGNSVEELEEMDSQDAEMTNTTEPMDHS

SEQ ID NO: 38197 - protein, 542 aa, Homo sapiens
MAAGAGTAGPASGPGVVRDPAASQPRKRPGREGGEGARRSDTMAGGGGSSDGSGRAAGRRASRSSGRARRGRHEPGLGGPAERGAGEARLEEAVNRWVLKFYFHEALRAFRGSRYGDFRQIRDIMQALLVRPLGKEHTVSRLLRVMQCLSRIEEGENLDCSFDMEAELTPLESAINVLEMIKTEFTLTEAVVESSRKLVKEAAVIICIKNKEFEKASKILKKHMSKDPTTQKLRNDLLNIIREKNLAHPVIQNFSYETFQQKMLRFLESHLDDAEPYLLTMAKKALKSESAASSTGKEDKQPAPGPVEKPPREPARQLRNPPTTIGMMTLKAAFKTLSGAQDSEAAFAKLDQKDLVLPTQALPASPALKNKRPRKDENESSAPADGEGGSELQPKNKRMTISRLVLEEDSQSTEPSAGLNSSQEAASAPPSKPTVLNQPLPGEKNPKVPKGKWNSSNGVEEKETWVEEDELFQVQAAPDEDSTTNITKKQKWTVEESEWVKAGVQKYGEGNWAAISKNYPFVNRTAVMIKDRWRTMKRLGMN

SEQ ID NO: 38198 - protein, 293 aa, Homo sapiens
MAAGAGTAGPASGPGVVRDPAASQPRKRPGREGGEGARRSDTMAGGGGSSDGSGRAAGRRASRSSGRARRGRHEPGLGGPAERGAGEARLEEAVNRWVLKFYFHEALRAFRGSRYGDFRQIRDIMQALLVRPLGKEHTVSRLLRVMQCLSRIEEGENLDCSFDMEAELTPLESAINVLEMIKTEFTLTEAVVESSRKLVKEAAVIICIKNKEFEKASKILKKHMSKDPTTQKLRNDLLNIIREKNLAHPVIQNFSYETFQQKMLRFLESHLDDAEPYLLTVRLGPSPITMVCP

SEQ ID NO: 38199 - protein, 454 aa, Homo sapiens
MNLASQSGEAGAGQLLFANFNQDNTEVKGASRAAGLGRRAVVWSLAVGSKSGYKFFSLSSVDKLEQIYECTDTEDVCIVERLFSSSLVAIVSLKAPRKLKVCHFKKGTEICNYSYSNTILAVKLNRQRLIVCLEESLYIHNIRDMKVLHTIRETPPNPAGLCALSINNDNCYLAYPGSATIGEVQVFDTINLRAANMIPAHDSPLAALAFDASGTKLATASEKGTVIRVFSIPEGQKLFEFRRGVKRCVSICSLAFSMDGMFLSASSNTETVHIFKLETVKEKPPEEPTTWTGYFGKVLMASTSYLPSQVTEMFNQGRAFATVRLPFCGHKNICSLATIQKIPRLLVGAADGYLYMYNLDPQEGGECALMKQHRLDGSLETTNEILDSASHDCPLVTQTYGAAAGKGTYVPSSPTRLAYTDDLGAVGGACLEDEASALRLDEDSEHPPMILRTD

SEQ ID NO: 38200 - protein, 425 aa, Homo sapiens
MNLASQSGEAGAGQLLFANFNQDNTSLAVGSKSGYKFFSLSSVDKLEQIYECTDTEDVCIVERLFSSSLVAIVSLKAPRKLKVCHFKKGTEICNYSYSNTILAVKLNRQRLIVCLEESLYIHNIRDMKVLHTIRETPPNPAGLCALSINNDNCYLAYPGSATIGEVQVFDTINLRAANMIPAHDSPLAALAFDASGTKLATASEKGTVIRVFSIPEGQKLFEFRRGVKRCVSICSLAFSMDGMFLSASSNTETVHIFKLETVKEKPPEEPTTWTGYFGKVLMASTSYLPSQVTEMFNQGRAFATVRLPFCGHKNICSLATIQKIPRLLVGAADGYLYMYNLDPQEGGECALMKQHRLDGSLETTNEILDSASHDCPLVTQTYGAAAGKAYTDDLGAVGGACLEDEASALRLDEDSEHPPMILRTD

SEQ ID NO: 38201 - protein, 384 aa, Homo sapiens
MFTHVLPFVISADTEDVCIVERLFSSSLVAIVSLKAPRKLKVCHFKKGTEICNYSYSNTILAVKLNRQRLIVCLEESLYIHNIRDMKVLHTIRETPPNPAGLCALSINNDNCYLAYPGSATIGEVQVFDTINLRAANMIPAHDSPLAALAFDASGTKLATASEKGTVIRVFSIPEGQKLFEFRRGVKRCVSICSLAFSMDGMFLSASSNTETVHIFKLETVKEKPPEEPTTWTGYFGKVLMASTSYLPSQVTEMFNQGRAFATVRLPFCGHKNICSLATIQKIPRLLVGAADGYLYMYNLDPQEGGECALMKQHRLDGSLETTNEILDSASHDCPLVTQTYGAAAGKAYTDDLGAVGGACLEDEASALRLDEDSEHPPMILRTD

SEQ ID NO: 38202 - protein, 436 aa, Homo sapiens
MNLASQSGEAGAGQLLFANFNQDNTSLAVGSKSGYKFFSLSSVDKLEQIYECTDTEDVCIVERLFSSSLVAIVSLKAPRKLKVCHFKKGTEICNYSYSNTILAVKLNRQRLIVCLEESLYIHNIRDMKVLHTIRETPPNPAGLCALSINNDNCYLAYPGSATIGEVQVFDTINLRAANMIPAHDSPLAALAFDASGTKLATASEKGTVIRVFSIPEGQKLFEFRRGVKRCVSICSLAFSMDGMFLSASSNTETVHIFKLETVKEKPPEEPTTWTGYFGKVLMASTSYLPSQVTEMFNQGRAFATVRLPFCGHKNICSLATIQKIPRLLVGAADGYLYMYNLDPQEGGECALMKQHRLDGSLETTNEILDSASHDCPLVTQTYGAAAGKGTYVPSSPTRLAYTDDLGAVGGACLEDEASALRLDEDSEHPPMILRTD

SEQ ID NO: 38203 - protein, 438 aa, Homo sapiens
MLLRLQRIKTLRPPGCPHPMTTCSAGTLSAVPCVSPRQVFVFERRFCLWHSHVEMFTHVLPFVISADTEDVCIVERLFSSSLVAIVSLKAPRKLKVCHFKKGTEICNYSYSNTILAVKLNRQRLIVCLEESLYIHNIRDMKVLHTIRETPPNPAGLCALSINNDNCYLAYPGSATIGEVQVFDTINLRAANMIPAHDSPLAALAFDASGTKLATASEKGTVIRVFSIPEGQKLFEFRRGVKRCVSICSLAFSMDGMFLSASSNTETVHIFKLETVKEKPPEEPTTWTGYFGKVLMASTSYLPSQVTEMFNQGRAFATVRLPFCGHKNICSLATIQKIPRLLVGAADGYLYMYNLDPQEGGECALMKQHRLDGSLETTNEILDSASHDCPLVTQTYGAAAGKAYTDDLGAVGGACLEDEASALRLDEDSEHPPMILRTD

SEQ ID NO: 38204 - protein, 443 aa, Homo sapiens
MNLASQSGEAGAGQLLFANFNQDNTEVKGASRAAGLGRRAVVWSLAVGSKSGYKFFSLSSVDKLEQIYECTDTEDVCIVERLFSSSLVAIVSLKAPRKLKVCHFKKGTEICNYSYSNTILAVKLNRQRLIVCLEESLYIHNIRDMKVLHTIRETPPNPAGLCALSINNDNCYLAYPGSATIGEVQVFDTINLRAANMIPAHDSPLAALAFDASGTKLATASEKGTVIRVFSIPEGQKLFEFRRGVKRCVSICSLAFSMDGMFLSASSNTETVHIFKLETVKEKPPEEPTTWTGYFGKVLMASTSYLPSQVTEMFNQGRAFATVRLPFCGHKNICSLATIQKIPRLLVGAADGYLYMYNLDPQEGGECALMKQHRLDGSLETTNEILDSASHDCPLVTQTYGAAAGKAYTDDLGAVGGACLEDEASALRLDEDSEHPPMILRTD

SEQ ID NO: 38205 - protein, 111 aa, Homo sapiens
MSWRGRSTYRPRPRRSLQPPELIGAMLEPTDEEPKEEKPPTKSRNPTPDQKREDDQGAAEIQVPDLEADLQELCQTKTGDGCEGGTDVKGKILPKAEHFKMPEAGEGKSQV

SEQ ID NO: 38206 - protein, 111 aa, Homo sapiens
MIWRGRSTYRPRPRRSVPPPELIGPMLEPGDEEPQQEEPPTESRDPAPGQEREEDQGAAETQVPDLEADLQELSQSKTGGECGNGPDDQGKILPKSEQFKMPEGGDRQPQV

SEQ ID NO: 38207 - protein, 1657 aa, Homo sapiens
MGLQARRWASGSRGAAGPRRGVLQLLPLPLPLPLLLLLLLRPGAGRAAAQGEAEAPTLYLWKTGPWGRCMGDECGPGGIQTRAVWCAHVEGWTTLHTNCKQAERPNNQQNCFKVCDWHKELYDWRLGPWNQCQPVISKSLEKPLECIKGEEGIQVREIACIQKDKDIPAEDIICEYFEPKPLLEQACLIPCQQDCIVSEFSAWSECSKTCGSGLQHRTRHVVAPPQFGGSGCPNLTEFQVCQSSPCEAEELRYSLHVGPWSTCSMPHSRQVRQARRRGKNKEREKDRSKGVKDPEARELIKKKRNRNRQNRQENKYWDIQIGYQTREVMCINKTGKAADLSFCQQEKLPMTFQSCVITKECQVSEWSEWSPCSKTCHDMVSPAGTRVRTRTIRQFPIGSEKECPEFEEKEPCLSQGDGVVPCATYGWRTTEWTECRVDPLLSQQDKRRGNQTALCGGGIQTREVYCVQANENLLSQLSTHKNKEASKPMDLKLCTGPIPNTTQLCHIPCPTECEVSPWSAWGPCTYENCNDQQGKKGFKLRKRRITNEPTGGSGVTGNCPHLLEAIPCEEPACYDWKAVRLGNCEPDNGKECGPGTQVQEVVCINSDGEEVDRQLCRDAIFPIPVACDAPCPKDCVLSTWSTWSSCSHTCSGKTTEGKQIRARSILAYAGEEGGIRCPNSSALQEVRSCNEHPCTVYHWQTGPWGQCIEDTSVSSFNTTTTWNGEASCSVGMQTRKVICVRVNVGQVGPKKCPESLRPETVRPCLLPCKKDCIVTPYSDWTSCPSSCKEGDSSIRKQSRHRVIIQLPANGGRDCTDPLYEEKACEAPQACQSYRWKTHKWRRCQLVPWSVQQDSPGAQEGCGPGRQARAITCRKQDGGQAGIHECLQYAGPVPALTQACQIPCQDDCQLTSWSKFSSCNGDCGAVRTRKRTLVGKSKKKEKCKNSHLYPLIETQYCPCDKYNAQPVGNWSDCILPEGKVEVLLGMKVQGDIKECGQGYRYQAMACYDQNGRLVETSRCNSHGYIEEACIIPCPSDCKLSEWSNWSRCSKSCGSGVKVRSKWLREKPYNGGRPCPKLDHVNQAQVYEVVPCHSDCNQYLWVTEPWSICKVTFVNMRENCGEGVQTRKVRCMQNTADGPSEHVEDYLCDPEEMPLGSRVCKLPCPEDCVISEWGPWTQCVLPCNQSSFRQRSADPIRQPADEGRSCPNAVEKEPCNLNKNCYHYDYNVTDWSTCQLSEKAVCGNGIKTRMLDCVRSDGKSVDLKYCEALGLEKNWQMNTSCMVECPVNCQLSDWSPWSECSQTCGLTGKMIRRRTVTQPFQGDGRPCPSLMDQSKPCPVKPCYRWQYGQWSPCQVQEAQCGEGTRTRNISCVVSDGSADDFSKVVDEEFCADIELIIDGNKNMVLEESCSQPCPGDCYLKDWSSWSLCQLTCVNGEDLGFGGIQVRSRPVIIQELENQHLCPEQMLETKSCYDGQCYEYKWMASAWKGSSRTVWCQRSDGINVTGGCLVMSQPDADRSCNPPCSQPHSYCSETKTCHCEEGYTEVMSSNSTLEQCTLIPVVVLPTMEDKRGDVKTSRAVHPTQPSSNPAGRGRTWFLQPFGPDGRLKTWVYGVAAGAFVLLIFIVSMIYLACKKPKKPQRRQNNRLKPLTLAYDGDADM

SEQ ID NO: 38208 - protein, 1910 aa, Homo sapiens
MACCHKVMLLLDTAGGAARHSRVRRAALRLLTYLSCRFGLARVHWAFKFFDSQGARSRPSRVSDFRELGSRSWEDFEEELEARLEDRAHLPGPAPRATHTHGALMETLLDYQWDRPEITSPTKPILRSSGRRLLDVESEAKEAEAALGGLVNAVFLLAPCPHSQRELLQFVSGCEAQAQRLPPTPKQVMEKLLPKRVREVMVARKITFYWVDTTEWSKLWESPDHLGYWTVCELLHHGGGTVLPSESFSWDFAQAGEMLLRSGIKLSSEPHLSPWISMLPTDATLNRLLYNSPEYEASFPRMEGMLFLPVEAGKEIQETWTVTLEPLAMHQRHFQKPVRIFLKGSVAQWSLPTSSTLGTDSWMLGSPEESTATQRLLFQQLVSRLTAEELHLVADVDPGEGRPPITGVISPLSASAMILTVCRTKEAEFQRHVLQTAVADSPRDTASLFSDVVDSILNQTHDSLADTASAASPVPEWAQQELGHTTPWSPAVVEKWFPFCNISGASSDLMESFGLLQAASANKEESSKTEGELIHCLAELYQRKSREESTIAHQEDSKKKRGVPRTPVRQKMNTMCRSLKMLNVARLNVKAQKLHPDGSPDVAGEKGIQKIPSGRTVDKLEDRGRTLRSSKPKDFKTEEELLSYIRENYQKTVATGEIMLYACARNMISTVKMFLKSKGTKELEVNCLNQVKSSLLKTSKSLRQNLGKKLDKEDKVRECQLQVFLRLEMCLQCPSINESTDDMEQVVEEVTDLLRMVCLTEDSAYLAEFLEEILRLYIDSIPKTLGNLYNSLGFVIPQKLAGVLPTDFFSDDSMTQENKSPLLSVPFLSSARRSVSGSPESDELQELRTRSAKKRRKNALIRHKSIAEVSQNLRQIEIPKVSKRATKKENSHPAPQQPSQPVKDTVQEVTKVRRNLFNQELLSPSKRSLKRGLPRSHSVSAVDGLEDKLDNFKKNKGYHKLLTKSVAETPVHKQISKRLLHRQIKGRSSDPGPDIGVVEESPEKGDEISLRRSPRIKQLSFSRTHSASFYSVSQPKSRSVQRVHSFQQDKSDQRENSPVQSIRSPKSLLFGAMSEMISPSEKGSARMKKRSRNTLDSEVPAAYQTPKKSHQKSLSFSKTTPRRISHTPQTPLYTPERLQKSPAKMTPTKQAAFKESLKDSSSPGHDSPLDSKITPQKRHTQAGEGTSLETKTPRTPKRQGTQPPGFLPNCTWPHSVNSSPESPSCPAPPTSSTAQPRRECLTPIRDPLRTPPRAAAFMGTPQNQTHQQPHVLRAARAEEPAQKLKDKAIKTPKRPGNSTVTSSPPVTPKKLFTSPLCDVSKKSPFRKSKIECPSPGELDQKEPQMSPSVAASLSCPVPSTPPELSQRATLDTVPPPPPSKVGKRCRKTSDPRRSIVECQPDASATPGVGTADSPAAPTDSRDDQKGLSLSPQSPPERRGYPGPGLRSDWHASSPLLITSDTEHVTLLSEAEHHGIGDLKSNVLSVEEGEGLRTADAEKSSLSHPGIPPSPPSCGPGSPLMPSRDVHCTTDGRQCQASAQLDNLPASAWHSTDSASPQTYEVELEMQASGLPKLRIKKIDPSSSLEAEPLSKEESSLGEESFLPALSMPRASRSLSKPEPTYVSPPCPRLSHSTPGKSRGQTYICQACTPTHGPSSTPSPFQTDGVPWTPSPKHSGKTTPDIIKDWPRRKRAVGCGAGSSSGRGEVGADLPGSLSLLESEGKDHGLELSIHRTPILEDFELEGVCQLPDQSPPRNSMPKAEEASSWGQFGLSSRKRVLLAKEEADRGAKRICDLREDSEVSKSKEGSPSWSAWQLPSTGDEEVFVSGSTPPPSCAVRSCLSASALQALTQSPLLFQGKTPSSQSKDPRDEDVDVLPSTVEDSPFSRAFSRRRPISRTYTRKKLMGTWLEDL

SEQ ID NO: 38209 - protein, 1909 aa, Homo sapiens
MACCHKVMLLLDTAGGAARHSRVRRAALRLLTYLSCRFGLARVHWAFKFFDSQGARSRPSRVSDFRELGSRSWEDFEEELEARLEDRAHLPGPAPRATHTHGALMETLLDYQWDRPEITSPTKPILRSSGRRLLDVESEAKEAEAALGGLVNAVFLLAPCPHSQRELLQFVSGCEAQAQRLPPTPKQVMEKLLPKRVREVMVARKITFYWVDTTEWSKLWESPDHLGYWTVCELLHHGGGTVLPSESFSWDFAQAGEMLLRSGIKLSSEPHLSPWISMLPTDATLNRLLYNSPEYEASFPRMEGMLFLPVEGKEIQETWTVTLEPLAMHQRHFQKPVRIFLKGSVAQWSLPTSSTLGTDSWMLGSPEESTATQRLLFQQLVSRLTAEELHLVADVDPGEGRPPITGVISPLSASAMILTVCRTKEAEFQRHVLQTAVADSPRDTASLFSDVVDSILNQTHDSLADTASAASPVPEWAQQELGHTTPWSPAVVEKWFPFCNISGASSDLMESFGLLQAASANKEESSKTEGELIHCLAELYQRKSREESTIAHQEDSKKKRGVPRTPVRQKMNTMCRSLKMLNVARLNVKAQKLHPDGSPDVAGEKGIQKIPSGRTVDKLEDRGRTLRSSKPKDFKTEEELLSYIRENYQKTVATGEIMLYACARNMISTVKMFLKSKGTKELEVNCLNQVKSSLLKTSKSLRQNLGKKLDKEDKVRECQLQVFLRLEMCLQCPSINESTDDMEQVVEEVTDLLRMVCLTEDSAYLAEFLEEILRLYIDSIPKTLGNLYNSLGFVIPQKLAGVLPTDFFSDDSMTQENKSPLLSVPFLSSARRSVSGSPESDELQELRTRSAKKRRKNALIRHKSIAEVSQNLRQIEIPKVSKRATKKENSHPAPQQPSQPVKDTVQEVTKVRRNLFNQELLSPSKRSLKRGLPRSHSVSAVDGLEDKLDNFKKNKGYHKLLTKSVAETPVHKQISKRLLHRQIKGRSSDPGPDIGVVEESPEKGDEISLRRSPRIKQLSFSRTHSASFYSVSQPKSRSVQRVHSFQQDKSDQRENSPVQSIRSPKSLLFGAMSEMISPSEKGSARMKKRSRNTLDSEVPAAYQTPKKSHQKSLSFSKTTPRRISHTPQTPLYTPERLQKSPAKMTPTKQAAFKESLKDSSSPGHDSPLDSKITPQKRHTQAGEGTSLETKTPRTPKRQGTQPPGFLPNCTWPHSVNSSPESPSCPAPPTSSTAQPRRECLTPIRDPLRTPPRAAAFMGTPQNQTHQQPHVLRAARAEEPAQKLKDKAIKTPKRPGNSTVTSSPPVTPKKLFTSPLCDVSKKSPFRKSKIECPSPGELDQKEPQMSPSVAASLSCPVPSTPPELSQRATLDTVPPPPPSKVGKRCRKTSDPRRSIVECQPDASATPGVGTADSPAAPTDSRDDQKGLSLSPQSPPERRGYPGPGLRSDWHASSPLLITSDTEHVTLLSEAEHHGIGDLKSNVLSVEEGEGLRTADAEKSSLSHPGIPPSPPSCGPGSPLMPSRDVHCTTDGRQCQASAQLDNLPASAWHSTDSASPQTYEVELEMQASGLPKLRIKKIDPSSSLEAEPLSKEESSLGEESFLPALSMPRASRSLSKPEPTYVSPPCPRLSHSTPGKSRGQTYICQACTPTHGPSSTPSPFQTDGVPWTPSPKHSGKTTPDIIKDWPRRKRAVGCGAGSSSGRGEVGADLPGSLSLLESEGKDHGLELSIHRTPILEDFELEGVCQLPDQSPPRNSMPKAEEASSWGQFGLSSRKRVLLAKEEADRGAKRICDLREDSEVSKSKEGSPSWSAWQLPSTGDEEVFVSGSTPPPSCAVRSCLSASALQALTQSPLLFQGKTPSSQSKDPRDEDVDVLPSTVEDSPFSRAFSRRRPISRTYTRKKLMGTWLEDL

SEQ ID NO: 38210 - protein, 298 aa, Homo sapiens
MWGACKVKVHDSLATISITLRRYLRLGATMAKSKFEYVRDFEADDTCLAHCWVVVRLDGRNFHRFAEKHNFAKPNDSRALQLMTKCAQTVMEELEDIVIAYGQSDEYSFVFKRKTNWFKRRASKFMTHVASQFASSYVFYWRDYFEDQPLLYPPGFDGRVVVYPSNQTLKDYLSWRQADCHINNLYNTVFWALIQQSGLTPVQAQGRLQGTLAADKNEILFSEFNINYNNELPMYRKGTVLIWQKVDEVMTKEIKLPTEMEGKKMAVTRTRTKPVPLHCDIIGDAFWKEHPEILDEDS

SEQ ID NO: 38211 - protein, 360 aa, Homo sapiens
MNAPLGGIWLWLPLLLTWLTPEVNSSWWYMRATGGSSRVMCDNVPGLVSSQRQLCHRHPDVMRAISQGVAEWTAECQHQFRQHRWNCNTLDRDHSLFGRVLLRSSRESAFVYAISSAGVVFAITRACSQGEVKSCSCDPKKMGSAKDSKGIFDWGGCSDNIDYGIKFARAFVDAKERKGKDARALMNLHNNRAGRKAVKRFLKQECKCHGVSGSCTLRTCWLAMADFRKTGDYLWRKYNGAIQVVMNQDGTGFTVANERFKKPTKNDLVYFENSPDYCIRDREAGSLGTAGRVCNLTSRGMDSCEVMCCGRGYDTSHVTRMTKCGCKFHWCCAVRCQDCLEALDVHTCKAPKNADWTTAT

SEQ ID NO: 38212 - protein, 200 aa, Homo sapiens
MEKPYNKNEGNLENEGKPEDEVEPDDEGKSDEEEKPDVEGKTECEGKREDEGEPGDEGQLEDEGSQEKQGRSEGEGKPQGEGKPASQAKPESQPRAAEKRPAEDYVPRKAKRKTDRGTDDSPKDSQEDLQERHLSSEEMMRECGDVSRAQEELRKKQKMGGFHWMQRDVQDPFAPRGQRGVRGVRGGGRGQRGLHDIPYL

SEQ ID NO: 38213 - protein, 575 aa, Homo sapiens
MAKPFFRLQKFLRRTQFLLFFLTAAYLMTGSLLLLQRVRVALPQGPRAPGPLQTLPVAAVALGVGLLDSRALHDPRVSPELLLGVDMLQSPLTRPRPGPRWLRSRNSELRQLRRRWFHHFMSDSQGPPALGPEAARPAIHSRGTYIGCFSDDGHERTLKGAVFYDLRKMTVSHCQDACAERSYVYAGLEAGAECYCGNRLPAVSVGLEECNHECKGEKGSVCGAVDRLSVYRVDELQPGSRKRRTATYRGCFRLPENITHAFPSSLIQANVTVGTCSGFCSQKEFPLAILRGWECYCAYPTPRFNLRDAMDSSVCGQDPEAQRLAEYCEVYQTPVQDTRCTDRRFLPNKSKVFVALSSFPGAGNTWARHLIEHATGFYTGSYYFDGTLYNKGFKGEKDHWRSRRTICVKTHESGRREIEMFDSAILLIRNPYRSLVAEFNRKCAGHLGYAADRNWKSKEWPDFVNSYASWWSSHVLDWLKYGKRLLVVHYEELRRSLVPTLREMVAFLNVSVSEERLLCVENNKEGSFRRRGRRSHDPEPFTPEMKDLINGYIRTVDQALRDHNWTGLPREYVPR

SEQ ID NO: 38214 - protein, 517 aa, Homo sapiens
MHAALAGPLLAALLATARARPQPPDGGQCRPPGSQRDLNSFLWTIRRDPPAYLFGTIHVPYTRVWDFIPDNSKAAFQASTRVYFELDLTDPYTISALASCQLLPHGENLQDVLPHELYWRLKRHLDYVKLMMPSWMTPAQRGKGLYADYLFNAIAGNWERKRPVWVMLMVNSLTERDVRFRGVPVLDLYLAQQAEKMKKTTGAVEQVEEQCHPLNNGLNFSQVLFALNQTLLQQESVRAGSLQASYTTEDLIKHYNCGDLSAVIFNHDTSQLPNFINTTLPPHEQVTAQEIDSYFRQELIYKRNERMGKRVMALLRENEDKICFFAFGAGHFLGNNTVIDILRQAGLEVDHTPAGQAIHSPAPQSPAPSPEGTSTSPAPVTPAAAVPEAPSVTPTAPPEDEDPALSPHLLLPDSLSQLEEFGRQRKWHKRQSTHQRPRQFNDLWVRIEDSTTASPPPLPLQPTHSSGTAKPPFQLSDQLQQQDPPGPASSSAPTLGLLPAIATTIAVCFLLHSLGPS

SEQ ID NO: 38215 - protein, 164 aa, Homo sapiens
MCPPVSMRYEEEGMSYLYASWMYQLQHGDQLSICFTCFKAAFLDFKDLLESEDWEEDNWDPELMEHTEAESEQEGSSGMELSWGQSPGQPVQGGSEAWGPGTLAAAPEGLEDAGLDPHFVPTELWPQEAVPLGLGLEDADWTQGLPWRFEELLTCSHWPSFFPS

SEQ ID NO: 38216 - protein, 676 aa, Homo sapiens
MSRRALRRLRGEQRGQEPLGPGALHFDLRDDDDAEEEGPKRELGVRRPGGAGKEGVRVNNRFELINIDDLEDDPVVNGERSGCALTDAVAPGNKGRGQRGNTESKTDGDDTETVPSEQSHASGKLRKKKKKQKNKKSSTGEASENGLEDIDRILERIEDSTGLNRPGPAPLSSRKHVLYVEHRHLNPDTELKRYFGARAILGEQRPRQRQRVYPKCTWLTTPKSTWPRYSKPGLSMRLLESKKGLSFFAFEHSEEYQQAQHKFLVAVESMEPNNIVVLLQTSPYHVDSLLQLSDACRFQEDQEMARDLVERALYSMECAFHPLFSLTSGACRLDYRRPENRSFYLALYKQMSFLEKRGCPRTALEYCKLILSLEPDEDPLCMLLLIDHLALRARNYEYLIRLFQEWEAHRNLSQLPNFAFSVPLAYFLLSQQTDLPECEQSSARQKASLLIQQALTMFPGVLLPLLESCSVRPDASVSSHRFFGPNAEISQPPALSQLVNLYLGRSHFLWKEPATMSWLEENVHEVLQAVDAGDPAVEACENRRKVLYQRAPRNIHRHVILSEIKEAVAALPPDVTTQSVMGFDPLPPSDTIYSYVRPERLSPISHGNTIALFFRSLLPNYTMEGERPEEGVAGGLNRNQGLNRLMLAVRDMMANFHLNDLEAPHEDDAEGEGEWD

SEQ ID NO: 38217 - protein, 166 aa, Homo sapiens
MAQRLLLRRFLASVISRKPSQGQWPPLTSRALQTPQCSPGGLTVTPNPARTIYTTRISLTTFNIQDGPDFQDRVVNSETPVVVDFHAQWCGPCKILGPRLEKMVAKQHGKVVMAKVDIDDHTDLAIEYEVSAVPTVLAMKNGDVVDKFVGIKDEDQLEAFLKKLIG

SEQ ID NO: 38218 - protein, 396 aa, Homo sapiens
MWIPVVGLPRRLRLSALAGAGRFCILGSEAATRKHLPARNHCGLSDSSPQLWPEPDFRNPPRKASKASLDFKRYVTDRRLAETLAQIYLGKPSRPPHLLLECNPGPGILTQALLEAGAKVVALESDKTFIPHLESLGKNLDGKLRVIHCDFFKLDPRSGGVIKPPAMSSRGLFKNLGIEAVPWTADIPLKVVGMFPSRGEKRALWKLAYDLYSCTSIYKFGRIEVNMFIGEKEFQKLMADPGNPDLYHVLSVIWQLACEIKVLHMEPWSSFDIYTRKGPLENPKRRELLDQLQQKLYLIQMIPRQNLFTKNLTPMNYNIFFHLLKHCFGRRSATVIDHLRSLTPLDARDILMQIGKQEDEKVVNMHPQDFKTLFETIERSKDCAYKWLYDETLEDR

SEQ ID NO: 38219 - protein, 851 aa, Homo sapiens
MTSHYVIAIFALMSSCLATAGPEPGALCELSPVSASHPVQALMESFTVLSGCASRGTTGLPQEVHVLNLRTAGQGPGQLQREVTLHLNPISSVHIHHKSVVFLLNSPHPLVWHLKTERLATGVSRLFLVSEGSVVQFSSANFSLTAETEERNFPHGNEHLLNWARKEYGAVTSFTELKIARNIYIKVGEDQVFPPKCNIGKNFLSLNYLAEYLQPKAAEGCVMSSQPQNEEVHIIELITPNSNPYSAFQVDITIDIRPSQEDLEVVKNLILILKCKKSVNWVIKSFDVKGSLKIIAPNSIGFGKESERSMTMTKSIRDDIPSTQGNLVKWALDNGYSPITSYTMAPVANRFHLRLENNAEEMGDEEVHTIPPELRILLDPGALPALQNPPIRGGEGQNGGLPFPFPDISRRVWNEEGEDGLPRPKDPVIPSIQLFPGLREPEEVQGSVDIALSVKCDNEKMIVAVEKDSFQASGYSGMDVTLLDPTCKAKMNGTHFVLESPLNGCGTRPRWSALDGVVYYNSIVIQVPALGDSSGWPDGYEDLESGDNGFPGDMDEGDASLFTRPEIVVFNCSLQQVRNPSSFQEQPHGNITFNMELYNTDLFLVPSQGVFSVPENGHVYVEVSVTKAEQELGFAIQTCFISPYSNPDRMSHYTIIENICPKDESVKFYSPKRVHFPIPQADMDKKRFSFVFKPVFNTSLLFLQCELTLCTKMEKHPQKLPKCVPPDEACTSLDASIIWAMMQNKKTFTKPLAVIHHEAESKEKGPSMKEPNPISPPIFHGLDTLTVMGIAFAAFVIGALLTGALWYIYSHTGETAGRQQVPTSPPASENSSAAHSIGSTQSTPCSSSSTA

SEQ ID NO: 38220 - protein, 850 aa, Homo sapiens
MTSHYVIAIFALMSSCLATAGPEPGALCELSPVSASHPVQALMESFTVLSGCASRGTTGLPQEVHVLNLRTAGQGPGQLQREVTLHLNPISSVHIHHKSVVFLLNSPHPLVWHLKTERLATGVSRLFLVSEGSVVQFSSANFSLTAETEERNFPHGNEHLLNWARKEYGAVTSFTELKIARNIYIKVGEDQVFPPKCNIGKNFLSLNYLAEYLQPKAAEGCVMSSQPQNEEVHIIELITPNSNPYSAFQVDITIDIRPSQEDLEVVKNLILILKCKKSVNWVIKSFDVKGSLKIIAPNSIGFGKESERSMTMTKSIRDDIPSTQGNLVKWALDNGYSPITSYTMAPVANRFHLRLENNEEMGDEEVHTIPPELRILLDPGALPALQNPPIRGGEGQNGGLPFPFPDISRRVWNEEGEDGLPRPKDPVIPSIQLFPGLREPEEVQGSVDIALSVKCDNEKMIVAVEKDSFQASGYSGMDVTLLDPTCKAKMNGTHFVLESPLNGCGTRPRWSALDGVVYYNSIVIQVPALGDSSGWPDGYEDLESGDNGFPGDMDEGDASLFTRPEIVVFNCSLQQVRNPSSFQEQPHGNITFNMELYNTDLFLVPSQGVFSVPENGHVYVEVSVTKAEQELGFAIQTCFISPYSNPDRMSHYTIIENICPKDESVKFYSPKRVHFPIPQADMDKKRFSFVFKPVFNTSLLFLQCELTLCTKMEKHPQKLPKCVPPDEACTSLDASIIWAMMQNKKTFTKPLAVIHHEAESKEKGPSMKEPNPISPPIFHGLDTLTVMGIAFAAFVIGALLTGALWYIYSHTGETAGRQQVPTSPPASENSSAAHSIGSTQSTPCSSSSTA

SEQ ID NO: 38221 - protein, 2096 aa, Homo sapiens
MCSTPGMPAPGASLALRVSFVDVHPDVIPVQLWGLVGERRGEYLRLSREIQEAAATRGQWALGSASASPGELCLVQVGLLWHRCRVVSRQAQESRVFLLDEGRTITAGAGSLAPGRREFFNLPSEVLGCVLAGLVPAGCGAGSGEPPQHWPADAVDFLSNLQGKEVHGCVLDVLLLHRLVLLEVPDVFQQMRELGLARRVPDSLFRSLLERYLTAATASVGSGVPVLSRVPLKQKQPGLDYFYPQLQLGVTEAVVITQVCHPHRIHCQLRSVSQEIHRLSESMAQVYRGSTGTGDENSTSATWEEREESPDKPGSPCASCGLDGHWYRALLLETFRPQRCAQVLHVDYGRKELVSCSSLRYLLPEYFRMPVVTYPCALYGLWDGGRGWSRSQVGDLKTLILGKAVNAKIEFYCSFEHVYYVSLYGEDGINLNRVFGVQSCCLADRVLQSQATEEEEPETSQSQSPAEEVDEEISLPALRSIRLKMNAFYDAQVEFVKNPSEFWIRLRKHNVTFSKLMRRMCGFYSSASKLDGVVLKPEPDDLCCVKWKENGYYRAIVTKLDDKSVDVFLVDRGNSENVDWYDVRMLLPQFRQLPILAVKCTLADIWPLGKTWSQEAVSFFKKTVLHKELVIHILDKQDHQYVIEILDESRTGEENISKVIAQAGYAKYQEFETKENILVNAHSPGHVSNHFTTESNKIPFAKTGEGEQKAKRENKTTSVSKALSDTTVVTNGSTELVVQEKVKRASVYFPLMQNCLEIKPGSSSKGELEVGSTVEVRVSYVENPGYFWCQLTRNIQGLKTLMSDIQYYCKNTAAPHQRNTLACLAKRTVNRQWSRALISGIQSVEHVNVTFVDYGDREMVSVKNIYSISEEFLKVKAQAFRCSLYNLIQPVGQNPFVWDVKAIQAFNEFIDNAWQKNLELKCTIFALASINEELFNIVDLLTPFQSACHFLVEKRLARPVKLQKPLESSVQLHSYFYSTHDMKIGSEELVYITHIDDPWTFYCQLARNANILEQLSCSITQLSKVLLNLKTSPLNPGTLCLAKYTDGNWYRGIVIEKEPKKVFFVDFGNIYVVTSDDLLPIPSDAYDVLLLPMQAVRCSLSDIPDHIPEEVVVWFQETILDKSLKALVVAKDPDGTLIIELYGDNIQISASINKKLGLLSYKDRIRKKESEVLCSTTETLEEKNENMKLPCTEYLSKSVGYKLPNKEILEESYKPQINSSYKELKLLQSLTKTNLVTQYQDSVGNKNSQVFPLTTEKKEEISAETPLKTARVEATLSERKIGDSCDKDLPLKFCEFPQKTIMPGFKTTVYVSHINDLSDFYVQLIEDEAEISHLSERLNSVKTRPEYYVGPPLQRGDMICAVFPEDNLWYRAVIKEQQPNDLLSVQFIDYGNVSVVHTNKIGRLDLVNAILPGLCIHCSLQGFEVPDNKNSKKMMHYFSQRTSEAAIRCEFVKFQDRWEVILADEHGIIADDMISRYALSEKSQVELSTQVIKSASSKSVNKSDIDTSVFLNWYNPEKKMIRAYATVIDGPEYFWCQFADTEKLQCLEVEVQTAGEQVADRRNCIPCPYIGDPCIVRYREDGHYYRALITNICEDYLVSVRLVDFGNIEDCVDPKALWAIPSELLSVPMQAFPCCLSGFNISEGLCSQEGNDYFYEIITEDVLEITILEIRRDVCDIPLAIVDLKSKGKSINEKMEKYSKTGIKSALPYENIDSEIKQTLGSYNLDVGLKKLSNKAVQNKIYMEQQTDELAEITEKDVNIIGTKPSNFRDPKTDNICEGFENPCKDKIDTEELEGELECHLVDKAEFDDKYLITGFNTLLPHANETKEILELNSLEVPLSPDDESKEFLELESIELQNSLVVDEEKGELSPVPPNVPLSQECVTKGAMELFTLQLPLSCEAEKQPELELPTAQLPLDDKMDPLSLGVSQKAQESMCTEDMRKSSCVESFDDQRRMSLHLHGADCDPKTQNEMNICEEEFVEYKNRDAISALMPLFSEEESSDGSKHNNGLPDHISAQLQNTYTLKAFTVGSKCVVWSSLRNTWSKCEILETAEEGTRVLNLSNGMEEIVNPENVWNGIPKLDKSPPEKRGLEVMEI

SEQ ID NO: 38222 - protein, 2066 aa, Homo sapiens
MCSTPGMPAPGASLALRVSFVDVHPDVIPVQLWGLVGERRGEYLRLSREIQEAAATRGQWALGSASASPGELCLVQVGLLWHRCRVVSRQAQESRVFLLDEGRTITAGAGSLAPGRREFFNLPSEVLGCVLAGLVPAGCGAGSGEPPQHWPADAVDFLSNLQGKEVHGCVLDVLLLHRLVLLEVPDVFQQMRELGLARRVPDSLFRSLLERYLTAATASVGSGVPVLSRVPLKQKQPGLDYFYPQLQLGVTEAVVITQVCHPHRIHCQLRSVSQEIHRLSESMAQVYRGSTGTGDENSTSATWEEREESPDKPGSPCASCGLDGHWYRALLLETFRPQRCAQVLHVDYGRKELVSCSSLRYLLPEYFRMPVVTYPCALYGLWDGGRGWSRSQVGDLKTLILGKAVNAKIEFYCSFEHVYYVSLYGEDGINLNRVFGVQSCCLADRVLQSQATEEEEPETSQSQSPAEEVDEEISLPALRSIRLKMNAFYDAQVEFVKNPSEFWIRLRKHNVTFSKLMRRMCGFYSSASKLDGVVLKPEPDDLCCVKWKENGYYRAIVTKLDDKSVDVFLVDRGNSENVDWYDVRMLLPQFRQLPILAVKCTLADIWPLGKTWSQEAVSFFKKTVLHKELVIHILDKQDHQYVIEILDESRTGEENISKVIAQAGYAKYQEFETKENILVNAHSPGHVSNHFTTESNKIPFAKTGEGEQKAKRENKTTSVSKALSDTTVVTNGSTELVVQEKVKRASVYFPLMQNCLEIKPGSSSKGELEVGSTVEVRVSYVENPGYFWCQLTRNIQGLKTLMSDIQYYCKNTAAPHQRNTLACLAKRTVNRQWSRALISGIQSVEHVNVTFVDYGDREMVSVKNIYSISEEFLKVKAQAFRCSLYNLIQPVGQNPFVWDVKAIQAFNEFIDNAWQKNLELKCTIFALASINEELFNIVDLLTPFQSACHFLVEKRLARPVKLQKPLESSVQLHSYFYSTHDMKIGSEELVYITHIDDPWTFYCQLARNANILEQLSCSITQLSKVLLNLKTSPLNPGTLCLAKYTDGNWYRGIVIEKEPKKVFFVDFGNIYVVTSDDLLPIPSDAYDVLLLPMQAVRCSLSDIPDHIPEEVVVWFQETILDKSLKALVVAKDPDGTLIIELYGDNIQISASINKKLGLLSYKDRIRKKESEVLCSTTETLEEKNENMKLPCTEYLSKSVGYKLPNKEILEESYKPQINSSYKELKLLQSLTKTNLVTQYQDSVGNKNSQVFPLTTEKKEEISAETPLKTARVEATLSERKIGDSCDKDLPLKFCEFPQKTIMPGFKTTVYVSHINDLSDFYVQLIEDEAEISHLSERLNSVKTRPEYYVGPPLQRGDMICAVFPEDNLWYRAVIKEQQPNDLLSVQFIDYGNVSVVHTNKIGRLDLVNAILPGLCIHCSLQGFEVPDNKNSKKMMHYFSQRTSEAAIRCEFVKFQDRWEVILADEHGIIADDMISRYALSEKSQVELSTQVIKSASSKSVNKSDIDTSVFLNWYNPEKKMIRAYATVIDGPEYFWCQFADTEKLQCLEVEVQTAGEQVADRRNCIPCPYIGDPCIVRYREDGHYYRALITNICEDYLVSVRLVDFGNIEDCVDPKALWAIPSELLSVPMQAFPCCLSGFNISEGLCSQEGNDYFYEIITEDVLEITILEIRRDVCDIPLAIVDLKSKGKSINEKMEKYSKTGIKSALPYENIDSEIKQTLGSYNLDVGLKKLSNKAVQNKIYMEQQTDELAEITEKDVNIIGTKPSNFRDPKTDNICEGFENPCKDKIDTEELEGELECHLVDKAEFDDKYLITGFNTLLPHANETKEILELNSLEVPLSPDDESKEFLELESIELQNSLVVDEEKGELSPVPPNVPLSQECVTKGAMELFTLQLPLSCEAEKQPELELPTAQLPLDDKMDPLSLGVSQKAQESMCTEDMRKSSCVESFDDQRRMSLHLHGADCDPKTQNEMNICEEEFVEYKNRDAISALMPLFSEEESSDGSKHNNGLPDHISAQLQNTYTLKAFTVGSKCVVWSSLRNTWSKCEILETAEEGTRKRGLEVMEI

SEQ ID NO: 38223 - protein, 230 aa, Homo sapiens
MLFIRMLRRAGQSPACGCWTPVLPVRFLGISPRQIPADANFHSASFSDTDHPRVLITGALGQLGVGLANLLRKRFGKDSVILSDIRKPPDHVFHSGPFIYSDILDYKNLREIVVNNRITWLFHYSALLSAFGEANVSLARAVNITGLHNILDVAAEHNLQLFVPSTIGAFGPTSPRNPTPDLCIQRPRTIYGVSKVHAELMGETMQSRFSMMPQSMANSSATWKPARDCP

SEQ ID NO: 38224 - protein, 180 aa, Homo sapiens
MLFIRMLRRAGQSPACGCWTPVLPVRFLGISPRQIPADANFHSASFSDTDHPRVLITGALGQLGVGLANLLRKRFGKDSVILSDIRKPPDHVFHSGLHNILDVAAEHNLQLFVPSTIGAFGPTSPRNPTPDLCIQRPRTIYGVSKVHAELMGETMQSRFSMMPQSMANSSATWKPARDCP

SEQ ID NO: 38225 - protein, 157 aa, Homo sapiens
MLFIRMLRRAGQSPACGCWTPVLPVRFLGISPRQIPADANFHSASFSDTDHPRVLITGALGQLGVGLANLLRKRFGKDSVILSDIRKPPDHVFHSGLHNILDVAAEHNLQLFVPSTIGAFGPTSPRNPTPDLCIQRPRTIYGVSKVHAELMGEISDA

SEQ ID NO: 38226 - protein, 1843 aa, Homo sapiens
MADTQTQVAPTPTMRMATAEDLPLPPPPALEDLPLPPPKESFSKFHQQRQASELRRLYRHIHPELRKNLAEAVAEDLAEVLGSEEPTEGDVQCMRWIFENWRLDAIGEHERPAAKEPVLCGDVQATSRKFEEGSFANSTDQEPTRPQPGGGDVRAARWLFETKPLDELTGQAKELEATVREPAASGDVQGTRMLFETRPLDRLGSRPSLQEQSPLELRSEIQELKGDVKKTVKLFQTEPLCAIQDAEGAIHEVKAACREEIQSNAVRSARWLFETRPLDAINQDPSQVRVIRGISLEEGARPDVSATRWIFETQPLDAIREILVDEKDFQPSPDLIPPGPDVQQQQHLFETRALDTLKGDEEAGAEAPPKEEVVPGDVRSTLWLFETKPLDAFRDKVQVGHLQRVDPQDGEGHLSSDSSSALPFSQSAPQRDELKGDVKTFKNLFETLPLDSIGQGEVLAHGSPSREEGTDSAGQAQGIGSPVYAMQDSKGRLHALTSVSREQIVGGDVQGYRWMFETQPLDQLGRSPSTIDVVRGITRQEVVAGDVGTARWLFETQPLEMIHQREQQERQKEEGKSQGDPQPEAPPKGDVQTIRWLFETCPMSELAEKQGSEVTDPTAKAEAQSCTWMFKPQPVDRPVGSREQHLQVSQVPAGERQTDRHVFETEPLQASGRPCGRRPVRYCSRVEIPSGQVSRQKEVFQALEAGKKEEQEPRVIAGSIPAGSVHKFTWLFENCPMGSLAAESIQGGNLLEEQPMSPSGNRMQESQETAAEGTLRTLHATPGILHHGGILMEARGPGELCLAKYVLSGTGQGHPYIRKEELVSGELPRIICQVLRRPDVDQQGLLVQEDPTGQLQLKPLRLPTPGSSGNIEDMDPELQQLLACGLGTSVARTGLVMQETEQGLVALTAYSLQPRLTSKASERSSVQLLASCIDKGDLSGLHSLRWEPPADPSPVPASEGAQSLHPTESIIHVPPLDPSMGMGHLRASGATPCPPQAIGKAVPLAGEAAAPAQLQNTEKQEDSHSGQKGMAVLGKSEGATTTPPGPGAPDLLAAMQSLRMATAEAQSLHQQVLNKHKQGPTPTATSNPIQDGLRKAGATQSNIRPGGGSDPRIPAAPRKVSREEQALPRGLPGGWVTIQDGIYTAHPVRTFDPPGGVQLSQREPQSRHRETALSVQAPRPLQGGPGQSTGPGREEPGGCTQMAWGPPGKAMAEVCPGGLQAAETTLKTAPLGRHILASGPQAAGASPHPHNAFVPPPPTLPAAVTGPDFPAGAHRAEDSIQQASEPLKDPLLHSHSSPAGQRTPGGSQTKTPKLDPTMPPKKKPQLPPKPAHLTQSHPPQRLPKPLPLSPSFSSEVGQREHQRGERDTAIPQPAKVPTTVDQGHIPLARCPSGHSQPSLQHGLSTTAPRPTKNQATGSNAQSSEPPKLNALNHDPTSPQWGPGPSGEQPMEGSHQGAPESPDSLQRNQKELQGLLNQVQALEKEAASSVDVQALRRLFEAVPQLGGAAPQAPAAHQKPEASVEQAFGELTRVSTEVAQLKEQTLARLLDIEEAVHKALSSMSSLQPEASARGHFQGPPKDHSAHKISVTVSSSARPSGSGQEVGGQTAVKNQAKVECHTEAQSQVKIRNHTEARGHTASTAPSTRRQETSREYLCPPRVLPSSRDSPSSPTFISIQSATRKPLETPSFKGNPDVSVKSTQLAQDIGQALLHQKGVQDKTGKKDITQCSVQPEPAPPSASPLPRGWQKSVLELQTGPGSSQHYGAMRTVTEQYEEVDQFGNTVLMSSTTVTEQAEPPRNPGSHLGLHASPLLRQFLHSPAGFSSDLTEAETVQVSCSYSQPAAQ

SEQ ID NO: 38227 - protein, 1121 aa, Homo sapiens
MADTQTQVAPTPTMRMATAEDLPLPPPPALEDLPLPPPKESFSKFHQQRQASELRRLYRHIHPELRKNLAEAVAEDLAEVLGSEEPTEGDVQCMRWIFENWRLDAIGEHERPAAKEPVLCGDVQATSRKFEEGSFANSTDQEPTRPQPGGGDVRAARWLFETKPLDELTGQAKELEATVREPAASGDVQGTRMLFETRPLDRLGSRPSLQEQSPLELRSEIQELKGDVKKTVKLFQTEPLCAIQDAEGAIHEVKAACREEIQSNAVRSARWLFETRPLDAINQDPSQVRVIRGISLEEGARPDVSATRWIFETQPLDAIREILVDEKDFQPSPDLIPPGPDVQQQQHLFETRALDTLKGDEEAGAEAPPKEEVVPGDVRSTLWLFETKPLDAFRDKVQVGHLQRVDPQDGEGHLSSDSSSALPFSQSAPQRDELKGDVKTFKNLFETLPLDSIGQGEVLAHGSPSREEGTDSAGQAQGIGSPVYAMQDSKGRLHALTSVSREQIVGGDVQGYRWMFETQPLDQLGRSPSTIDVVRGITRQEVVAGDVGTARWLFETQPLEMIHQREQQERQKEEGKSQGDPQPEAPPKGDVQTIRWLFETCPMSELAEKQGSEVTDPTAKAEAQSCTWMFKPQPVDRPVGSREQHLQVSQVPAGERQTDRHVFETEPLQASGRPCGRRPVRYCSRVEIPSGQVSRQKEVFQALEAGKKEEQEPRVIAGSIPAGSVHKFTWLFENCPMGSLAAESIQGGNLLEEQPMSPSGNRMQESQETAAEGTLRTLHATPGILHHGGILMEARGPGELCLAKYVLSGTGQGHPYIRKEELVSGELPRIICQVLRRPDVDQQGLLVQEDPTGQLQLKPLRLPTPGSSGNIEDMDPELQQLLACGLGTSVARTGLVMQETEQGLVALTAYSLQPRLTSKASERSSVQLLASCIDKGDLSGLHSLRWEPPADPSPVPASEGAQSLHPTESIIHVPPLDPSMGMGHLRASGATPCPPQAIGKAVPLAGEAAAPAQLQNTEKQEDSHSGQKGMAVLGKSEGATTTPPGPGAPDLLAAMQSLRMATAEAQSLHQQVLNKHKQGPTPTATSNPIQDGLRKAGATQSNIRPGGGSDPRIPAAPRKLL

SEQ ID NO: 38228 - protein, 526 aa, Homo sapiens
MPPKKKPQLPPKPAHLTQSHPPQRLPKPLPLSPSFSSEVGQREHQRGERDTAIPQPAKVPTTVDQGHIPLARCPSGHSQPSLQHGLSTTAPRPTKNQATGSNAQSSEPPKLNALNHDPTSPQWGPGPSGEQPMEGSHQGAPESPDSLQRNQKELQGLLNQVQALEKEAASSVDVQALRRLFEAVPQLGGAAPQAPAAHQKPEASVEQAFGELTRVSTEVAQLKEQTLARLLDIEEAVHKALSSMSSLQPEASARGHFQGPPKDHSAHKISVTVSSSARPSGSGQEVGGQTAVKNQAKVECHTEAQSQVKIRNHTEARGHTASTAPSTRRQETSREYLCPPRVLPSSRDSPSSPTFISIQSATRKPLETPSFKGNPDVSVKSTQLAQDIGQALLHQKGVQDKTGKKDITQCSVQPEPAPPSASPLPRGWQKSVLELQTGPGSSQHYGAMRTVTEQYEEVDQFGNTVLMSSTTVTEQAEPPRNPGSHLGLHASPLLRQFLHSPAGFSSDLTEAETVQVSCSYSQPAAQ

SEQ ID NO: 38229 - protein, 311 aa, Homo sapiens
MEDKNGAPHGAPHSDSPLGFSHAAPEEDTPAPELAPEAPEPPEEPRLGVLTVTDTTPDSMRLSWSVAQGPFDSFVVQYEDTNGQPQALLVDGDQSKILISGLEPSTPYRFLLYGLHEGKRLGPLSAEGTTGLAPAGQTSEESRPRLSQLSVTDVTTSSLRLNWEAPPGAFDSFLLRFGVPSPSTLEPHPRPLLQRELMVPGTRHSAVLRDLRSGTLYSLTLYGLRGPHKADSIQGTARTLSPVLESPRDLQFSEIRETSAKVNWMPPPSRADSFKVSYQLADGGEPQSVQVDGRARTQKLQFLTVPHSCVH

SEQ ID NO: 38230 - protein, 509 aa, Homo sapiens
MVLWILWRPFGFSGRFLKLESHSITESKSLIPVAWTSLTQMLLEAPGIFLLGQRKRFSTMPETETHERETELFSPPSDVRGMTKLDRTAFKKTVNIPVLKVRKEIVSKLMRSLKRAALQRPGIRRVIEDPEDKESRLIMLDPYKIFTHDSFEKAELSVLEQLNVSPQISKYNLELTYEHFKSEEILRAVLPEGQDVTSGFSRIGHIAHLNLRDHQLSFKHLIGQVMIDKNPGITSAVNKINNIDNMYRNFQMEVLSGEQNMMTKVRENNYTYEFDFSKVYWNPRLSTEHSRITELLKPGDVLFDVFAGVGPFAIPVAKKNCTVFANDLNPESHKWLLYNCKLNKVDQKVKVFNLDGKDFLQGPVKEELMQLLGLSKERKPSVHVVMNLPAKAIEFLSAFKWLLDGQPCSSEFLPIVHCYSFSKDANPAEDVRQRAGAVLGISLEACSSVHLVRNVAPNKEMLCITFQIPASVLYKNQTRNPENHEDPPLKRQRTAEAFSDEKTQIVSNT

SEQ ID NO: 38231 - protein, 199 aa, Homo sapiens
MTLHPSPITCEFLFSTALISPKMCLSHLENMPLSHSRTQGAQRSSWKLWLFCSIVMLLFLCSFSWLIFIFLQLETAKEPCMAKFGPLPSKWQMASSEPPCVNKVSDWKLEILQNGLYLIYGQVAPNANYNDVAPFEVRLYKNKDMIQTLTNKSKIQNVGGTYELHVGDTIDLIFNSEHQVLKNNTYWGIILLANPQFIS

SEQ ID NO: 38232 - protein, 557 aa, Homo sapiens
MAYSEEHKGMPCGFIRQNSGNSISLDFEPSIEYQFVERLEERYKCAFCHSVLHNPHQTGCGHRFCQHCILSLRELNTVPICPVDKEVIKSQEVFKDNCCKREVLNLYVYCSNAPGCNAKVILGRYQDHLQQCLFQPVQCSNEKCREPVLRKDLKEHLSASCQFRKEKCLYCKKDVVVINLQNHEENLCPEYPVFCPNNCAKIILKTEVDEHLAVCPEAEQDCPFKHYGCAVTDKRRNLQQHEHSALREHMRLVLEKNVQLEEQISDLHKSLEQKESKIQQLAETIKKLEKEFKQFAQLFGKNGSFLPNIQVFASHIDKSAWLEAQVHQLLQMVNQQQNKFDLRPLMEAVDTVKQKITLLENNDQRLAVLEEETNKHDTHINIHKAQLSKNEERFKLLEGTCYNGKLIWKVTDYKMKKREAVDGHTVSIFSQSFYTSRCGYRLCARAYLNGDGSGRGSHLSLYFVVMRGEFDSLLQWPFRQRVTLMLLDQSGKKNIMETFKPDPNSSSFKRPDGEMNIASGCPRFVAHSVLENAKNAYIKDDTLFLKVAVDLTDLEDL

SEQ ID NO: 38233 - protein, 568 aa, Homo sapiens
MAYSEEHKGMPCGFIRQNSGNSISLDFEPSIEYQFVERLEERYKCAFCHSVLHNPHQTGCGHRFCQHCILSLRELNTVPICPVDKEVIKSQEVFKDNCCKREVLNLYVYCSNAPGCNAKVILGRYQQVPLACCYLLQDHLQQCLFQPVQCSNEKCREPVLRKDLKEHLSASCQFRKEKCLYCKKDVVVINLQNHEENLCPEYPVFCPNNCAKIILKTEVDEHLAVCPEAEQDCPFKHYGCAVTDKRRNLQQHEHSALREHMRLVLEKNVQLEEQISDLHKSLEQKESKIQQLAETIKKLEKEFKQFAQLFGKNGSFLPNIQVFASHIDKSAWLEAQVHQLLQMVNQQQNKFDLRPLMEAVDTVKQKITLLENNDQRLAVLEEETNKHDTHINIHKAQLSKNEERFKLLEGTCYNGKLIWKVTDYKMKKREAVDGHTVSIFSQSFYTSRCGYRLCARAYLNGDGSGRGSHLSLYFVVMRGEFDSLLQWPFRQRVTLMLLDQSGKKNIMETFKPDPNSSSFKRPDGEMNIASGCPRFVAHSVLENAKNAYIKDDTLFLKVAVDLTDLEDL

SEQ ID NO: 38234 - protein, 451 aa, Homo sapiens
MAYSEEHKGMPCGFIRQNSGNSISLDFEPSIEYQFVERLEERYKCAFCHSVLHNPHQTGCGHRFCQHCILSLRELNTVPICPVDKEVIKSQEVFKDNCCKREVLNLYVYCSNAPGCNAKVILGRYQDKRRNLQQHEHSALREHMRLVLEKNVQLEEQISDLHKSLEQKESKIQQLAETIKKLEKEFKQFAQLFGKNGSFLPNIQVFASHIDKSAWLEAQVHQLLQMVNQQQNKFDLRPLMEAVDTVKQKITLLENNDQRLAVLEEETNKHDTHINIHKAQLSKNEERFKLLEGTCYNGKLIWKVTDYKMKKREAVDGHTVSIFSQSFYTSRCGYRLCARAYLNGDGSGRGSHLSLYFVVMRGEFDSLLQWPFRQRVTLMLLDQSGKKNIMETFKPDPNSSSFKRPDGEMNIASGCPRFVAHSVLENAKNAYIKDDTLFLKVAVDLTDLEDL

SEQ ID NO: 38235 - protein, 953 aa, Homo sapiens
MALVFQFGQPVRAQPLPGLCHGKLIRTNACDVCNSTDLPEVEIISLLEEQLPHYKLRADTIYGYDHDDWLHTPLISPDANIDLTTEQIEETLKYFLLCAERVGQMTKTYNDIDAVTRLLEEKERDLELAARIGQSLLKKNKTLTERNELLEEQVEHIREEVSQLRHELSMKDELLQFYTSAAEESEPESVCSTPLKRNESSSSVQNYFHLDSLQKKLKDLEEENVVLRSEASQLKTETITYEEKEQQLVNDCVKELRDANVQIASISEELAKKTEDAARQQEEITHLLSQIVDLQKKAKACAVENEELVQHLGAAKDAQRQLTAELRELEDKYAECMEMLHEAQEELKNLRNKTMPNTTSRRYHSLGLFPMDSLAAEIEGTMRKELQLEEAESPDITHQKRVFETVRNINQVVKQRSLTPSPMNIPGSNQSSAMNSLLSSCVSTPRSSFYGSDIGNVVLDNKTNSIILETEAADLGNDERSKKPGTPGTPGSHDLETALRRLSLRRENYLSERRFFEEEQERKLQELAEKGELRSGSLTPTESIMSLGTHSRFSEFTGFSGMSFSSRSYLPEKLQIVKPLEGSATLHHWQQLAQPHLGGILDPRPGVVTKGFRTLDVDLDEVYCLNDFEEDDTGDHISLPRLATSTPVQHPETSAHHPGKCMSQTNSTFTFTTCRILHPSDELTRVTPSLNSAPTPACGSTSHLKSTPVATPCTPRRLSLAESFTNTRESTTTMSTSLGLVWLLKERGISAAVYDPQSWDRAGRGSLLHSYTPKMAVIPSTPPNSPMQTPTSSPPSFEFKCTSPPYDNFLASKPASSILREVREKNVRSSESQTDVSVSNLNLVDKVRRFGVAKVVNSGRAHVPTLTEEQGPLLCGPPGPAPALVPRGLVPEGLPLRCPTVTSAIGGLQLNSGIRRNRSFPTMVGSSMQMKAPVTLTSGILMGAKLSKQTSLR

SEQ ID NO: 38236 - protein, 686 aa, Homo sapiens
MSLRDKGGEEECFEYDCQDEERKPTHRQHDTQDLLEEVLCAERVGQMTKTYNDIDAVTRLLEEKERDLELAARIGQSLLKKNKTLTERNELLEEQVEHIREEVSQLRHELSMKDELLQFYTSAAEESEPESVCSTPLKRNESSSSVQNYFHLDSLQKKLKDLEEENVVLRSEASQLKTETITYEEKEQQLVNDCVKELRDANVQIASISEELAKKTEDAARQQEEITHLLSQIVDLQKKAKACAVENEELVQHLGAAKDAQRQLTAELRELEDKYAECMEMLHEAQEELKNLRNKTMPNTTSRRYHSLGLFPMDSLAAEIEGTMRKELQLEEAESPDITHQKRVFETVRNINQVVKQRSLTPSPMNIPGSNQSSAMNSLLSSCVSTPRSSFYGSDIGNVVLDNKTNSIILETEAADLGNDERSKKPGTPGTPGSHDLETALRRLSLRRENYLSERRFFEEEQERKLQELAEKGELRSGSLTPTESIMSLGTHSRFSEFTGFSGMSFSSRSYLPEKLQIVKPLEGSATLHHWQQLAQPHLGGILDPRPGVVTKGFRTLDVDLDEVYCLNDFEEDDTGDHISLPRLATSTPVQHPETSGERSQARVTVSGSRSYPSRPQASPEEMQEPPAATEEEEEEEEEEGSGEGTTISPVNLAPFPEAEFWAILTSVPGTIRSGSLSVASARLCG

SEQ ID NO: 38237 - protein, 556 aa, Homo sapiens
MQKFIEADYYELDWYYEECSDVLCAERVGQMTKTYNDIDAVTRLLEEKERDLELAARIGQSLLKKNKTLTERNELLEEQVEHIREEVSQLRHELSMKDELLQFYTSAAEESEPESVCSTPLKRNESSSSVQNYFHLDSLQKKLKDLEEENVVLRSEASQLKTETITYEEKEQQLVNDCVKELRDANVQIASISEELAKKTEDAARQQEEITHLLSQIVDLQKKAKACAVENEELVQHLGAAKDAQRQLTAELRELEDKYAECMEMLHEAQEELKNLRNKTMPNTTSRRYHSLGLFPMDSLAAEIEGTMRKELQLEEAESPDITHQKRVFETVRNINQVVKQRSLTPSPMNIPGSNQSSAMNSLLSSCVSTPRSSFYGSDIGNVVLDNKTNSIILETEAADLGNDERSKKPGTPGTPGSHDLETALRRLSLRRENYLSERRFFEEEQERKLQELAEKGELRSGSLTPTESIMSLGTHSRFSEFTGFSGMSFSSRSYLPEKLQIVKPLEGDHAGPRPLSVLLGDSLWSLIHLRKAGHLCHAYSFFFRDSHPRCWFEFL

SEQ ID NO: 38238 - protein, 577 aa, Homo sapiens
MEGTAVAVFEILRFLIIHWKCDIDVSKGALLEGQLVISIEGLNSKHQANALHCVTTVASAGSLFGGMVLKKFLKEIQSILPGISAKLTWTSEEGSYSQDMTGVTPFQMIFEVDEKPRTLMTDCLVIKHFLRKIIMVHPKVRFHFSVKVNGILSTEIFGVENEPTLNLGNGIALLVDSQHYVRPNFGTIESHCSRIHPVLGHPVMLFIPEDVAGMDLLGELILTPAAALCPSPKVSSNQLNRISSVSIFLYGPLGLPLILSTWEQPMTTFFKDTSSLVDWKKYHLCMIPNLDLNLDRDLVLPDVSYQVESSEEDQSQTMDPQGQTLLLFLFVDFHSAFPVQQMEIWGVYTLLTTHLNAILVESHSVVQGSIQFTVDKVLEQHHQAAKAQQKLQASLSVAVNSIMSILTGSTRSSFRKMCLQTLQAADTQEFRTKLHKVFREITQHQFLHHCSCEVKQQLTLEKKDSAQGTEDAPDNSSLELLADTSGQAENKRLKRGSPRIEEMRALRSARAPSPSEAAPRRPEATAAPLTPRGREHREAHGRALAPGRASLGSRLEDVLWLQEVSNLSEWLSPSPGP

SEQ ID NO: 38239 - protein, 677 aa, Homo sapiens
MGSRCRAWAWTRAWALAEFQARAEEGAAAAAAAAGGYPSTGRCRCSLRGMEGTAVAVFEILRFLIIHWKCDIDVSKGALLEGQLVISIEGLNSKHQANALHCVTTRWSLTLLPRPECSGAVSAHCNLHLPGSSDSHASVPRVAGITDAHHHAWLIMVASAGSLFGGMVLKKFLKEIQSILPGISAKLTWTSEEGSYSQDMTGVTPFQMIFEVDEKPRTLMTDCLVIKHFLRKIIMVHPKVRFHFSVKVNGILSTEIFGVENEPTLNLGNGIALLVDSQHYVRPNFGTIESHCSRIHPVLGHPVMLFIPEDVAGMDLLGELILTPAAALCPSPKVSSNQLNRISSVSIFLYGPLGLPLILSTWEQPMTTFFKDTSSLVDWKKYHLCMIPNLDLNLDRDLVLPDVSYQVESSEEDQSQTMDPQGQTLLLFLFVDFHSAFPVQQMEIWGVYTLLTTHLNAILVESHSVVQGSIQFTVDKVLEQHHQAAKAQQKLQASLSVAVNSIMSILTGSTRSSFRKMCLQTLQAADTQEFRTKLHKVFREITQHQFLHHCSCEVKQQLTLEKKDSAQGTEDAPDNSSLELLADTSGQAENKRLKRGSPRIEEMRALRSARAPSPSEAAPRRPEATAAPLTPRGREHREAHGRALAPGRASLGSRLEDVLWLQEVSNLSEWLSPSPGP

SEQ ID NO: 38240 - protein, 591 aa, Homo sapiens
MEGTAVAVFEILRFLIIHWKCDIDVSKGALLEGQLVISIEGLNSKHQANALHCVTTRWSLTLLPRPECSGAVSAHCNLHLPGSSDSHASVPRVAGITDAHHHAWLIMVASAGSLFGGMVLKKFLKEIQSILPGISAKLTWTSEEGSYSQDMTGVTPFQMIFEVDEKPRTLMTDCLVIKHFLRKIIMVHPKVRFHFSVKVNGILSTEIFGVENEPTLNLGNGIALLVDSQHYVRPNFGTIESHCSRIHPVLGHPVMLFIPEDVAGMDLLGELILTPAAALCPSPKVSSNQLNRISSVSIFLYGPLGLPLILSTWEQPMTTFFKDTSSLVDWKKYHLCMIPNLDLNLDRDLVLPDVSYQVESSEEDQSQTMDPQGQTLLLFLFVDFHSAFPVQQMEIWGVYTLLTTHLNAILVESHSVVQGSIQFTVDKVLEQHHQAAKAADTQEFRTKLHKVFREITQHQFLHHCSCEVKQQLTLEKKDSAQGTEDAPDNSSLELLADTSGQAENKRLKRGSPRIEEMRALRSARAPSPSEAAPRRPEATAAPLTPRGREHREAHGRALAPGRASLGSRLEDVLWLQEVSNLSEWLSPSPGP

SEQ ID NO: 38241 - protein, 1979 aa, Homo sapiens
MSSWLGGLGSGLGQSLGQVGGSLASLTGQISNFTKDMLMEGTEEVEAELPDSRTKEIEAIHAILRSENERLKKLCTDLEEKHEASEIQIKQQSTSYRNQLQQKEVEISHLKARQIALQDQLLKLQSAAQSVPSGAGVPATTASSSFAYGISHHPSAFHDDDMDFGDIISSQQEINRLSNEVSRLESEVGHWRHIAQTSKAQGTDNSDQSEICKLQNIIKELKQNRSQEIDDHQHEMSVLQNAHQQKLTEISRRHREELSDYEERIEELENLLQQGGSGVIETDLSKIYEMQKTIQVLQIEKVESTKKMEQLEDKIKDINKKLSSAENDRDILRREQEQLNVEKRQIMEECENLKLECSKLQPSAVKQSDTMTEKERILAQSASVEEVFRLQQALSDAENEIMRLSSLNQDNSLAEDNLKLKMRIEVLEKEKSLLSQEKEELQMSLLKLNNEYEVIKSTATRDISLDSELHDLRLNLEAKEQELNQSISEKETLIAEIEELDRQNQEATKHMILIKDQLSKQQNEGDSIISKLKQDLNDEKKRVHQLEDDKMDITKELDVQKEKLIQSEVALNDLHLTKQKLEDKVENLVDQLNKSQESNVSIQKENLELKEHIRQNEEELSRIRNELMQSLNQDSNSNFKDTLLKEREAEVRNLKQNLSELEQLNENLKKVAFDVKMENEKLVLACEDVRHQLEECLAGNNQLSLEKNTIVETLKMEKGEIEAELCWAKKRLLEEANKYEKTIEELSNARNLNTSALQLEHEHLIKLNQKKDMEIAELKKNIEQMDTDHKETKDVLSSSLEEQKQLTQLINKKEIFIEKLKERSSKLQEELDKYSQALRKNEILRQTIEEKDRSLGSMKEENNHLQEELERLREEQSRTAPVADPKTLDSVTELASEVSQLNTIKEHLEEEIKHHQKIIEDQNQSKMQLLQSLQEQKKEMDEFRYQHEQMNATHTQLFLEKDEEIKSLQKTIEQIKTQLHEERQDIQTDNSDIFQETKVQSLNIENGSEKHDLSKAETERLVKGIKERELEIKLLNEKNISLTKQIDQLSKDEVGKLTQIIQQKDLEIQALHARISSTSHTQDVVYLQQQLQAYAMEREKVFAVLNEKTRENSHLKTEYHKMMDIVAAKEAALIKLQDENKKLSTRFESSGQDMFRETIQNLSRIIREKDIEIDALSQKCQTLLAVLQTSSTGNEAGGVNSNQFEELLQERDKLKQQVKKMEEWKQQVMTTVQNMQHESAQLQEELHQLQAQVLVDSDNNSKLQVDYTGLIQSYEQNETKLKNFGQELAQVQHSIGQLCNTKDLLLGKLDIISPQLSSASLLTPQSAECLRASKSEVLSESSELLQQELEELRKSLQEKDATIRTLQENNHRLSDSIAATSELERKEHEQTDSEIKQLKEKQDVLQKLLKEKDLLIKAKSDQLLSSNENFTNKVNENELLRQAVTNLKERILILEMDIGKLKGENEKIVETYRGKETEYQALQETNMKFSMMLREKEFECHSMKEKALAFEQLLKEKEQGKTGELNQLLNAVKSMQEKTVVFQQERDQVMLALKQKQMENTALQNEVQRLRDKEFRSNQELERLRNHLLESEDSYTREALAAEDREAKLRKKVTVLEEKLVSSSNAMENASHQASVQVESLQEQLNVVSKQRDETALQLSVSQEQVKQYALSLANLQMVLEHFQQEEKAMYSAELEKQKQLIAEWKKNAENLEGKVISLQECLDEANAALDSASRLTEQLDVKEEQIEELKRQNELRQEMLDDVQKKLMSLANSSEGKVDKVLMRNLFIGHFHTPKNQRHEVLRLMGSILGVRREEMEQLFHDDQGGVTRWMTGWLGGGSKSVPNTPLRPNQQSVVNSSFSELFVKFLETESHPSIPPPKLSVHDMKPLDSPGRRKRDTNAPESFKDTAESRSGRRTDVNPFLAPRSAAVPLINPAGLGPGGPGHLLLKPISDVLPTFTPLPALPDNSAGVVLKDLLKQ

SEQ ID NO: 38242 - protein, 1950 aa, Homo sapiens
MSSWLGGLGSGLGQSLGQVGGSLASLTGQISNFTKDMLMEGTEEVEAELPDSRTKEIEAIHAILRSENERLKKLCTDLEEKHEASEIQIKQQSTSYRNQLQQKEVEISHLKARQIALQDQLLKLQSAAQSVPSGAGVPATTASSSFAYGISHHPSAFHDDDMDFGDIISSQQEINRLSNEVSRLESEVGHWRHIAQTSKAQGTDNSDQSEICKLQNIIKELKQNRSQEIDDHQHEMSVLQNAHQQKLTEISRRHREELSDYEERIEELENLLQQGGSGVIETDLSKIYEMQKTIQVLQIEKVESTKKMEQLEDKIKDINKKLSSAENDRDILRREQEQLNVEKRQIMEECENLKLECSKLQPSAVKQSDTMTEKERILAQSASVEEVFRLQQALSDAENEIMRLSSLNQEELQMSLLKLNNEYEVIKSTATRDISLDSELHDLRLNLEAKEQELNQSISEKETLIAEIEELDRQNQEATKHMILIKDQLSKQQNEGDSIISKLKQDLNDEKKRVHQLEDDKMDITKELDVQKEKLIQSEVALNDLHLTKQKLEDKVENLVDQLNKSQESNVSIQKENLELKEHIRQNEEELSRIRNELMQSLNQDSNSNFKDTLLKEREAEVRNLKQNLSELEQLNENLKKVAFDVKMENEKLVLACEDVRHQLEECLAGNNQLSLEKNTIVETLKMEKGEIEAELCWAKKRLLEEANKYEKTIEELSNARNLNTSALQLEHEHLIKLNQKKDMEIAELKKNIEQMDTDHKETKDVLSSSLEEQKQLTQLINKKEIFIEKLKERSSKLQEELDKYSQALRKNEILRQTIEEKDRSLGSMKEENNHLQEELERLREEQSRTAPVADPKTLDSVTELASEVSQLNTIKEHLEEEIKHHQKIIEDQNQSKMQLLQSLQEQKKEMDEFRYQHEQMNATHTQLFLEKDEEIKSLQKTIEQIKTQLHEERQDIQTDNSDIFQETKVQSLNIENGSEKHDLSKAETERLVKGIKERELEIKLLNEKNISLTKQIDQLSKDEVGKLTQIIQQKDLEIQALHARISSTSHTQDVVYLQQQLQAYAMEREKVFAVLNEKTRENSHLKTEYHKMMDIVAAKEAALIKLQDENKKLSTRFESSGQDMFRETIQNLSRIIREKDIEIDALSQKCQTLLAVLQTSSTGNEAGGVNSNQFEELLQERDKLKQQVKKMEEWKQQVMTTVQNMQHESAQLQEELHQLQAQVLVDSDNNSKLQVDYTGLIQSYEQNETKLKNFGQELAQVQHSIGQLCNTKDLLLGKLDIISPQLSSASLLTPQSAECLRASKSEVLSESSELLQQELEELRKSLQEKDATIRTLQENNHRLSDSIAATSELERKEHEQTDSEIKQLKEKQDVLQKLLKEKDLLIKAKSDQLLSSNENFTNKVNENELLRQAVTNLKERILILEMDIGKLKGENEKIVETYRGKETEYQALQETNMKFSMMLREKEFECHSMKEKALAFEQLLKEKEQGKTGELNQLLNAVKSMQEKTVVFQQERDQVMLALKQKQMENTALQNEVQRLRDKEFRSNQELERLRNHLLESEDSYTREALAAEDREAKLRKKVTVLEEKLVSSSNAMENASHQASVQVESLQEQLNVVSKQRDETALQLSVSQEQVKQYALSLANLQMVLEHFQQEEKAMYSAELEKQKQLIAEWKKNAENLEGKVISLQECLDEANAALDSASRLTEQLDVKEEQIEELKRQNELRQEMLDDVQKKLMSLANSSEGKVDKVLMRNLFIGHFHTPKNQRHEVLRLMGSILGVRREEMEQLFHDDQGGVTRWMTGWLGGGSKSVPNTPLRPNQQSVVNSSFSELFVKFLETESHPSIPPPKLSVHDMKPLDSPGRRKRDTNAPESFKDTAESRSGRRTDVNPFLAPRSAAVPLINPAGLGPGGPGHLLLKPISDVLPTFTPLPALPDNSAGVVLKDLLKQ

SEQ ID NO: 38243 - protein, 358 aa, Homo sapiens
MNFTVGFKPLLGDAHSMDNLEKQLICPICLEMFSKPVVILPCQHNLCRKCANDVFQASNPLWQSRGSTTVSSGGRFRCPSCRHEVVLDRHGVYGLQRNLLVENIIDIYKQESSRPLHSKAEQHLMCEEHEEEKINIYCLSCEVPTCSLCKVFGAHKDCEVAPLPTIYKRQKSELSDGIAMLVAGNDRVQAVITQMEEVCQTIEDNSRRQKQLLNQRFESLCAVLEERKGELLQALAREQEEKLQRVRGLIRQYGDHLEASSKLVESAIQSMEEPQMALYLQQAKELINKVGAMSKVELAGRPEPGYESMEQFTVRVEHVAEMLRTIDFQPGASGEEEEVAPDGEEGSAGPEEERPDGP

SEQ ID NO: 38244 - protein, 400 aa, Homo sapiens
MNFTVGFKPLLGDAHSMDNLEKQLICPICLEMFSKPVVILPCQHNLCRKCANDVFQASNPLWQSRGSTTVSSGGRFRCPSCRHEVVLDRHGVYGLQRNLLVENIIDIYKQESSRPLHSKAEQHLMCEEHEEEKINIYCLSCEVPTCSLCKVFGAHKDCEVAPLPTIYKRQKKQDLTLLPRLECSGTNTTYCSLDLPSSSDPPILASQNTKIIDSELSDGIAMLVAGNDRVQAVITQMEEVCQTIEDNSRRQKQLLNQRFESLCAVLEERKGELLQALAREQEEKLQRVRGLIRQYGDHLEASSKLVESAIQSMEEPQMALYLQQAKELINKVGAMSKVELAGRPEPGYESMEQFTVRVEHVAEMLRTIDFQPGASGEEEEVAPDGEEGSAGPEEERPDGP

SEQ ID NO: 38245 - protein, 298 aa, Homo sapiens
MSDIEEVVEEYEEEEQEEAAVEEEEDWREDEDEQEEAAEEDAEAEAETEETRAEEDEEEEEAKEAEDGPMEESKPKPRSFMPNLVPPKIPDGERVDFDDIHRKRMEKDLNELQALIEAHFENRKKEEEELVSLKDRIERRRAERAEQQRIRNEREKERQNRLAEERARREEEENRRKAEDEARKKKALSNMMHFGGYIQKQAQTERKSGKRQTEREKKKKILAERRKVLAIDHLNEDQLREKAKELWQSIYNLEAEKFDLQEKFKQQKYEINVLRNRINDNQKVSKTRGKAKVTGRWK

SEQ ID NO: 38246 - protein, 297 aa, Homo sapiens
MSDIEEVVEEYEEEEQEEAAVEEEDWREDEDEQEEAAEEDAEAEAETEETRAEEDEEEEEAKEAEDGPMEESKPKPRSFMPNLVPPKIPDGERVDFDDIHRKRMEKDLNELQALIEAHFENRKKEEEELVSLKDRIERRRAERAEQQRIRNEREKERQNRLAEERARREEEENRRKAEDEARKKKALSNMMHFGGYIQKQAQTERKSGKRQTEREKKKKILAERRKVLAIDHLNEDQLREKAKELWQSIYNLEAEKFDLQEKFKQQKYEINVLRNRINDNQKVSKTRGKAKVTGRWK

SEQ ID NO: 38247 - protein, 297 aa, Homo sapiens
MSDIEEVVEEYEEEEQEEAAVEEEEDWREDEDEQEEAAEEDAEAEAETEETRAEDEEEEEAKEAEDGPMEESKPKPRSFMPNLVPPKIPDGERVDFDDIHRKRMEKDLNELQALIEAHFENRKKEEEELVSLKDRIERRRAERAEQQRIRNEREKERQNRLAEERARREEEENRRKAEDEARKKKALSNMMHFGGYIQKQAQTERKSGKRQTEREKKKKILAERRKVLAIDHLNEDQLREKAKELWQSIYNLEAEKFDLQEKFKQQKYEINVLRNRINDNQKVSKTRGKAKVTGRWK

SEQ ID NO: 38248 - protein, 296 aa, Homo sapiens
MSDIEEVVEEYEEEEQEEAAVEEEDWREDEDEQEEAAEEDAEAEAETEETRAEDEEEEEAKEAEDGPMEESKPKPRSFMPNLVPPKIPDGERVDFDDIHRKRMEKDLNELQALIEAHFENRKKEEEELVSLKDRIERRRAERAEQQRIRNEREKERQNRLAEERARREEEENRRKAEDEARKKKALSNMMHFGGYIQKQAQTERKSGKRQTEREKKKKILAERRKVLAIDHLNEDQLREKAKELWQSIYNLEAEKFDLQEKFKQQKYEINVLRNRINDNQKVSKTRGKAKVTGRWK

SEQ ID NO: 38249 - protein, 297 aa, Homo sapiens
MSDIEEVVEEYEEEEQEEAAVEEEEDWREDEDEQEEAAEEDAEAEAETEETRAEEDEEEEEAKEAEDGPMEESKPKPRSFMPNLVPPKIPDGERVDFDDIHRKRMEKDLNELQALIEAHFENRKKEEEELVSLKDRIERRRAERAEQQRIRNEREKERQNRLAEERARREEEENRRKAEDEARKKKALSNMMHFGGYIQKAQTERKSGKRQTEREKKKKILAERRKVLAIDHLNEDQLREKAKELWQSIYNLEAEKFDLQEKFKQQKYEINVLRNRINDNQKVSKTRGKAKVTGRWK

SEQ ID NO: 38250 - protein, 288 aa, Homo sapiens
MSDIEEVVEEYEEEEQEEAAVEEQEEAAEEDAEAEAETEETRAEEDEEEEEAKEAEDGPMEESKPKPRSFMPNLVPPKIPDGERVDFDDIHRKRMEKDLNELQALIEAHFENRKKEEEELVSLKDRIERRRAERAEQQRIRNEREKERQNRLAEERARREEEENRRKAEDEARKKKALSNMMHFGGYIQKQAQTERKSGKRQTEREKKKKILAERRKVLAIDHLNEDQLREKAKELWQSIYNLEAEKFDLQEKFKQQKYEINVLRNRINDNQKVSKTRGKAKVTGRWK

SEQ ID NO: 38251 - protein, 283 aa, Homo sapiens
MSDIEEVVEEYEEEEQEEQEEAAEEDAEAEAETEETRAEEDEEEEEAKEAEDGPMEESKPKPRSFMPNLVPPKIPDGERVDFDDIHRKRMEKDLNELQALIEAHFENRKKEEEELVSLKDRIERRRAERAEQQRIRNEREKERQNRLAEERARREEEENRRKAEDEARKKKALSNMMHFGGYIQKQAQTERKSGKRQTEREKKKKILAERRKVLAIDHLNEDQLREKAKELWQSIYNLEAEKFDLQEKFKQQKYEINVLRNRINDNQKVSKTRGKAKVTGRWK

SEQ ID NO: 38252 - protein, 293 aa, Homo sapiens
MSDIEEVVEEYEEEEQEEEEDWREDEDEQEEAAEEDAEAEAETEETRAEEDEEEEEAKEAEDGPMEESKPKPRSFMPNLVPPKIPDGERVDFDDIHRKRMEKDLNELQALIEAHFENRKKEEEELVSLKDRIERRRAERAEQQRIRNEREKERQNRLAEERARREEEENRRKAEDEARKKKALSNMMHFGGYIQKQAQTERKSGKRQTEREKKKKILAERRKVLAIDHLNEDQLREKAKELWQSIYNLEAEKFDLQEKFKQQKYEINVLRNRINDNQKVSKTRGKAKVTGRWK

SEQ ID NO: 38253 - protein, 259 aa, Homo sapiens
MSDIEEVVEEYEEEEQEEAAVEEEEDWREDEDEQEEAAEEDAEAEAETEETRAEEDEEEEEAKEAEDGPMEESKPKPRSFMPNLVPPKIPDGERVDFDERRRAERAEQQRIRNEREKERQNRLAEERARREEEENRRKAEDEARKKKALSNMMHFGGYIQKQAQTERKSGKRQTEREKKKKILAERRKVLAIDHLNEDQLREKAKELWQSIYNLEAEKFDLQEKFKQQKYEINVLRNRINDNQKVSKTRGKAKVTGRWK

SEQ ID NO: 38254 - protein, 295 aa, Homo sapiens
MSDIEEVVEEYEEEEQEEAAVEEEEDWREDEDEQEEAAEEDAEAEAETEETRAEEDEEEEEAKEAEDGPMEESKPKPRSFMPNLVPPKIPDGERVDFDDIHRKRMEKDLNELQALIEAHFENRKKEEEELVSLKDRIERRRAERAEQQRIRNEREKERQNRLAEERARREEEENRRKAEDEARKKKALSNMMHFGGYIQKTERKSGKRQTEREKKKKILAERRKVLAIDHLNEDQLREKAKELWQSIYNLEAEKFDLQEKFKQQKYEINVLRNRINDNQKVSKTRGKAKVTGRWK

SEQ ID NO: 38255 - protein, 285 aa, Homo sapiens
MSDIEEVVEEYEEEEQEEAAVEEQEEAAEEDAEAEAETEETRAEEDEEEEEAKEAEDGPMEESKPKPRSFMPNLVPPKIPDGERVDFDDIHRKRMEKDLNELQALIEAHFENRKKEEEELVSLKDRIERRRAERAEQQRIRNEREKERQNRLAEERARREEEENRRKAEDEARKKKALSNMMHFGGYIQKTERKSGKRQTEREKKKKILAERRKVLAIDHLNEDQLREKAKELWQSIYNLEAEKFDLQEKFKQQKYEINVLRNRINDNQKVSKTRGKAKVTGRWK

SEQ ID NO: 38256 - protein, 255 aa, Homo sapiens
MSDIEEVVEEYEEEEQEEAAVEEEEDWREDEDEQEEAAEEDAEAEAETEETRAEDEEEEEAKEAEDGPMEESKPKPRSFMPNLVPPKIPDGERVDFDERRRAERAEQQRIRNEREKERQNRLAEERARREEEENRRKAEDEARKKKALSNMMHFGGYIQKTERKSGKRQTEREKKKKILAERRKVLAIDHLNEDQLREKAKELWQSIYNLEAEKFDLQEKFKQQKYEINVLRNRINDNQKVSKTRGKAKVTGRWK

SEQ ID NO: 38257 - protein, 16 aa, Homo sapiens
TDKLIFGKGTRVTVEP

SEQ ID NO: 38258 - protein, 898 aa, Homo sapiens
MVWDRQTKMEYEWKPDEQGLQQILQLLKESQSPDTTIQRTVQQKLEQLNQYPDFNNYLIFVLTKLKSEDEPTRSLSGLILKNNVKAHFQNFPNGVTDFIKSECLNNIGDSSPLIRATVGILITTIASKGELQNWPDLLPKLCSLLDSEDYNTCEGAFGALQKICEDSAEILDSDVLDRPLNIMIPKFLQFFKHSSPKIRSHAVACVNQFIISRTQALMLHIDSFIENLFALAGDEEPEVRKNVCRALVMLLEVRMDRLLPHMHNIVEYMLQRTQDQDENVALEACEFWLTLAEQPICKDVLVRHLPKLIPVLVNGMKYSDIDIILLKGDVEEDETIPDSEQDIRPRFHRSRTVAQQHDEDGIEEEDDDDDEIDDDDTISDWNLRKCSAAALDVLANVYRDELLPHILPLLKELLFHHEWVVKESGILVLGAIAEGCMQGMIPYLPELIPHLIQCLSDKKALVRSITCWTLSRYAHWVVSQPPDTYLKPLMTELLKRILDSNKRVQEAACSAFATLEEEACTELVPYLAYILDTLVFAFSKYQHKNLLILYDAIGTLADSVGHHLNKPEYIQMLMPPLIQKWNMLKDEDKDLFPLLECLSSVATALQSGFLPYCEPVYQRCVNLVQKTLAQAMLNNAQPDQYEAPDKDFMIVALDLLSGLAEGLGGNIEQLVARSNILTLMYQCMQDKMPEVRQSSFALLGDLTKACFQHVKPCIADFMPILGTNLNPEFISVCNNATWAIGEISIQMGIEMQPYIPMVLHQLVEIINRPNTPKTLLENTAITIGRLGYVCPQEVAPMLQQFIRPWCTSLRNIRDNEEKDSAFRGICTMISVNPSGVIQDFIFFCDAVASWINPKDDLRDMFCKILHGFKNQVGDENWRRFSDQFPLPLKERLAAFYGV

SEQ ID NO: 38259 - protein, 890 aa, Homo sapiens
MEYEWKPDEQGLQQILQLLKESQSPDTTIQRTVQQKLEQLNQYPDFNNYLIFVLTKLKSEDEPTRSLSGLILKNNVKAHFQNFPNGVTDFIKSECLNNIGDSSPLIRATVGILITTIASKGELQNWPDLLPKLCSLLDSEDYNTCEGAFGALQKICEDSAEILDSDVLDRPLNIMIPKFLQFFKHSSPKIRSHAVACVNQFIISRTQALMLHIDSFIENLFALAGDEEPEVRKNVCRALVMLLEVRMDRLLPHMHNIVEYMLQRTQDQDENVALEACEFWLTLAEQPICKDVLVRHLPKLIPVLVNGMKYSDIDIILLKGDVEEDETIPDSEQDIRPRFHRSRTVAQQHDEDGIEEEDDDDDEIDDDDTISDWNLRKCSAAALDVLANVYRDELLPHILPLLKELLFHHEWVVKESGILVLGAIAEGCMQGMIPYLPELIPHLIQCLSDKKALVRSITCWTLSRYAHWVVSQPPDTYLKPLMTELLKRILDSNKRVQEAACSAFATLEEEACTELVPYLAYILDTLVFAFSKYQHKNLLILYDAIGTLADSVGHHLNKPEYIQMLMPPLIQKWNMLKDEDKDLFPLLECLSSVATALQSGFLPYCEPVYQRCVNLVQKTLAQAMLNNAQPDQYEAPDKDFMIVALDLLSGLAEGLGGNIEQLVARSNILTLMYQCMQDKMPEVRQSSFALLGDLTKACFQHVKPCIADFMPILGTNLNPEFISVCNNATWAIGEISIQMGIEMQPYIPMVLHQLVEIINRPNTPKTLLENTAITIGRLGYVCPQEVAPMLQQFIRPWCTSLRNIRDNEEKDSAFRGICTMISVNPSGVIQDFIFFCDAVASWINPKDDLRDMFCKILHGFKNQVGDENWRRFSDQFPLPLKERLAAFYGV

SEQ ID NO: 38260 - protein, 848 aa, Homo sapiens
MVWDRQTKMEYEWKPDEQGLQQILQLLKESQSPDTTIQRTVQQKLEQLNQYPDFNNYLIFVLTKLKSEGILITTIASKGELQNWPDLLPKLCSLLDSEDYNTCEGAFGALQKICEDSAEILDSDVLDRPLNIMIPKFLQFFKHSSPKIRSHAVACVNQFIISRTQALMLHIDSFIENLFALAGDEEPEVRKNVCRALVMLLEVRMDRLLPHMHNIVEYMLQRTQDQDENVALEACEFWLTLAEQPICKDVLVRHLPKLIPVLVNGMKYSDIDIILLKGDVEEDETIPDSEQDIRPRFHRSRTVAQQHDEDGIEEEDDDDDEIDDDDTISDWNLRKCSAAALDVLANVYRDELLPHILPLLKELLFHHEWVVKESGILVLGAIAEGCMQGMIPYLPELIPHLIQCLSDKKALVRSITCWTLSRYAHWVVSQPPDTYLKPLMTELLKRILDSNKRVQEAACSAFATLEEEACTELVPYLAYILDTLVFAFSKYQHKNLLILYDAIGTLADSVGHHLNKPEYIQMLMPPLIQKWNMLKDEDKDLFPLLECLSSVATALQSGFLPYCEPVYQRCVNLVQKTLAQAMLNNAQPDQYEAPDKDFMIVALDLLSGLAEGLGGNIEQLVARSNILTLMYQCMQDKMPEVRQSSFALLGDLTKACFQHVKPCIADFMPILGTNLNPEFISVCNNATWAIGEISIQMGIEMQPYIPMVLHQLVEIINRPNTPKTLLENTAITIGRLGYVCPQEVAPMLQQFIRPWCTSLRNIRDNEEKDSAFRGICTMISVNPSGVIQDFIFFCDAVASWINPKDDLRDMFCKILHGFKNQVGDENWRRFSDQFPLPLKERLAAFYGV

SEQ ID NO: 38261 - protein, 581 aa, Homo sapiens
MAVAGAVSGEPLVHWCTQQLRKTFGLDVSEEIIQYVLSIESAEEIREYVTDLLQGNEGKKGQFIEELITKWQKNDQELISDPLQQCFKKDEILDGQKSGDHLKRGRKKGRNRQEVPAFTEPDTTAEVKTPFDLAKAQENSNSVKKKTKFVNLYTREGQDRLAVLLPGRHPCDCLGQKHKLINNCLICGRIVCEQEGSGPCLFCGTLVCTHEEQDILQRDSNKSQKLLKKLMSGVENSGKVDISTKDLLPHQELRIKSGLEKAIKHKDKLLEFDRTSIRRTQVIDDESDYFASDSNQWLSKLERETLQKREEELRELRHASRLSKKVTIDFAGRKILEEENSLAEYHSRLDETIQAIANGTLNQPLTKLDRSSEEPLGVLVNPNMYQSPPQWVDHTGAASQKKAFRSSGFGLEFNSFQHQLRIQDQEFQEGFDGGWCLSVHQPWASLLVRGIKRVEGRSWYTPHRGRLWIAATAKKPSPQEVSELQATYRLLRGKDVEFPNDYPSGCLLGCVDLIDCLSQKQFKEQFPDISQESDSPFVFICKNPQEMVVKFPIKGNPKIWKLDSKIHQGAKKGLMKQNKAV

SEQ ID NO: 38262 - protein, 811 aa, Homo sapiens
MRLIRNIYIFCSIVMTAEGDAPELPEERELMTNCSNMSLRKVPADLTPATTTLDLSYNLLFQLQSSDFHSVSKLRVLILCHNRIQQLDLKTFEFNKELRYLDLSNNRLKSVTWYLLAGLRYLDLSFNDFDTMPICEEAGNMSHLEILGLSGAKIQKSDFQKIAHLHLNTVFLGFRTLPHYEEGSLPILNTTKLHIVLPMDTNFWVLLRDGIKTSKILEMTNIDGKSQFVSYEMQRNLSLENAKTSVLLLNKVDLLWDDLFLILQFVWHTSVEHFQIRNVTFGGKAYLDHNSFDYSNTVMRTIKLEHVHFRVFYIQQDKIYLLLTKMDIENLTISNAQMPHMLFPNYPTKFQYLNFANNILTDELFKRTIQLPHLKTLILNGNKLETLSLVSCFANNTPLEHLDLSQNLLQHKNDENCSWPETVVNMNLSYNKLSDSVFRCLPKSIQILDLNNNQIQTVPKETIHLMALRELNIAFNFLTDLPGCSHFSRLSVLNIEMNFILSPSLDFVQSCQEVKTLNAGRNPFRCTCELKNFIQLETYSEVMMVGWSDSYTCEYPLNLRGTRLKDVHLHELSCNTALLIVTIVVIMLVLGLAVAFCCLHFDLPWYLRMLGQCTQTWHRVRKTTQEQLKRNVRFHAFISYSEHDSLWVKNELIPNLEKEDGSILICLYESYFDPGKSISENIVSFIEKSYKSIFVLSPNFVQNEWCHYEFYFAHHNLFHENSDHIILILLEPIPFYCIPTRYHKLKALLEKKAYLEWPKDRRKCGLFWANLRAAINVNVLATREMYELQTFTELNEESRGSTISLMRTDCL

SEQ ID NO: 38263 - protein, 176 aa, Homo sapiens
MAASTDMAGLEESFRKFAIHGDPKASGQEMNGKNWAKLCKDCKVADGKSVTGTDVDIVFSKVKGKSARVINYEEFKKALEELATKRFKGKSKEEAFDAICQLVAGKEPANVGVTKAKTGGAVDRLTDTSRYTGSHKERFDESGKGKGIAGRQDILDDSGYVSAYKNAGTYDAKVKK

SEQ ID NO: 38264 - protein, 208 aa, Homo sapiens
MNSGISQVFQRELTCPICMNYFIDPVTIDCGHSFCRPCFYLNWQDIPILTQCFECIKTIQQRNLKTNIRLKKMASLARKASLWLFLSSEEQMCGIHRETKKMFCEVDRSLLCLLCSSSQEHRYHRHCPAEWAAEEHWEKLLKKMQSLWEKACENQRNLNVETTRISHWKAFGDILYRSESVLLHMPQPLNLALRAGPITGLRDRLNQF

SEQ ID NO: 38265 - protein, 222 aa, Homo sapiens
MERKGSAAGAKGNPSPPAAGEGQRPPPPLCVPGGGGGAPARGQVGAAAEPAELIRRAHEFKSQGAQCYKDKKFREAIGKYHRALLELKGLLPPPGERERDSRPASPAGALKPGRLSEEQSKTVEAIEIDCYNSLAACLLQAELVNYERVKEYCLKVLKKEGENFKALYRSGVAFYHLGDYDKALYYLKEARTQQPTDTNVIRYIQLTEMKLSRCSQREKEAM

SEQ ID NO: 38266 - protein, 312 aa, Homo sapiens
MEAENLTELSKFLLLGLSDDPELQPVLFGLFLSMYLVTVLGNLLIILAVSSDSHLHTPMYFFLSNLSFVDICFISTTVPKMLVSIQARSKDISYMGCLTQVYFLMMFAGMDTFLLAVMAYDRFVAICHPLHYTVIMNPCLCGLLVLASWFIIFWFSLVHILLMKRLTFSTGTEIPHFFCEPAQVLKVACSNTLLNNIVLYVATALLGVFPVAGILFSYSQIVSSLMGMSSTKGKYKAFSTCGSHLCVVSLFYGTGLGVYLSSAVTHSSQSSSTASVMYAMVTPMLNPFIYSLRNKDVKGALERLLSRADSCP

SEQ ID NO: 38267 - protein, 317 aa, Homo sapiens
MDQYNHSSLAEFVFLGFASVGYVRGWLFVLLLLAYLFTICGNMLIFSVIRLDAALHTPMYHFVSVLSFLELWYTATTIPKMLSNILSEKKTISFAGCLLQTYFFHSLGASECYLLTAMAYDRYLAICRPLHYPIIMTTTLCAKMAAACWTCGFLCPISEVILASQLPFCAYNEIQHIFCDFPPLLSLACKDTSANILVDFAINAFIILITFFFIMISYARIIGAVLKIKTASGRKKAFSTCASHLAVVLIFFGSIIFMYVRLKKSYSLTLDRTLAIVYSVLTPMVNPIIYSLRNKEIIKAIKRTIFQKGDKASLAHL

SEQ ID NO: 38268 - protein, 63 aa, Homo sapiens
MGCGNSTATSAGAGQGPAGAAKDVTEESVTEDDKRRNYGGVYVGLPSEAVNMVSSQTKTVRKN

SEQ ID NO: 38269 - protein, 750 aa, Homo sapiens
MAKPRLLVLYFALIVVPAWVSSIVLTGTSEPPDAQTVAPAEDETLQNEADNQENVLSQLLGDYDKVKAMSEGSDCQCKCVVRPLGRDACQRINAGASRKEDFYTVETITSGSSCKCACVAPPSALNPCEGDFRLQKLREADSQDLKLSTIIDMLEGAFYGLDLLKLHSVTTKLVGRVDKLEEEVSKNLTKENEQIKEDMEEIRTEMNKRGKENCSENILDSMPDIRSALQRDAAAAYAHPEYEERFLQEETVSQQINSIELLQTRPLALPEVVKSQRPLQRQVHLRGRPASQPTVIRGITYYKAKVSEEENDIEEQQDEFFSGDNGVDLLIEDQLLRHNGLMTSVTRRPAATRQGHSTAVTSDLNARTAPWSSALPQPSTSDPSIANHASVGPTLQTTSVSPDPTRESVLQPSPQVPATTVAHTATQQPAAPAPPAVSPREALMEAMHTVPVPPTTVRTDSLGKDAPAGWGTTPASPTLSPEEEDDIRNVIGRCKDTLSTITGPTTQNTYGRNEGAWMKDPLAKDERIYVTNYYYGNTLVEFRNLENFKQGRWSNSYKLPYSWIGTGHVVYNGAFYYNRAFTRNIIKYDLKQRYVAAWAMLHDVAYEEATPWRWQGHSDVDFAVDENGLWLIYPALDDEGFSQEVIVLSKLNAADLSTQKETTWRTGLRRNFYGNCFVICGVLYAVDSYNQRNANISYAFDTHTNTQIVPRLLFENEYSYTTQIDYNPKDRLLYAWDNGHQVTYHVIFAY

SEQ ID NO: 38270 - protein, 233 aa, Homo sapiens
MKDPLAKDERIYVTNYYYGNTLVEFRNLENFKQGRWSNSYKLPYSWIGTGHVVYNGAFYYNRAFTRNIIKYDLKQRYVAAWAMLHDVAYEEATPWRWQGHSDVDFAVDENGLWLIYPALDDEGFSQEVIVLSKLNAADLSTQKETTWRTGLRRNFYGNCFVICGVLYAVDSYNQRNANISYAFDTHTNTQIVPRLLFENEYSYTTQIDYNPKDRLLYAWDNGHQVTYHVIFAY

SEQ ID NO: 38271 - protein, 254 aa, Homo sapiens
MSAELNVPIDPSAPACPEPGHKGMDYRDWVRRSYLELVTSNHHSVQALSWRKLYLSRAKLKASSRTSALLSGFAMVAMVEVQLETQYQYPRPLLIAFSACTTVLVAVHLFALLISTCILPNVEAVSNIHNLNSISESPHERMHPYIELAWGFSTVLGILLFLAEVVLLCWIKFLPVDARRQPGPPPGPGSHTGWQAALVSTIIMVPVGLIFVVFTIHFYRSLVRHKTERHNREIEELHKLKVQLDGHERSLQVL

SEQ ID NO: 38272 - protein, 76 aa, Homo sapiens
MPVAPSNHCDNQCPHIFSKALVVSVAPSPPRDKPAPYTFTDVSSLCGLQKKCEGGKAMLFTLKRDRFSFLLFVSHC

SEQ ID NO: 38273 - protein, 317 aa, Homo sapiens
MQPYTKNWTQVTEFVMMGFAGIHEAHLLFFILFLTMYLFTLVENLAIILVVGLDHRLRRPMYFFLTHLSCLEIWYTSVTVPKMLAGFIGVDGGKNISYADCLSQLFIFTFLGATECFLLAAMAYDRYVAICMPLHYGAFVSWGTCIRLAAACWLVGFLTPILPIYLLSQLTFYGPNVIDHFSCDASPLLALSCSDVTWKETVDFLVSLAVLLASSMVIAVSYGNIVWTLLHIRSAAERWKAFSTCAAHLTVVSLFYGTLFFMYVQTKVTSSINFNKVVSVFYSVVTPMLNPLIYSLRNKEVKGALGRVFSLNFWKGQ

SEQ ID NO: 38274 - protein, 311 aa, Homo sapiens
MSNASLLTAFILMGLPHAPALDAPLFGVFLVVYVLTVLGNLLILLVIRVDSHLHTTMYYFLTNLSFIDMWFSTVTVPKLLMTLVFPSGRAISFHSCMAQLYFFHFLGGTECFLYRVMSCDRYLAISYPLRYTSMMTGRSCTLLATSTWLSGSLHSAVQAILTFHLPYCGPNWIQHYLCDAPPILKLACADTSAIETVIFVTVGIVASGCFVLIVLSYVSIVCSILRIRTSEGKHRAFQTCASHCIVVLCFFGPGLFIYLRPGSRKAVDGVVAVFYTVLTPLLNPVVYTLRNKEVKKALLKLKDKVAHSQSK

SEQ ID NO: 38275 - protein, 311 aa, Homo sapiens
MGRRNNTNVPDFILTGLSDSEEVQMALFILFLLIYLITMLGNVGMILIIRLDLQLHTPMYFFLTHLSFIDLSYSTVITPKTLANLLTSNYISFMGCFAQMFFFVFLGAAECFLLSSMAYDRYVAICSPLRYPVIMSKRLCCALVTGPYVISFINSFVNVVWMSRLHFCDSNVVRHFFCDTSPILALSCMDTYDIEIMIHILAGSTLMVSLITISASYVSILSTILKINSTSGKQKALSTCASHLLGVTIFYGTMIFTYLKPRKSYSLGRDQVASVFYTIVIPMLNPLIYSLRNKEVKNALIRVMQRRQDSR

SEQ ID NO: 38276 - protein, 312 aa, Homo sapiens
MDQKNGSSFTGFILLGFSDRPQLELVLFVVLLIFYIFTLLGNKTIIVLSHLDPHLHTPMYFFFSNLSFLDLCYTTGIVPQLLVNLRGADKSISYGGCVVQLYISLGLGSTECVLLGVMVFDRYAAVCRPLHYTVVMHPCLYVLMASTSWVIGFANSLLQTVLILLLTLCGRNKLEHFLCEVPPLLKLACVDTTMNESELFFVSVIILLVPVALIIFSYSQIVRAVMRIKLATGQRKVFGTCGSHLTVVSLFYGTAIYAYLQPGNNYSQDQGKFISLFYTIITPMINPLIYTLRNKDVKGALKKVLWKNYDSR

SEQ ID NO: 38277 - protein, 311 aa, Homo sapiens
MGKENCTTVAEFILLGLSDVPELRVCLFLLFLLIYGVTLLANLGMIALIQVSSRLHTPMYFFLSHLSSVDFCYSSIIVPKMLANIFNKDKAISFLGCMVQFYLFCTCVVTEVFLLAVMAYDRFVAICNPLLYTVTMSWKVRVELASCCYFCGTVCSLIHLCLALRIPFYRSNVINHFFCDLPPVLSLACSDITVNETLLFLVATLNESVTIMIILTSYLLILTTILKMGSAEGRHKAFSTCASHLTAITVFHGTVLSIYCRPSSGNSGDADKVATVFYTVVIPMLNSVIYSLRNKDVKEALRKVMGSKIHS

SEQ ID NO: 38278 - protein, 319 aa, Homo sapiens
MDTSTSVTYDSSLQISQFILMGLPGIHEWQHWLSLPLTLLYLLALGANLLIIITIQHETVLHEPMYHLLGILAVVDIGLATTIMPKILAIFWFDAKAISLPMCFAQIYAIHCFFCIESGIFLCMAVDRYIAICRPLQYPSIVTKAFVFKATGFIMLRNGLLTIPVPILAAQRHYCSRNEIEHCLCSNLGVISLACDDITVNKFYQLMLAWVLVGSDMALVFSSYAVILHSVLRLNSAEAMSKALSTCSSHLILILFHTGIIVLSVTHLAEKKIPLIPVFLNVLHNVIPPALNPLACALRMHKLRLGFQRLLGLGQDVSK

SEQ ID NO: 38279 - protein, 311 aa, Homo sapiens
MGKENCTTVAEFILLGLSDVPELRVCLFLLFLLIYGVTLLANLGMTALIQVSSRLHTPVYFFLSHLSFVDFCYSSIIVPKMLANIFNKDKAISFLGCMVQFYLFCTCGVTEVFLLAVMAYDRFVAICNPLLYMVTMSQKLRVELTSCCYFCGTVCSLIHSSLALRILFYRSNVINHFFCDLPPLLSLACSDVTVNETLLFLVATLNESVTIMIILTSYLLILTTILKIHSAESRHKAFSTCASHLTAITVSHGTILYIYCRPSSGNSGDVDKVATVFYTVVIPMLNPLIYSLRNKDVNKALRKVMGSKIHS

SEQ ID NO: 38280 - protein, 318 aa, Homo sapiens
MEWENHTILVEFFLKGLSGHPRLELLFFVLIFIMYVVILLGNGTLILISILDPHLHTPMYFFLGNLSFLDICYTTTSIPSTLVSFLSERKTISLSGCAVQMFLSLAMGTTECVLLGVMAFDRYVAICNPLRYPIIMSKDAYVPMAAGSWIIGAVNSAVQTVFVVQLPFCRNNIINHFTCEILAVMKLACADISGNEFILLVTTTLFLLTPLLLIIVSYTLIILSIFKISSSEGRSKPSSTCSARLTVVITFCGTIFLMYMKPKSQETLNSDDLDATDKLIFIFYRVMTPMMNPLIYSLRNKDVKEAVKHLLRRKNFNK

SEQ ID NO: 38281 - protein, 348 aa, Homo sapiens
MFGPAKGRHFGVHPAPGFPGGVSQQAAGTKAGPAGAWPVGSRTDTMWRLRCKAKDGTHVLQGLSSRTRVRELQGQIAAITGIAPGGQRILVGYPPECLDLSNGDTILEDLPIQSGDMLIIEEDQTRPRSSPAFTKRGASSYVRETLPVLTRTVVPADNSCLFTSVYYVVEGGVLNPACAPEMRRLIAQIVASDPDFYSEAILGKTNQEYCDWIKRDDTWGGAIEISILSKFYQCEICVVDTQTVRIDRFGEDAGYTKRVLLIYDGIHYDPLQRNFPDPDTPPLTIFSSNDDIVLVQALELADEARRRRQFTDVNRFTLRCMVCQKGLTGQAEAREHAKETGHTNFGEV

SEQ ID NO: 38282 - protein, 304 aa, Homo sapiens
METLHIIYSEAKSFTVEGLSSRTRVRELQGQIAAITGIAPGGQRILVGYPPECLDLSNGDTILEDLPIQSGDMLIIEEDQTRPRSSPAFTKRGASSYVRETLPVLTRTVVPADNSCLFTSVYYVVEGGVLNPACAPEMRRLIAQIVASDPDFYSEAILGKTNQEYCDWIKRDDTWGGAIEISILSKFYQCEICVVDTQTVRIDRFGEDAGYTKRVLLIYDGIHYDPLQRNFPDPDTPPLTIFSSNDDIVLVQALELADEARRRRQFTDVNRFTLRCMVCQKGLTGQAEAREHAKETGHTNFGEV

SEQ ID NO: 38283 - protein, 312 aa, Homo sapiens
MPNMTSIREFILLGFTDNPELQVVIFFFMLITYLLSVSGNMIIIMLTLSNIHLKTPMYFFLRNFSFLEISFTTVFIPRFLINIATGDTTISYNASMAQVFFLILLGSTEFFLLAVMSYDRYVAICKPLHYTTIMSNKVCNWLVISSWLAGFLIIFPPVIMGLQLDFCDSSTIDHFICDSSPMLLIACTDTQFLELMAFLLAVFTLMVTLALVVLSYTLILKTILKIPSAQQRKKAFSTCSSHMIVVSVSYGSCIFMCVKTSAKEGMALSKGVAVLNTSVAPMLNPFIYTLRNQQVKQALREFTKKILSLNKQ

SEQ ID NO: 38284 - protein, 304 aa, Homo sapiens
MERANHSVVSEFILLGLSKSQNLQILFFLGFSVVFVGIVLGNLLILVTVTFDSLLHTPMYFLLSNLSCIDMILASFATPKMIVDFLRERKTISWWGCYSQMFFMHLLGGSEMMLLVAMAIDRYVAICKPLHYMTIMSPRVLTGLLLSSYAVGFVHSSSQMAFMLTLPFCGPNVIDSFFCDLPLVIKLACKDTYILQLLVIADSGLLSLVCFLLLLVSYGVIIFSVRYRAASRSSKAFSTLSAHITVVTLFFAPCVFIYVWPFSRYSVDKILSVFYTIFTPLLNPIIYTLRNQEVKAAIKKRLCI

SEQ ID NO: 38285 - protein, 1817 aa, Homo sapiens
MFNKSFGTPFGGGTGGFGTTSTFGQNTGFGTTSGGAFGTSAFGSSNNTGGLFGNSQTKPGGLFGTSSFSQPATSTSTGFGFGTSTGTANTLFGTASTGTSLFSSQNNAFAQNKPTGFGNFGTSTSSGGLFGTTNTTSNPFGSTSGSLFGPSSFTAAPTGTTIKFNPPTGTDTMVKAGVSTNISTKHQCITAMKEYESKSLEELRLEDYQANRKGPQNQVGAGTTTGLFGSSPATSSATGLFSSSTTNSGFAYGQNKTAFGTSTTGFGTNPGGLFGQQNQQTTSLFSKPFGQATTTQNTGFSFGNTSTIGQPSTNTMGLFGVTQASQPGGLFGTATNTSTGTAFGTGTGLFGQTNTGFGAVGSTLFGNNKLTTFGSSTTSAPSFGTTSGGLFGNKPTLTLGTNTNTSNFGFGTNTSGNSIFGSKPAPGTLGTGLGAGFGTALGAGQASLFGNNQPKIGGPLGTGAFGAPGFNTTTATLGFGAPQAPVALTDPNASAAQQAVLQQHINSLTYSPFGDSPLFRNPMSDPKKKEERLKPTNPAAQKALTTPTHYKLTPRPATRVRPKALQTTGTAKSHLFDGLDDDEPSLANGAFMPKKSIKKLVLKNLNNSNLFSPVNRDSENLASPSEYPENGERFSFLSKPVDENHQQDGDEDSLVSHFYTNPIAKPIPQTPESAGNKHSNSNSVDDTIVALNMRAALRNGLEGSSEETSFHDESLQDDREEIENNSYHMHPAGIILTKVGYYTIPSMDDLAKITNEKGECIVSDFTIGRKGYGSIYFEGDVNLTNLNLDDIVHIRRKEVVVYLDDNQKPPVGEGLNRKAEVTLDGVWPTDKTSRCLIKSPDRLADINYEGRLEAVSRKQGAQFKEYRPETGSWVFKVSHFSKYGLQDSDEEEEEHPSKTSTKKLKTAPLPPASQTTPLQMALNGKPAPPPQSQSPEVEQLGRVVELDSDMVDITQEPVLDTMLEESMPEDQEPVSASTHIASSLGINPHVLQIMKASLLTDEEDVDMALDQRFSRLPSKADTSQEICSPRLPISASHSSKTRSLVGGLLQSKFTSGAFLSPSVSVQECRTPRAASLMNIPSTSSWSVPPPLTSVFTMPSPAPEVPLKTVGTRRQLGLVPREKSVTYGKGKLLMDMALFMGRSFRVGWGPNWTLANSGEQLNGSHELENHQIADSMEFGFLPNPVAVKPLTESPFKVHLEKLSLRQRKPDEDMKLYQTPLELKLKHSTVHVDELCPLIVPNLGVAVIHDYADWVKEASGDLPEAQIVKHWSLTWTLCEALWGHLKELDSQLNEPREYIQILERRRAFSRWLSCTATPQIEEEVSLTQKNSPVEAVFSYLTGKRISEACSLAQQSGDHRLALLLSQFVGSQSVRELLTMQLVDWHQLQADSFIQDERLRIFALLAGKPVWQLSEKKQINVCSQLDWKRSLAIHLWYLLPPTASISRALSMYEEAFQNTSDSDRYACSPLPSYLEGSGCVIAEEQNSQTPLRDVCFHLLKLYSDRHYDLNQLLEPRSITADPLDYRLSWHLWEVLRALNYTHLSAQCEGVLQASYAGQLESEGLWEWAIFVLLHIDNSGIREKAVRELLTRHCQLLETPESWAKETFLTQKLRVPAKWIHEAKAVRAHMESDKHLEALCLFKAEHWNRCHKLIIRHLASDAIINENYDYLKGFLEDLAPPERSSLIQDWETSGLVYLDYIRVIEMLRHIQQVDCSGNDLEQLHIKVTSLCSRIEQIQCYSAKDRLAQSDMAKRVANLLRVVLSLHHPPDRTSDSTPDPQRVPLRLLAPHIGRLPMPEDYAMDELRSLTQSYLRELAVGSL

SEQ ID NO: 38286 - protein, 1726 aa, Homo sapiens
MFNKSFGTPFGGGTGGFGTTSTFGQNTGFGTTSGGAFGTSAFGSSNNTGGLFGNSQTKPGGLFGTSSFSQPATSTSTGFGFGTSTGTANTLFGTASTGTSLFSSQNNAFAQNKPTGFGNFGTSTSSGGLFGTTNTTSNPFGSTSGSLFGPSSFTAAPTGTTIKFNPPTGTDTMVKAGVSTNISTKHQCITAMKEYESKSLEELRLEDYQANRKGPQNQVGAGTTTGLFGSSPATSSATGLFSSSTTNSGFAYGQNKTAFGTSTTGFGTNPGGLFGQQNQQTTSLFSKPFGQATTTQNTGFSFGNTSTIGQPSTNTMGLFGVTQASQPGGLFGTATNTSTGTAFGTGTGLFGQTNTGFGAVGSTLFGNNKLTTFGSSTTSAPSFGTTSGGLFGFGTNTSGNSIFGSKPAPGTLGTGLGAGFGTALGAGQASLFGNNQPKIGGPLGTGAFGAPGFNTTTATLGFGAPQAPVALTDPNASAAQQAVLQQHINSLTYSPFGDSPLFRNPMSDPKKKEERLKPTNPAAQKALTTPTHYKLTPRPATRVRPKALQTTGTAKSHLFDGLDDDEPSLANGAFMPKKSIKKLVLKNLNNSNLFSPVNRDSENLASPSEYPENGERFSFLSKPVDENHQQDGDEDSLVSHFYTNPIAKPIPQTPESAGNKHSNSNSVDDTIVALNMRAALRNGLEGSSEETSFHDESLQDDREEIENNSYHMHPAGIILTKVGYYTIPSMDDLAKITNEKGECIVSDFTIGRKGYGSIYFEGDVNLTNLNLDDIVHIRRKEVVVYLDDNQKPPVGEGLNRKAEVTLDGVWPTDKTSRCLIKSPDRLADINYEGRLEAVSRKQGAQFKEYRPETGSWVFKVSHFSKYGLQDSDEEEEEHPSKTSTKKLKTAPLPPASQTTPLQMALNGKPAPPPQSQSPEVEQLGRVVELDSDMVDITQEPVLDTMLEESMPEDQEPVSASTHIASSLGINPHVLQIMKASLLTDEEDVDMALDQRFSRLPSKADTSQEICSPRLPISASHSSKTRSLVGGLLQSKFTSGAFLSPSVSVQECRTPRAASLMNIPSTSSWSVPPPLTSVFTMPSPAPEVPLKTVGTRRQLGLVPREKSVTYGKGKLLMDMALFMGRSFRVGWGPNWTLANSGEQLNGSHELENHQIADSMEFGFLPNPVAVKPLTESPFKVHLEKLSLRQRKPDEDMKLYQTPLELKLKHSTVHVDELCPLIVPNLGVAVIHDYADWVKEASGDLPEAQIVKHWSLTWTLCEALWGHLKELDSQLNEPREYIQILERRRAFSRWLSCTATPQIEEEVSLTQKNSPVEAVFSYLTGKRISEACSLAQQSGDHRLALLLSQFVGSQSVRELLTMQLVDWHQLQADSFIQDERLRIFALLAGKPVWQLSEKKQINVCSQLDWKRSLAIHLWYLLPPTASISRALSMYEEAFQNTSDSDRYACSPLPSYLEGSGCVIAEEQNSQTPLRDVCFHLLKLYSDSIREKAVRELLTRHCQLLETPESWAKETFLTQKLRVPAKWIHEAKAVRAHMESDKHLEALCLFKAEHWNRCHKLIIRHLASDAIINENYDYLKGFLEDLAPPERSSLIQDWETSGLVYLDYIRVIEMLRHIQQVDCSGNDLEQLHIKVTSLCSRIEQIQCYSAKDRLAQSDMAKRVANLLRVVLSLHHPPDRTSDSTPDPQRVPLRLLAPHIGRLPMPEDYAMDELRSLTQSYLRELAVGSL

SEQ ID NO: 38287 - protein, 937 aa, Homo sapiens
MFNKSFGTPFGGGTGGFGTTSTFGQNTGFGTTSGGAFGTSAFGSSNNTGGLFGNSQTKPGGLFGTSSFSQPATSTSTGFGFGTSTGTANTLFGTASTGTSLFSSQNNAFAQNKPTGFGNFGTSTSSGGLFGTTNTTSNPFGSTSGSLFGPSSFTAAPTGTTIKFNPPTGTDTMVKAGVSTNISTKHQCITAMKEYESKSLEELRLEDYQANRKGPQNQVGAGTTTGLFGSSPATSSATGLFSSSTTNSGFAYGQNKTAFGTSTTGFGTNPGGLFGQQNQQTTSLFSKPFGQATTTQNTGFSFGNTSTIGQPSTNTMGLFGVTQASQPGGLFGTATNTSTGTAFGTGTGLFGQTNTGFGAVGSTLFGNNKLTTFGSSTTSAPSFGTTSGGLFGNKPTLTLGTNTNTSNFGFGTNTSGNSIFGSKPAPGTLGTGLGAGFGTALGAGQASLFGNNQPKIGGPLGTGAFGAPGFNTTTATLGFGAPQAPVALTDPNASAAQQAVLQQHINSLTYSPFGDSPLFRNPMSDPKKKEERLKPTNPAAQKALTTPTHYKLTPRPATRVRPKALQTTGTAKSHLFDGLDDDEPSLANGAFMPKKSIKKLVLKNLNNSNLFSPVNRDSENLASPSEYPENGERFSFLSKPVDENHQQDGDEDSLVSHFYTNPIAKPIPQTPESAGNKHSNSNSVDDTIVALNMRAALRNGLEGSSEETSFHDESLQDDREEIENNSYHMHPAGIILTKVGYYTIPSMDDLAKITNEKGECIVSDFTIGRKGYGSIYFEGDVNLTNLNLDDIVHIRRKEVVVYLDDNQKPPVGEGLNRKAEVTLDGVWPTDKTSRCLIKSPDRLADINYEGRLEAVSRKQGAQFKEYRPETGSWVFKVSHFSKYGLQDSDEEEEEHPSKTSTKKLKTAPLPPASQTTPLQMALNGKPAPPPQVEKKGQ

SEQ ID NO: 38288 - protein, 920 aa, Homo sapiens
MFNKSFGTPFGGGTGGFGTTSTFGQNTGFGTTSGGAFGTSAFGSSNNTGGLFGNSQTKPGGLFGTSSFSQPATSTSTGFGFGTSTGTANTLFGTASTGTSLFSSQNNAFAQNKPTGFGNFGTSTSSGGLFGTTNTTSNPFGSTSGSLFGPSSFTAAPTGTTIKFNPPTGTDTMVKAGVSTNISTKHQCITAMKEYESKSLEELRLEDYQANRKGPQNQVGAGTTTGLFGSSPATSSATGLFSSSTTNSGFAYGQNKTAFGTSTTGFGTNPGGLFGQQNQQTTSLFSKPFGQATTTQNTGFSFGNTSTIGQPSTNTMGLFGVTQASQPGGLFGTATNTSTGTAFGTGTGLFGQTNTGFGAVGSTLFGNNKLTTFGSSTTSAPSFGTTSGGLFGFGTNTSGNSIFGSKPAPGTLGTGLGAGFGTALGAGQASLFGNNQPKIGGPLGTGAFGAPGFNTTTATLGFGAPQAPVALTDPNASAAQQAVLQQHINSLTYSPFGDSPLFRNPMSDPKKKEERLKPTNPAAQKALTTPTHYKLTPRPATRVRPKALQTTGTAKSHLFDGLDDDEPSLANGAFMPKKSIKKLVLKNLNNSNLFSPVNRDSENLASPSEYPENGERFSFLSKPVDENHQQDGDEDSLVSHFYTNPIAKPIPQTPESAGNKHSNSNSVDDTIVALNMRAALRNGLEGSSEETSFHDESLQDDREEIENNSYHMHPAGIILTKVGYYTIPSMDDLAKITNEKGECIVSDFTIGRKGYGSIYFEGDVNLTNLNLDDIVHIRRKEVVVYLDDNQKPPVGEGLNRKAEVTLDGVWPTDKTSRCLIKSPDRLADINYEGRLEAVSRKQGAQFKEYRPETGSWVFKVSHFSKYGLQDSDEEEEEHPSKTSTKKLKTAPLPPASQTTPLQMALNGKPAPPPQVEKKGQ

SEQ ID NO: 38289 - protein, 1800 aa, Homo sapiens
MFNKSFGTPFGGGTGGFGTTSTFGQNTGFGTTSGGAFGTSAFGSSNNTGGLFGNSQTKPGGLFGTSSFSQPATSTSTGFGFGTSTGTANTLFGTASTGTSLFSSQNNAFAQNKPTGFGNFGTSTSSGGLFGTTNTTSNPFGSTSGSLFGPSSFTAAPTGTTIKFNPPTGTDTMVKAGVSTNISTKHQCITAMKEYESKSLEELRLEDYQANRKGPQNQVGAGTTTGLFGSSPATSSATGLFSSSTTNSGFAYGQNKTAFGTSTTGFGTNPGGLFGQQNQQTTSLFSKPFGQATTTQNTGFSFGNTSTIGQPSTNTMGLFGVTQASQPGGLFGTATNTSTGTAFGTGTGLFGQTNTGFGAVGSTLFGNNKLTTFGSSTTSAPSFGTTSGGLFGFGTNTSGNSIFGSKPAPGTLGTGLGAGFGTALGAGQASLFGNNQPKIGGPLGTGAFGAPGFNTTTATLGFGAPQAPVALTDPNASAAQQAVLQQHINSLTYSPFGDSPLFRNPMSDPKKKEERLKPTNPAAQKALTTPTHYKLTPRPATRVRPKALQTTGTAKSHLFDGLDDDEPSLANGAFMPKKSIKKLVLKNLNNSNLFSPVNRDSENLASPSEYPENGERFSFLSKPVDENHQQDGDEDSLVSHFYTNPIAKPIPQTPESAGNKHSNSNSVDDTIVALNMRAALRNGLEGSSEETSFHDESLQDDREEIENNSYHMHPAGIILTKVGYYTIPSMDDLAKITNEKGECIVSDFTIGRKGYGSIYFEGDVNLTNLNLDDIVHIRRKEVVVYLDDNQKPPVGEGLNRKAEVTLDGVWPTDKTSRCLIKSPDRLADINYEGRLEAVSRKQGAQFKEYRPETGSWVFKVSHFSKYGLQDSDEEEEEHPSKTSTKKLKTAPLPPASQTTPLQMALNGKPAPPPQSQSPEVEQLGRVVELDSDMVDITQEPVLDTMLEESMPEDQEPVSASTHIASSLGINPHVLQIMKASLLTDEEDVDMALDQRFSRLPSKADTSQEICSPRLPISASHSSKTRSLVGGLLQSKFTSGAFLSPSVSVQECRTPRAASLMNIPSTSSWSVPPPLTSVFTMPSPAPEVPLKTVGTRRQLGLVPREKSVTYGKGKLLMDMALFMGRSFRVGWGPNWTLANSGEQLNGSHELENHQIADSMEFGFLPNPVAVKPLTESPFKVHLEKLSLRQRKPDEDMKLYQTPLELKLKHSTVHVDELCPLIVPNLGVAVIHDYADWVKEASGDLPEAQIVKHWSLTWTLCEALWGHLKELDSQLNEPREYIQILERRRAFSRWLSCTATPQIEEEVSLTQKNSPVEAVFSYLTGKRISEACSLAQQSGDHRLALLLSQFVGSQSVRELLTMQLVDWHQLQADSFIQDERLRIFALLAGKPVWQLSEKKQINVCSQLDWKRSLAIHLWYLLPPTASISRALSMYEEAFQNTSDSDRYACSPLPSYLEGSGCVIAEEQNSQTPLRDVCFHLLKLYSDRHYDLNQLLEPRSITADPLDYRLSWHLWEVLRALNYTHLSAQCEGVLQASYAGQLESEGLWEWAIFVLLHIDNSGIREKAVRELLTRHCQLLETPESWAKETFLTQKLRVPAKWIHEAKAVRAHMESDKHLEALCLFKAEHWNRCHKLIIRHLASDAIINENYDYLKGFLEDLAPPERSSLIQDWETSGLVYLDYIRVIEMLRHIQQVDCSGNDLEQLHIKVTSLCSRIEQIQCYSAKDRLAQSDMAKRVANLLRVVLSLHHPPDRTSDSTPDPQRVPLRLLAPHIGRLPMPEDYAMDELRSLTQSYLRELAVGSL

SEQ ID NO: 38290 - protein, 1714 aa, Homo sapiens
MFNKSFGTPFGGGTGGFGTTSTFGQNTGFGTTSGGAFGTSAFGSSNNTGGLFGNSQTKPGGLFGTSSFSQPATSTSTGFGFGTSTGTANTLFGTASTGTSLFSSQNNAFAQNKPTGFGNFGTSTSSGGLFGTTNTTSNPFGSTSGSLFGPSSFTAAPTGTTIKFNPPTGTDTMVKAGVSTNISTKHQCITAMKEYESKSLEELRLEDYQANRKGPQNQVGAGTTTGLFGSSPATSSATGLFSSSTTNSGFAYGQNKTAFGTSTTGFGTNPGGLFGQQNQQTTSLFSKPFGQATTTQNTGFSFGNTSTIGQPSTNTMGLFGVTQASQPGGLFGTATNTSTGTAFGTGTGLFGQTNTGFGAVGSTLFGNNKLTTFGSSTTSAPSFGTTSGGLFGNKPTLTLGTNTNTSNFGFGTNTSGNSIFGSKPAPGTLGTGLGAGFGTALGAGQASLFGNNQPKIGGPLGTGAFGAPGFNTTTATLGFGAPQAPVALTDPNASAAQQAVLQQHINSLTYSPFGDSPLFRNPMSDPKKKEERLKPTNPAAQKALTTPTHYKLTPRPATRVRPKALQTTGTAKSHLFDGLDDDEPSLANGAFMPKKSIKKLVLKNLNNSNLFSPVNRDSENLASPSEYPENGERFSFLSKPVDENHQQDGDEDSLVSHFYTNPIAKPIPQTPESAGNKHSNSNSVDDTIVALNMRAALRNGLEGSSEETSFHDESLQDDREEIENNSYHMHPAGIILTKVGYYTIPSMDDLAKITNEKGECIVSDFTIGRKGYGSIYFEGDVNLTNLNLDDIVHIRRKEVVVYLDDNQKPPVGEGLNRKAEVTLDGVWPTDKTSRCLIKSPDRLADINYEGRLEAVSRKQGAQFKEYRPETGSWVFKVSHFSKYGLQDSDEEEEEHPSKTSTKKLKTAPLPPASQTTPLQMALNGKPAPPPQSQSPEVEQLGRVVELDSDMVDITQEPVLDTMLEESMPEDQEPVSASTHIASSLGINPHVLQIMKASLLTDEEDVDMALDQRFSRLPSKADTSQEICSPRLPISASHSSKTRSLVGGLLQSKFTSGAFLSPSVSVQECRTPRAASLMNIPSTSSCLTESPFKVHLEKLSLRQRKPDEDMKLYQTPLELKLKHSTVHVDELCPLIVPNLGVAVIHDYADWVKEASGDLPEAQIVKHWSLTWTLCEALWGHLKELDSQLNEPREYIQILERRRAFSRWLSCTATPQIEEEVSLTQKNSPVEAVFSYLTGKRISEACSLAQQSGDHRLALLLSQFVGSQSVRELLTMQLVDWHQLQADSFIQDERLRIFALLAGKPVWQLSEKKQINVCSQLDWKRSLAIHLWYLLPPTASISRALSMYEEAFQNTSDSDRYACSPLPSYLEGSGCVIAEEQNSQTPLRDVCFHLLKLYSDRHYDLNQLLEPRSITADPLDYRLSWHLWEVLRALNYTHLSAQCEGVLQASYAGQLESEGLWEWAIFVLLHIDNSGIREKAVRELLTRHCQLLETPESWAKETFLTQKLRVPAKWIHEAKAVRAHMESDKHLEALCLFKAEHWNRCHKLIIRHLASDAIINENYDYLKGFLEDLAPPERSSLIQDWETSGLVYLDYIRVIEMLRHIQQVDCSGNDLEQLHIKVTSLCSRIEQIQCYSAKDRLAQSDMAKRVANLLRVVLSLHHPPDRTSDSTPDPQRVPLRLLAPHIGRLPMPEDYAMDELRSLTQSYLRELAVGSL

SEQ ID NO: 38291 - protein, 345 aa, Homo sapiens
MGVCGYLFLPWKCLVVVSLRLLFLVPTGVPVRSGDATFPKAMDNVTVRQGESATLRCTIDDRVTRVAWLNRSTILYAGNDKWSIDPRVIILVNTPTQYSIMIQNVDVYDEGPYTCSVQTDNHPKTSRVHLIVQVPPQIMNISSDITVNEGSSVTLLCLAIGRPEPTVTWRHLSVKEGQGFVSEDEYLEISDIKRDQSGEYECSALNDVAAPDVRKVKITVNYPPYISKAKNTGVSVGQKGILSCEASAVPMAEFQWFKEETRLATGLDGMRIENKGRMSTLTFFNVSEKDYGNYTCVATNKLGNTNASITLYGPGAVIDGVNSASRALACLWLSGTLLAHFFIKF

SEQ ID NO: 38292 - protein, 338 aa, Homo sapiens
MYHPAYWVVFSATTALLFIPGVPVRSGDATFPKAMDNVTVRQGESATLRCTIDDRVTRVAWLNRSTILYAGNDKWSIDPRVIILVNTPTQYSIMIQNVDVYDEGPYTCSVQTDNHPKTSRVHLIVQVPPQIMNISSDITVNEGSSVTLLCLAIGRPEPTVTWRHLSVKEGQGFVSEDEYLEISDIKRDQSGEYECSALNDVAAPDVRKVKITVNYPPYISKAKNTGVSVGQKGILSCEASAVPMAEFQWFKEETRLATGLDGMRIENKGRMSTLTFFNVSEKDYGNYTCVATNKLGNTNASITLYGPGAVIDGVNSASRALACLWLSGTLLAHFFIKF

SEQ ID NO: 38293 - protein, 304 aa, Homo sapiens
MDNVTVRQGESATLRCTIDDRVTRVAWLNRSTILYAGNDKWSIDPRVIILVNTPTQYSIMIQNVDVYDEGPYTCSVQTDNHPKTSRVHLIVQVPPQIMNISSDITVNEGSSVTLLCLAIGRPEPTVTWRHLSVKEGQGFVSEDEYLEISDIKRDQSGEYECSALNDVAAPDVRKVKITVNYPPYISKAKNTGVSVGQKGILSCEASAVPMAEFQWFKEETRLATGLDGMRIENKGRMSTLTFFNVSEKDYGNYTCVATNKLGNTNASITLYGPGAVIDGVNSASRALACLWLSGTLLAHFFIKF

SEQ ID NO: 38294 - protein, 354 aa, Homo sapiens
MGVCGYLFLPWKCLVVVSLRLLFLVPTGVPVRSGDATFPKAMDNVTVRQGESATLRCTIDDRVTRVAWLNRSTILYAGNDKWSIDPRVIILVNTPTQYSIMIQNVDVYDEGPYTCSVQTDNHPKTSRVHLIVQVPPQIMNISSDITVNEGSSVTLLCLAIGRPEPTVTWRHLSVKEGQGFVSEDEYLEISDIKRDQSGEYECSALNDVAAPDVRKVKITVNYPPYISKAKNTGVSVGQKGILSCEASAVPMAEFQWFKEETRLATGLDGMRIENKGRMSTLTFFNVSEKDYGNYTCVATNKLGNTNASITLYEISPSSAVAGPGAVIDGVNSASRALACLWLSGTLLAHFFIKF

SEQ ID NO: 38295 - protein, 318 aa, Homo sapiens
MVSANQTASVTEFILLGLSAHPKLEKTFFVLILLMYLVILLGNGVLILMTVSNSHLHMPMYFFLGNLSFLDICYTTSSVPLILDSFLTPRKTISFSACAVQMFLSFAMGATECVLLSMMAFDRYVAICNPLRYPVVMSKAAYMPKAAGSWVAGSTASMVQTSLAMRLPFCGDNIINHFTCEILAVLKLACADISVNVISMGVTNVIFLGVPVLFISFSYVFIIATILRIPSAEGRKKAFSTCSAHLTVVVIFYGTILFMYGKPKSKDPLGADKQDLADKLISLFYGVVTPMLNPIIYSLRNKDVKAAVRDLIFQKCFA

SEQ ID NO: 38296 - protein, 327 aa, Homo sapiens
MLHTNNTQFHPSTFLVVGVPGLEDVHVWIGFPFFAVYLTALLGNIIILFVIQTEQSLHQPMFYFLAMLAGTDLGLSTATIPKMLGIFWFNLGEIAFGACITQMYTIHICTGLESVVLTVTGIDRYIAICNPLRYSMILTNKVIAILGIVIIVRTLVFVTPFTFLILRLPFCGVRIIPHTYCEHMGLAKLACASINVIYGLIAFSVGYIDISVIGFSYVQILRAVFHLPAWDARPKALSTCGSHVCVMLAFYLPALFSFMTHRFGHNIPHYIHILLANLYVVFPPALNSVIYGVKTKQIREQVLRILNPKSFWHFDPKRIFHNNSVRQ

SEQ ID NO: 38297 - protein, 314 aa, Homo sapiens
MTRKNYTSLTEFVLLGLADTLELQIILFLFFLVIYTLTVLGNLGMILLIRIDSQLHTPMYFFLANLSFVDVCNSTTITPKMLADLLSEKKTISFAGCFLQMYFFISLATTECILFGLMAYDRYAAICRPLLYSLIMSRTVYLKMAAGAFAAGLLNFMVNTSHVSSLSFCDSNVIHHFFCDSPPLFKLSCSDTILKESISSILAGVNIVGTLLVILSSYSYVLFSIFSMHSGEGRHRAFSTCASHLTAIILFYATCIYTYLRPSSSYSLNQDKVASVFYTVVIPMLNPLIYSLRSKEVKKALANVISRKRTSSFL

SEQ ID NO: 38298 - protein, 917 aa, Homo sapiens
MFRKARRVNVRKRNDSEEEERERDEEQEPPPLLPPPGTGEEAGPGGGDRAPGGESLLGPGPSPPSALTPGLGAEAGGGFPGGAEPGNGLKPRKRPRENKEVPRASLLSFQDEEEENEEVFKVKKSSYSKKIVKLLKKEYKEDLEKSKIKTELNSSAESEQPLDKTGHVKDTNQEDGVIISEHGEDEMDMESEKEEEKPKTGGAFSNALSSLNVLRPGEIPDAAFIHAARKKRQMARELGDFTPHDNEPGKGRLVREDENDASDDEDDDEKRRIVFSVKEKSQRQKIAEEIGIEGSDDDALVTGEQDEELSRWEQEQIRKGINIPQVQASQPAEVNMYYQNTYQTMPYGSSYGIPYSYTAYGSSDAKSQKTDNTVPFKTPSNEMTPVTIDLVKKQLKDRLDSMKELHKTNRQQHEKHLQSRVDSTRAIERLEGSSGGIGERYKFLQEMRGYVQDLLECFSEKVPLINELESAIHQLYKQRASRLVQRRQDDIKDESSEFSSHSNKALMAPNLDSFGRDRALYQEHAKRRIAEREARRTRRRQAREQTGKMADHLEGLSSDDEETSTDITNFNLEKDRISKESGKVFEDVLESFYSIDCIKSQFEAWRSKYYTSYKDAYIGLCLPKLFNPLIRLQLLTWTPLEAKCRDFENMLWFESLLFYGCEEREQEKDDVDVALLPTIVEKVILPKLTVIAENMWDPFSTTQTSRMVGITLKLINGYPSVVNAENKNTQVYLKALLLRMRRTLDDDVFMPLYPKNVLENKNSGPYLFFQRQFWSSVKLLGNFLQWYGIFSNKTLQELSIDGLLNRYILMAFQNSEYGDDSIKKAQNVINCFPKQWFMNLKGERTISQLENFCRYLVHLADTIYRNSIGCSDVEKRNARENIKQIVKLLASVRALDHAMSVASDHNVKEFKSLIEGK

SEQ ID NO: 38299 - protein, 815 aa, Homo sapiens
MFRKARRVNVRKRNDSEEEERERDEEQEPPPLLPPPGTGEEAGPGGGDRAPGGESLLGPGPSPPSALTPGLGAEAGGGFPGGAEPGNGLKPRKRPRENKEVPRASLLSFQDEEEENEEVFKVKKSSYSKKIVKLLKKEYKEDLEKSKIKTELNSSAESEQPLDKTGHVKDTNQEDGVIISEHGEDEMDMESEKEEEKPKTGGAFSNALSSLNVLRPGEIPDAAFIHAARKKRQMARELGDFTPHDNEPGKGRLVREDENDASDDEDDDEKRRIVFSVKEKSQRQKIAEEIGIEGSDDDALVTGEQDEELSRWEQEQIRKGINIPQVQASQPAEVNMYYQNTYQTMPYGSSYGIPYSYTAYGSSDAKSQKTDNTVPFKTPSNEMTPVTIDLVKKQLKDRLDSMKELHKTNRQQHEKHLQSRVDSTRAIERLEGSSGGIGERYKFLQEMRGYVQDLLECFSEKVPLINELESAIHQLYKQRASRLVQRRQDDIKDESSEFSSHSNKALMAPNLDSFGRDRALYQEHAKRRIAEREARRTRRRQAREQTGKMADHLEGLSSDDEETSTDITNFNLEKDRISKESGKVFEDVLESFYSIDCIKSQFEAWRSKYYTSYKDAYIGLCLPKLFNPLIRLQLLTWTPLEAKCRDFENMLWFESLLFYGCEEREQEKDDVDVALLPTIVEKVILPKLTVIAENMWDPFSTTQTSRMVGITLKLINGYPSVVNAENKNTQVYLKALLLRMRRTLDDDVFMPLYPKNVLENKNSGPYLFFQRQFWSSVKVIKPPFQRGSCPIPRRKECCSERPRRIWTDRPCVVFS

SEQ ID NO: 38300 - protein, 469 aa, Homo sapiens
MFRKARRVNVRKRNDSEEEERERDEEQEPPPLLPPPGTGEEAGPGGGDRAPGGESLLGPGPSPPSALTPGLGAEAGGGFPGGAEPGNGLKPRKRPRENKEVPRASLLSFQDEEEENEEVFKVKKSSYSKKIVKLLKKEYKEDLEKSKIKTELNSSAESEQPLDKTGHVKDTNQEDGVIISEHGEDEMDMESEKEEEKPKTGGAFSNALSSLNVLRPGEIPDAAFIHAARKKRQMARELGDFTPHDNEPGKGRLVREDENDASDDEDDDEKRRIVFSVKEKSQRQKIAEEIGIEGSDDDALVTGEQDEELSRWEQEQIRKGINIPQVQASQPAEVNMYYQNTYQTMPYGSSYGIPYSYTAYGSSDAKSQKTDNTVPFKTPSNEMTPVTIDLVKKQLKDRLDSMKELHKTNRQQHEKHLQSRVDSTRAIERLEGSSGGIGERYKFLQEMRGYVQDLLECFSEKSVQFRKLL

SEQ ID NO: 38301 - protein, 511 aa, Homo sapiens
MFRKARRVNVRKRNDSEEEERERDEEQEPPPLLPPPGTGEEAGPGGGDRAPGGESLLGPGPSPPSALTPGLGAEAGGGFPGGAEPGNGLKPRKRPRENKEVPRASLLSFQDEEEENEEVFKVKKSSYSKKIVKLLKKEYKEDLEKSKIKTELNSSAESEQPLDKTGHVKDTNQEDGVIISEHGEDEMDMESEKEEEKPKTGGAFSNALSSLNVLRPGEIPDAAFIHAARKKRQMARELGDFTPHDNEPGKGRLVREDENDASDDEDDDEKRRIVFSVKEKSQRQKIAEEIGIEGSDDDALVTGEQDEELSRWEQEQIRKGINIPQVQASQPAEVNMYYQNTYQTMPYGSSYGIPYSYTAYGSSDAKSQKTDNTVPFKTPSNEMTPVTIDLVKKQLKDRLDSMKELHKTNRQQHEKHLQSRVDSTRAIERLEGSSGGIGERYKFLQEMRGYVQDLLECFSEKVPLINELESAIHQLYKQRASRLVQRRQDDIKDESSEFSSHSSQSILKTKL

SEQ ID NO: 38302 - protein, 365 aa, Homo sapiens
MDTGVIEGGLNVTLTIRLLMHGKEVGSIIGKKGESVKKMREESGARINISEGNCPERIITLAGPTNAIFKAFAMIIDKLEEDISSSMTNSTAASRPPVTLRLVVPASQCGSLIGKGGCKIKEIRESTGAQVQVAGDMLPNSTERAITIAGIPQSIIECVKQICVVMLETLSQSPPKGVTIPYRPKPSSSPVIFAGGQDRYSTGSDSASFPHTTPSMCLNPDLEGPPLEAYTIQGQYAIPQPDLTKLHQLAMQQSHFPMTHGNTGFSGIESSSPEVKGYWGLDASAQTTSHELTIPNDLIGCIIGRQGAKINEIRQMSGAQIKIANPVEGSTDRQVTITGSAASISLAQYLINVRLSSETGGMGSS

SEQ ID NO: 38303 - protein, 366 aa, Homo sapiens
MDTGVIEGGLNVTLTIRLLMHGKEVGSIIGKKGESVKKMREESGARINISEGNCPERIITLAGPTNAIFKAFAMIIDKLEEDISSSMTNSTAASRPPVTLRLVVPASQCGSLIGKGGCKIKEIRESTGAQVQVAGDMLPNSTERAITIAGIPQSIIECVKQICVVMLETLSQSPPKGVTIPYRPKPSSSPVIFAGGQDRYSTGSDSASFPHTTPSMCLNPDLEGPPLEAYTIQGQYAIPQPDLTKLHQLAMQQSHFPMTHGNTGFSGIESSSPEVKGYWAGLDASAQTTSHELTIPNDLIGCIIGRQGAKINEIRQMSGAQIKIANPVEGSTDRQVTITGSAASISLAQYLINVRLSSETGGMGSS

SEQ ID NO: 38304 - protein, 362 aa, Homo sapiens
MDTGVIEGGLNVTLTIRLLMHGKEVGSIIGKKGESVKKMREESGARINISEGNCPERIITLAGPTNAIFKAFAMIIDKLEEDISSSMTNSTAASRPPVTLRLVVPASQCGSLIGKGGCKIKEIRESTGAQVQVAGDMLPNSTERAITIAGIPQSIIECVKQICVVMLESPPKGVTIPYRPKPSSSPVIFAGGQDRYSTGSDSASFPHTTPSMCLNPDLEGPPLEAYTIQGQYAIPQPDLTKLHQLAMQQSHFPMTHGNTGFSGIESSSPEVKGYWAGLDASAQTTSHELTIPNDLIGCIIGRQGAKINEIRQMSGAQIKIANPVEGSTDRQVTITGSAASISLAQYLINVRLSSETGGMGSS

SEQ ID NO: 38305 - protein, 331 aa, Homo sapiens
MDTGVIEGGLNVTLTIRLLMHGKEVGSIIGKKGESVKKMREESGARINISEGNCPERIITLAGPTNAIFKAFAMIIDKLEEDISSSMTNSTAASRPPVTLRLVVPASQCGSLIGKGGCKIKEIRESTGAQVQVAGDMLPNSTERAITIAGIPQSIIECVKQICVVMLESPPKGVTIPYRPKPSSSPVIFAGGQAYTIQGQYAIPQPDLTKLHQLAMQQSHFPMTHGNTGFSGIESSSPEVKGYWAGLDASAQTTSHELTIPNDLIGCIIGRQGAKINEIRQMSGAQIKIANPVEGSTDRQVTITGSAASISLAQYLINVRLSSETGGMGSS

SEQ ID NO: 38306 - protein, 335 aa, Homo sapiens
MDTGVIEGGLNVTLTIRLLMHGKEVGSIIGKKGESVKKMREESGARINISEGNCPERIITLAGPTNAIFKAFAMIIDKLEEDISSSMTNSTAASRPPVTLRLVVPASQCGSLIGKGGCKIKEIRESTGAQVQVAGDMLPNSTERAITIAGIPQSIIECVKQICVVMLETLSQSPPKGVTIPYRPKPSSSPVIFAGGQAYTIQGQYAIPQPDLTKLHQLAMQQSHFPMTHGNTGFSGIESSSPEVKGYWAGLDASAQTTSHELTIPNDLIGCIIGRQGAKINEIRQMSGAQIKIANPVEGSTDRQVTITGSAASISLAQYLINVRLSSETGGMGSS

SEQ ID NO: 38307 - protein, 361 aa, Homo sapiens
MDTGVIEGGLNVTLTIRLLMHGKEVGSIIGKKGESVKKMREESGARINISEGNCPERIITLAGPTNAIFKAFAMIIDKLEEDISSSMTNSTAASRPPVTLRLVVPASQCGSLIGKGGCKIKEIRESTGAQVQVAGDMLPNSTERAITIAGIPQSIIECVKQICVVMLESPPKGVTIPYRPKPSSSPVIFAGGQDRYSTGSDSASFPHTTPSMCLNPDLEGPPLEAYTIQGQYAIPQPDLTKLHQLAMQQSHFPMTHGNTGFSGIESSSPEVKGYWGLDASAQTTSHELTIPNDLIGCIIGRQGAKINEIRQMSGAQIKIANPVEGSTDRQVTITGSAASISLAQYLINVRLSSETGGMGSS

SEQ ID NO: 38308 - protein, 318 aa, Homo sapiens
MDTGVIEGGLNVTLTIRLLMHGKEVGSIIGKKGESVKKMREESGARINISEGNCPERIITLAGPTNAIFKAFAMIIDKLEEDISSSMTNSTAASRPPVTLRLVVPASQCGSLIGKGGCKIKEIRESTGAQVQVAGDMLPNSTERAITIAGIPQSIIECVKQICVVMLESPPKGVTIPYRPKPSSSPVIFAGGQAYTIQGQYAIPQPDLTKLHQLAMQQSHFPMTHGNTGFSAGLDASAQTTSHELTIPNDLIGCIIGRQGAKINEIRQMSGAQIKIANPVEGSTDRQVTITGSAASISLAQYLINVRLSSETGGMGSS

SEQ ID NO: 38309 - protein, 322 aa, Homo sapiens
MDTGVIEGGLNVTLTIRLLMHGKEVGSIIGKKGESVKKMREESGARINISEGNCPERIITLAGPTNAIFKAFAMIIDKLEEDISSSMTNSTAASRPPVTLRLVVPASQCGSLIGKGGCKIKEIRESTGAQVQVAGDMLPNSTERAITIAGIPQSIIECVKQICVVMLETLSQSPPKGVTIPYRPKPSSSPVIFAGGQAYTIQGQYAIPQPDLTKLHQLAMQQSHFPMTHGNTGFSAGLDASAQTTSHELTIPNDLIGCIIGRQGAKINEIRQMSGAQIKIANPVEGSTDRQVTITGSAASISLAQYLINVRLSSETGGMGSS

SEQ ID NO: 38310 - protein, 270 aa, Homo sapiens
MVLLKEYRVILPVSVDEYQVGQLYSVAEASKNETGGGEGVEVLVNEPYEKDGEKGQYTHKIYHLQSKVPTFVRMLAPEGALNIHEKAWNAYPYCRTVITNEYMKEDFLIKIETWHKPDLGTQENVHKLEPEAWKHVEAVYIDIADRSQVLSKDYKAEEDPAKFKSIKTGRGPLGPNWKQELVNQKDCPYMCAYKLVTVKFKWWGLQNKVENFIHKQERRLFTNFHRQLFCWLDKWVDLTMDDIRRMEEETKRQLDEMRQKDPVKGMTADD

SEQ ID NO: 38311 - protein, 96 aa, Homo sapiens
MEHKEVVLLLLLFLKSGQGEPLDDYVNTQGPSLFSVTKKQLGAGSREECAAKCEEDKEFTCRAFQYHSKEQQCVIMAENRKSSIIIRMRDAVLFEK

SEQ ID NO: 38312 - protein, 627 aa, Homo sapiens
MARGSVSDEEMMELREAFAKVDTDGNGYISFNELNDLFKAACLPLPGYRVREITENLMATGDLDQDGRISFDEFIKIFHGLKSTDVAKTFRKAINKKEGICAIGGTSEQSSVGTQHSYSEEEKYAFVNWINKALENDPDCRHVIPMNPNTNDLFNAVGDGIVLCKMINLSVPDTIDERTINKKKLTPFTIQENLNLALNSASAIGCHVVNIGAEDLKEGKPYLVLGLLWQVIKIGLFADIELSRNEALIALLREGESLEDLMKLSPEELLLRWANYHLENAGCNKIGNFSTDIKDSKAYYHLLEQVAPKGDEEGVPAVVIDMSGLREKDDIQRAECMLQQAERLGCRQFVTATDVVRGNPKLNLAFIANLFNRYPALHKPENQDIDWGALEGETREERTFRNWMNSLGVNPRVNHLYSDLSDALVIFQLYEKIKVPVDWNRVNKPPYPKLGGNMKKLENCNYAVELGKNQAKFSLVGIGGQDLNEGNRTLTLALIWQLMRRYTLNILEEIGGGQKVNDDIIVNWVNETLREAKKSSSISSFKDPKISTSLPVLDLIDAIQPGSINYDLLKTENLNDDEKLNNAKYAISMARKIGARVYALPEDLVEVNPKMVMTVFACLMGKGMKRV

SEQ ID NO: 38313 - protein, 196 aa, Homo sapiens
MCAEDGDSKFSMSISMNSPFLEILHLENCNYAVELGKNQAKFSLVGIGGQDLNEGNRTLTLALIWQLMRRYTLNILEEIGGGQKVNDDIIVNWVNETLREAKKSSSISSFKDPKISTSLPVLDLIDAIQPGSINYDLLKTENLNDDEKLNNAKYAISMARKIGARVYALPEDLVEVNPKMVMTVFACLMGKGMKRV

SEQ ID NO: 38314 - protein, 182 aa, Homo sapiens
MAEFPSKVSTRTSSPAQGAEASVSALRPDLGFVRSRLGALMLLQLVLGLLVWALIADTPYHLYPAYGWVMFVAVFLWLVTIVLFNLYLFQLHMKLYMVPWPLVLMIFNISATVLYITAFIACSAAVDLTSLRGTRPYNQRAAASFFACLVMIAYGVSAFFSYQAWRGVGSNAATSQMAGGYA

SEQ ID NO: 38315 - protein, 646 aa, Homo sapiens
MEPAAGFLSPRPFQRAAAAPAPPAGPGPPPSALRGPELEMLAGLPTSDPGRLITDPRSGRTYLKGRLLGKGGFARCYEATDTETGSAYAVKVIPQSRVAKPHQREKILNEIELHRDLQHRHIVRFSHHFEDADNIYIFLELCSRKSLAHIWKARHTLLEPEVRYYLRQILSGLKYLHQRGILHRDLKLGNFFITENMELKVGDFGLAARLEPPEQRKKTICGTPNYVAPEVLLRQGHGPEADVWSLGCVMYTLLCGSPPFETADLKETYRCIKQVHYTLPASLSLPARQLLAAILRASPRDRPSIDQILRHDFFTKGYTPDRLPISSCVTVPDLTPPNPARSLFAKVTKSLFGRKKKSKNHAQERDEVSGLVSGLMRTSVGHQDARPEAPAASGPAPVSLVETAPEDSSPRGTLASSGDGFEEGLTVATVVESALCALRNCIAFMPPAEQNPAPLAQPEPLVWVSKWVDYSNKFGFGYQLSSRRVAVLFNDGTHMALSANRKTVHYNPTSTKHFSFSVGAVPRALQPQLGILRYFASYMEQHLMKGGDLPSVEEVEVPAPPLLLQWVKTDQALLMLFSDGTVQVNFYGDHTKLILSGWEPLLVTFVARNRSACTYLASHLRQLGCSPDLRQRLRYALRLLRDRSPA

SEQ ID NO: 38316 - protein, 343 aa, Homo sapiens
MAGGRPHLKRSFSIIPCFVFVESVLLGIVILLAYRLEFTDTFPVHTQGFFCYDSTYAKPYPGPEAASRVPPALVYALVTAGPTLTILLGELARAFFPAPPSAVPVIGESTIVSGACCRFSPPVRRLVRFLGVYSFGLFTTTIFANAGQVVTGNPTPHFLSVCRPNYTALGCLPPSPDRPGPDRFVTDQGACAGSPSLVAAARRAFPCKDAALCAYAVTYTAMYVTLVFRVKGSRLVKPSLCLALLCPAFLVGVVRVAEYRNHWSDVLAGFLTGAAIATFLVTCVVHNFQSRPPSGRRLSPWEDLGQAPTMDSPLEKNPRSAGRIRHRHGSPHPSRRTAPAVAT

SEQ ID NO: 38317 - protein, 427 aa, Homo sapiens
MAGGRPHLKRSFSIIPCFVFVEGFFCYDSTYAKPYPGPEAASRVPPALVYALVTAGPTLTILLGELARAFFPAPPSAVPVIGESTIVSGACCRFSPPVRRLVRFLGVYSFGLFTTTIFANAGQVVTGNPTPHFLSVCRPNYTALGCLPPSPDRPGPDRFVTDQGACAGSPSLVAAARRAFPCKDAALCAYAVTYTAMYVTLVFRVKGSRLVKPSLCLALLCPAFLVGVVRVAEYRNHWSDVLAGFLTGAAIATFLVTCVVHNFQSRPPSGRRLSPWEDLGQAPTMDSPLEKLSVAQEPEVCRPHSTPARLTPSKSQNCARRGHLIPSCVSSRAPAMCSSPRVPRPRLRSEPTPLPLPLPLPAPTPSQGPSPSSPGPGGPGGGGGRGRKLLLPTPLLRDLYTLSGLYPSPFHRDNFSPYLFASRDHLL

SEQ ID NO: 38318 - protein, 862 aa, Homo sapiens
MERAESSSTEPAKAIKPIDRKSVHQICSGQVVLSLSTAVKELVENSLDAGATNIDLKLKDYGVDLIEVSDNGCGVEEENFEGLTLKHHTSKIQEFADLTQVETFGFRGEALSSLCALSDVTISTCHASAKVGTRLMFDHNGKIIQKTPYPRPRGTTVSVQQLFSTLPVRHKEFQRNIKKEYAKMVQVLHAYCIISAGIRVSCTNQLGQGKRQPVVCTGGSPSIKENIGSVFGQKQLQSLIPFVQLPPSDSVCEEYGLSCSDALHNLFYISGFISQCTHGVGRSSTDRQFFFINRRPCDPAKVCRLVNEVYHMYNRHQYPFVVLNISVDSECVDINVTPDKRQILLQEEKLLLAVLKTSLIGMFDSDVNKLNVSQQPLLDVEGNLIKMHAADLEKPMVEKQDQSPSLRTGEEKKDVSISRLREAFSLRHTTENKPHSPKTPEPRRSPLGQKRGMLSSSTSGAISDKGVLRPQKEAVSSSHGPSDPTDRAEVEKDSGHGSTSVDSEGFSIPDTGSHCSSEYAASSPGDRGSQEHVDSQEKAPKTDDSFSDVDCHSNQEDTGCKFRVLPQPTNLATPNTKRFKKEEILSSSDICQKLVNTQDMSASQVDVAVKINKKVVPLDFSMSSLAKRIKQLHHEAQQSEGEQNYRKFRAKICPGENQAAEDELRKEISKTMFAEMEIIGQFNLGFIITKLNEDIFIVDQHATDEKYNFEMLQQHTVLQGQRLIAPQTLNLTAVNEAVLIENLEIFRKNGFDFVIDENAPVTERAKLISLPTSKNWTFGPQDVDELIFMLSDSPGVMCRPSRVKQMFASRACRKSVMIGTALNTSEMKKLITHMGEMDHPWNCPHGRPTMRHIANLGVISQN

SEQ ID NO: 38319 - protein, 461 aa, Homo sapiens
MERAESSSTEPAKAIKPIDRKSVHQICSGQVVLSLSTAVKELVENSLDAGATNIDLKLKDYGVDLIEVSDNGCGVEEENFEGLTLKHHTSKIQEFADLTQVETFGFRGEALSSLCALSDVTISTCHASAKVGTRLMFDHNGKIIQKTPYPRPRGTTVSVQQLFSTLPVRHKEFQRNIKKEYAKMVQVLHAYCIISAGIRVSCTNQLGQGKRQPVVCTGGSPSIKENIGSVFGQKQLQSLIPFVQLPPSDSVCEEYGLSCSDALHNLFYKTMFAEMEIIGQFNLGFIITKLNEDIFIVDQHATDEKYNFEMLQQHTVLQGQRLIAPQTLNLTAVNEAVLIENLEIFRKNGFDFVIDENAPVTERAKLISLPTSKNWTFGPQDVDELIFMLSDSPGVMCRPSRVKQMFASRACRKSVMIGTALNTSEMKKLITHMGEMDHPWNCPHGRPTMRHIANLGVISQN

SEQ ID NO: 38320 - protein, 572 aa, Homo sapiens
MERAESSSTEPAKAIKPIDRKSVHQICSGQVVLSLSTAVKELVENSLDAGATNIDLKLKDYGVDLIEVSDNGCGVEEENFEGLTLKHHTSKIQEFADLTQVETFGFRGEALSSLCALSDVTISTCHASAKVGTRLMFDHNGKIIQKTPYPRPRGTTVSVQQLFSTLPVRHKEFQRNIKKEYAKMVQVLHAYCIISAGIRVSCTNQLGQGKRQPVVCTGGSPSIKENIGSVFGQKQLQSLIPFVQLPPSDSVCEEYGLSCSDALHNLFYISGFISQCTHGVGRSSTDRQFFFINRRPCDPAKVCRLVNEVYHMYNRHQYPFVVLNISVDSECVDINVTPDKRQILLQEEKLLLAVLKTSLIGMFDSDVNKLNVSQQPLLDVEGNLIKMHAADLEKPMVEKQDQSPSLRTGEEKKDVSISRLREAFSLRHTTENKPHSPKTPEPRRSPLGQKRGMLSSSTSGAISDKGVLRPQKEAVSSSHGPSDPTDRAEVEKDSGHGSTSVDSEGFSIPDTGSHCSSEYAASSPGDRGSQEHVDSQEKAPKTDDSFSDVDCHSNQEDTGLKTGPSDPRTSMN

SEQ ID NO: 38321 - protein, 183 aa, Homo sapiens
MERAESSSTEPAKAIKPIDRKSVHQICSGQVVLSLSTAVKELVENSLDAGATNIDLKLKDYGVDLIEVSDNGCGVEEENFEGLTLKHHTSKIQEFADLTQVETFGFRGEALSSLCALSDVTISTCHASAKVGTRLMFDHNGKIIQKTPYPRPRGTTVSVQQLFSTLPVRHKEFQRNIKKQASV

SEQ ID NO: 38322 - protein, 750 aa, Homo sapiens
MPPATGGGLAESELRPRRGRCGPQAARAAGRDVAAEAVARSPKRPAWGSRRFEAVGWWALLALVTLLSFATRFHRLDEPPHICWDETHFGKMGSYYINRTFFFDVHPPLGKMLIGLAGYLSGYDGTFLFQKPGDKYEHHSYMGMRGFCAFLGSWLVPFAYLTVLDLSKSLSAALLTAALLTFDTGCLTLSQYILLDPILMFFIMAAMLSMVKYNSCADRPFSAPWWFWLSLTGVSLAGALGVKFVGLFIILQVGLNTIADLWYLFGDLSLSLVTVGKHLTARVLCLIVLPLALYTATFAVHFMVLSKSGPGDGFFSSAFQARLSGNNLHNASIPEHLAYGSVITVKNLRMAIGYLHSHRHLYPEGIGARQQQVTTYLHKDYNNLWIIKKHNTNSDPLDPSFPVEFVRHGDIIRLEHKETSRNLHSHYHEAPMTRKHYQVTGYGINGTGDSNDFWRIEVVNRKFGNRIKVLRSRIRFIHLVTGCVLGSSGKVLPKWGWEQLEVTCTPYLKETLNSIWNVEDHINPKLPNISLDVLQPSFPEILLESHMVMIRGNSGLKPKDNEFTSKPWHWPINYQGLRFSGVNDTDFRVYLLGNPVVWWLNLLSIALYLLSGSIIAVAMQRGARLPAEVAGLSQVLLRGGGQVLLGWTLHYFPFFLMGRVLYFHHYFPAMLFSSMLTGILWDTLLRLCAWGLASWPLARGIHVAGILSLLLGTAYSFYLFHPLAYGMVGPLAQDPQSPMAGLRWLDSWDF

SEQ ID NO: 38323 - protein, 82 aa, Homo sapiens
MPPATGGGLAESELRPRRGRCGPQAARAAGRDVAAEAVARSPKRPAWGSRRFEAVGWWALLALVTLLSFATRFHRLDEPPHI

SEQ ID NO: 38324 - protein, 747 aa, Homo sapiens
MNHSPLKTALAYECFQDQDNSTLALPSDQKMKTGTSGRQRVQEQVMMTVKRQKSKSSQSSTLSHSNRGSMYDGLADNYNYGTTSRSSYYSKFQAGNGSWGYPIYNGTLKREPDNRRFSSYSQMENWSRHYPRGSCNTTGAGSDICFMQKIKASRSEPDLYCDPRGTLRKGTLGSKGQKTTQNRYSFYSTCSGQKAIKKCPVRPPSCASKQDPVYIPPISCNKDLSFGHSRASSKICSEDIECSGLTIPKAVQYLSSQDEKYQAIGAYYIQHTCFQDESAKQQVYQLGGICKLVDLLRSPNQNVQQAAAGALRNLVFRSTTNKLETRRQNGIREAVSLLRRTGNAEIQKQLTGLLWNLSSTDELKEELIADALPVLADRVIIPFSGWCDGNSNMSREVVDPEVFFNATGCLRKRLGMRELLALVPQRATSSRVNLSSADAGRQTMRNYSGLIDSLMAYVQNCVAASRCDDKSVENCMCVLHNLSYRLDAEVPTRYRQLEYNARNAYTEKSSTGCFSNKSDKMMNNNYDCPLPEEETNPKGSGWLYHSDAIRTYLNLMGKSKKDATLEACAGALQNLTASKGLMSSGMSQLIGLKEKGLPQIARLLQSGNSDVVRSGASLLSNMSRHPLLHRVMGNQVFPEVTRLLTSHTGNTSNSEDILSSACYTVRNLMASQPQLAKQYFSSSMLNNIINLCRSSASPKAAEAARLLLSDMWSSKELQGVLRQQGFDRNMLGTLAGANSLRNFTSRF

SEQ ID NO: 38325 - protein, 726 aa, Homo sapiens
MNHSPLKTALAYECFQDQDNSTLALPSDQKMKTGTSGRQRVQEQVMMTVKRQKSKSSQSSTLSHSNRGSMYDGLADNYNYGTTSRSSYYSKFQAGNGSWGYPIYNGTLKREPDNRRFSSYSQMENWSRHYPRGSCNTTGAGSDICFMQKIKASRSEPDLYCDPRGTLRKGTLGSKGQKTTQNRYSFYSTCSGQKAIKKCPVRPPSCASKQDPVYIPPISCNKDLSFGHSRASSKICSEDIECSGLTIPKAVQYLSSQDEKYQAIGAYYIQHTCFQDESAKQQVYQLGGICKLVDLLRSPNQNVQQAAAGALRNLVFRSTTNKLETRRQNGIREAVSLLRRTGNAEIQKQLTGLLWNLSSTDELKEELIADALPVLADRVIIPFSGWCDGNSNMSREVVDPEVFFNATGCLRNLSSADAGRQTMRNYSGLIDSLMAYVQNCVAASRCDDKSVENCMCVLHNLSYRLDAEVPTRYRQLEYNARNAYTEKSSTGCFSNKSDKMMNNNYDCPLPEEETNPKGSGWLYHSDAIRTYLNLMGKSKKDATLEACAGALQNLTASKGLMSSGMSQLIGLKEKGLPQIARLLQSGNSDVVRSGASLLSNMSRHPLLHRVMGNQVFPEVTRLLTSHTGNTSNSEDILSSACYTVRNLMASQPQLAKQYFSSSMLNNIINLCRSSASPKAAEAARLLLSDMWSSKELQGVLRQQGFDRNMLGTLAGANSLRNFTSRF

SEQ ID NO: 38326 - protein, 227 aa, Homo sapiens
MNIKGSPWKGSLLLLLVSNLLLCQSVAPLPICPGGAARCQVTLRDLFDRAVVLSHYIHNLSSEMFSEFDKRYTHGRGFITKAINSCHTSSLATPEDKEQAQQMNQKDFLSLIVSILRSWNEPLYHLVTEVRGMQEAPEAILSKAVEIEEQTKRLLEGMELIVSQVHPETKENEIYPVWSGLPSLQMADEESRLSAYYNLLHCLRRDSHKIDNYLKLLKCRIIHNNNC

SEQ ID NO: 38327 - protein, 3088 aa, Homo sapiens
MEEFLQRAKSKLNRSKRLEKVHVVIGPKSCDLDSLISTFTYAYFLDKVSPPGVLCLPVLNIPRTEFNYFTETRFILEELNISESFHIFRDEINLHQLNDEGKLSITLVGSSVLASEDKTLESAVVKVINPVEQSDANVEFRESSSSLVLKEILQEAPELITEQLAHRLRGSILFKWMTMESEKISEKQEEILSILEEKFPNLPPREDIINVLQETQFSAQGLSIEQTMLKDLKELSDGEIKVAISTVSMNLENCLFHSNITSDLKAFTDKFGFDVLILFSSYLSEEQQPRRQIAVYSENMELCSQICCELEECQNPCLELEPFDCGCDEILVYQQEDPSVTCDQVVLVVKEVINRRCPEMVSNSRTSSTEAVAGSAPLSQGSSGIMELYGSDIEPQPSSVNFIENPPDLNDSNQAQVDANVDLVSPDSGLATIRSSRSSKESSVFLSDDSPVGEGAGPHHTLLPGLDSYSPIPEGAVAEEHAWSGEHGEHFDLFNFDPAPMASGQSQQSSHSADYSPADDFFPNSDLSEGQLPAGPEGLDGMGTNMSNYSSSSLLSGAGKDSLVEHDEEFVQRQDSPRDNSERNLSLTDFVGDESPSPERLKNTGKRIPPTPMNSLVESSPSTEEPASLYTEDMTQKATDTGHMGPPQTHARCSSWWGGLEIDSKNIADAWSSSEQESVFQSPESWKEHKPSSIDRRASDSVFQPKSLEFTKSGPWESEFGQPELGSNDIQDKNEESLPFQNLPMEKSPLPNTSPQGTNHLIEDFASLWHSGRSPTAMPEPWGNPTDDGEPAAVAPFPAWSAFGKEDHDEALKNTWNLHPTSSKTPSVRDPNEWAMAKSGFAFSSSELLDNSPSEINNEAAPEIWGKKNNDSRDHIFAPGNPSSDLDHTWTNSKPPKEDQNGLVDPKTRGKVYEKVDSWNLFEENMKKGGSDVLVPWEDSFLSYKCSDYSASNLGEDSVPSPLDTNYSTSDSYTSPTFAGDEKETEHKPFAKEEGFESKDGNSTAEETDIPPQSLQQSSRNRISSGPGNLDMWASPHTDNSSEINTTHNLDENELKTEHTDGKNISMEDDVGESSQSSYDDPSMMQLYNETNRQLTLLHSSTNSRQTAPDSLDLWNRVILEDTQSTATISDMDNDLDWDDCSGGAAIPSDGQTEGYMAEGSEPETRFTVRQLEPWGLEYQEANQVDWELPASDEHTKDSAPSEHHTLNEKSGQLIANSIWDSVMRDKDMSSFMLPGSSHITDSEQRELPPEIPSHSANVKDTHSPDAPAASGTSESEALISHLDKQDTERETLQSDAASLATRLENPGYFPHPDPWKGHGDGQSESEKEAQGATDRGHLDEEEVIASGVENASGISEKGQSDQELSSLVASEHQEICIKSGKISSLAVTFSPQTEEPEEVLEYEEGSYNLDSRDVQTGMSADNLQPKDTHEKHLMSQRNSGETTETSDGMNFTKYVSVPEKDLEKTEECNFLEPENVGGGPPHRVPRSLDFGDVPIDSDVHVSSTCSEITKNLDVKGSENSLPGAGSSGNFDRDTISSEYTHSSASSPELNDSSVALSSWGQQPSSGYQEENQGNWSEQNHQESELITTDGQVEIVTKVKDLEKNRINEFEKSFDRKTPTFLEIWNDSVDGDSFSSLSSPETGKYSEHSGTHQESNLIASYQEKNEHDISATVQPEDARVISTSSGSDDDSVGGEESIEEEIQVANCHVAEDESRAWDSLNESNKFLVTADPKSENIYDYLDSSEPAENENKSNPFCDNQQSSPDPWTFSPLTETEMQITAVEKEKRSSPETGTTGDVAWQISPKASFPKNEDNSQLEMLGFSADSTEWWKASPQEGRLIESPFERELSDSSGVLEINSSVHQNASPWGVPVQGDIEPVETHYTNPFSDNHQSPFLEGNGKNSHEQLWNIQPRQPDPDADKFSQLVKLDQIKEKDSREQTFVSAAGDELTPETPTQEQCQDTMLPVCDHPDTAFTHAEENSCVTSNVSTNEGQETNQWEQEKSYLGEMTNSSIATENFPAVSSPTQLIMKPGSEWDGSTPSEDSRGTFVPDILHGNFQEGGQLASAAPDLWIDAKKPFSLKADGENPDILTHCEHDSNSQASDSPDICHDSEAKQETEKHLSACMGPEVESSELCLTEPEIDEEPIYEPGREFVPSNAELDSENATVLPPIGYQADIKGSSQPASHKGSPEPSEINGDNSTGLQVSEKGASPDMAPILEPVDRRIPRIENVATSIFVTHQEPTPEGDGSWISDSFSPESQPGARALFDGDPHLSTENPALVPDALLASDTCLDISEAAFDHSFSDASGLNTSTGTIDDMSKLTLSEGHPETPVDGDLGKQDICSSEASWGDFEYDVMGQNIDEDLLREPEHFLYGGDPPLEEDSLKQSLAPYTPPFDLSYLTEPAQSAETIEEAGSPEDESLGCRAAEIVLSALPDRRSEGNQAETKNRLPGSQLAVLHIREDPESVYLPVGAGSNILSPSNVDWEVETDNSDLPAGGDIGPPNGASKEISELEEEKTIPTKEPEQIKSEYKEERCTEKNEDRHALHMDYILVNREENSHSKPETCEERESIAELELYVGSKETGLQGTQLASFPDTCQPASLNERKGLSAEKMSSKSDTRSSFESPAQDQSWMFLGHSEVGDPSLDARDSGPGWSGKTVEPFSELGLGEGPQLQILEEMKPLESLALEEASGPVSQSQKSKSRGRAGPDAVTLQAVTHDNEWEMLSPQPVQKNMIPDTEMEEETEFLELGTRISRPNGLLSEDVGMDIPFEEGVLSPSAADMRPEPPNSLDLNDTHPRRIKLTAPNINLSLDQSEGSILSDDNLDSPDEIDINVDELDTPDEADSFEYTGHDPTANKDSGQESESIPEYTAEEEREDNRLWRTVVIGEQEQRIDMKVIEPYRRVISHGGYYGDGLNAIIVFAACFLPDSSRADYHYVMENLFLYVISTLELMVAEDYMIVYLNGATPRRRMPGLGWMKKCYQMIDRRLRKNLKSFIIVHPSWFIRTILAVTRPFISSKFSSKIKYVNSLSELSGLIPMDCIHIPESIIKLDEELREASEAAKTSCLYNDPEMSSMEKDIDLKLKEKP

SEQ ID NO: 38328 - protein, 3089 aa, Homo sapiens
MEEFLQRAKSKLNRSKRLEKVHVVIGPKSCDLDSLISTFTYAYFLDKVSPPGVLCLPVLNIPRTEFNYFTETRFILEELNISESFHIFRDEINLHQLNDEGKLSITLVGSSVLASEDKTLESAVVKVINPVEQSDANVEFRESSSSLVLKEILQEAPELITEQLAHRLRGSILFKWMTMESEKISEKQEEILSILEEKFPNLPPREDIINVLQETQFSAQGLSIEQTMLKDLKELSDGEIKVAISTVSMNLENCLFHSNITSDLKAFTDKFGFDVLILFSSYLSEEQQPRRQIAVYSENMELCSQICCELEECQNPCLELEPFDCGCDEILVYQQEDPSVTCDQVVLVVKEVINRRCPEMVSNSRTSSTEAVAGSAPLSQGSSGIMELYGSDIEPQPSSVNFIENPPDLNDSNQAQVDANVDLVSPDSGLATIRSSRSSKESSVFLSDDSPVGEGAGPHHTLLPGLDSYSPIPEGAVAEEHAWSGEHGEHFDLFNFDPAPMASGQSQQSSHSADYSPADDFFPNSDLSEGQLPAGPEGLDGMGTNMSNYSSSSLLSGAGKDSLVEHDEEFVQRQDSPRDNSERNLSLTDFVGDESPSPERLKNTGKRIPPTPMNSLVESSPSTEEPASLYTEDMTQKATDTGHMGPPQTHARCSSWWGGLEIDSKNIADAWSSSEQESVFQSPESWKEHKPSSIDRRASDSVFQPKSLEFTKSGPWESEFGQPELGSNDIQDKNEESLPFQNLPMEKSPLPNTSPQGTNHLIEDFASLWHSGRSPTAMPEPWGNPTDDGEPAAVAPFPAWSAFGKEDHDEALKNTWNLHPTSSKTPSVRDPNEWAMAKSGFAFSSSELLDNSPSEINNEAAPEIWGKKNNDSRDHIFAPGNPSSDLDHTWTNSKPPKEDQNGLVDPKTRGKVYEKVDSWNLFEENMKKGGSDVLVPWEDSFLSYKCSDYSASNLGEDSVPSPLDTNYSTSDSYTSPTFAGDEKETEHKPFAKEEGFESKDGNSTAEETDIPPQSLQQSSRNRISSGPGNLDMWASPHTDNSSEINTTHNLDENELKTEHTDGKNISMEDDVGESSQSSYDDPSMMQLYNETNRQLTLLHSSTNSRQTAPDSLDLWNRVILEDTQSTATISDMDNDLDWDDCSGGAAIPSDGQTEGYMAEGSEPETRFTVRQLEPWGLEYQEANQVDWELPASDEHTKDSAPSEHHTLNEKSGQLIANSIWDSVMRDKDMSSFMLPGSSHITDSEQRELPPEIPSHSANVKDTHSPDAPAASGTSESEALISHLDKQDTERETLQSDAASLATRLENPGYFPHPDPWKGHGDGQSESEKEAQGATDRGHLDEEEVIASGVENASGISEKGQSDQELSSLVASEHQEICIKSGKISSLAVTFSPQTEEPEEVLEYEEGSYNLDSRDVQTGMSADNLQPKDTHEKHLMSQRNSGETTETSDGMNFTKYVSVPEKDLEKTEECNFLEPENVGGGPPHRVPRSLDFGDVPIDSDVHVSSTCSEITKNLDVKGSENSLPGAGSSGNFDRDTISSEYTHSSASSPELNDSSVALSSWGQQPSSGYQEENQGNWSEQNHQESELITTDGQVEIVTKVKDLEKNRINEFEKSFDRKTPTFLEIWNDSVDGDSFSSLSSPETGKYSEHSGTHQESNLIASYQEKNEHDISATVQPEDARVISTSSGSDDDSVGGEESIEEEIQVANCHVAEDESRAWDSLNESNKFLVTADPKSENIYDYLDSSEPAENENKSNPFCDNQQSSPDPWTFSPLTETEMQITAVEKEKRSSPETGTTGDVAWQISPKASFPKNEDNSQLEMLGFSADSTEWWKASPQEGRLIESPFERELSDSSGVLEINSSVHQNASPWGVPVQGDIEPVETHYTNPFSDNHQSPFLEGNGKNSHEQLWNIQPRQPDPDADKFSQLVKLDQIKEKDSREQTFVSAAGDELTPETPTQEQCQDTMLPVCDHPDTAFTHAEENSCVTSNVSTNEGQETNQWEQEKSYLGEMTNSSIATENFPAVSSPTQLIMKPGSEWDGSTPSEDSRGTFVPDILHGNFQEGGQLASAAPDLWIDAKKPFSLKADGENPDILTHCEHDSNSQASDSPDICHDSEAKQETEKHLSACMGPEVESSELCLTEPEIDEEPIYEPGREFVPSNAELDSENATVLPPIGYQADIKGSSQPASHKGSPEPSEINGDNSTGLQVSEKGASPDMAPILEPVDRRIPRIENVATSIFVTHQEPTPEGDGSWISDSFSPESQPGARALFDGDPHLSTENPALVPDALLASDTCLDISEAAFDHSFSDASGLNTSTGTIDDMSKLTLSEGHPETPVDGDLGKQDICSSEASWGDFEYDVMGQNIDEDLLREPEHFLYGGDPPLEEDSLKQSLAPYTPPFDLSYLTEPAQSAETIEEAGSPEDESLGCRAAEIVLSALPDRRSEGNQAETKNRLPGSQLAVLHIREDPESVYLPVGAGSNILSPSNVDWEVETDNSDLPAGGDIGPPNGASKEISELEEEKTIPTKEPEQIKSEYKEERCTEKNEDRHALHMDYILVNREENSHSKPETCEERESIAELELYVGSKETGLQGTQLASFPDTCQPASLNERKGLSAEKMSSKSDTRSSFESPAQDQSWMFLGHSEVGDPSLDARDSGPGWSGKTVEPFSELGLGEGPQLQILEEMKPLESLALEEASGPVSQSQKSKSRGRAGPDAVTLQAVTHDNEWEMLSPQPVQKNMIPDTEMEEETEFLELGTRISRPNGLLSEDVGMDIPFEEGVLSPSAADMRPEPPNSLDLNDTHPRRIKLTAPNINLSLDQSEGSILSDDNLDSPDEIDINVDELDTPDEADSFEYTGHEDPTANKDSGQESESIPEYTAEEEREDNRLWRTVVIGEQEQRIDMKVIEPYRRVISHGGYYGDGLNAIIVFAACFLPDSSRADYHYVMENLFLYVISTLELMVAEDYMIVYLNGATPRRRMPGLGWMKKCYQMIDRRLRKNLKSFIIVHPSWFIRTILAVTRPFISSKFSSKIKYVNSLSELSGLIPMDCIHIPESIIKLDEELREASEAAKTSCLYNDPEMSSMEKDIDLKLKEKP

SEQ ID NO: 38329 - protein, 3092 aa, Homo sapiens
MEEFLQRAKSKLNRSKRLEKVHVVIGPKSCDLDSLISTFTYAYFLDKVSPPGVLCLPVLNIPRTEFNYFTETRFILEELNISESFHIFRDEINLHQLNDEGKLSITLVGSSVLASEDKTLESAVVKVINPVEQSDANVEFRESSSSLVLKEILQEAPELITEQLAHRLRGSILFKWMTMESEKISEKQEEILSILEEKFPNLPPREDIINVLQETQFSAQGLSIEQTMLKDLKELSDGEIKVAISTVSMNLENCLFHSNITSDLKAFTDKFGFDVLILFSSYLSEEQQPRRQIAVYSENMELCSQICCELEECQNPCLELEPFDCGCDEILVYQQEDPSVTCDQVVLVVKEVINRRCPEMVSNSRTSSTEAVAGSAPLSQGSSGIMELYGSDIEPQPSSVNFIENPPDLNDSNQAQVDANVDLVSPDSGLATIRSSRSSKESSVFLSDDSPVGEGAGPHHTLLPGLDSYSPIPEGAVAEEHAWSGEHGEHFDLFNFDPAPMASGQSQQSSHSADYSPADDFFPNSDLSEGQLPAGPEGLDGMGTNMSNYSSSSLLSGAGKDSLVEHDEEFVQRQDSPRDNSERNLSLTDFVGDESPSPERLKNTGKRIPPTPMNSLVESSPSTEEPASLYTEDMTQKATDTGHMGPPQTHARCSSWWGGLEIDSKNIADAWSSSEQESVFQSPESWKEHKPSSIDRRASDSVFQPKSLEFTKSGPWESEFGQPELGSNDIQDKNEESLPFQNLPMEKSPLPNTSPQGTNHLIEDFASLWHSGRSPTAMPEPWGNPTDDGEPAAVAPFPAWSAFGKEDHDEALKNTWNLHPTSSKTPSVRDPNEWAMAKSGFAFSSSELLDNSPSEINNEAAPEIWGKKNNDSRDHIFAPGNPSSDLDHTWTNSKPPKEDQNGLVDPKTRGKVYEKVDSWNLFEENMKKGGSDVLVPWEDSFLSYKCSDYSASNLGEDSVPSPLDTNYSTSDSYTSPTFAGDEKETEHKPFAKEEGFESKDGNSTAEETDIPPQSLQQSSRNRISSGPGNLDMWASPHTDNSSEINTTHNLDENELKTEHTDGKNISMEDDVGESSQSSYDDPSMMQLYNETNRQLTLLHSSTNSRQTAPDSLDLWNRVILEDTQSTATISDMDNDLDWDDCSGGAAIPSDGQTEGYMAEGSEPETRFTVRQLEPWGLEYQEANQVDWELPASDEHTKDSAPSEHHTLNEKSGQLIANSIWDSVMRDKDMSSFMLPGSSHITDSEQRELPPEIPSHSANVKDTHSPDAPAASGTSESEALISHLDKQDTERETLQSDAASLATRLENPGYFPHPDPWKGHGDGQSESEKEAQGATDRGHLDEEEVIASGVENASGISEKGQSDQELSSLVASEHQEICIKSGKISSLAVTFSPQTEEPEEVLEYEEGSYNLDSRDVQTGMSADNLQPKDTHEKHLMSQRNSGETTETSDGMNFTKYVSVPEKDLEKTEECNFLEPENVGGGPPHRVPRSLDFGDVPIDSDVHVSSTCSEITKNLDVKGSENSLPGAGSSGNFDRDTISSEYTHSSASSPELNDSSVALSSWGQQPSSGYQEENQGNWSEQNHQESELITTDGQVEIVTKVKDLEKNRINEFEKSFDRKTPTFLEIWNDSVDGDSFSSLSSPETGKYSEHSGTHQESNLIASYQEKNEHDISATVQPEDARVISTSSGSDDDSVGGEESIEEEIQVANCHVAEDESRAWDSLNESNKFLVTADPKSENIYDYLDSSEPAENENKSNPFCDNQQSSPDPWTFSPLTETEMQITAVEKEKRSSPETGTTGDVAWQISPKASFPKNEDNSQLEMLGFSADSTEWWKASPQEGRLIESPFERELSDSSGVLEINSSVHQNASPWGVPVQGDIEPVETHYTNPFSDNHQSPFLEGNGKNSHEQLWNIQPRQPDPDADKFSQLVKLDQIKEKDSREQTFVSAAGDELTPETPTQEQCQDTMLPVCDHPDTAFTHAEENSCVTSNVSTNEGQETNQWEQEKSYLGEMTNSSIATENFPAVSSPTQLIMKPGSEWDGSTPSEDSRGTFVPDILHGNFQEGGQLASAAPDLWIDAKKPFSLKADGENPDILTHCEHDSNSQASDSPDICHDSEAKQETEKHLSACMGPEVESSELCLTEPEIDEEPIYEPGREFVPSNAELDSENATVLPPIGYQADIKGSSQPASHKGSPEPSEINGDNSTGLQVSEKGASPDMAPILEPVDRRIPRIENVATSIFVTHQEPTPEGDGSWISDSFSPESQPGARALFDGDPHLSTENPALVPDALLASDTCLDISEAAFDHSFSDASGLNTSTGTIDDMSKLTLSEGHPETPVDGDLGKQDICSSEASWGDFEYDVMGQNIDEDLLREPEHFLYGGDPPLEEDSLKQSLAPYTPPFDLSYLTEPAQSAETIEEAGSPEDESLGCRAAEIVLSALPDRRSEGNQAETKNRLPGSQLAVLHIREDPESVYLPVGAGSNILSPSNVDWEVETDNSDLPAGGDIGPPNGASKEISELEEEKTIPTKEPEQIKSEYKEERCTEKNEDRHALHMDYILVNREENSHSKPETCEERESIAELELYVGSKETGLQGTQLASFPDTCQPASLNERKGLSAEKMSSKSDTRSSFESPAQDQSWMFLGHSEVGDPSLDARDSGPGWSGKTVEPFSELGLGEGPQLQILEEMKPLESLALEEASGPVSQSQKSKSRGRAGPDAVTLQAVTHDNEWEMLSPQPVQKNMIPDTEMEEETEFLELGTRISRPNGLLSEDVGMDIPFEEGVLSPSAADMRPEPPNSLDLNDTHPRRIKLTAPNINLSLDQSEGSILSDDNLDSPDEIDINVDELDTPDEADSFEYTGHEDPTANKDSGQESESIPEYTAEEEREDNRLWRTVVIGEQEQRIDMKVIEPYRRVISHGGLRGYYGDGLNAIIVFAACFLPDSSRADYHYVMENLFLYVISTLELMVAEDYMIVYLNGATPRRRMPGLGWMKKCYQMIDRRLRKNLKSFIIVHPSWFIRTILAVTRPFISSKFSSKIKYVNSLSELSGLIPMDCIHIPESIIKLDEELREASEAAKTSCLYNDPEMSSMEKDIDLKLKEKP

SEQ ID NO: 38330 - protein, 3055 aa, Homo sapiens
MEEFLQRAKSKLNRSKRLEKVHVVIGPKSCDLDSLISTFTYAYFLDKVSPPGVLCLPVLNIPRTEFNYFTETRFILEELNISESFHIFRDEINLHQLNDEGKLSITLVGSSVLASEDKTLESAVVKVINPVEQSDANVEFRESSSSLVLKEILQEAPELITEQLAHRLRGSILFKWMTMESEKISEKQEEILSILEEKFPNLPPREDIINVLQETQFSAQGLSIEQTMLKDLKELSDGEIKVAISTVSMNLENCLFHSNITSDLKAFTDKFGFDVLILFSSYLSEEQQPRRQIAVYSENMELCSQICCELEECQNPCLELEPFDCGCDEILVYQQEDPSVTCDQVVLVVKEVINRRCPEMVSNSRTSSTEAVAGSAPLSQGSSGIMELYGSDIEPQPSSVNFIENPPDLNDSNQAQVDANVDLVSPDSGLATIRSSRSSKESSVFLSDDSPVGEGAGPHHTLLPGLDSYSPIPEGAVAEEHAWSGEHGEHFDLFNFDPAPMASGQSQQSSHSADYSPADDFFPNSDLSEGQLPAGPEGLDGMGTNMSNYSSSSLLSGAGKDSLVEHDEEFVQRQDSPRDNSERNLSLTDFVGDESPSPERLKNTGKRIPPTPMNSLVESSPSTEEPASLYTEDMTQKATDTGHMGPPQTHARCSSWWGGLEIDSKNIADAWSSSEQESVFQSPESWKEHKPSSIDRRASDSVFQPKSLEFTKSGPWESEFGQPELGSNDIQDKNEESLPFQNLPMEKSPLPNTSPQGTNHLIEDFASLWHSGRSPTAMPEPWGNPTDDGEPAAVAPFPAWSAFGKEDHDEALKNTWNLHPTSSKTPSVRDPNEWAMAKSGFAFSSSELLDNSPSEINNEAAPEIWGKKNNDSRDHIFAPGNPSSDLDHTWTNSKPPKEDQNGLVDPKTRGKVYEKVDSWNLFEENMKKGGSDVLVPWEDSFLSYKCSDYSASNLGEDSVPSPLDTNYSTSDSYTSPTFAGDEKETEHKPFAKEEGFESKDGNSTAEETDIPPQSLQQSSRNRISSGPGNLDMWASPHTDNSSEINTTHNLDENELKTEHTDGKNISMEDDVGESSQSSYDDPSMMQLYNETNRQLTLLHSSTNSRQTAPDSLDLWNRVILEDTQSTATISDMDNDLDWDDCSGGAAIPSDGQTEGYMAEGSEPETRFTVRQLEPWGLEYQEANQVDWELPASDEHTKDSAPSEHHTLNEKSGQLIANSIWDSVMRDKDMSSFMLPGSSHITDSEQRELPPEIPSHSANVKDTHSPDAPAASGTSESEALISHLDKQDTERETLQSDAASLATRLENPGYFPHPDPWKGHGDGQSESEKEAQGATDRGHLDEEEVIASGVENASGISEKGQSDQELSSLVASEHQEICIKSGKISSLAVTFSPQTEEPEEVLEYEEGSYNLDSRDVQTGMSADNLQPKDTHEKHLMSQRNSGETTETSDGMNFTKYVSVPEKDLEKTEECNFLEPENVGGGPPHRVPRSLDFGDVPIDSDVHVSSTCSEITKNLDVKGSENSLPGAGSSGNFDRDTISSEYTHSSASSPELNDSSVALSSWGQQPSSGYQEENQGNWSEQNHQESELITTDGQVEIVTKVKDLEKNRINEFEKSFDRKTPTFLEIWNDSVDGDSFSSLSSPETGKYSEHSGTHQESNLIASYQEKNEHDISATVQPEDARVISTSSGSDDDSVGGEESIEEEIQVANCHVAEDESRAWDSLNESNKFLVTADPKSENIYDYLDSSEPAENENKSNPFCDNQQSSPDPWTFSPLTETEMQITAVEKEKRSSPETGTTGDVAWQISPKASFPKNEDNSQLEMLGFSADSTEWWKASPQEGRLIESPFERELSDSSGVLEINSSVHQNASPWGVPVQGDIEPVETHYTNPFSDNHQSPFLEGNGKNSHEQLWNIQPRQPDPDADKFSQLVKLDQIKEKDSREQTFVSAAGDELTPETPTQEQCQDTMLPVCDHPDTAFTHAEENSCVTSNVSTNEGQETNQWEQEKSYLGEMTNSSIATENFPAVSSPTQLIMKPGSEWDGSTPSEDSRGTFVPDILHGNFQEGGQLASAAPDLWIDAKKPFSLKADGENPDILTHCEHDSNSQASDSPDICHDSEAKQETEKHLSACMGPEVESSELCLTEPEIDEEPIYEPGREFVPSNAELDSENATVLPPIGYQADIKGSSQPASHKGSPEPSEINGDNSTGLQVSEKGASPDMAPILEPVDRRIPRIENVATSIFVTHQEPTPEGDGSWISDSFSPESQPGARALFDGDPHLSTENPALVPDALLASDTCLDISEAAFDHSFSDASGLNTSTGTIDDMSKLTLSEGHPETPVDGDLGKQDICSSEASWGDFEYDVMGQNIDEDLLREPEHFLYGGDPPLEEDSLKQSLAPYTPPFDLSYLTEPAQSAETIEEAGSPEDESLGCRAAEIVLSALPDRRSEGNQAETKNRLPGSQLAVLHIREDPESVYLPVGAGSNILSPSNVDWEVETDNSDLPAGGDIGPPNGASKEISELEEEKTIPTKEPEQIKSEYKEERCTEKNEDRHALHMDYILVNREENSHSKPETCEERESIAELELYVGSKETGLQGTQLASFPDTCQPASLNERKGLSAEKMSSKSDTRSSFESPAQDQSWMFLGHSEVGDPSLDARDSGPGWSGKTVEPFSELGLGEGPQLQILEEMKPLESLALEEASGPVSQSQKSKSRGRAGPDAVTLQAVTHDNEWEMLSPQPVQKNMIPDTEMEEETEFLELGTRISRPNGLLSEDVGMDIPFEEGVLSPSAADMRPEPPNSLDLNDTHPRRIKLTAPNINLSLDQSEGSILSDDNLDSPDEIDINVDELDTPDEADSFEYTGHEDPTANKDSGQESESIPEYTAEEEREDNRLWRTVVIGEQEQRIDMKVIEPYRRVISHGGLRGYYGDGLNAIIVFAACFLPDSSRADYHYVMENLFLYVISTLELMVAEDYMIVYLNGATPRRRMPGLGWMKKCYQMIDRRLRKNLKSFIIVHPSWFIRTILAVTRPFISSKFSSKIKYVNSLSELSGLIPMDCIHIPESIIKY

SEQ ID NO: 38331 - protein, 352 aa, Homo sapiens
MLKSCSRASFSPSVRKPPLILRRLLSEDVGMDIPFEEGVLSPSAADMRPEPPNSLDLNDTHPRRIKLTAPNINLSLDQSEGSILSDDNLDSPDEIDINVDELDTPDEADSFEYTGHDPTANKDSGQESESIPEYTAEEEREDNRLWRTVVIGEQEQRIDMKVIEPYRRVISHGGYYGDGLNAIIVFAACFLPDSSRADYHYVMENLFLYVISTLELMVAEDYMIVYLNGATPRRRMPGLGWMKKCYQMIDRRLRKNLKSFIIVHPSWFIRTILAVTRPFISSKFSSKIKYVNSLSELSGLIPMDCIHIPESIIKLDEELREASEAAKTSCLYNDPEMSSMEKDIDLKLKEKP

SEQ ID NO: 38332 - protein, 257 aa, Homo sapiens
MAADGVDERSPLLSASHSGNVTPTAPPYLQESSPRAELPPPYTAIASPDASGIPVINCRVCQSLINLDGKLHQHVVKCTVCNEATPIKNPPTGKKYVRCPCNCLLICKDTSRRIGCPRPNCRRIINLGPVMLISEEQPAQPALPIQPEGTRVVCGHCGNTFLWMELRFNTLAKCPHCKKISSVGSALPRRRCCAYITIGMICIFIGVGLTVGTPDFARRFRATYVSWAIAYLLGLICLIRACYWGAIRVSYPEHSFA

SEQ ID NO: 38333 - protein, 691 aa, Homo sapiens
MEIAPQEAPPVPGADGDIEEAPAEAGSPSPASPPADGRLKAAAKRVTFPSDEDIVSGAVEPKDPWRHAQNVTVDEVIGAYKQACQKLNCRQIPKLLRQLQEFTDLGHRLDCLDLKGEKLDYKTCEALEEVFKRLQFKVVDLEQTNLDEDGASALFDMIEYYESATHLNISFNKHIGTRGWQAAAHMMRKTSCLQYLDARNTPLLDHSAPFVARALRIRSSLAVLHLENASLSGRPLMLLATALKMNMNLRELYLADNKLNGLQDSAQLGNLLKFNCSLQILDLRNNHVLDSGLAYICEGLKEQRKGLVTLVLWNNQLTHTGMAFLGMTLPHTQSLETLNLGHNPIGNEGVRHLKNGLISNRSVLRLGLASTKLTCEGAVAVAEFIAESPRLLRLDLRENEIKTGGLMALSLALKVNHSLLRLDLDREPKKEAVKSFIETQKALLAEIQNGCKRNLVLAREREEKEQPPQLSASMPETTATEPQPDDEPAAGVQNGAPSPAPSPDSDSDSDSDGEEEEEEEGERDETPCPALVPPTDSLGPGDRSPPGSPSTPTEQRISVSSPGRGHKVFVVTRVESPPERAEPPASPTPPSPPPPPSPPASPSLPPAGAIDTRDTGSSEPQPPPEPPRSGPPLPNGLKPEFALALPPEPPPGPEVKGGSCGLEHELSCSKNEKELEELLLEASQESGQETL

SEQ ID NO: 38334 - protein, 257 aa, Homo sapiens
MPETTATEPQPDDEPAAGVQNGAPSPAPSPDSDSDSDSDGEEEEEEEGERDETPCPALVPPTDSLGPGDRSPPGSPSTPTEQRISVSSPGRGHKVFVVTRVESPPERAEPPASPTPPSPPPPPSPPASPSLPPAGAIDTRDTGSSEPQPPPEPPRSGPPLPNGLKPEFALALPPEPPPGPEVKGGSCGLEHGERGPRAGVEGPWVLYVTPGKPLPVVGLSFPLFKMVLAGASKVGLSSHLHPASLGSWELFLGWGGM

SEQ ID NO: 38335 - protein, 391 aa, Homo sapiens
MFPNGTASSPSSSPSPSPGSCGEGGGSRGPGAGAADGMEEPGRNASQNGTLSEGQGSAILISFIYSVVCLVGLCGNSMVIYVILRYAKMKTATNIYILNLAIADELLMLSVPFLVTSTLLRHWPFGALLCRLVLSVDAVNMFTSIYCLTVLSVDRYVAVVHPIKAARYRRPTVAKVVNLGVWVLSLLVILPIVVFSRTAANSDGTVACNMLMPEPAQRWLVGFVLYTFLMGFLLPVGAICLCYVLIIAKMRMVALKAGWQQRKRSERKITLMVMMVVMVFVICWMPFYVVQLVNVFAEQDDATVSQLSVILGYANSCANPILYGFLSDNFKRSFQRILCLSWMDNAAEEPVDYYATALKSRAYSVEDFQPENLESGGVFRNGTCTSRITTL

SEQ ID NO: 38336 - protein, 458 aa, Homo sapiens [sequence omitted]

SEQ ID NO: 38337 - protein, 288 aa, Homo sapiens
MEREPSASEAAPAAAALFAWGANSYGQLGLGHKEDVLLPQQLNDFCKPRSVRRITGGGGHSAVVTDGGDLFVCGLNKDGQLGLGHTEDIPYFTPCKSLFGCPIQQVACGWDFTIMLTENGQVLSCGSNSFGQLGVPHGPRRCVVPQAIELHKEKVVCIAAGLRHAVAATASGIVFQWGTGLASCGRRLCPGQTLPLFFTAKEPSRVTGLENSKAMCVLAGSDHSASLTDAGEVYVWGSNKHGQLANEAAFLPVPQKIEAHCFQNEKVTAIWSGWTHLVAQTGLLWLRA

SEQ ID NO: 38338 - protein, 1220 aa, Homo sapiens
MKLKEVDRTAMQAWSPAQNHPIYLATGTSAQQLDATFSTNASLEIFELDLSDPSLDMKSCATFSSSHRYHKLIWGPYKMDSKGDVSGVLIAGGENGNIILYDPSKIIAGDKEVVIAQNDKHTGPVRALDVNIFQTNLVASGANESEIYIWDLNNFATPMTPGAKTQPPEDISCIAWNRQVQHILASASPSGRATVWDLRKNEPIIKVSDHSNRMHCSGLAWHPDVATQMVLASEDDRLPVIQMWDLRFASSPLRVLENHARGILAIAWSMADPELLLSCGKDAKILCSNPNTGEVLYELPTNTQWCFDIQWCPRNPAVLSAASFDGRISVYSIMGGSTDGLRQKQVDKLSSSFGNLDPFGTGQPLPPLQIPQQTAQHSIVLPLKKPPKWIRRPVGASFSFGGKLVTFENVRMPSHQGAEQQQQQHHVFISQVVTEKEFLSRSDQLQQAVQSQGFINYCQKKIDASQTEFEKNVWSFLKVNFEDDSRGKYLELLGYRKEDLGKKIALALNKVDGANVALKDSDQVAQSDGEESPAAEEQLLGEHIKEEKEESEFLPSSGGTFNISVSGDIDGLITQALLTGNFESAVDLCLHDNRMADAIILAIAGGQELLARTQKKYFAKSQSKITRLITAVVMKNWKEIVESCDLKNWREALAAVLTYAKPDEFSALCDLLGTRLENEGDSLLQTQACLCYICAGNVEKLVACWTKAQDGSHPLSLQDLIEKVVILRKAVQLTQAMDTSTVGVLLAAKMSQYANLLAAQGSIAAALAFLPDNTNQPNIMQLRDRLCRAQGEPVAGHESPKIPYEKQQLPKGRPGPVAGHHQMPRVQTQQYYPHGENPPPPGFIMHGNVNPNAAGQLPTSPGHMHTQVPPYPQPQPYQPAQPYPFGTGGSAMYRPQQPVAPPTSNAYPNTPYISSASSYTGQSQLYAAQHQASSPTSSPATSFPPPPSSGASFQHGGPGAPPSSSAYALPPGTTGTLPAASELPASQRTGPQNGWNDPPALNRVPKKKKMPENFMPPVPITSPIMNPLGDPQSQMLQQQPSAPVPLSSQSSFPQPHLPGGQPFHGVQQPLGQTGMPPSFSKPNIEGAPGAPIGNTFQHVQSLPTKKITKKPIPDEHLILKTTFEDLIQRCLSSATDPQTKRKLDDASKRLEFLYDKLREQTLSPTITSGLHNIARSIETRNYSEGLTMHTHIVSTSNFSETSAFMPVLKVVLTQANKLGV

SEQ ID NO: 38339 - protein, 1205 aa, Homo sapiens
MKLKEVDRTAMQAWSPAQNHPIYLATGTSAQQLDATFSTNASLEIFELDLSDPSLDMKSCATFSSSHRYHKLIWGPYKMDSKGDVSGVLIAGGENGNIILYDPSKIIAGDKEVVIAQNDKHTGPVRALDVNIFQTNLVASGANESEIYIWDLNNFATPMTPGAKTQPPEDISCIAWNRQVQHILASASPSGRATVWDLRKNEPIIKVSDHSNRMHCSGLAWHPDVATQMVLASEDDRLPVIQMWDLRFASSPLRVLENHARGILAIAWSMADPELLLSCGKDAKILCSNPNTGEVLYELPTNTQWCFDIQWCPRNPAVLSAASFDGRISVYSIMGGSTDGLRQKQVDKLSSSFGNLDPFGTGQPLPPLQIPQQTAQHSIVLPLKKPPKWIRRPVGASFSFGGKLVTFENVRMPSHQGAEQQQQQHHVFISQVVTEKEFLSRSDQLQQAVQSQGFINYCQKKIDASQTEFEKNVWSFLKVNFEDDSRGKYLELLGYRKEDLGKKIALALNKVDGANVALKDSDQVAQSDGEESPAAEEQLLGEHIKEEKEESEFLPSSGGTFNISVSGDIDGLITQALLTGNFESAVDLCLHDNRMADAIILAIAGGQELLARTQKKYFAKSQSKITRLITAVVMKNWKEIVESCDLKNWREALAAVLTYAKPDEFSALCDLLGTRLENEGDSLLQTQACLCYICAGNVEKLVACWTKAQDGSHPLSLQDLIEKVVILRKAVQLTQAMDTSTVGVLLAAKMSQYANLLAAQGSIAAALAFLPDNTNQPNIMQLRDRLCRAQGEPVAGHESPKIPYEKQQLPKGRPGPVAGHHQMPRVQTQQYYPHGENPPPPGFIMHGNVNPNAAGQLPTSPGHMHTQVPPYPQPQPYQPAQPYPFGTGGSAMYRPQQPVAPPTSNAYPNTPYISSASSYTGQSQLYAAQHQASSPTSSPATSFPPPPSSGASFQHGGPGAPPSSSAYALPPGTTGPQNGWNDPPALNRVPKKKKMPENFMPPVPITSPIMNPLGDPQSQMLQQQPSAPVPLSSQSSFPQPHLPGGQPFHGVQQPLGQTGMPPSFSKPNIEGAPGAPIGNTFQHVQSLPTKKITKKPIPDEHLILKTTFEDLIQRCLSSATDPQTKRKLDDASKRLEFLYDKLREQTLSPTITSGLHNIARSIETRNYSEGLTMHTHIVSTSNFSETSAFMPVLKVVLTQANKLGV

SEQ ID NO: 38340 - protein, 1106 aa, Homo sapiens
MKLKEVDRTAMQAWSPAQNHPIYLATGTSAQQLDATFSTNASLEIFELDLSDPSLDMKSCATFSSSHRYHKLIWGPYKMDSKGDVSGVLIAGGENGNIILYDPSKIIAGDKEVVIAQNDKHTGPVRALDVNIFQTNLVASGANESEIYIWDLNNFATPMTPGAKTQPPEDISCIAWNRQVQHILASASPSGRATVWDLRKNEPIIKVSDHSNRMHCSGLAWHPDVATQMVLASEDDRLPVIQMWDLRFASSPLRVLENHARGILAIAWSMADPELLLSCGKDAKILCSNPNTGEVLYELPTNTQWCFDIQWCPRNPAVLSAASFDGRISVYSIMGGSTDGLRQKQVDKLSSSFGNLDPFGTGQPLPPLQIPQQTAQHSIVLPLKKPPKWIRRPVGASFSFGGKLVTFENVRMPSHQGAEQQQQQHHVFISQVVTEKEFLSRSDQLQQAVQSQGFINYCQKKIDASQTEFEKNVWSFLKVNFEDDSRGKYLELLGYRKEDLGKKIALALNKVDGANVALKDSDQVAQSDGEESPAAEEQLLGEHIKEEKEESEFLPSSGGTFNISVSGDIDGLITQALLTGNFESAVDLCLHDNRMADAIILAIAGGQELLARTQKKYFAKSQSKITRLITAVVMKNWKEIVESCDLKNWREALAAVLTYAKPDEFSALCDLLGTRLENEGDSLLQTQACLCYICAGNVEKLVACWTKAQDGSHPLSLQDLIEKVVILRKAVQLTQAMDTSTVGVLLAAKMSQYANLLAAQGSIAAALAFLPDNTNQPNIMQLRDRLCRAQGEPVAGHESPKIPYEKQQLPKGRPGPVAGHHQMPRVQTQQYYPHGENPPPPGFIMHGNVNPNAAGQLPTSPGHMHTQVPPYPQPQRPQNGWNDPPALNRVPKKKKMPENFMPPVPITSPIMNPLGDPQSQMLQQQPSAPVPLSSQSSFPQPHLPGGQPFHGVQQPLGQTGMPPSFSKPNIEGAPGAPIGNTFQHVQSLPTKKITKKPIPDEHLILKTTFEDLIQRCLSSATDPQTKRKLDDASKRLEFLYDKLREQTLSPTITSGLHNIARSIETRNYSEGLTMHTHIVSTSNFSETSAFMPVLKVVLTQANKLGV

SEQ ID NO: 38341 - protein, 1181 aa, Homo sapiens
MKLKEVDRTAMQAWSPAQNHPIYLATGTSAQQLDATFSTNASLEIFELDLSDPSLDMKSCATFSSSHRYHKLIWGPYKMDSKGDVSGVLIAGGENGNIILYDPSKIIAGDKEVVIAQNDKHTGPVRALDVNIFQTNLVASGANESEIYIWDLNNFATPMTPGAKTQPPEDISCIAWNRQVQHILASASPSGRATVWDLRKNEPIIKVSDHSNRMHCSGLAWHPDVATQMVLASEDDRLPVIQMWDLRFASSPLRVLENHARGILAIAWSMADPELLLSCGKDAKILCSNPNTGEVLYELPTNTQWCFDIQWCPRNPAVLSAASFDGRISVYSIMGGSTDGLRQKQVDKLSSSFGNLDPFGTGQPLPPLQIPQQTAQHSIVLPLKKPPKWIRRPVGASFSFGGKLVTFENVRMPSHQGAEQQQQQHHVFISQVVTEKEFLSRSDQLQQAVQSQGFINYCQKKIDASQTEFEKNVWSFLKVNFEDDSRGKYLELLGYRKEDLGKKHIKEEKEESEFLPSSGGTFNISVSGDIDGLITQALLTGNFESAVDLCLHDNRMADAIILAIAGGQELLARTQKKYFAKSQSKITRLITAVVMKNWKEIVESCDLKNWREALAAVLTYAKPDEFSALCDLLGTRLENEGDSLLQTQACLCYICAGNVEKLVACWTKAQDGSHPLSLQDLIEKVVILRKAVQLTQAMDTSTVGVLLAAKMSQYANLLAAQGSIAAALAFLPDNTNQPNIMQLRDRLCRAQGEPVAGHESPKIPYEKQQLPKGRPGPVAGHHQMPRVQTQQYYPHGENPPPPGFIMHGNVNPNAAGQLPTSPGHMHTQVPPYPQPQPYQPAQPYPFGTGGSAMYRPQQPVAPPTSNAYPNTPYISSASSYTGQSQLYAAQHQASSPTSSPATSFPPPPSSGASFQHGGPGAPPSSSAYALPPGTTGTLPAASELPASQRTGPQNGWNDPPALNRVPKKKKMPENFMPPVPITSPIMNPLGDPQSQMLQQQPSAPVPLSSQSSFPQPHLPGGQPFHGVQQPLGQTGMPPSFSKPNIEGAPGAPIGNTFQHVQSLPTKKITKKPIPDEHLILKTTFEDLIQRCLSSATDPQTKRKLDDASKRLEFLYDKLREQTLSPTITSGLHNIARSIETRNYSEGLTMHTHIVSTSNFSETSAFMPVLKVVLTQANKLGV

SEQ ID NO: 38342 - protein, 509 aa, Homo sapiens
MKLKEVDRTAMQAWSPAQNHPIYLATGTSAQQLDATFSTNASLEIFELDLSDPSLDMKSCATFSSSHRYHKLIWGPYKMDSKGDVSGVLIAGGENGNIILYDPSKIIAGDKEVVIAQNDKHTGPVRALDVNIFQTNLVASGANESEIYIWDLNNFATPMTPGAKTQPPEDISCIAWNRQVQHILASASPSGRATVWDLRKNEPIIKVSDHSNRMHCSGLAWHPDVATQMVLASEDDRLPVIQMWDLRFASSPLRVLENHARGILAIAWSMADPELLLSCGKDAKILCSNPNTGEVLYELPTNTQWCFDIQWCPRNPAVLSAASFDGRISVYSIMGGSTDGLRQKQVDKLSSSFGNLDPFGTGQPLPPLQIPQQTAQHSIVLPLKKPPKWIRRPVGASFSFGGKLVTFENVRMPSHQGAEQQQQQHHVFISQVVTEKEFLSRSDQLQQAVQSQGFINYCQKKIDASQTEFEKNVWSFLKVNFEDDSRGKYLELLGYRKEDLGKKVNFWES

SEQ ID NO: 38343 - protein, 1067 aa, Homo sapiens
MKLKEVDRTAMQAWSPAQNHPIYLATGTSAQQLDATFSTNASLEIFELDLSDPSLDMKSCATFSSSHRYHKLIWGPYKMDSKGDVSGVLIAGGENGNIILYDPSKIIAGDKEVVIAQNDKHTGPVRALDVNIFQTNLVASGANESEIYIWDLNNFATPMTPGAKTQPPEDISCIAWNRQVQHILASASPSGRATVWDLRKNEPIIKVSDHSNRMHCSGLAWHPDVATQMVLASEDDRLPVIQMWDLRFASSPLRVLENHARGILAIAWSMADPELLLSCGKDAKILCSNPNTGEVLYELPTNTQWCFDIQWCPRNPAVLSAASFDGRISVYSIMGGSTDGLRQKQVDKLSSSFGNLDPFGTGQPLPPLQIPQQTAQHSIVLPLKKPPKWIRRPVGASFSFGGKLVTFENVRMPSHQGAEQQQQQHHVFISQVVTEKEFLSRSDQLQQAVQSQGFINYCQKKIDASQTEFEKNVWSFLKVNFEDDSRGKYLELLGYRKEDLGKKHIKEEKEESEFLPSSGGTFNISVSGDIDGLITQALLTGNFESAVDLCLHDNRMADAIILAIAGGQELLARTQKKYFAKSQSKITRLITAVVMKNWKEIVESCDLKNWREALAAVLTYAKPDEFSALCDLLGTRLENEGDSLLQTQACLCYICAGNVEKLVACWTKAQDGSHPLSLQDLIEKVVILRKAVQLTQAMDTSTVGVLLAAKMSQYANLLAAQGSIAAALAFLPDNTNQPNIMQLRDRLCRAQGEPVAGHESPKIPYEKQQLPKGRPGPVAGHHQMPRVQTQQYYPHGENPPPPGFIMHGNVNPNAAGQLPTSPGHMHTQVPPYPQPQRPQNGWNDPPALNRVPKKKKMPENFMPPVPITSPIMNPLGDPQSQMLQQQPSAPVPLSSQSSFPQPHLPGGQPFHGVQQPLGQTGMPPSFSKPNIEGAPGAPIGNTFQHVQSLPTKKITKKPIPDEHLILKTTFEDLIQRCLSSATDPQTKRKLDDASKRLEFLYDKLREQTLSPTITSGLHNIARSIETRNYSEGLTMHTHIVSTSNFSETSAFMPVLKVVLTQANKLGV

SEQ ID NO: 38344 - protein, 969 aa, Homo sapiens
MVKLVLLSIVLLKVTVPKLSNYLLQLDFMPIHRGILAIAWSMADPELLLSCGKDAKILCSNPNTGEVLYELPTNTQWCFDIQWCPRNPAVLSAASFDGRISVYSIMGGSTDGLRQKQVDKLSSSFGNLDPFGTGQPLPPLQIPQQTAQHSIVLPLKKPPKWIRRPVGASFSFGGKLVTFENVRMPSHQGAEQQQQQHHVFISQVVTEKEFLSRSDQLQQAVQSQGFINYCQKKIDASQTEFEKNVWSFLKVNFEDDSRGKYLELLGYRKEDLGKKHIKEEKEESEFLPSSGGTFNISVSGDIDGLITQALLTGNFESAVDLCLHDNRMADAIILAIAGGQELLARTQKKYFAKSQSKITRLITAVVMKNWKEIVESCDLKNWREALAAVLTYAKPDEFSALCDLLGTRLENEGDSLLQTQACLCYICAGNVEKLVACWTKAQDGSHPLSLQDLIEKVVILRKAVQLTQAMDTSTVGVLLAAKMSQYANLLAAQGSIAAALAFLPDNTNQPNIMQLRDRLCRAQGEPVAGHESPKIPYEKQQLPKGRPGPVAGHHQMPRVQTQQYYPHVRIAPTVTTWSNKTPTALPSHPPAASPSDTQGENPPPPGFIMHGNVNPNAAGQLPTSPGHMHTQVPPYPQPQPYQPAQPYPFGTGGSAMYRPQQPVAPPTSNAYPNTPYISSASSYTGQSQLYAAQHQASSPTSSPATSFPPPPSSGASFQHGGPGAPPSSSAYALPPGTTGPQNGWNDPPALNRVPKKKKMPENFMPPVPITSPIMNPLGDPQSQMLQQQPSAPVPLSSQSSFPQPHLPGGQPFHGVQQPLGQTGMPPSFSKPNIEGAPGAPIGNTFQHVQSLPTKKITKKPIPDEHLILKTTFEDLIQRCLSSATDPQTKRKLDDASKRLEFLYDKLREQTLSPTITSGLHNIARSIETRNYSEGLTMHTHIVSTSNFSETSAFMPVLKVVLTQANKLGV

SEQ ID NO: 38345 - protein, 1233 aa, Homo sapiens
MKLKEVDRTAMQAWSPAQNHPIYLATGTSAQQLDATFSTNASLEIFELDLSDPSLDMKSCATFSSSHRYHKLIWGPYKMDSKGDVSGVLIAGGENGNIILYDPSKIIAGDKEVVIAQNDKHTGPVRALDVNIFQTNLVASGANESEIYIWDLNNFATPMTPGAKTQPPEDISCIAWNRQVQHILASASPSGRATVWDLRKNEPIIKVSDHSNRMHCSGLAWHPDVATQMVLASEDDRLPVIQMWDLRFASSPLRVLENHARGILAIAWSMADPELLLSCGKDAKILCSNPNTGEVLYELPTNTQWCFDIQWCPRNPAVLSAASFDGRISVYSIMGGSTDGLRQKQVDKLSSSFGNLDPFGTGQPLPPLQIPQQTAQHSIVLPLKKPPKWIRRPVGASFSFGGKLVTFENVRMPSHQGAEQQQQQHHVFISQVVTEKEFLSRSDQLQQAVQSQGFINYCQKKIDASQTEFEKNVWSFLKVNFEDDSRGKYLELLGYRKEDLGKKIALALNKVDGANVALKDSDQVAQSDGEESPAAEEQLLGEHIKEEKEESEFLPSSGGTFNISVSGDIDGLITQALLTGNFESAVDLCLHDNRMADAIILAIAGGQELLARTQKKYFAKSQSKITRLITAVVMKNWKEIVESCDLKNWREALAAVLTYAKPDEFSALCDLLGTRLENEGDSLLQTQACLCYICAGNVEKLVACWTKAQDGSHPLSLQDLIEKVVILRKAVQLTQAMDTSTVGVLLAAKMSQYANLLAAQGSIAAALAFLPDNTNQPNIMQLRDRLCRAQGEPVAGHESPKIPYEKQQLPKGRPGPVAGHHQMPRVQTQQYYPHGENPPPPGFIMHGNVNPNAAGQLPTSPGHMHTQVPPYPQPQPYQPAQPYPFGTGGSAMYRPQQPVAPPTSNAYPNTPYISSASSYTGQSQLYAAQHQASSPTSSPATSFPPPPSSGASFQHGGPGAPPSSSAYALPPGTTGTLPAASELPASQRTENQSIQDQAPMLEGPQNGWNDPPALNRVPKKKKMPENFMPPVPITSPIMNPLGDPQSQMLQQQPSAPVPLSSQSSFPQPHLPGGQPFHGVQQPLGQTGMPPSFSKPNIEGAPGAPIGNTFQHVQSLPTKKITKKPIPDEHLILKTTFEDLIQRCLSSATDPQTKRKLDDASKRLEFLYDKLREQTLSPTITSGLHNIARSIETRNYSEGLTMHTHIVSTSNFSETSAFMPVLKVVLTQANKLGV

SEQ ID NO: 38346 - protein, 1200 aa, Homo sapiens
MLGESDERCTNAGSGCRRSSPGTSAQQLDATFSTNASLEIFELDLSDPSLDMKSCATFSSSHRYHKLIWGPYKMDSKGDVSGVLIAGGENGNIILYDPSKIIAGDKEVVIAQNDKHTGPVRALDVNIFQTNLVASGANESEIYIWDLNNFATPMTPGAKTQPPEDISCIAWNRQVQHILASASPSGRATVWDLRKNEPIIKVSDHSNRMHCSGLAWHPDVATQMVLASEDDRLPVIQMWDLRFASSPLRVLENHARGILAIAWSMADPELLLSCGKDAKILCSNPNTGEVLYELPTNTQWCFDIQWCPRNPAVLSAASFDGRISVYSIMGGSTDGLRQKQVDKLSSSFGNLDPFGTGQPLPPLQIPQQTAQHSIVLPLKKPPKWIRRPVGASFSFGGKLVTFENVRMPSHQGAEQQQQQHHVFISQVVTEKEFLSRSDQLQQAVQSQGFINYCQKKIDASQTEFEKNVWSFLKVNFEDDSRGKYLELLGYRKEDLGKKIALALNKVDGANVALKDSDQVAQSDGEESPAAEEQLLGEHIKEEKEESEFLPSSGGTFNISVSGDIDGLITQALLTGNFESAVDLCLHDNRMADAIILAIAGGQELLARTQKKYFAKSQSKITRLITAVVMKNWKEIVESCDLKNWREALAAVLTYAKPDEFSALCDLLGTRLENEGDSLLQTQACLCYICAGNVEKLVACWTKAQDGSHPLSLQDLIEKVVILRKAVQLTQAMDTSTVGVLLAAKMSQYANLLAAQGSIAAALAFLPDNTNQPNIMQLRDRLCRAQGEPVAGHESPKIPYEKQQLPKGRPGPVAGHHQMPRVQTQQYYPHGENPPPPGFIMHGNVNPNAAGQLPTSPGHMHTQVPPYPQPQPYQPAQPYPFGTGGSAMYRPQQPVAPPTSNAYPNTPYISSASSYTGQSQLYAAQHQASSPTSSPATSFPPPPSSGASFQHGGPGAPPSSSAYALPPGTTGPQNGWNDPPALNRVPKKKKMPENFMPPVPITSPIMNPLGDPQSQMLQQQPSAPVPLSSQSSFPQPHLPGGQPFHGVQQPLGQTGMPPSFSKPNIEGAPGAPIGNTFQHVQSLPTKKITKKPIPDEHLILKTTFEDLIQRCLSSATDPQTKRKLDDASKRLEFLYDKLREQTLSPTITSGLHNIARSIETRNYSEGLTMHTHIVSTSNFSETSAFMPVLKVVLTQANKLGV

SEQ ID NO: 38347 - protein, 1166 aa, Homo sapiens
MKLKEVDRTAMQAWSPAQNHPIYLATGTSAQQLDATFSTNASLEIFELDLSDPSLDMKSCATFSSSHRYHKLIWGPYKMDSKGDVSGVLIAGGENGNIILYDPSKIIAGDKEVVIAQNDKHTGPVRALDVNIFQTNLVASGANESEIYIWDLNNFATPMTPGAKTQPPEDISCIAWNRQVQHILASASPSGRATVWDLRKNEPIIKVSDHSNRMHCSGLAWHPDVATQMVLASEDDRLPVIQMWDLRFASSPLRVLENHARGILAIAWSMADPELLLSCGKDAKILCSNPNTGEVLYELPTNTQWCFDIQWCPRNPAVLSAASFDGRISVYSIMGGSTDGLRQKQVDKLSSSFGNLDPFGTGQPLPPLQIPQQTAQHSIVLPLKKPPKWIRRPVGASFSFGGKLVTFENVRMPSHQGAEQQQQQHHVFISQVVTEKEFLSRSDQLQQAVQSQGFINYCQKKIDASQTEFEKNVWSFLKVNFEDDSRGKYLELLGYRKEDLGKKHIKEEKEESEFLPSSGGTFNISVSGDIDGLITQALLTGNFESAVDLCLHDNRMADAIILAIAGGQELLARTQKKYFAKSQSKITRLITAVVMKNWKEIVESCDLKNWREALAAVLTYAKPDEFSALCDLLGTRLENEGDSLLQTQACLCYICAGNVEKLVACWTKAQDGSHPLSLQDLIEKVVILRKAVQLTQAMDTSTVGVLLAAKMSQYANLLAAQGSIAAALAFLPDNTNQPNIMQLRDRLCRAQGEPVAGHESPKIPYEKQQLPKGRPGPVAGHHQMPRVQTQQYYPHGENPPPPGFIMHGNVNPNAAGQLPTSPGHMHTQVPPYPQPQPYQPAQPYPFGTGGSAMYRPQQPVAPPTSNAYPNTPYISSASSYTGQSQLYAAQHQASSPTSSPATSFPPPPSSGASFQHGGPGAPPSSSAYALPPGTTGPQNGWNDPPALNRVPKKKKMPENFMPPVPITSPIMNPLGDPQSQMLQQQPSAPVPLSSQSSFPQPHLPGGQPFHGVQQPLGQTGMPPSFSKPNIEGAPGAPIGNTFQHVQSLPTKKITKKPIPDEHLILKTTFEDLIQRCLSSATDPQTKRKLDDASKRLEFLYDKLREQTLSPTITSGLHNIARSIETRNYSEGLTMHTHIVSTSNFSETSAFMPVLKVVLTQANKLGV

SEQ ID NO: 38348 - protein, 1032 aa, Homo sapiens
MSQQGYVATPPYSQPQPGIGLSPPHYGHYGDPSHTASPTGMMKPAGPLGATATRGMLPPGPPPPGPHQFGQNGAHATGHPPQRFPGPPPVNNVASSHAPYQPSAQSSYPGPISTSSVTQLGSQLSAMQINSYGSGMAPPSQGPPGPLSATSLQTPPRPPQPSILQPGSQVLPPPPTTLNGPGASPLPLPMYRPDGLSGPPPPNAQYQPPPLPGQTLGAGYPPQQANSGPQMAGAQLSYPGGFPGGPAQMAGPPQPQKKLDPDSIPSPIQVIENDRASRGGQVYATNTRGQIPPLVTTDCMIQDQGNASPRFIRCTTYCFPCTSDMAKQAQIPLAAVIKPFATIPSNESPLYLVNHGESGPVRCNRCKAYMCPFMQFIEGGRRYQCGFCNCVNDVPPFYFQHLDHIGRRLDHYEKPELSLGSYEYVATLDYCRKSKPPNPPAFIFMIDVSYSNIKNGLVKLICEELKTMLEKIPKEEQEETSAIRVGFITYNKVLHFFNVKSNLAQPQMMVVTDVGEVFVPLLDGFLVNYQESQSVIHNLLDQIPDMFADSNENETVFAPVIQAGMEALKAADCPGKLFIFHSSLPTAEAPGKLKNRDDKKLVNTDKEKILFQPQTNVYDSLAKDCVAHGCSVTLFLFPSQYVDVASLGLVPQLTGGTLYKYNNFQMHLDRQQFLNDLRNDIEKKIGFDAIMRVRTSTGFRATDFFGGILMNNTTDVEMAAIDCDKAVTVEFKHDDKLSEDSGALIQCAVLYTTISGQRRLRIHNLGLNCSSQLADLYKSCETDALINFFAKSAFKAVLHQPLKVIREILVNQTAHMLACYRKNCASPSAASQLILPDSMKVLPVYMNCLLKNCVLLSRPEISTDERAYQRQLVMTMGVADSQLFFYPQLLPIHTLDVKSTMLPAAVRCSESRLSEEGIFLLANGLHMFLWLGVSSPPELIQGIFNVPSFAHINTDMTLLPEVGNPYSQQLRMIMGIIQQKRPYSMKLTIVKQREQPEMVFRQFLVEDKGLYGGSSYVDFLCCVHKEICQLLN

SEQ ID NO: 38349 - protein, 1033 aa, Homo sapiens
MSQQGYVATPPYSQPQPGIGLSPPHYGHYGDPSHTASPTGMMKPAGPLGATATRGMLPPGPPPPGPHQFGQNGAHATGHPPQRFPGPPPVNNVASSHAPYQPSAQSSYPGPISTSSVTQLGSQLSAMQINSYGSGMAPPSQGPPGPLSATSLQTPPRPPQPSILQPGSQVLPPPPTTLNGPGASPLPLPMYRPDGLSGPPPPNAQYQPPPLPGQTLGAGYPPQQAANSGPQMAGAQLSYPGGFPGGPAQMAGPPQPQKKLDPDSIPSPIQVIENDRASRGGQVYATNTRGQIPPLVTTDCMIQDQGNASPRFIRCTTYCFPCTSDMAKQAQIPLAAVIKPFATIPSNESPLYLVNHGESGPVRCNRCKAYMCPFMQFIEGGRRYQCGFCNCVNDVPPFYFQHLDHIGRRLDHYEKPELSLGSYEYVATLDYCRKSKPPNPPAFIFMIDVSYSNIKNGLVKLICEELKTMLEKIPKEEQEETSAIRVGFITYNKVLHFFNVKSNLAQPQMMVVTDVGEVFVPLLDGFLVNYQESQSVIHNLLDQIPDMFADSNENETVFAPVIQAGMEALKAADCPGKLFIFHSSLPTAEAPGKLKNRDDKKLVNTDKEKILFQPQTNVYDSLAKDCVAHGCSVTLFLFPSQYVDVASLGLVPQLTGGTLYKYNNFQMHLDRQQFLNDLRNDIEKKIGFDAIMRVRTSTGFRATDFFGGILMNNTTDVEMAAIDCDKAVTVEFKHDDKLSEDSGALIQCAVLYTTISGQRRLRIHNLGLNCSSQLADLYKSCETDALINFFAKSAFKAVLHQPLKVIREILVNQTAHMLACYRKNCASPSAASQLILPDSMKVLPVYMNCLLKNCVLLSRPEISTDERAYQRQLVMTMGVADSQLFFYPQLLPIHTLDVKSTMLPAAVRCSESRLSEEGIFLLANGLHMFLWLGVSSPPELIQGIFNVPSFAHINTDMTLLPEVGNPYSQQLRMIMGIIQQKRPYSMKLTIVKQREQPEMVFRQFLVEDKGLYGGSSYVDFLCCVHKEICQLLN

SEQ ID NO: 38350 - protein, 1093 aa, Homo sapiens
MSQPGIPASGGAPASLQAQNGAALASGSPYTNGPVQNALLSSQESVSQGYNFQLPGSYPHPIPAKTLNPVSGQSNYGGSQGSGQTLNRPPVASNPVTPSLHSGPAPRMPLPASQNPATTPMPSSSFLPEANLPPPLNWQYNYPSTASQTNHCPRASSQPTVSGNTSLTTNHQYVSSGYPSLQNSFIKSGPSVPPLVNPPLPTTFQPGAPHGPPPAGGPPPVRALTPLTSSYRDVPQPLFNSAVNQEGITSNTNNGSMVVHSSYDEIEGGGLLATPQLTNKNPKMSRSVGYSYPSLPPGYQNTTPPGATGVPPSSLNYPSGPQAFTQTPLGANHLTTSMSGLSLQPEGLRVVNLLQERNMLPSTPLKPPVPNLHEDIQKLNCNPELFRCTLTSIPQTQALLNKAKLPLGLLLHPFKDLVQLPVVTSSTIVRCRSCRTYINPFVSFLDQRRWKCNLCYRVNDVPEEFLYNPLTRVYGEPHRRPEVQNATIEFMAPSEYMLRPPQPPVYLFVFDVSHNAVETGYLNSVCQSLLDNLDLLPGNTRTKIGFITFDSTIHFYGLQESLSQPQMLIVSDIEDVFIPMPENLLVNLNESKELVQDLLKTLPQMFTKTLETQSALGPALQAAFKLMSPTGGRMSVFQTQLPTLGVGALKPREEPNHRSSAKDIHMTPSTDFYKKLALDCSGQQVAVDLFLLSGQYSDLASLGCISRYSAGSVYYYPSYHHQHNPVQVQKLQKELQRYLTRKIGFEAVMRIRCTKGLSIHTFHGNFFVRSTDLLSLPNVNPDAGYAVQMSVEESLTDTQLVSFQSALLYTSSKGERRIRVHTLCLPVVSTLNDVFLGADVQAISGLLANMAVDRSMTASLSDARDALVNAVIDSLSAYRSSVLSNQQPGLMVPFSLRLFPLFVLALLKQKSFQTGTNARLDERIFAMCQVKNQPLVYLMLTTHPSLYRVDNLSDEGALNISDRTIPQPPILQLSVEKLSRDGAFLMDAGSVLMLWVGKNCTQNFLSQVLGVQNYASIPQPMTDLPELDTPESARIIAFISWLREQRPFFPILYVIRDESPMKANFLQNMIEDRTESALSYYEFLLHIQQQVNK

SEQ ID NO: 38351 - protein, 613 aa, Homo sapiens
MSQPGIPASGGAPASLQAQNGAALASGSPYTNGPVQNALLSSQESVSQGYNFQLPGSYPHPIPAKTLNPVSGQSNYGGSQGSGQTLNRPPVASNPVTPSLHSGPAPRMPLPASQNPATTPMPSSSFLPEANLPPPLNWQYNYPSTASQTNHCPRASSQPTVSGNTSLTTNHQYVSSGYPSLQNSFIKSGPSVPPLVNPPLPTTFQPGAPHGPPPAGGPPPVRALTPLTSSYRDVPQPLFNSAVNQEGITSNTNNGSMVVHSSYDEIEGGGLLATPQLTNKNPKMSRSVGYSYPSLPPGYQNTTPPGATGVPPSSLNYPSGPQAFTQTPLGANHLTTSMSGLSLQPEGLRVVNLLQERNMLPSTPLKPPVPNLHEDIQKLNCNPELFRCTLTSIPQTQALLNKAKLPLGLLLHPFKDLVQLPVVTSSTIVRCRSCRTYINPFVSFLDQRRWKCNLCYRVNDVPEEFLYNPLTRVYGEPHRRPEVQNATIEFMAPSEYMLRPPQPPVYLFVFDVSHNAVETGYLNSVCQSLLDNLDLLPGNTRTKIGFITFDSTIHFYGLQESLSQPQMLIVSDIEDVFIPMPENLLVNLNESKESVIGVSSEETLITCLEIAMR

SEQ ID NO: 38352 - protein, 664 aa, Homo sapiens
MDSSTWSPKTTAVTRPVETHELIRNAADISIIVIYFVVVMAVGLWAMFSTNRGTVGGFFLAGRSMVWWPIGASLFASNIGSGHFVGLAGTGAASGIAIGGFEWNALVLVVVLGWLFVPIYIKAGVVTMPEYLRKRFGGQRIQVYLSLLSLLLYIFTKISADIFSGAIFINLALGLNLYLAIFLLLAITALYTITGGLAAVIYTDTLQTVIMLVGSLILTGFAFHEVGGYDAFMEKYMKAIPTIVSDGNTTFQEKCYTPRADSFHIFRDPLTGDLPWPGFIFGMSILTLWYWCTDQVIVQRCLSAKNMSHVKGGCILCGYLKLMPMFIMVMPGMISRILYTEKIACVVPSECEKYCGTKVGCTNIAYPTLVVELMPNGLRGLMLSVMLASLMSSLTSIFNSASTLFTMDIYAKVRKRASEKELMIAGRLFILVLIGISIAWVPIVQSAQSGQLFDYIQSITSYLGPPIAAVFLLAIFWKRVNEPGAFWGLILGLLIGISRMITEFAYGTGSCMEPSNCPTIICGVHYLYFAIILFAISFITIVVISLLTKPIPDVHLYRLCWSLRNSKEERIDLDAEEENIQEGPKETIEIETQVPEKKKGIFRRAYDLFCGLEQHGAPKMTEEEEKAMKMKMTDTSEKPLWRTVLNVNGIILVTVAVFCHAYFA

SEQ ID NO: 38353 - protein, 537 aa, Homo sapiens
MPEYLRKRFGGQRIQVYLSLLSLLLYIFTKISADIFSGAIFINLALGLNLYLAIFLLLAITALYTITGGLAAVIYTDTLQTVIMLVGSLILTGFAFHEVGGYDAFMEKYMKAIPTIVSDGNTTFQEKCYTPRADSFHIFRDPLTGDLPWPGFIFGMSILTLWYWCTDQVIVQRCLSAKNMSHVKGGCILCGYLKLMPMFIMVMPGMISRILYTEKIACVVPSECEKYCGTKVGCTNIAYPTLVVELMPNGLRGLMLSVMLASLMSSLTSIFNSASTLFTMDIYAKVRKRASEKELMIAGRLFILVLIGISIAWVPIVQSAQSGQLFDYIQSITSYLGPPIAAVFLLAIFWKRVNEPGAFWGLILGLLIGISRMITEFAYGTGSCMEPSNCPTIICGVHYLYFAIILFAISFITIVVISLLTKPIPDVHLYRLCWSLRNSKEERIDLDAEEENIQEGPKETIEIETQVPEKKKGIFRRAYDLFCGLEQHGAPKMTEEEEKAMKMKMTDTSEKPLWRTVLNVNGIILVTVAVFCHAYFA

SEQ ID NO: 38354 - protein, 412 aa, Homo sapiens
MDTSPSRKYPVKKRVKIHPNTVMVKYTSHYPQPGDDGYEEINEGYGNFMEENPKKGLLSEMKKKGRAFFGTMDTLPPPTEDPMINEIGQFQSFAEKNIFQSRKMWIVLFGSALAHGCVALITRLVSDRSKVPSLELIFIRSVFQVLSVLVVCYYQEAPFGPSGYRLRLFFYGVCNVISITCAYTSFSIVPPSNGTTMWRATTTVFSAILAFLLVDEKMAYVDMATVVCSILGVCLVMIPNIVDEDNSLLNAWKEAFGYTMTVMAGLTTALSMIVYRSIKEKISMWTALFTFGWTGTIWGISTMFILQEPIIPLDGETWSYLIAICVCSTAAFLGVYYALDKFHPALVSTVQHLEIVVAMVLQLLVLHIFPSIYDVFGGVIIMISVFVLAGYKLYWRNLRKQDYQEILDSPIK

SEQ ID NO: 38355 - protein, 504 aa, Homo sapiens
MEAAATPAAAGAARREELDMDVMRPLINEQNFDGTSDEEHEQELLPVQKHYQLDDQEGISFVQTLMHLLKGNIGTGLLGLPLAIKNAGIVLGPISLVFIGIISVHCMHILVRCSHFLCLRFKKSTLGYSDTVSFAMEVSPWSCLQKQAAWGRSVVDFFLVITQLGFCSVYIVFLAENVKQVHEGFLESKVFISNSTNSSNPCERRSVDLRIYMLCFLPFIILLVFIRELKNLFVLSFLANVSMAVSLVIIYQYVVRNMPDPHNLPIVAGWKKYPLFFGTAVFAFEGIGVVLPLENQMKESKRFPQALNIGMGIVTTLYVTLATLGYMCFHDEIKGSITLNLPQDVWLYQSVKILYSFGIFVTYSIQFYVPAEIIIPGITSKFHTKWKQICEFGIRSFLVSITCAGAILIPRLDIVISFVGAVSSSTLALILPPLVEILTFSKEHYNIWMVLKNISIAFTGVVGFLLGTYITVEEIIYPTPKVVAGTPQSPFLNLNSTCLTSGLK

SEQ ID NO: 38356 - protein, 369 aa, Homo sapiens
MEVSPWSCLQKQAAWGRSVVDFFLVITQLGFCSVYIVFLAENVKQVHEGFLESKVFISNSTNSSNPCERRSVDLRIYMLCFLPFIILLVFIRELKNLFVLSFLANVSMAVSLVIIYQYVVRNMPDPHNLPIVAGWKKYPLFFGTAVFAFEGIGVVLPLENQMKESKRFPQALNIGMGIVTTLYVTLATLGYMCFHDEIKGSITLNLPQDVWLYQSVKILYSFGIFVTYSIQFYVPAEIIIPGITSKFHTKWKQICEFGIRSFLVSITCAGAILIPRLDIVISFVGAVSSSTLALILPPLVEILTFSKEHYNIWMVLKNISIAFTGVVGFLLGTYITVEEIIYPTPKVVAGTPQSPFLNLNSTCLTSGLK

SEQ ID NO: 38357 - protein, 1411 aa, Homo sapiens
MASISEPVTFREFCPLYYLLNAIPTKIQKGFRSIVVYLTALDTNGDYIAVGSSIGMLYLYCRHLNQMRKYNFEGKTESITVVKLLSCFDDLVAAGTASGRVAVFQLVSSLPGRNKQLRRFDVTGIHKNSITALAWSPNGMKLFSGDDKGKIVYSSLDLDQGLCNSQLVLEEPSSIVQLDYSQKVLLVSTLQRSLLFYTEEKSVRQIGTQPRKSTGKFGACFIPGLCKQSDLTLYASRPGLRLWKADVHGTVQATFILKDAFAGGVKPFELHPRLESPNSGSCSLPERHLGLVSCFFQEGWVLSWNEYSIYLLDTVNQATVAGLEGSGDIVSVSCTENEIFFLKGDRNIIRISSRPEGLTSTVRDGLEMSGCSERVHVQQAEKLPGATVSETRLRGSSMASSVASEPRSRSSSLNSTDSGSGLLPPGLQATPELGKGSQPLSQRFNAISSEDFDQELVVKPIKVKRKKKKKKTEGGSRSTCHSSLESTPCSEFPGDSPQSLNTDLLSMTSSVLGSSVDQLSAESPDQESSFNGEVNGVPQENTDPETFNVLEVSGSMPDSLAEEDDIRTEMPHCHHAHGRELLNGAREDVGGSDVTGLGDEPCPADDGPNSTQLPFQEQDSSPGAHDGEDIQPIGPQSTFCEVPLLNSLTVPSSLSWAPSAEQWLPGTRADEGSPVEPSQEQDILTSMEASGHLSTNLWHAVTDDDTGQKEIPISERVLGSVGGQLTPVSALAASTHKPWLEQPPRDQTLTSSDEEDIYAHGLPSSSSETSVTELGPSCSQQDLSRLGAEDAGLLKPDQFAESWMGYSGPGYGILSLVVSEKYIWCLDYKGGLFCSALPGAGLRWQKFEDAVQQVAVSPSGALLWKIEQKSNRAFACGKVTIKGKRHWYEALPQAVFVALSDDTAWIIRTSGDLYLQTGLSVDRPCARAVKVDCPYPLSQITARNNVVWALTEQRALLYREGVSSFCPEGEQWKCDIVSERQALEPVCITLGDQQTLWALDIHGNLWFRTGIISKKPQGDDDHWWQVSITDYVVFDQCSLFQTIIHATHSVATAAQAPVEKVADKLRMAFWSQQLQCQPSLLGVNNSGVWISSGKNEFHVAKGSLIGTYWNHVVPRGTASATKWAFVLASAAPTKEGSFLWLCQSSKDLCSVSAQSAQSRPSTVQLPPEAEMRAYAACQDALWALDSLGQVFIRTLSKSCPTGMHWTRLDLSQLGAVKLTSLACGNQHIWACDSRGGVYFRVGTQPLNPSLMLPAWIMIEPPVQPAGVSLVSVHSSPNDQMLWVLDSRWNVHVRTGITEEMPVGTAWEHVPGLQACQLALSTRTVWARCPNGDLARRYGVTDKNPAGDYWKKIPGSVSCFTVTASDELWAVGPPGYLLQRLTKTFSHSHGTQKSSQAAMPHPEDLEDEWEVI

SEQ ID NO: 38358 - protein, 1267 aa, Homo sapiens
MASISEPVTFREFCPLYYLLNAIPTKIQKGFRSIVVYLTALDTNGDYIAVGSSIGMLYLYCRHLNQMRKYNFEGKTESITVVKLLSCFDDLVAAGTASGRVAVFQLVSSLPGRNKQLRRFDVTGIHKNSITALAWSPNGMKLFSGDDKGKIVYSSLDLDQGLCNSQLVLEEPSSIVQLDYSQKVLLVSTLQRSLLFYTEEKSVRQIGTQPRKSTGKFGACFIPGLCKQSDLTLYASRPGLRLWKADVHGTVQATFILKDAFAGGVKPFELHPRLESPNSGSCSLPERHLGLVSCFFQEGWVLSWNEYSIYLLDTVNQATVAGLEGSGDIVSVSCTENEIFFLKGDRNIIRISSRPEGLTSTVRDGLEMSGCSERVHVQQAEKLPGATVSETRLRGSSMASSVASEPRSRSSSLNSTDSGSGLLPPGLQATPELGKGSQPLSQRFNAISSEDFDQELVVKPIKVKRKKKKKKTEGGSRSTCHSSLESTPCSEFPGDSPQSLNTDLLSMTSSVLGSSVDQLSAESPDQESSFNGEVNGVPQENTDPETFNVLEVSGSMPDSLAEEDDIRTEMPHCHHAHGRELLNGAREDVGGSDVTGLGDEPCPADDGPNSTQLPFQEQDSSPGAHDGEDIQPIGPQSTFCEVPLLNSLTVPSSLSWAPSAEQWLPGTRADEGSPVEPSQEQDILTSMEASGHLSTNLWHAVTDDDTGQKEIPISERVLGSVGGQLTPVSALAASTHKPWLEQPPRDQTLTSSDEEDIYAHGLPSSSSETSVTELGPSCSQQDLSRLGAEDAGLLKPDQFAESWMGYSGPGYGILSLVVSEKYIWCLDYKGGLFCSALPGAGLRWQKFEDAVQQVAVSPSGALLWKIEQKSNRAFACGKVTIKGKRHWYEALPQAVFVALSDDTAWIIRTSGDLYLQTGLSVDRPCARAVKVDCPYPLSQITARNNVVWALTEQRALLYREGVSSFCPEGEQWKCDIVSERQALEPVCITLGDQQTLWALDIHGNLWFRTGIISKKPQGDDDHWWQVSITDYVVFDQCSLFQTIIHATHSVATAAQAPVEKVADKLRMAFWSQQLQCQPSLLGVNNSGVWISSGKNEFHVAKGSLIGTYWNHVVPRGTASATKWAFVLASAAPTKEGSFLWLCQSSKDLCSVSAQSAQSRPSTVQLPPEAEMRAYAACQDALWALDSLGQVFIRTLSKSCPTGMHWTRLDLSQLGAVKLTSLACGNQHIWACDSRGGVYFRVGTQPLNPSLMLPAWIMIEPPVQVSRS

SEQ ID NO: 38359 - protein, 456 aa, Homo sapiens
MEASWGSFNAERGWYVSVQQPEEAEAEELSPLLSNELHRQRSPGVSFGLSVFNLMNAIMGSGILGLAYVLANTGVFGFSFLLLTVALLASYSVHLLLSMCIQTAVTSYEDLGLFAFGLPGKLVVAGTIIIQNIGAMSSYLLIIKTELPAAIAEFLTGDYSRYWYLDGQTLLIIICVGIVFPLALLPKIGFLGYTSSLSFFFMMFFALVVIIKKWSIPCPLTLNYVEKGFQISNVTDDCKPKLFHFSKESAYALPTMAFSFLCHTSILPIYCELQSPSKKRMQNVTNTAIALSFLIYFISALFGYLTFYDKVESELLKGYSKYLSHDVVVMTVKLCILFAVLLTVPLIHFPARKAVTMMFFSNFPFSWIRHFLITLALNIIIVLLAIYVPDIRNVFGVVGASTSTCLIFIFPGLFYLKLSREDFLSWKKLGAFVLLIFGILVGNFSLALIIFDWINK

SEQ ID NO: 38360 - protein, 521 aa, Homo sapiens
MEASWGSFNAERGWYVSVQQPEEAEAEELSPLLSNELHRQRSPGVSFGLSVFNLMNAIMGSGILGLAYVLANTGVFGFSFLLLTVALLASYSVHLLLSMCIQTAVTSYEDLGLFAFGLPGKLVVAGTIIIQNIGAMSSYLLIIKTELPAAIAEFLTGDYSRYWYLDGQTLLIIICVGIVFPLALLPKIGFLGYTSSLSFFFMMFFALVVIIKKWSIPCPLTLNYVEKGFQISNVTDDCKPKLFHFSKESAYALPTMAFSFLCHTSILPIYCELQSPSKKRMQNVTNTAIALSFLIYFISALFGYLTFYDKVESELLKGYSKYLSHDVVVMTVKLCILFAVLLTVPLIHFPARKAVTMMFFSNFPFSWIRHFLITLALNIIIVLLAIYVPDIRNVFGVVGASTSTCLIFIFPGLFYLKLSREDFLSWKKLGGLILSHRLACSGVISAHCNLCLPDSSNPPTSASRVAETTGRDTMEMCTQRKGHARTQQEGNCLQAKGRGLRRTKRVHTLILHFPTSRTVSK

SEQ ID NO: 38361 - protein, 341 aa, Homo sapiens
MATWRRDGRLTGGQRLLCAGLAGTLSLSLTAPLELATVLAQVGVVRGHARGPWATGHRVWRAEGLRALWKGNAVACLRLFPCSAVQLAAYRKFVVLFTDDLGHISQWSSIMAGSLAGMVSTIVTYPTDLIKTRLIMQNILEPSYRGLLHAFSTIYQQEGFLALYRGVSLTVVGALPFSAGSLLVYMNLEKIWNGPRDQFSLPQNFANVCLAAAVTQTLSFPFETVKRKMQAQSPYLPHSGGVDVHFSGAVDCFRQIVKAQGVLGLWNGLTANLLKIVPYFGIMFSTFEFCKRICLYQNGYILSPLSYKLTPGVDQSLQPQELRELKKFFKTRKPKPKKPTL

SEQ ID NO: 38362 - protein, 289 aa, Homo sapiens
MATWRRDGRLTGGQRLLCAGLAGTLSLSLTAPLQLAAYRKFVVLFTDDLGHISQWSSIMAGSLAGMVSTIVTYPTDLIKTRLIMQNILEPSYRGLLHAFSTIYQQEGFLALYRGVSLTVVGALPFSAGSLLVYMNLEKIWNGPRDQFSLPQNFANVCLAAAVTQTLSFPFETVKRKMQAQSPYLPHSGGVDVHFSGAVDCFRQIVKAQGVLGLWNGLTANLLKIVPYFGIMFSTFEFCKRICLYQNGYILSPLSYKLTPGVDQSLQPQELRELKKFFKTRKPKPKKPTL

SEQ ID NO: 38363 - protein, 318 aa, Homo sapiens
MGNGVKEGPVRLHEDAEAVLSSSVSSKRDHRQVLSSLLSGALAGALAKTAVAPLDRTKIIFQVSSKRFSAKEAFRVLYYTYLNEGFLSLWRGNSATMVRVVPYAAIQFSAHEEYKRILGSYYGFRGEALPPWPRLFAGALAGTTAASLTYPLDLVRARMAVTPKEMYSNIFHVFIRISREEGLKTLYHGFMPTVLGVIPYAGLSFFTYETLKSLHREYSGRRQPYPFERMIFGACAGLIGQSASYPLDVVRRRMQTAGVTGYPRASIARTLRTIVREEGAVRGLYKGLSMNWVKGPIAVGISFTTFDLMQILLRHLQS

SEQ ID NO: 38364 - protein, 307 aa, Homo sapiens
MDDFISISLLSLAMLVGCYVAGIIPLAVNFSEERLKLVTVLGAGLLCGTALAVIVPEGVHALYEDILEGKHHQASETHNVIASDKAAEKSVVHEHEHSHDHTQLHAYIGVSLVLGFVFMLLVDQIGNSHVHSTDDPEAARSSNSKITTTLGLVVHAAADGVALGAAASTSQTSVQLIVFVAIMLHKAPAAFGLVSFLMHAGLERNRIRKHLLVFALAAPVMSMVTYLGLSKSSKEALSEVNATGVAMLFSAGTFLYVATVHVLPEVGGIGHSHKPDATGGRGLSRLEVAALVLGCLIPLILSVGHQH

SEQ ID NO: 38365 - protein, 284 aa, Homo sapiens
MDDFISISLLSLAMLVGCYVAGIIPLAVNFSEERLKLVTVLGAGLLCGTALAVIVPEGVHALYEDILEGKHHQASETHNVIASDKAAEKSVVHEHEHSHDHTQLHAYIGVSLVLGFVFMLLVDQIGNSHVHSTDADGVALGAAASTSQTSVQLIVFVAIMLHKAPAAFGLVSFLMHAGLERNRIRKHLLVFALAAPVMSMVTYLGLSKSSKEALSEVNATGVAMLFSAGTFLYVATVHVLPEVGGIGHSHKPDATGGRGLSRLEVAALVLGCLIPLILSVGHQH

SEQ ID NO: 38366 - protein, 232 aa, Homo sapiens
MDDFISISLLSLAMLVGCYVAGIIPLAVNFSEERLKLVTVLGAGLLCGTALAVIVPEGVHALYEDILEGKHHQASETHNVIASDKAAEKSVVHEHEHSHDHTQLHAYIGVSLVLGFVFMLLVDQIGNSHVHSTDDPEAARSSNSKITTTLGLVVHAAADGVALGAAASTSQTSVQLIVFVAIMLHKAPAAFGLVSFLMHAGLERNRIRKHLLVFALAAPVMSMVTYLGLSKD

SEQ ID NO: 38367 - protein, 701 aa, Homo sapiens
MDESPEPLQQGRGPVPVRRQRPAPRGLREMLKARLWCSCSCSVLCVRALVQDLLPATRWLRQYRPREYLAGDVMSGLVIGIILVPQAIAYSLLAGLQPIYSLYTSFFANLIYFLMGTSRHVSVGIFSLLCLMVGQVVDRELQLAGFDPSQDGLQPGANSSTLNGSAAMLDCGRDCYAIRVATALTLMTGLYQVLMGVLRLGFVSAYLSQPLLDGFAMGASVTILTSQLKHLLGVRIPRHQGPGMVVLTWLSLLRGAGQANVCDVVTSTVCLAVLLAAKELSDRYRHRLRVPLPTELLVIVVATLVSHFGQLHKRFGSSVAGDIPTGFMPPQVPEPRLMQRVALDAVALALVAAAFSISLAEMFARSHGYSVRANQELLAVGCCNVLPAFLHCFATSAALAKSLVKTATGCRTQLSSVVSATVVLLVLLALAPLFHDLQRSVLACVIVVSLRGALRKVWDLPRLWRMSPADALVWAGTAATCMLVSTEAGLLAGVILSLLSLAGRTQRPRTALLARIGDTAFYEDATEFEGLVPEPGVRVFRFGGPLYYANKDFFLQSLYSLTGLDAGCMAARRKEGGSETGVGEGGPAQGEDLGPVSTRAALVPAAAGFHTVVIDCAPLLFLDAAGVSTLQDLRRDYGALGISLLLACCSPPVRDILSRGGFLGEGPGDTAEEEQLFLSVHDAVQTARARHRELEATDAHL

SEQ ID NO: 38368 - protein, 224 aa, Homo sapiens
MDESPEPLQQGRGPVPVRRQRPAPRGLREMLKARLWCSCSCSVLCVRALVQDLLPATRWLRQYRPREYLAGDVMSGLVIGIILVPQAIAYSLLAGLQPIYSLYTSFFANLIYFLMGTSRHVSVGIFSLLCLMVGQVVDRELQLAGFDPSQDGLQPGANSSTLNGSAAMLDCGRDCYAIRVATALTLMTGLYQTSWGRNSFQQHPWQLTQRSDSQELLEEEERSC

SEQ ID NO: 38369 - protein, 108 aa, Homo sapiens
MTPSRLPWLLSWVSATAWRAARSPLLCHSLRKTSSSQGGKSELVKQSLKKPKLPEGRFDAPEDSHLEKEPLEKFPDDVNPVTKEKGGPRGPEPTRYGDWERKGRCIDF

SEQ ID NO: 38370 - protein, 308 aa, Homo sapiens
MVSDEDELNLLVIVVDANPIWWGKQALKESQFTLSKCIDAVMVLGNSHLFMNRSNKLAVIASHIQESRFLYPGKNGRLGDFFGDPGNPPEFNPSGSKDGKYELLTSANEVIVEEIKDLMTKSDIKGQHTETLLAGSLAKALCYIHRMNKEVKDNQEMKSRILVIKAAEDSALQYMNFMNVIFAAQKQNILIDACVLDSDSGLLQQACDITGGLYLKVPQMPSLLQYLLWVFLPDQDQRSQLILPPPVHVDYRAACFCHRNLIEIGYVCSVCLSIFCNFSPICTTCETAFKISLPPVLKAKKKKLKVSA

SEQ ID NO: 38371 - protein, 267 aa, Homo sapiens
MVLGNSHLFMNRSNKLAVIASHIQESRFLYPGKNGRLGDFFGDPGNPPEFNPSGSKDGKYELLTSANEVIVEEIKDLMTKSDIKGQHTETLLAGSLAKALCYIHRMNKEVKDNQEMKSRILVIKAAEDSALQYMNFMNVIFAAQKQNILIDACVLDSDSGLLQQACDITGGLYLKVPQMPSLLQYLLWVFLPDQDQRSQLILPPPVHVDYRAACFCHRNLIEIGYVCSVCLSIFCNFSPICTTCETAFKISLPPVLKAKKKKLKVSA

SEQ ID NO: 38372 - protein, 222 aa, Homo sapiens
MVKCCSAIGCASRCLPNSKLKGLTFHVFPTDENIKRKWVLAMKRLDVNAAGIWEPKKGDVLCSRHFKKTDFDRSAPNIKLKPGVIPSIFDSPYHLQGKREKLHCRKNFTLKTVPATNYNHHLVGASSCIEEFQSQFIFEHSYSVMDSPKKLKHKLDHVIGELEDTKESLRNVLDREKRFQKSLRKTIRELKDECLISQETANRLDTFCWDCCQESIEQDYIS

SEQ ID NO: 38373 - protein, 180 aa, Homo sapiens
MVKCCSAIGCASRCLPNSKLKGLTFHVFPTDENIKRKWVLAMKRLDVNAAGIWEPKKGDVLCSRHFKKTDFDRSAPNIKLKPGVIPSIFDSPYHLQEHSYSVMDSPKKLKHKLDHVIGELEDTKESLRNVLDREKRFQKSLRKTIRELKDECLISQETANRLDTFCWDCCQESIEQDYIS

SEQ ID NO: 38374 - protein, 160 aa, Homo sapiens
MVKCCSAIGCASRCLPNSKLKGLTFHVFPTDENIKRKWVLAMKRLDVNAAGIWEPKKGDVLCSRHFKKTDFDRSAPNIKLKPGVIPSIFDSPYHLQGKREKLHCRKNFTLKTVPATNYNHHLVGASSCIEEFQSQFIFKHRKRKQEQEEEQKPRREKCIS

SEQ ID NO: 38375 - protein, 691 aa, Homo sapiens
MCFRTKLSVSWVPLFLLLSRVFSTETDKPSAQDSRSRGSSGQPADLLQVLSAGDHPPHNHSRSLIKTLLEKTGCPRRRNGMQGDCNLCFEPDALLLIAGGNFEDQLREEVVQRVSLLLLYYIIHQEEICSSKLNMSNKEYKFYLHSLLSLRQDEDSSFLSQNETEDILAFTRQYFDTSQSQCMETKTLQKKSGIVSSEGANESTLPQLAAMIITLSLQGVCLGQGNLPSPDYFTEYIFSSLNRTNTLRLSELDQLLNTLWTRSTCIKNEKIHQFQRKQNNIITHDQDYSNFSSSMEKESEDGPVSWDQTCFSARQLVEIFLQKGLSLISKEDFKQMSPGIIQQLLSCSCHLPKDQQAKLPPTTLEKYGYSTVAVTLLTLGSMLGTALVLFHSCEENYRLILQLFVGLAVGTLSGDALLHLIPQVLGLHKQEAPEFGHFHESKGHIWKLMGLIGGIHGFFLIEKCFILLVSPNDKQGLSLVNGHVGHSHHLALNSELSDQAGRGKSASTIQLKSPEDSQAAEMPIGSMTASNRKCKAISLLAIMILVGDSLHNFADGLAIGAAFSSSSESGVTTTIAILCHEIPHEMGDFAVLLSSGLSMKTAILMNFISSLTAFMGLYIGLSVSADPCVQDWIFTVTAGMFLYLSLVEMLPEMTHVQTQRPWMMFLLQNFGLILGWLSLLLLAIYEQNIKI

SEQ ID NO: 38376 - protein, 404 aa, Homo sapiens
MCFRTKLSVSWVPLFLLLSRVFSTETDKPSAQDSRSRGSSGQPADLLQVLSAGDHPPHNHSRSLIKTLLEKTGCPRRRNGMQGDCNLCFEPDALLLIAGGNFEDQLREEVVQRVSLLLLYYIIHQEEICSSKLNMSNKEYKFYLHSLLSLRQDEDSSFLSQNETEDILAFTRQYFDTSQSQCMETKTLQKKSGIVSSEGANESTLPQLAAMIITLSLQGVCLGQGNLPSPDYFTEYIFSSLNRTNTLRLSELDQLLNTLWTRSTCIKNEKIHQFQRKQNNIITHDQDYSNFSSSMEKESEDGPVSWDQTCFSARQLVEIFLQKGLSLISKEDFKQMSPGIIQRWSFSIAVRRTTGLSYSCLWAWPSGHCLGTLCSTLSLRFLVYISRKPQNLGISMKAKVIFGN

SEQ ID NO: 38377 - protein, 654 aa, Homo sapiens
MCFRTKLSVSWVPLFLLLSRVFSTETDKPSAQDSRSRGSSGQPADLLQVLSAGDHPPHNHSRSLIKTLLEKTGCPRRRNGMQGDCNLCFEPDALLLIAGGNFEDQLREEVVQRVSLLLLYYIIHQEEICSSKLNMSNKEYKFYLHSLLSLRQDEDSSFLSQNETEDILAFTRQYFDTSQSQCMETKTLQKKSGIVSSEGANESTLPQLAAMIITLSLQGVCLGQGNLPSPDYFTEYIFSSLNRTNTLRLSELDQLLNTLWTRSTCIKNEKIHQFQRKQNNIITHDQDYSNFSSSMEKESEDGPVSWDQTCFSARQLVEIFLQKGLSLISKEDFKQMSPGIIQQLLSCSCHLPKDQQAKLPPTTLEKYGYSTVAVTLLTLGSMLGTALVLFHSCEENYRLILQLFVGLAVGTLSGDALLHLIPQVLGLHKQEAPEFGHFHESKGHIWKLMGLIGGIHGFFLIEKCFILLVSPNDKKSPEDSQAAEMPIGSMTASNRKCKAISLLAIMILVGDSLHNFADGLAIGAAFSSSSESGVTTTIAILCHEIPHEMGDFAVLLSSGLSMKTAILMNFISSLTAFMGLYIGLSVSADPCVQDWIFTVTAGMFLYLSLVEMLPEMTHVQTQRPWMMFLLQNFGLILGWLSLLLLAIYEQNIKI

SEQ ID NO: 38378 - protein, 690 aa, Homo sapiens
MCFRTKLSVSWVPLFLLLSRVFSTETDKPSAQDSRSRGSSGQPADLLQVLSAGDHPPHNHSRSLIKTLLEKTGCPRRRNGMQGDCNLCFEPDALLLIAGGNFEDQLREEVVQRVSLLLLYYIIHQEEICSSKLNMSNKEYKFYLHSLLSLRQDEDSSFLSQNETEDILAFTRQYFDTSQSQCMETKTLQKKSGIVSSEGANESTLPQLAAMIITLSLQGVCLGQGNLPSPDYFTEYIFSSLNRTNTLRLSELDQLLNTLWTRSTCIKNEKIHQFQRKQNNIITHDQDYSNFSSSMEKESEDGPVSWDQTCFSARQLVEIFLQKGLSLISKEDFKQMSPGIIQQLLSCSCHLPKDQQAKLPPTTLEKYGYSTVAVTLLTLGSMLGTALVLFHSCEENYRLILQLFVGLAVGTLSGDALLHLIPQVLGLHKQEAPEFGHFHESKGHIWKLMGLIGGIHGFFLIEKCFILLVSPNDKGLSLVNGHVGHSHHLALNSELSDQAGRGKSASTIQLKSPEDSQAAEMPIGSMTASNRKCKAISLLAIMILVGDSLHNFADGLAIGAAFSSSSESGVTTTIAILCHEIPHEMGDFAVLLSSGLSMKTAILMNFISSLTAFMGLYIGLSVSADPCVQDWIFTVTAGMFLYLSLVEMLPEMTHVQTQRPWMMFLLQNFGLILGWLSLLLLAIYEQNIKI

SEQ ID NO: 38379 - protein, 557 aa, Homo sapiens
MSNKEYKFYLHSLLSLRQDEDSSFLSQNETEDILAFTRQYFDTSQSQCMETKTLQKKSGIVSSEGANESTLPQLAAMIITLSLQGVCLGQGNLPSPDYFTEYIFSSLNRTNTLRLSELDQLLNTLWTRSTCIKNEKIHQFQRKQNNIITHDQDYSNFSSSMEKESEDGPVSWDQTCFSARQLVEIFLQKGLSLISKEDFKQMSPGIIQQLLSCSCHLPKDQQAKLPPTTLEKYGYSTVAVTLLTLGSMLGTALVLFHSCEENYRLILQLFVGLAVGTLSGDALLHLIPQVLGLHKQEAPEFGHFHESKGHIWKLMGLIGGIHGFFLIEKCFILLVSPNDKQGLSLVNGHVGHSHHLALNSELSDQAGRGKSASTIQLKSPEDSQAAEMPIGSMTASNRKCKAISLLAIMILVGDSLHNFADGLAIGAAFSSSSESGVTTTIAILCHEIPHEMGDFAVLLSSGLSMKTAILMNFISSLTAFMGLYIGLSVSADPCVQDWIFTVTAGMFLYLSLVEMLPEMTHVQTQRPWMMFLLQNFGLILGWLSLLLLAIYEQNIKI

SEQ ID NO: 38380 - protein, 886 aa, Homo sapiens
MSGFSPELIDYLEGKISFEEFERRREERKTREKKSLQEKGKLSAEENPDDSEVPSSSGINSTKSQDKDVNEGETSDGVRKSVHKVFASMLGENEDDEEEEEEEEEEEEEEETPEQPTAGDVFVLEMVLNRETKKMMKEKRPRSKLPRALRGLMGEANIRFARGEREEAILMCMEIIRQAPLAYEPFSTLAMIYEDQGDMEKSLQFELIAAHLNPSDTEEWVRLAEMSLEQDNIKQAIFCYTKALKYEPTNVRYLWERSSLYEQMGDHKMAMDGYRRILNLLSPSDGERFMQLARDMAKSYYEANDVTSAINIIDEAFSKHQGLVSMEDVNIAAELYISNKQYDKALEIITDFSGIVLEKKTSEEGTSEENKAPENVTCTIPDGVPIDITVKLMVCLVHLNILEPLNPLLTTLVEQNPEDMGDLYLDVAEAFLDVGEYNSALPLLSALVCSERYNLAVVWLRHAECLKALGYMERAAESYGKVVDLAPLHLDARISLSTLQQQLGQPEKALEALEPMYDPDTLAQDANAAQQELKLLLHRSTLLFSQGKMYGYVDTLLTMLAMLLKVAMNRAQVCLISSSKSGERHLYLIKVSRDKISDSNDQESANCDAKAIFAVLTSVLTKDDWWNLLLKAIYSLCDLSRFQEAELLVDSSLEYYSFYDDRQKRKELEYFGLSAAILDKNFRKAYNYIRIMVMENVNKPQLWNIFNQVTMHSQDVRHHRFCLRLMLKNPENHALCVLNGHNAFVSGSFKHALGQYVQAFRTHPDEPLYSFCIGLTFIHMASQKYVLRRHALIVQGFSFLNRYLSLRGPCQESFYNLGRGLHQLGLIHLAIHYYQKALELPPLVVEGIELDQLDLRRDIAYNLSLIYQSSGNTGMAQTLLYTYCSI

SEQ ID NO: 38381 - protein, 413 aa, Homo sapiens
MSGFSPELIDYLEGKISFEEFERRREERKTREKKSLQEKGKLSAEENPDDSEVPSSSGINSTKSQDKDVNEGETSDGVRKSVHKVFASMLGENEDDEEEEEEEEEEEEEEETPEQPTAGDVFVLEMVLNRETKKMMKEKRPRSKLPRALRGLMGEANIRFARGEREEAILMCMEIIRQAPLAYEPFSTLAMIYEDQGDMEKSLQFELIAAHLNPSDTEEWVRLAEMSLEQDNIKQAIFCYTKALKYEPTNVRYLWERSSLYEQMGDHKMAMDGYRRILNLLSPSDGERFMQLARDMAKSYYEANDVTSAINIIDEAFSKHQGLVSMEDVNIAAELYISNKQYDKALEIITDFSGIVLEKKTSEEGTSEENKAPENVTCTIPDGVPIDITVKLMVCLVHLNILEPLNVCNKICT

SEQ ID NO: 38382 - protein, 274 aa, Homo sapiens
MPKYCRAPNCSNTAGRLGADNRPVSFYKFPLKDGPRLQAWLQHMGCEHWVPSCHQHLCSEHFTPSCFQWRWGVRYLRPDAVPSIFSRGPPAKSQRRTRSTQKPVSPPPPLQKNTPLPQSPAIPVSGPVRLVVLGPTSGSPKTVATMLLTPLAPAPTPERSQPEVPAQQAQTGLGPVLGALQRRVRRLQRCQERHQAQLQALERLAQQLHGESLLARARRGLQRLTTAQTLGPEESQTFTIICGGPDIAMVLAQDPAPATVDAKPELLDTRIPSA

SEQ ID NO: 38383 - protein, 462 aa, Homo sapiens
MESTPSRGLNRVHLQCRNLQEFLGGLSPGVLDRLYGHPATCLAVFRELPSLAKNWVMRMLFLEQPLPQAAVALWVKKEFSKAQEESTGLLSGLRIWHTQLLPGGLQGLILNPIFRQNLRIALLGGGKAWSDDTSQLGPDKHARDVPSLDKYAEERWEVVLHFMVGSPSAAVSQDLAQLLSQAGLMKSTEPGEPPCITSAGFQFLLLDTPAQLWYFMLQYLQTAQSRGMDLVEILSFLFQLSFSTLGKDYSVEGMSDSLLNFLQHLREFGLVFQRKRKSRRYYPTRLAINLSSGVSGAGGTVHQPGFIVVETNYRLYAYTESELQIALIALFSEMLYRFPNMVVAQVTRESVQQAIASGITAQQIIHFLRTRAHPVMLKQTPVLPPTITDQIRLWELERDRLRFTEGVLYNQFLSQVDFELLLAHARELGVLVFENSAKRLMVVTPAGHSDVKRFWKRQKHSS

SEQ ID NO: 38384 - protein, 220 aa, Homo sapiens
MRMLFLEQPLPQAAVALWVKKEFSKAQEESTGLLSGLRIWHTQLLPGGLQGLILNPIFRQNLRIALLGGGKAWSDDTSQLGPDKHARDVPSLDKYAEERWEVVLHFMVGSPSAAVSQDLAQLLSQAGLMKSTEPGEPPCITSAGFQFLLLDTPAQLWYFMLQYLQTAQSRGMDLVEILSFLFQLSFSTLGKDYSVEGMSDSLLNFLQHLREFGLVFQRKV

SEQ ID NO: 38385 - protein, 760 aa, Homo sapiens
MMDQARSAFSNLFGGEPLSYTRFSLARQVDGDNSHVEMKLAVDEEENADNNTKANVTKPKRCSGSICYGTIAVIVFFLIGFMIGYLGYCKGVEPKTECERLAGTESPVREEPGEDFPAARRLYWDDLKRKLSEKLDSTDFTGTIKLLNENSYVPREAGSQKDENLALYVENQFREFKLSKVWRDQHFVKIQVKDSAQNSVIIVDKNGRLVYLVENPGGYVAYSKAATVTGKLVHANFGTKKDFEDLYTPVNGSIVIVRAGKITFAEKVANAESLNAIGVLIYMDQTKFPIVNAELSFFGHAHLGTGDPYTPGFPSFNHTQFPPSRSSGLPNIPVQTISRAAAEKLFGNMEGDCPSDWKTDSTCRMVTSESKNVKLTVSNVLKEIKILNIFGVIKGFVEPDHYVVVGAQRDAWGPGAAKSGVGTALLLKLAQMFSDMVLKDGFQPSRSIIFASWSAGDFGSVGATEWLEGYLSSLHLKAFTYINLDKAVLGTSNFKVSASPLLYTLIEKTMQNVKHPVTGQFLYQDSNWASKVEKLTLDNAAFPFLAYSGIPAVSFCFCEDTDYPYLGTTMDTYKELIERIPELNKVARAAAEVAGQFVIKLTHDVELNLDYERYNSQLLSFVRDLNQYRADIKEMGLSLQWLYSARGDFFRATSRLTTDFGNAEKTDRFVMKKLNDRVMRVEYHFLSPYVSPKESPFRHVFWGSGSHTLPALLENLKLRKQNNGAFNETLFRNQLALATWTIQGAANALSGDVWDIDNEF

SEQ ID NO: 38386 - protein, 903 aa, Homo sapiens
MTRSCSAVGCSTRDTVLSRERGLSFHQFPTDTIQRSKWIRAVNRVDPRSKKIWIPGPGAILCSKHFQESDFESYGIRRKLKKGAVPSVSLYKIPQGVHLKGKARQKILKQPLPDNSQEVATEDHNYSLKTPLTIGAEKLAEVQQMLQVSKKRLISVKNYRMIKKRKGLRLIDALVEEKLLSEETECLLRAQFSDFKWELYNWRETDEYSAEMKQFACTLYLCSSKVYDYVRKILKLPHSSILRTWLSKCQPSPGFNSNIFSFLQRRVENGDQLYQYCSLLIKSMPLKQQLQWDPSSHSLQGFMDFGLGKLDADETPLASETVLLMAVGIFGHWRTPLGYFFVNRASGYLQAQLLRLTIGKLSDIGITVLAVTSDATAHSVQMAKALGIHIDGDDMKCTFQHPSSSSQQIAYFFDSCHLLRLIRNAFQNFQSIQFINGIAHWQHLVELVALEEQELSNMERIPSTLANLKNHVLKVNSATQLFSESVASALEYLLSLDLPPFQNCIGTIHFLRLINNLFDIFNSRNCYGKGLKGPLLPETYSKINHVLIEAKTIFVTLSDTSNNQIIKGKQKLGFLGFLLNAESLKWLYQNYVFPKVMPFPYLLTYKFSHDHLELFLKMLRQVLVTSSSPTCMAFQKAYYNLETRYKFQDEVFLSKVSIFDISIARRKDLALWTVQRQYGVSVTKTVFHEEGICQDWSHCSLSEALLDLSDHRRNLICYAGYVANKLSALLTCEDCITALYASDLKASKIGSLLFVKKKNGLHFPSESLCRVINICERVVRTHSRMAIFELVSKQRELYLQQKILCELSGHINLFVDVNKHLFDGEVCAINHFVKLLKDIIICFLNIRAKNVAQNPLKHHSERTDMKTLSRKHWSSVQDYKCSSFANTSSKFRHLLSNDGYPFK

SEQ ID NO: 38387 - protein, 822 aa, Homo sapiens
MNTADQARVGPADDGPAPSGEEEGEGGGEAGGKEPAADAAPGPSAAFRLMVTRREPAVKLQYAVSGLEPLAWSEDHRVSVSTARSIAVLELICDVHNPGQDLVIHRTSVPAPLNSCLLKVGSKTEVAECKEKFAASKDPTVSQTFMLDRVFNPEGKALPPMRGFKYTSWSPMGCDANGRCLLAALTMDNRLTIQANLNRLQWVQLVDLTEIYGERLYETSYRLSKNEAPEGNLGDFAEFQRRHSMQTPVRMEWSGICTTQQVKHNNECRDVGSVLLAVLFENGNIAVWQFQLPFVGKESISSCNTIESGITSPSVLFWWEYEHNNRKMSGLIVGSAFGPIKILPVNLKAVKGYFTLRQPVILWKEMDQLPVHSIKCVPLYHPYQKCSCSLVVAARGSYVFWCLLLISKAGLNVHNSHVTGLHSLPIVSMTADKQNGTVYTCSSDGKVRQLIPIFTDVALKFEHQLIKLSDVFGSVRTHGIAVSPCGAYLAIITTEGMINGLHPVNKNYQVQFVTLKTFEEAAAQLLESSVQNLFKQVDLIDLVRWKILKDKHIPQFLQEALEKKIESSGVTYFWRFKLFLLRILYQSMQKTPSEALWKPTHEDSKILLVDSPGMGNADDEQQEEGTSSKQVVKQGLQERSKEGDVEEPTDDSLPTTGDAGGREPMEEKLLEIQGKIEAVEMHLTREHMKRVLGEVYLHTWITENTSIPTRGLCNFLMSDEEYDDRTARVLIGHISKKMNKQTFPEHCSLCKEILPFTDRKQAVCSNGHIWLRCFLTYQSCQSLIYRRCLLHDSIARHPAPEDPDWIKRLLQSPCPFCDSPVF

SEQ ID NO: 38388 - protein, 519 aa, Homo sapiens
MAAEAADLGLGAAVPVELRRERRMVCVEYPGVVRDVAKMLPTLGGEEGVSRIYADPTKRLELYFRPKDPYCHPVCANRFSTSSLLLRIRKRTRRQKGVLGTEAHSEVTFDMEILGIISTIYKFQGMSDFQYLAVHTEAGGKHTSMYDKVLMLRPEKEAFFHQELPLYIPPPIFSRLDAPVDYFYRPETQHREGYNNPPISGENLIGLSRARRPHNAIFVNFEDEEVPKQPLEAAAQTWRRVCTNPVDRKVEEELRKLFDIRPIWSRNAVKANISVHPDKLKVLLPFIAYYMITGPWRSLWIRFGYDPRKNPDAKIYQVLDFRIRCGMKHGYAPSDLPVKAKRSTYNYSLPITVKKTSSQLVTMHDLKQGLGPSGTSGARKPASSKYKLKDSVYIFREGALPPYRQMFYQLCDLNVEELQKIIHRNDGAENSCTERDGWCLPKTSDELRDTMSLMIRQTIRSKRPALFSSSAKADGGKEQLTYESGEDEEDEEEEEEEEEDFKPSDGSENEMETEILDYV

SEQ ID NO: 38389 - protein, 509 aa, Homo sapiens
MAAEAADLGLGAAVPVELRRERRMVCVEYPGVVRDVAKMLPTLGGEEGVSRIYADPKDPYCHPVCANRFSTSSLLLRIRKRTRRQKGVLGTEAHSEVTFDMEILGIISTIYKFQGMSDFQYLAVHTEAGGKHTSMYDKVLMLRPEKEAFFHQELPLYIPPPIFSRLDAPVDYFYRPETQHREGYNNPPISGENLIGLSRARRPHNAIFVNFEDEEVPKQPLEAAAQTWRRVCTNPVDRKVEEELRKLFDIRPIWSRNAVKANISVHPDKLKVLLPFIAYYMITGPWRSLWIRFGYDPRKNPDAKIYQVLDFRIRCGMKHGYAPSDLPVKAKRSTYNYSLPITVKKTSSQLVTMHDLKQGLGPSGTSGARKPASSKYKLKDSVYIFREGALPPYRQMFYQLCDLNVEELQKIIHRNDGAENSCTERDGWCLPKTSDELRDTMSLMIRQTIRSKRPALFSSSAKADGGKEQLTYESGEDEEDEEEEEEEEEDFKPSDGSENEMETEILDYV

SEQ ID NO: 38390 - protein, 526 aa, Homo sapiens
MAAEAADLGLGAAVPVELRRERRMVCVEYPGVVRDVAKMLPTLGGEEGVSRIYADPTKRLELYFRPKDPYCHPVCANRFSTSSLLLRIRKRTRRQKGVLGTEAHSEVTFDMEILGIISTIYKFQGMSDFQYLAVHTEAGGKHTSMYDKVLMLRPEKEAFFHQELPLYIPPPIFSRLDAPVDYFYRPETQHREGYNNPPISGENLIGLSRARRPHNAIFVNFEDEEVPKQPLEAAAQTWRRVCTNPVDRKVEEELRKLFDIRPIWSRNAVKANISVHPDKLKVLLPFIAYYMITGPWRSLWIRFGYDPRKNPDAKIYQVLDFRIRCGMKHGYAPSDLPVKAKRSTYNYSLPITVKKTSSQLVTMHDLKQGLGPSGTSGARKPASSKYKLKVSLQTLRDSVYIFREGALPPYRQMFYQLCDLNVEELQKIIHRNDGAENSCTERDGWCLPKTSDELRDTMSLMIRQTIRSKRPALFSSSAKADGGKEQLTYESGEDEEDEEEEEEEEEDFKPSDGSENEMETEILDYV

SEQ ID NO: 38391 - protein, 71 aa, Homo sapiens
MVNVLKGVLIECDPAMKQFLLYLDESNALGKKFIIQDIDDTHVFVIAELVNVLQERVGELMDQNAFSLTQK

SEQ ID NO: 38392 - protein, 533 aa, Homo sapiens
MEALGFLKLEVNGPMVTVALSVALLALLKWYSTSAFSRLEKLGLRHPKPSPFIGNLTFFRQGFWESQMELRKLYGPLCGYYLGRRMFIVISEPDMIKQVLVENFSNFTNRMASGLEFKSVADSVLFLRDKRWEEVRGALMSAFSPEKLNEMVPLISQACDLLLAHLKRYAESGDAFDIQRCYCNYTTDVVASVAFGTPVDSWQAPEDPFVKHCKRFFEFCIPRPILVLLLSFPSIMVPLARILPNKNRDELNGFFNKLIRNVIALRDQQAAEERRRDFLQMVLDARHSASPMGVQDFDIVRDVFSSTGCKPNPSRQHQPSPMARPLTVDEIVGQAFIFLIAGYEIITNTLSFATYLLATNPDCQEKLLREVDVFKEKHMAPEFCSLEEGLPYLDMVIAETLRMYPPAFRFTREAAQDCEVLGQRIPAGAVLEMAVGALHHDPEHWPSPETFNPERFTAEARQQHRPFTYLPFGAGPRSCLGVRLGLLEVKLTLLHVLHKFRFQACPETQVPLQLESKSALGPKNGVYIKIVSR

SEQ ID NO: 38393 - protein, 466 aa, Homo sapiens
MELRKLYGPLCGYYLGRRMFIVISEPDMIKQVLVENFSNFTNRMASGLEFKSVADSVLFLRDKRWEEVRGALMSAFSPEKLNEMVPLISQACDLLLAHLKRYAESGDAFDIQRCYCNYTTDVVASVAFGTPVDSWQAPEDPFVKHCKRFFEFCIPRPILVLLLSFPSIMVPLARILPNKNRDELNGFFNKLIRNVIALRDQQAAEERRRDFLQMVLDARHSASPMGVQDFDIVRDVFSSTGCKPNPSRQHQPSPMARPLTVDEIVGQAFIFLIAGYEIITNTLSFATYLLATNPDCQEKLLREVDVFKEKHMAPEFCSLEEGLPYLDMVIAETLRMYPPAFRFTREAAQDCEVLGQRIPAGAVLEMAVGALHHDPEHWPSPETFNPERFTAEARQQHRPFTYLPFGAGPRSCLGVRLGLLEVKLTLLHVLHKFRFQACPETQVPLQLESKSALGPKNGVYIKIVSR

SEQ ID NO: 38394 - protein, 579 aa, Homo sapiens
MEALGFLKLEVNGPMVTVALSVALLALLKWYSTSAFSRLEKLGLRHPKPSPFIGNLTFFRQGFWESQMELRKLYGPLCGYYLGRRMFIVISEPDMIKQVLVENFSNFTNRMASGLEFKSVADSVLFLRDKRWEEVRGALMSAFSPEKLNELGLLIMQERIKGHMGGQQAPQRIPPTRLSKPSGIYVNLHYATLPFCMVPLISQACDLLLAHLKRYAESGDAFDIQRCYCNYTTDVVASVAFGTPVDSWQAPEDPFVKHCKRFFEFCIPRPILVLLLSFPSIMVPLARILPNKNRDELNGFFNKLIRNVIALRDQQAAEERRRDFLQMVLDARHSASPMGVQDFDIVRDVFSSTGCKPNPSRQHQPSPMARPLTVDEIVGQAFIFLIAGYEIITNTLSFATYLLATNPDCQEKLLREVDVFKEKHMAPEFCSLEEGLPYLDMVIAETLRMYPPAFRFTREAAQDCEVLGQRIPAGAVLEMAVGALHHDPEHWPSPETFNPERFTAEARQQHRPFTYLPFGAGPRSCLGVRLGLLEVKLTLLHVLHKFRFQACPETQVPLQLESKSALGPKNGVYIKIVSR

SEQ ID NO: 38395 - protein, 459 aa, Homo sapiens
MEALGFLKLEVNGPMVTVALSVALLALLKWYSTSAFSRLEKLGLRHPKPSPFIGNLTFFRQGFWESQMELRKLYGPLCGYYLGRRMFIVISEPDMIKQVLVENFSNFTNRMASGLEFKSVADSVLFLRDKRWEEVRGALMSAFSPEKLNEMVPLISQACDLLLAHLKRYAESGDAFDIQRCYCNYTTDVVASVAFGTPVDSWQAPEDPFVKHCKRFFEFCIPRPILVLLLSFPSIMVPLARILPNKNRDELNGFFNKLIRNVIALRDQQAAEERRRDFLQMVLDARHSASPMGVQDFDIVRDVFSSTGCKPNPSRQHQPSPMARPLTVDEIVGQAFIFLIAGYEIITNTLSFATYLLATNPDCQEKLLREVDVFKEKHMAPEFCSLEEGLPYLDMVIAETLRMYPPAFRFTREAAQDCEVLGQRIPAGAVLEMAVGALHHDPEHWPSPETFNPERYRCS

SEQ ID NO: 38396 - protein, 213 aa, Homo sapiens
MAAAADERSPEDGEDEEEEEQLVLVELSGIIDSDFLSKCENKCKVLGIDTERPILQVDSCVFAGEYEDTLGTCVIFEENVEHADTEGNNKTVLKYKCHTMKKLSMTRTLLTEKKEGEENIGGVEWLQIKDNDFSYRPNMICNFLHENEDEEVVASAPDKSLELEEEEIQMNDSSNLSCEQEKPMHLEIEDSGPLIDIPSETEGSVFMETQMLP

SEQ ID NO: 38397 - protein, 479 aa, Homo sapiens
MLFWHTQPEHYNQHNSGSYLRDVLALPIFKQEEPQLSPENEARLPPLQYVLCAATSPAVKLHEETLTYLNQGQSYEIRLLENRKLGDFQDLNTKYVKSIIRVVFHDRRLQYTEHQQLEGWRWSRPGDRILDIDIPLSVGILDPRASPTQLNAVEFLWDPAKRASAFIQVHCISTEFTPRKHGGEKGVPFRVQIDTFKQNENGEYTEHLHSASCQIKVFKPKGADRKQKTDREKMEKRTAQEKEKYQPSYETTILTECSPWPDVAYQVNSAPSPSYNGSPNSFGLGEGNASPTHPVEALPVGSDHLLPSASIQDAQQWLHRNRFSQFCRLFASFSGADLLKMSRDDLVQICGPADGIRLFNAIKGRNVRPKMTIYVCQELEQNRVPLQQKRDGSGDSNLSVYHAIFLEELTTLELIEKIANLYSISPQHIHRVYRQGPTGIHVVVSNEMVQNFQDESCFVLSTIKAESNDGYHIILKCGL

SEQ ID NO: 38398 - protein, 607 aa, Homo sapiens
MRTPQLALLQVFFLVFPDGVRPQPSSSPSGAVPTSLELQRGTDGGTLQSPSEATATRPAVPGLPTVVPTLVTPSAPGNRTVDLFPVLPICVCDLTPGACDINCCCDRDCYLLHPRTVFSFCLPGSVRSSSWVCVDNSVIFRSNSPFPSRVFMDSNGIRQFCVHVNNSNLNYFQKLQKVNATNFQALAAEFGGESFTSTFQTQSPPSFYRAGDPILTYFPKWSVISLLRQPAGVGAGGLCAESNPAGFLESKSTTCTRFFKNLASSCTLDSALNAASYYNFTVLKVPRSMTDPQNMEFQVPVILTSQANAPLLAGNTCQNVVSQVTYEIETNGTFGIQKVSVSLGQTNLTVEPGASLQQHFILRFRAFQQSTAASLTSPRSGNPGYIVGKPLLALTDDISYSMTLLQSQGNGSCSVKRHEVQFGVNAISGCKLRLKKADCSHLQQEIYQTLHGRPRPEYVAIFGNADPAQKGGWTRILNRHCSISAINCTSCCLIPVSLEIQVLWAYVGLLSNPQAHVSGVRFLYQCQSIQDSQQVTEVSLTTLVNFVDITQKPQPPRGQPKMDWKWPFDFFPFKVAFSRGVFSQKCSVSPILILCLLLLGVLNLETM

SEQ ID NO: 38399 - protein, 443 aa, Homo sapiens
MRTPQLALLQVFFLVFPDGVRPQPSSSPSGAVPTSLELQRGTDGGTLQSPSEATATRPAVPGLPTVVPTLVTPSAPGNRTVDLFPVLPICVCDLTPGACDINCCCDRDCYLLHPRTVFSFCLPGSVRSSSWVCVDNSVIFRSNSPFPSRVFMDSNGIRQFCVHVNNSNLNYFQKLQKVNATNFQALAAEFGGESFTSTFQTQSPPSFYRAGDPILTYFPKWSVISLLRQPAGVGAGGLCAESNPAGFLESKSTTCTRFFKNLASSCTLDSALNAASYYNFTVLKVPRSMTDPQNMEFQVPVILTSQANAPLLAGNTCQNVVSQVTYEIETNGTFGIQKVSVSLGQTNLTVEPGASLQQHFILRFRAFQQSTAASLTSPRSGNPGYIVGKPLLALTDDISYSVSFLELGGLLQPNEKSCKGFQTYVRLAKGEEFFVHYNEVLIY

SEQ ID NO: 38400 - protein, 429 aa, Homo sapiens
MDSNGIRQFCVHVNNSNLNYFQKLQKVNATNFQALAAEFGGESFTSTFQTQSPPSFYRAGDPILTYFPKWSVISLLRQPAGVGAGGLCAESNPAGFLESKSTTCTRFFKNLASSCTLDSALNAASYYNFTVLKVPRSMTDPQNMEVTYEIETNGTFGIQKVSVSLGQTNLTVEPGASLQQHFILRFRAFQQSTAASLTSPRSGNPGYIVGKPLLALTDDISYSMTLLQSQGNGSCSVKRHEVQFGVNAISGCKLRLKKADCSHLQQEIYQTLHGRPRPEYVAIFGNADPAQKGGWTRILNRHCSISAINCTSCCLIPVSLEIQVLWAYVGLLSNPQAHVSGVRFLYQCQSIQDSQQVTEVSLTTLVNFVDITQKPQPPRGQPKMDWKWPFDFFPFKVAFSRGVFSQKCSVSPILILCLLLLGVLNLETM

SEQ ID NO: 38401 - protein, 211 aa, Homo sapiens
MRTPQLALLQVFFLVFPDGVRPQPSSSPSGAVPTSLELQRGTDGGTLQSPSEATATRPAVPGLPTVVPTLVTPSAPGNRTVDLFPVLPICVCDLTPGACDINCCCDRDCYLLHPRTVFSFCLPGSVRSSSWVCVDNSVIFRSNSPFPSRVFMDSNGIRQFCVHVNNSNLNYFQKLQKVNATNFQALAAEFGGESFTSTFQTQSPPSFYRVS

SEQ ID NO: 38402 - protein, 459 aa, Homo sapiens
MRTPQLALLQVFFLVFPDGVRPQPSSSPSGAVPTSLELQRGTDGGTLQSPSEATATRPAVPGLPTVVPTLVTPSAPGNRTVDLFPVLPICVCDLTPGACDINCCCDRDCYLLHPRTVFSFCLPGSVRSSSWVCVDNSVIFRSNSPFPSRVFMDSNGIRQFCVHVNNCFLESKSTTCTRFFKNLASSCTLDSALNAASYYNFTVLKVPRSMTDPQNMEAFQQSTAASLTSPRSGNPGYIVGKPLLALTDDISYSMTLLQSQGNGSCSVKRHEVQFGVNAISGCKLRLKKADCSHLQQEIYQTLHGRPRPEYVAIFGNADPAQKGGWTRILNRHCSISAINCTSCCLIPVSLEIQVLWAYVGLLSNPQAHVSGVRFLYQCQSIQDSQQVTEVSLTTLVNFVDITQKPQPPRGQPKMDWKWPFDFFPFKVAFSRGVFSQKCSVSPILILCLLLLGVLNLETM

SEQ ID NO: 38403 - protein, 801 aa, Homo sapiens
MERLWGLFQRAQQLSPRSSQTVYQRVEGPRKGHLEEEEEDGEEGAETLAHFCPMELRGPEPLGSRPRQPNLIPWAAAGRRAAPYLVLTALLIFTGAFLLGYVAFRGSCQACGDSVLVVSEDVNYEPDLDFHQGRLYWSDLQAMFLQFLGEGRLEDTIRQTSLRERVAGSAGMAALTQDIRAALSRQKLDHVWTDTHYVGLQFPDPAHPNTLHWVDEAGKVGEQLPLEDPDVYCPYSAIGNVTGELVYAHYGRPEDLQDLRARGVDPVGRLLLVRVGVISFAQKVTNAQDFGAQGVLIYPEPADFSQDPPKPSLSSQQAVYGHVHLGTGDPYTPGFPSFNQTQFPPVASSGLPSIPAQPISADIASRLLRKLKGPVAPQEWQGSLLGSPYHLGPGPRLRLVVNNHRTSTPINNIFGCIEGRSEPDHYVVIGAQRDAWGPGAAKSAVGTAILLELVRTFSSMVSNGFRPRRSLLFISWDGGDFGSVGSTEWLEGYLSVLHLKAVVYVSLDNAVLGDDKFHAKTSPLLTSLIESVLKQVDSPNHSGQTLYEQVVFTNPSWDAEVIRPLPMDSSAYSFTAFVGVPAVEFSFMEDDQAYPFLHTKEDTYENLHKVLQGRLPAVAQAVAQLAGQLLIRLSHDRLLPLDFGRYGDVVLRHIGNLNEFSGDLKARGLTLQWVYSARGDYIRAAEKLRQEIYSSEERDERLTRMYNVRIMRVEFYFLSQYVSPADSPFRHIFMGRGDHTLGALLDHLRLLRSNSSGTPGATSSTGFQESRFRRQLALLTWTLQGAANALSGDVWNIDNNF

SEQ ID NO: 38404 - protein, 630 aa, Homo sapiens
MAALTQDIRAALSRQKLDHVWTDTHYVGLQFPDPAHPNTLHWVDEAGKVGEQLPLEDPDVYCPYSAIGNVTGELVYAHYGRPEDLQDLRARGVDPVGRLLLVRVGVISFAQKVTNAQDFGAQGVLIYPEPADFSQDPPKPSLSSQQAVYGHVHLGTGDPYTPGFPSFNQTQFPPVASSGLPSIPAQPISADIASRLLRKLKGPVAPQEWQGSLLGSPYHLGPGPRLRLVVNNHRTSTPINNIFGCIEGRSEPDHYVVIGAQRDAWGPGAAKSAVGTAILLELVRTFSSMVSNGFRPRRSLLFISWDGGDFGSVGSTEWLEGYLSVLHLKAVVYVSLDNAVLGDDKFHAKTSPLLTSLIESVLKQVDSPNHSGQTLYEQVVFTNPSWDAEVIRPLPMDSSAYSFTAFVGVPAVEFSFMEDDQAYPFLHTKEDTYENLHKVLQGRLPAVAQAVAQLAGQLLIRLSHDRLLPLDFGRYGDVVLRHIGNLNEFSGDLKARGLTLQWVYSARGDYIRAAEKLRQEIYSSEERDERLTRMYNVRIMRVEFYFLSQYVSPADSPFRHIFMGRGDHTLGALLDHLRLLRSNSSGTPGATSSTGFQESRFRRQLALLTWTLQGAANALSGDVWNIDNNF

SEQ ID NO: 38405 - protein, 774 aa, Homo sapiens
MERLWGLFQRAQQLSPRSSQTVYQRVEGPRKGHLEEEEEDGEEGAETLAHFCPMELRGPEPLGSRPRQPNLIPWAAAGRRAAPYLVLTALLIFTGAFLLGYVAFRGSCQACGDSVLVVSEDVNYEPDLDFHQGRLYWSDLQAMFLQFLGEGRLEDTIRQTSLRERVAGSAGMAALTQDIRAALSRQKLDHVWTDTHYVGLQFPDPAHPNTLHWVDEAGKVGEQLPLEDPDVYCPYSAIGNVTGELVYAHYGRPEDLQDLRARGVDPVGRLLLVRVGVISFAQKVTNAQDFGAQGVLIYPEPADFSQDPPKPSLSSQQAVYGHVHLGTGDPYTPGFPSFNQTQKLKGPVAPQEWQGSLLGSPYHLGPGPRLRLVVNNHRTSTPINNIFGCIEGRSEPDHYVVIGAQRDAWGPGAAKSAVGTAILLELVRTFSSMVSNGFRPRRSLLFISWDGGDFGSVGSTEWLEGYLSVLHLKAVVYVSLDNAVLGDDKFHAKTSPLLTSLIESVLKQVDSPNHSGQTLYEQVVFTNPSWDAEVIRPLPMDSSAYSFTAFVGVPAVEFSFMEDDQAYPFLHTKEDTYENLHKVLQGRLPAVAQAVAQLAGQLLIRLSHDRLLPLDFGRYGDVVLRHIGNLNEFSGDLKARGLTLQWVYSARGDYIRAAEKLRQEIYSSEERDERLTRMYNVRIMRVEFYFLSQYVSPADSPFRHIFMGRGDHTLGALLDHLRLLRSNSSGTPGATSSTGFQESRFRRQLALLTWTLQGAANALSGDVWNIDNNF

SEQ ID NO: 38406 - protein, 241 aa, Homo sapiens
MEAAADGPAETQSPVEKDSPAKTQSPAQDTSIMSRNNADTGRVLALPEHKKKRKGNLPAESVKILRDWMYKHRFKAYPSEEEKQMLSEKTNLSLLQISNWFINARRRILPDMLQQRRNDPIIGHKTGKDAHATHLQSTEASVPAKSGPSGPDNVQSLPLWPLPKGQMSREKQPDPESAPSQKLTGIAQPKKKVKVSVTSPSSPELVSPEEHADFSSFLLLVDAAVQRAAELELEKKQEPNP

SEQ ID NO: 38407 - protein, 324 aa, Homo sapiens
MGPWGEPELLVWRPEAVASEPPVPVGLEVKLGALVLLLVLTLLCSLVPICVLRRPGANHEGSASRQKALSLVSCFAGGVFLATCLLDLLPDYLAAIDEALAALHVTLQFPLQEFILAMGFFLVLVMEQITLAYKEQSGPSPLEETRALLGTVNGGPQHWHDGPGVPQASGAPATPSALRACVLVFSLALHSVFEGLAVGLQRDRARAMELCLALLLHKGILAVSLSLRLLQSHLRAQVVAGCGILFSCMTPLGIGLGAALAESAGPLHQLAQSVLEGMAAGTFLYITFLEILPQELASSEQRILKVILLLAGFALLTGLLFIQI

SEQ ID NO: 38408 - protein, 222 aa, Homo sapiens
MKAQLQFPLQEFILAMGFFLVLVMEQITLAYKEQSGPSPLEETRALLGTVNGGPQHWHDGPGVPQASGAPATPSALRACVLVFSLALHSVFEGLAVGLQRDRARAMELCLALLLHKGILAVSLSLRLLQSHLRAQVVAGCGILFSCMTPLGIGLGAALAESAGPLHQLAQSVLEGMAAGTFLYITFLEILPQELASSEQRILKVILLLAGFALLTGLLFIQI

SEQ ID NO: 38409 - protein, 185 aa, Homo sapiens
MEAAADGPAETQSPVEKDSPAKTQSPAQDTSIMSRNNADTGRVLALPEHKKKRKGNLPAESVKILRDWMYKHRFKAYPSEEEKQMLSEKTNLSLLRISNWFINARRRILPDMLQQRRNDPIIGHKTGKDAHATHLQSTEASVPAKSGPVVQTMYKACPCGPCQRARCQERSNQIRSRPLARSSPE

SEQ ID NO: 38410 - protein, 691 aa, Homo sapiens
MELRSTAAPRAEGYSNVGFQNEENFLENENTSGNNSIRSRAVQSREHTNTKQDEEQVTVEQDSPRNREHMEDDDEEMQQKGCLERRYDTVCGFCRKHKTTLRHIIWGILLAGYLVMVISACVLNFHRALPLFVITVAAIFFVVWDHLMAKYEHRIDEMLSPGRRLLNSHWFWLKWVIWSSLVLAVIFWLAFDTAKLGQQQLVSFGGLIMYIVLLFLFSKYPTRVYWRPVLWGIGLQFLLGLLILRTDPGFIAFDWLGRQVQTFLEYTDAGASFVFGEKYKDHFFAFKVLPIVVFFSTVMSMLYYLGLMQWIIRKVGWIMLVTTGSSPIESVVASGNIFVGQTESPLLVRPYLPYITKSELHAIMTAGFSTIAGSVLGAYISFGVPSSHLLTASVMSAPASLAAAKLFWPETEKPKITLKNAMKMESGDSGNLLEAATQGASSSISLVANIAVNLIAFLALLSFMNSALSWFGNMFDYPQLSFELICSYIFMPFSFMMGVEWQDSFMVARLIGYKTFFNEFVAYEHLSKWIHLRKEGGPKFVNGVQQYISIRSEIIATYALCGFANIGSLGIVIGGLTSMAPSRKRDIASGAVRALIAGTVACFMTACIAGILSSTPVDINCHHVLENAFNSTFPGNTTKVIACCQSLLSSTVAKGPGEVIPGGNHSLYSLKGCCTLLNPSTFNCNGISNTF

SEQ ID NO: 38411 - protein, 622 aa, Homo sapiens
MEDDDEEMQQKGCLERRYDTVCGFCRKHKTTLRHIIWGILLAGYLVMVISACVLNFHRALPLFVITVAAIFFVVWDHLMAKYEHRIDEMLSPGRRLLNSHWFWLKWVIWSSLVLAVIFWLAFDTAKLGQQQLVSFGGLIMYIVLLFLFSKYPTRVYWRPVLWGIGLQFLLGLLILRTDPGFIAFDWLGRQVQTFLEYTDAGASFVFGEKYKDHFFAFKVLPIVVFFSTVMSMLYYLGLMQWIIRKVGWIMLVTTGSSPIESVVASGNIFVGQTESPLLVRPYLPYITKSELHAIMTAGFSTIAGSVLGAYISFGVPSSHLLTASVMSAPASLAAAKLFWPETEKPKITLKNAMKMESGDSGNLLEAATQGASSSISLVANIAVNLIAFLALLSFMNSALSWFGNMFDYPQLSFELICSYIFMPFSFMMGVEWQDSFMVARLIGYKTFFNEFVAYEHLSKWIHLRKEGGPKFVNGVQQYISIRSEIIATYALCGFANIGSLGIVIGGLTSMAPSRKRDIASGAVRALIAGTVACFMTACIAGILSSTPVDINCHHVLENAFNSTFPGNTTKVIACCQSLLSSTVAKGPGEVIPGGNHSLYSLKGCCTLLNPSTFNCNGISNTF

SEQ ID NO: 38412 - protein, 1988 aa, Homo sapiens
MAMLPPPGPQSFVHFTKQSLALIEQRIAERKSKEPKEEKKDDDEEAPKPSSDLEAGKQLPFIYGDIPPGMVSEPLEDLDPYYADKKTFIVLNKGKTIFRFNATPALYMLSPFSPLRRISIKILVHSLFSMLIMCTILTNCIFMTMNNPPDWTKNVEYTFTGIYTFESLVKILARGFCVGEFTFLRDPWNWLDFVVIVFAYLTEFVNLGNVSALRTFRVLRALKTISVIPGLKTIVGALIQSVKKLSDVMILTVFCLSVFALIGLQLFMGNLKHKCFRNSLENNETLESIMNTLESEEDFRKYFYYLEGSKDALLCGFSTDSGQCPEGYTCVKIGRNPDYGYTSFDTFSWAFLALFRLMTQDYWENLYQQTLRAAGKTYMIFFVVVIFLGSFYLINLILAVVAMAYEEQNQANIEEAKQKELEFQQMLDRLKKEQEEAEAIAAAAAEYTSIRRSRIMGLSESSSETSKLSSKSAKERRNRRKKKNQKKLSSGEEKGDAEKLSKSESEDSIRRKSFHLGVEGHRRAHEKRLSTPNQSPLSIRGSLFSARRSSRTSLFSFKGRGRDIGSETEFADDEHSIFGDNESRRGSLFVPHRPQERRSSNISQASRSPPMLPVNGKMHSAVDCNGVVSLVDGRSALMLPNGQLLPEVIIDKATSDDSGTTNQIHKKRRCSSYLLSEDMLNDPNLRQRAMSRASILTNTVEELEESRQKCPPWWYRFAHKFLIWNCSPYWIKFKKCIYFIVMDPFVDLAITICIVLNTLFMAMEHHPMTEEFKNVLAIGNLVFTGIFAAEMVLKLIAMDPYEYFQVGWNIFDSLIVTLSLVELFLADVEGLSVLRSFRLLRVFKLAKSWPTLNMLIKIIGNSVGALGNLTLVLAIIVFIFAVVGMQLFGKSYKECVCKINDDCTLPRWHMNDFFHSFLIVFRVLCGEWIETMWDCMEVAGQAMCLIVYMMVMVIGNLVVLNLFLALLLSSFSSDNLTAIEEDPDANNLQIAVTRIKKGINYVKQTLREFILKAFSKKPKISREIRQAEDLNTKKENYISNHTLAEMSKGHNFLKEKDKISGFGSSVDKHLMEDSDGQSFIHNPSLTVTVPIAPGESDLENMNAEELSSDSDSEYSKVRLNRSSSSECSTVDNPLPGEGEEAEAEPMNSDEPEACFTDGCVWRFSCCQVNIESGKGKIWWNIRKTCYKIVEHSWFESFIVLMILLSSGALAFEDIYIERKKTIKIILEYADKIFTYIFILEMLLKWIAYGYKTYFTNAWCWLDFLIVDVSLVTLVANTLGYSDLGPIKSLRTLRALRPLRALSRFEGMRVVVNALIGAIPSIMNVLLVCLIFWLIFSIMGVNLFAGKFYECINTTDGSRFPASQVPNRSECFALMNVSQNVRWKNLKVNFDNVGLGYLSLLQVATFKGWTIIMYAAVDSVNVDKQPKYEYSLYMYIYFVVFIIFGSFFTLNLFIGVIIDNFNQQKKKLGGQDIFMTEEQKKYYNAMKKLGSKKPQKPIPRPGNKIQGCIFDLVTNQAFDISIMVLICLNMVTMMVEKEGQSQHMTEVLYWINVVFIILFTGECVLKLISLRHYYFTVGWNIFDFVVVIISIVGMFLADLIETYFVSPTLFRVIRLARIGRILRLVKGAKGIRTLLFALMMSLPALFNIGLLLFLVMFIYAIFGMSNFAYVKKEDGINDMFNFETFGNSMICLFQITTSAGWDGLLAPILNSKPPDCDPKKVHPGSSVEGDCGNPSVGIFYFVSYIIISFLVVVNMYIAVILENFSVATEESTEPLSEDDFEMFYEVWEKFDPDATQFIEFSKLSDFAAALDPPLLIAKPNKVQLIAMDLPMVSGDRIHCLDILFAFTKRVLGESGEMDSLRSQMEERFMSANPSKVSYEPITTTLKRKQEDVSATVIQRAYRRYRLRQNVKNISSIYIKDGDRDDDLLNKKDMAFDNVNENSSPEKTDATSSTTSPPSYDSVTKPDKEKYEQDRTEKEDKGKDSKESKK

SEQ ID NO: 38413 - protein, 1988 aa, Homo sapiens
MAMLPPPGPQSFVHFTKQSLALIEQRIAERKSKEPKEEKKDDDEEAPKPSSDLEAGKQLPFIYGDIPPGMVSEPLEDLDPYYADKKTFIVLNKGKTIFRFNATPALYMLSPFSPLRRISIKILVHSLFSMLIMCTILTNCIFMTMNNPPDWTKNVEYTFTGIYTFESLVKILARGFCVGEFTFLRDPWNWLDFVVIVFAYVTEFVDLGNVSALRTFRVLRALKTISVIPGLKTIVGALIQSVKKLSDVMILTVFCLSVFALIGLQLFMGNLKHKCFRNSLENNETLESIMNTLESEEDFRKYFYYLEGSKDALLCGFSTDSGQCPEGYTCVKIGRNPDYGYTSFDTFSWAFLALFRLMTQDYWENLYQQTLRAAGKTYMIFFVVVIFLGSFYLINLILAVVAMAYEEQNQANIEEAKQKELEFQQMLDRLKKEQEEAEAIAAAAAEYTSIRRSRIMGLSESSSETSKLSSKSAKERRNRRKKKNQKKLSSGEEKGDAEKLSKSESEDSIRRKSFHLGVEGHRRAHEKRLSTPNQSPLSIRGSLFSARRSSRTSLFSFKGRGRDIGSETEFADDEHSIFGDNESRRGSLFVPHRPQERRSSNISQASRSPPMLPVNGKMHSAVDCNGVVSLVDGRSALMLPNGQLLPEVIIDKATSDDSGTTNQIHKKRRCSSYLLSEDMLNDPNLRQRAMSRASILTNTVEELEESRQKCPPWWYRFAHKFLIWNCSPYWIKFKKCIYFIVMDPFVDLAITICIVLNTLFMAMEHHPMTEEFKNVLAIGNLVFTGIFAAEMVLKLIAMDPYEYFQVGWNIFDSLIVTLSLVELFLADVEGLSVLRSFRLLRVFKLAKSWPTLNMLIKIIGNSVGALGNLTLVLAIIVFIFAVVGMQLFGKSYKECVCKINDDCTLPRWHMNDFFHSFLIVFRVLCGEWIETMWDCMEVAGQAMCLIVYMMVMVIGNLVVLNLFLALLLSSFSSDNLTAIEEDPDANNLQIAVTRIKKGINYVKQTLREFILKAFSKKPKISREIRQAEDLNTKKENYISNHTLAEMSKGHNFLKEKDKISGFGSSVDKHLMEDSDGQSFIHNPSLTVTVPIAPGESDLENMNAEELSSDSDSEYSKVRLNRSSSSECSTVDNPLPGEGEEAEAEPMNSDEPEACFTDGCVWRFSCCQVNIESGKGKIWWNIRKTCYKIVEHSWFESFIVLMILLSSGALAFEDIYIERKKTIKIILEYADKIFTYIFILEMLLKWIAYGYKTYFTNAWCWLDFLIVDVSLVTLVANTLGYSDLGPIKSLRTLRALRPLRALSRFEGMRVVVNALIGAIPSIMNVLLVCLIFWLIFSIMGVNLFAGKFYECINTTDGSRFPASQVPNRSECFALMNVSQNVRWKNLKVNFDNVGLGYLSLLQVATFKGWTIIMYAAVDSVNVDKQPKYEYSLYMYIYFVVFIIFGSFFTLNLFIGVIIDNFNQQKKKLGGQDIFMTEEQKKYYNAMKKLGSKKPQKPIPRPGNKIQGCIFDLVTNQAFDISIMVLICLNMVTMMVEKEGQSQHMTEVLYWINVVFIILFTGECVLKLISLRHYYFTVGWNIFDFVVVIISIVGMFLADLIETYFVSPTLFRVIRLARIGRILRLVKGAKGIRTLLFALMMSLPALFNIGLLLFLVMFIYAIFGMSNFAYVKKEDGINDMFNFETFGNSMICLFQITTSAGWDGLLAPILNSKPPDCDPKKVHPGSSVEGDCGNPSVGIFYFVSYIIISFLVVVNMYIAVILENFSVATEESTEPLSEDDFEMFYEVWEKFDPDATQFIEFSKLSDFAAALDPPLLIAKPNKVQLIAMDLPMVSGDRIHCLDILFAFTKRVLGESGEMDSLRSQMEERFMSANPSKVSYEPITTTLKRKQEDVSATVIQRAYRRYRLRQNVKNISSIYIKDGDRDDDLLNKKDMAFDNVNENSSPEKTDATSSTTSPPSYDSVTKPDKEKYEQDRTEKEDKGKDSKESKK

SEQ ID NO: 38414 - protein, 1977 aa, Homo sapiens
MAMLPPPGPQSFVHFTKQSLALIEQRIAERKSKEPKEEKKDDDEEAPKPSSDLEAGKQLPFIYGDIPPGMVSEPLEDLDPYYADKKTFIVLNKGKTIFRFNATPALYMLSPFSPLRRISIKILVHSLFSMLIMCTILTNCIFMTMNNPPDWTKNVEYTFTGIYTFESLVKILARGFCVGEFTFLRDPWNWLDFVVIVFAYLTEFVNLGNVSALRTFRVLRALKTISVIPGLKTIVGALIQSVKKLSDVMILTVFCLSVFALIGLQLFMGNLKHKCFRNSLENNETLESIMNTLESEEDFRKYFYYLEGSKDALLCGFSTDSGQCPEGYTCVKIGRNPDYGYTSFDTFSWAFLALFRLMTQDYWENLYQQTLRAAGKTYMIFFVVVIFLGSFYLINLILAVVAMAYEEQNQANIEEAKQKELEFQQMLDRLKKEQEEAEAIAAAAAEYTSIRRSRIMGLSESSSETSKLSSKSAKERRNRRKKKNQKKLSSGEEKGDAEKLSKSESEDSIRRKSFHLGVEGHRRAHEKRLSTPNQSPLSIRGSLFSARRSSRTSLFSFKGRGRDIGSETEFADDEHSIFGDNESRRGSLFVPHRPQERRSSNISQASRSPPMLPVNGKMHSAVDCNGVVSLVDGRSALMLPNGQLLPEGTTNQIHKKRRCSSYLLSEDMLNDPNLRQRAMSRASILTNTVEELEESRQKCPPWWYRFAHKFLIWNCSPYWIKFKKCIYFIVMDPFVDLAITICIVLNTLFMAMEHHPMTEEFKNVLAIGNLVFTGIFAAEMVLKLIAMDPYEYFQVGWNIFDSLIVTLSLVELFLADVEGLSVLRSFRLLRVFKLAKSWPTLNMLIKIIGNSVGALGNLTLVLAIIVFIFAVVGMQLFGKSYKECVCKINDDCTLPRWHMNDFFHSFLIVFRVLCGEWIETMWDCMEVAGQAMCLIVYMMVMVIGNLVVLNLFLALLLSSFSSDNLTAIEEDPDANNLQIAVTRIKKGINYVKQTLREFILKAFSKKPKISREIRQAEDLNTKKENYISNHTLAEMSKGHNFLKEKDKISGFGSSVDKHLMEDSDGQSFIHNPSLTVTVPIAPGESDLENMNAEELSSDSDSEYSKVRLNRSSSSECSTVDNPLPGEGEEAEAEPMNSDEPEACFTDGCVWRFSCCQVNIESGKGKIWWNIRKTCYKIVEHSWFESFIVLMILLSSGALAFEDIYIERKKTIKIILEYADKIFTYIFILEMLLKWIAYGYKTYFTNAWCWLDFLIVDVSLVTLVANTLGYSDLGPIKSLRTLRALRPLRALSRFEGMRVVVNALIGAIPSIMNVLLVCLIFWLIFSIMGVNLFAGKFYECINTTDGSRFPASQVPNRSECFALMNVSQNVRWKNLKVNFDNVGLGYLSLLQVATFKGWTIIMYAAVDSVNVDKQPKYEYSLYMYIYFVVFIIFGSFFTLNLFIGVIIDNFNQQKKKLGGQDIFMTEEQKKYYNAMKKLGSKKPQKPIPRPGNKIQGCIFDLVTNQAFDISIMVLICLNMVTMMVEKEGQSQHMTEVLYWINVVFIILFTGECVLKLISLRHYYFTVGWNIFDFVVVIISIVGMFLADLIETYFVSPTLFRVIRLARIGRILRLVKGAKGIRTLLFALMMSLPALFNIGLLLFLVMFIYAIFGMSNFAYVKKEDGINDMFNFETFGNSMICLFQITTSAGWDGLLAPILNSKPPDCDPKKVHPGSSVEGDCGNPSVGIFYFVSYIIISFLVVVNMYIAVILENFSVATEESTEPLSEDDFEMFYEVWEKFDPDATQFIEFSKLSDFAAALDPPLLIAKPNKVQLIAMDLPMVSGDRIHCLDILFAFTKRVLGESGEMDSLRSQMEERFMSANPSKVSYEPITTTLKRKQEDVSATVIQRAYRRYRLRQNVKNISSIYIKDGDRDDDLLNKKDMAFDNVNENSSPEKTDATSSTTSPPSYDSVTKPDKEKYEQDRTEKEDKGKDSKESKK

SEQ ID NO: 38415 - protein, 1977 aa, Homo sapiens
MAMLPPPGPQSFVHFTKQSLALIEQRIAERKSKEPKEEKKDDDEEAPKPSSDLEAGKQLPFIYGDIPPGMVSEPLEDLDPYYADKKTFIVLNKGKTIFRFNATPALYMLSPFSPLRRISIKILVHSLFSMLIMCTILTNCIFMTMNNPPDWTKNVEYTFTGIYTFESLVKILARGFCVGEFTFLRDPWNWLDFVVIVFAYVTEFVDLGNVSALRTFRVLRALKTISVIPGLKTIVGALIQSVKKLSDVMILTVFCLSVFALIGLQLFMGNLKHKCFRNSLENNETLESIMNTLESEEDFRKYFYYLEGSKDALLCGFSTDSGQCPEGYTCVKIGRNPDYGYTSFDTFSWAFLALFRLMTQDYWENLYQQTLRAAGKTYMIFFVVVIFLGSFYLINLILAVVAMAYEEQNQANIEEAKQKELEFQQMLDRLKKEQEEAEAIAAAAAEYTSIRRSRIMGLSESSSETSKLSSKSAKERRNRRKKKNQKKLSSGEEKGDAEKLSKSESEDSIRRKSFHLGVEGHRRAHEKRLSTPNQSPLSIRGSLFSARRSSRTSLFSFKGRGRDIGSETEFADDEHSIFGDNESRRGSLFVPHRPQERRSSNISQASRSPPMLPVNGKMHSAVDCNGVVSLVDGRSALMLPNGQLLPEGTTNQIHKKRRCSSYLLSEDMLNDPNLRQRAMSRASILTNTVEELEESRQKCPPWWYRFAHKFLIWNCSPYWIKFKKCIYFIVMDPFVDLAITICIVLNTLFMAMEHHPMTEEFKNVLAIGNLVFTGIFAAEMVLKLIAMDPYEYFQVGWNIFDSLIVTLSLVELFLADVEGLSVLRSFRLLRVFKLAKSWPTLNMLIKIIGNSVGALGNLTLVLAIIVFIFAVVGMQLFGKSYKECVCKINDDCTLPRWHMNDFFHSFLIVFRVLCGEWIETMWDCMEVAGQAMCLIVYMMVMVIGNLVVLNLFLALLLSSFSSDNLTAIEEDPDANNLQIAVTRIKKGINYVKQTLREFILKAFSKKPKISREIRQAEDLNTKKENYISNHTLAEMSKGHNFLKEKDKISGFGSSVDKHLMEDSDGQSFIHNPSLTVTVPIAPGESDLENMNAEELSSDSDSEYSKVRLNRSSSSECSTVDNPLPGEGEEAEAEPMNSDEPEACFTDGCVWRFSCCQVNIESGKGKIWWNIRKTCYKIVEHSWFESFIVLMILLSSGALAFEDIYIERKKTIKIILEYADKIFTYIFILEMLLKWIAYGYKTYFTNAWCWLDFLIVDVSLVTLVANTLGYSDLGPIKSLRTLRALRPLRALSRFEGMRVVVNALIGAIPSIMNVLLVCLIFWLIFSIMGVNLFAGKFYECINTTDGSRFPASQVPNRSECFALMNVSQNVRWKNLKVNFDNVGLGYLSLLQVATFKGWTIIMYAAVDSVNVDKQPKYEYSLYMYIYFVVFIIFGSFFTLNLFIGVIIDNFNQQKKKLGGQDIFMTEEQKKYYNAMKKLGSKKPQKPIPRPGNKIQGCIFDLVTNQAFDISIMVLICLNMVTMMVEKEGQSQHMTEVLYWINVVFIILFTGECVLKLISLRHYYFTVGWNIFDFVVVIISIVGMFLADLIETYFVSPTLFRVIRLARIGRILRLVKGAKGIRTLLFALMMSLPALFNIGLLLFLVMFIYAIFGMSNFAYVKKEDGINDMFNFETFGNSMICLFQITTSAGWDGLLAPILNSKPPDCDPKKVHPGSSVEGDCGNPSVGIFYFVSYIIISFLVVVNMYIAVILENFSVATEESTEPLSEDDFEMFYEVWEKFDPDATQFIEFSKLSDFAAALDPPLLIAKPNKVQLIAMDLPMVSGDRIHCLDILFAFTKRVLGESGEMDSLRSQMEERFMSANPSKVSYEPITTTLKRKQEDVSATVIQRAYRRYRLRQNVKNISSIYIKDGDRDDDLLNKKDMAFDNVNENSSPEKTDATSSTTSPPSYDSVTKPDKEKYEQDRTEKEDKGKDSKESKK

SEQ ID NO: 38416 - protein, 418 aa, Homo sapiens
MAKLLQPPPKFLPSEWHIANKNQYHRADAQRSRSERLVAESQRLVDEIEKTTRKSQSDVNKKLEQRLEEVQFWKKELDDKLEQLVNVTDDLLIYKIRLEKALETLKEPLHITETCLAYREKRIGIDLVHDTVEHELIKEAEIIQGIMALLTRTLEEASEQIRMNRSAKYNLEKDLKDKFVALTIDDICFSLNNNSPNIRYSENAVRIEPNSVSLEDWLDFSSTNVEKADKQRNNSLMLKALVDRILSQTANDLRKQCDVVDTAFKNGLKDTKDARDKLADHLAKVMEEIASQEKNITALEKAILDQEGPAKVAHTRLETRTHRPNVELCRDVAQYRLMKEVQEITHNVARLKETLAQAQAELKGLHRRQLALQEEIQVKENTIYIDEVLCMQMRKSIPLRDGEDHGVWAGGLRPDAVC

SEQ ID NO: 38417 - protein, 430 aa, Homo sapiens
MATLSVKPSRRFQLPDWHTNSYLLSTNAQLQRDASHQIRQEARVLRNETNNQTIWDEHDNRTRLVERIDTVNRWKEMLDKCLTDLDAEIDALTQMKESAEQNLQAKNLPLDVAIECLTLRESRRDIDVVKDPVEDELHKEVEVIEATKKALQQKVSQAFEQLCLLQEVQQQLNSDHRGKMETLEIDRGCLSLNLRSPNISLKVDPTRVPDGSTTLQQWDDFSRFNKDRAEAEMKAATELREATALTIAETNNELEAQRVATEFAFRKRLREMEKVYSELKWQEKNTLEEIAELQEDIRHLEEDLRTKLLSLKLSHTRLEARTYRPNVELCRDQAQYGLTDEVHQLEATIAALKQKLAQAQDALDALCKHLARLQADIACKANSMLLDTKCMDTRRKLTVPAERFVPEVDTFTRTTNSTLSPLKSCQLELA

SEQ ID NO: 38418 - protein, 981 aa, Homo sapiens
MSEQERIQECLRKEIRSLLISTKDGLSPQELEKEYLLMVGNHLPLRILGYRSTMELVLDMPDVVRVCPGAGGTVILKAIPDESTKGIASLVAKQRSSHKLRNSMHKGRPSIYSGPRSHRRVPYRGRVAPILPAVVKSELKDLLALSPVLLSDFEKAFAKRFGRSFQYMQYGFLSMFEVLNAASDVISVEQTRAGSLLMLKKSVTEEKPRGCPAGKIFTQPFRMKQGSYSTGFPVAKPCFSQPTSNMEPPKQIMSMEKTSKLNVVETSRLNHTEKLNQLENTFKSVIAQIGPGGTISSELKHKIKFVVSKFPEGLFISKLLGEYEVIFKEQLSPKKLGFLNVTELVGALSDILHVEFRKGHQDLLVFDADKKPLPPVQSDKKIEAKACVSSPPRNSLSTAAVKETVWNCPSKKQKEPQQKICKKPNLVVKPLQLQVETNKSELNLAMANHDIPPDAVPNKKLCRLPPLDTSSLIGVFVEYIISPSQFYIRIYSRDSSELLEDMMIEMRRCYSNQLVSDRYVMPECFIQPGHLCCVRISEDKWWYRVIIHRVLEKQEVEVFYPDFGNIGIVQKSSLRFLKCCYTKLPAQAIPCSLAWVRPVEEHWTSKAILQFQKLCGLKPLVGVVDEYVDGILNIFLCDTSSNEDVYFHHVLRTEGHAIVCRENISSKGFSELNPLALYTTSSGGPEDIVLTELGYPSQQHYFNEDRKISPQSKESELRILDEIPTGMPCLESVTIGDDIWDENWLPLQAKMGKGGDAASHLFTASLGGKNQYSSCKEMPQKDWCFSTPKDTWDDSWQPSGLVNGTKVEVHKPEVLGAQEKNTGTNRTQKQLDINGSSDSSTLPKLEEFCTSLTQSEQSADGSQSEPNNSQTQPKQIQLSTAAPCSTTAVDDSAEKPSGSVESSPEILKNEDFSSSRAITLYKDKRQESVDQLSLILSYECQISQKLYIPRSTATAALGAAARLATSRSLLHWYPSVKRMEA

SEQ ID NO: 38419 - protein, 1035 aa, Homo sapiens
MSEQERIQECLRKEIRSLLISTKDGLSPQELEKEYLLMVGNHLPLRILGYRSTMELVLDMPDVVRVCPGAGGTVILKAIPDESTKGIASLVAKQRSSHKLRNSMHKGRPSIYSGPRSHRRVPYRGRVAPILPAVVKSELKDLLALSPVLLSDFEKAFAKRFGRSFQYMQYGFLSMFEVLNAASDVISVEQTRAGSLLMLKKSVTEEKPRGCPAGKIFTQPFRMKQGSYSTGFPVAKPCFSQPTSNMEPPKQIMSMEKTSKLNVVETSRLNHTEKLNQLENTFKSVIAQIGPGGTISSELKHKIKFVVSKFPEGLFISKLLGEYEVIFKEQLSPKKLGFLNVTELVGALSDILHVEFRKGHQDLLVFDADKKPLPPVQSDKKIEAKACVSSPPRNSLSTAAVKETVWNCPSKKQKEPQQKICKKPNLVVKPLQLQVETNKSELNLAMANHDIPPDAVPNKKLCRLPPLDTSSLIGVFVEYIISPSQFYIRIYSRDSSELLEDMMIEMRRCYSNQLVSDRYVMPECFIQPGHLCCVRISEDKWWYRVIIHRVLEKQEVEVFYPDFGNIGIVQKSSLRFLKCCYTKLPAQAIPCSLAWVRPVEEHWTSKAILQFQKLCGLKPLVGVVDEYVDGILNIFLCDTSSNEDVYFHHVLRTEGHAIVCRENISSKGFSELNPLALYTTSSGGPEDIVLTELGYPSQQHYFNEDRKISPQSKESELRILQDINDEKSLSHLKSESKEPLKDSEFESLKTCNKSFEEDPKWSNPEPNDLKEENEDEIPTGMPCLESVTIGDDIWDENWLPLQAKMGKGGDAASHLFTASLGGKNQYSSCKEMPQKDWCFSTPKDTWDDSWQPSGLVNGTKVEVHKPEVLGAQEKNTGTNRTQKQLDINGSSDSSTLPKLEEFCTSLTQSEQSADGSQSEPNNSQTQPKQIQLSTAAPCSTTAVDDSAEKPSGSVESSPEILKNEDFSSSRAITLYKDKRQESVDQLSLILSYECQISQKLYIPRSTATAALGAAARLATSRSLLHWYPSVKRMEA

SEQ ID NO: 38420 - protein, 485 aa, Homo sapiens
MEFLGTTQTASYCGPKKCCGLTSLPAVQAPVIQECYQPYYLPGYRYLNSWRPSLFYKIANVQTCPDESTSTLRPPTILPTLRSALFSRYSPHDWDQSNQLQVRGAEASRLWASRLTDDSMRLLQDKDQLTHQMQEGTCRNLGQRLSDIGFWKSELSYELDRLLTENQNLETVKRRLECAANEVNCPLQVALECLYHREKRIGIDLVHDNVEKNLIREVDLLKCCQEQMRKLAQRIDIQMRDNRDAQHVLERDLEDKSSAQCIDEKCFNLRNTSDCISFFHGMEKIDGTISVPETWAKFSNDNIKHSQNMRANSIQLREEAEHLFETLSDQMWRQFTDTNLAFNARISEVTDVKNKLQTQLAKTLQEIFQAENTIMLLERSIMAKEGPLKVAQTRLECRTRRPNMELCRDIPQLKLVNEVFTIDDTLQTLKLRLRETQDTLQLLVMTKCRLEHELAIKANTLCIDKEKCMGMRKTFPCTPRLVGHT

SEQ ID NO: 38421 - protein, 502 aa, Homo sapiens
MAWALKLPLADEVIESGLVQDFDASLSGIGQELGAGAYSMSDVLALPIFKQEESSLPPDNENKILPFQYVLCAATSPAVKLHDETLTYLNQGQSYEIRMLDNRKLGELPEINGKLVKSIFRVVFHDRRLQYTEHQQLEGWRWNRPGDRILDIDIPMSVGIIDPRANPTQLNTVEFLWDPAKRTSVFIQVHCISTEFTMRKHGGEKGVPFRVQIDTFKENENGEYTEHLHSASCQIKVFKPKGADRKQKTDREKMEKRTPHEKEKYQPSYETTILTECSPWPEITYVNNSPSPGFNSSHSSFSLGEGNGSPNHQPEPPPPVTDNLLPTTTPQEAQQWLHRNRFSTFTRLFTNFSGADLLKLTRDDVIQICGPADGIRLFNALKGRMVRPRLTIYVCQESLQLREQQQQQQQQQQKHEDGDSNGTFFVYHAIYLEELTAVELTEKIAQLFSISPCQISQIYKQGPTGIHVLISDEMIQNFQEEACFILDTMKAETNDSYHIILK

SEQ ID NO: 38422 - protein, 450 aa, Homo sapiens
MAWALKLPLADEVIESGLVQDFDASLSGIGQELGAGAYSMSDVLALPIFKQEESSLPPDNENKILPFQYVLCAATSPAVKLHDETLTYLNQGQSYEIRMLDNRKLGELPEINGKLVKSIFRVVFHDRRLQYTEHQQLEGWRWNRPGDRILDIDIPMSVGIIDPRANPTQLNTVEFLWDPAKRTSVFIQPKGADRKQKTDREKMEKRTPHEKEKYQPSYETTILTECSPWPEITYVNNSPSPGFNSSHSSFSLGEGNGSPNHQPEPPPPVTDNLLPTTTPQEAQQWLHRNRFSTFTRLFTNFSGADLLKLTRDDVIQICGPADGIRLFNALKGRMVRPRLTIYVCQESLQLREQQQQQQQQQQKHEDGDSNGTFFVYHAIYLEELTAVELTEKIAQLFSISPCQISQIYKQGPTGIHVLISDEMIQNFQEEACFILDTMKETNDSYHIILK

SEQ ID NO: 38423 - protein, 451 aa, Homo sapiens
MAWALKLPLADEVIESGLVQDFDASLSGIGQELGAGAYSMSDVLALPIFKQEESSLPPDNENKILPFQYVLCAATSPAVKLHDETLTYLNQGQSYEIRMLDNRKLGELPEINGKLVKSIFRVVFHDRRLQYTEHQQLEGWRWNRPGDRILDIDIPMSVGIIDPRANPTQLNTVEFLWDPAKRTSVFIQPKGADRKQKTDREKMEKRTPHEKEKYQPSYETTILTECSPWPEITYVNNSPSPGFNSSHSSFSLGEGNGSPNHQPEPPPPVTDNLLPTTTPQEAQQWLHRNRFSTFTRLFTNFSGADLLKLTRDDVIQICGPADGIRLFNALKGRMVRPRLTIYVCQESLQLREQQQQQQQQQQKHEDGDSNGTFFVYHAIYLEELTAVELTEKIAQLFSISPCQISQIYKQGPTGIHVLISDEMIQNFQEEACFILDTMKAETNDSYHIILK

SEQ ID NO: 38424 - protein, 501 aa, Homo sapiens
MAWALKLPLADEVIESGLVQDFDASLSGIGQELGAGAYSMSDVLALPIFKQEESSLPPDNENKILPFQYVLCAATSPAVKLHDETLTYLNQGQSYEIRMLDNRKLGELPEINGKLVKSIFRVVFHDRRLQYTEHQQLEGWRWNRPGDRILDIDIPMSVGIIDPRANPTQLNTVEFLWDPAKRTSVFIQVHCISTEFTMRKHGGEKGVPFRVQIDTFKENENGEYTEHLHSASCQIKVFKPKGADRKQKTDREKMEKRTPHEKEKYQPSYETTILTECSPWPEITYVNNSPSPGFNSSHSSFSLGEGNGSPNHQPEPPPPVTDNLLPTTTPQEAQQWLHRNRFSTFTRLFTNFSGADLLKLTRDDVIQICGPADGIRLFNALKGRMVRPRLTIYVCQESLQLREQQQQQQQQQQKHEDGDSNGTFFVYHAIYLEELTAVELTEKIAQLFSISPCQISQIYKQGPTGIHVLISDEMIQNFQEEACFILDTMKETNDSYHIILK

SEQ ID NO: 38425 - protein, 1098 aa, Homo sapiens
MLEGDLVSKMLRAVLQSHKNGVALPRLQGEYRSLTGDWIPFKQLGFPTLEAYLRSVPAVVRIETSRSGEITCYAMACTETARIAQLVARQRSSKRKTGRQVNCQMRVKKTMPFFLEGKPKATLRQPGFASNFSVGKKPNPAPLRDKGNSVGVKPDAEMSPYMLHTTLGNEAFKDIPVQRHVTMSTNNRFSPKASLQPPLQMHLSRTSTKEMSDNLNQTVEKPNVKPPASYTYKMDEVQNRIKEILNKHNNGIWISKLPHFYKELYKEDLNQGILQQFEHWPHICTVEKPCSGGQDLLLYPAKRKQLLRSELDTEKVPLSPLPGPKQTPPLKGCPTVMAGDFKEKVADLLVKYTSGLWASALPKAFEEMYKVKFPEDALKNLASLSDVCSIDYISGNPQKAILYAKLPLPTDKIQKDAGQAHGDNDIKAMVEQEYLQVEESIAESANTFMEDITVPPLMIPTEASPSVLVVELSNTNEVVIRYVGKDYSAAQELMEDEMKEYYSKNPKITPVQAVNVGQLLAVNAEEDAWLRAQVISTEENKIKVCYVDYGFSENVEKSKAYKLNPKFCSLSFQATKCKLAGLEVLSDDPDLVKVVESLTCGKIFAVEILDKADIPLVVLYDTSGEDDININATCLKAICDKSLEVHLQVDAMYTNVKVTNICSDGTLYCQVPCKGLNKLSDLLRKIEDYFHCKHMTSECFVSLPFCGKICLFHCKGKWLRVEITNVHSSRALDVQFLDSGTVTSVKVSELREIPPRFLQEMIAIPPQAIKCCLADLPQSIGMWTPDAVLWLRDSVLNCSDCSIKVTKVDETRGIAHVYLFTPKNFPDPHRSINRQITNADLWKHQKDVFLSAISSGADSPNSKNGNMPMSGNTGENFRKNLTDVIKKSMVDHTSAFSTEELPPPVHLSKPGEHMDVYVPVACHPGYFVIQPWQEIHKLEVLMEEMILYYSVSEERHIAVEKDQVYAAKVENKWHRVLLKGILTNGLVSVYELDYGKHELVNIRKVQPLVDMFRKLPFQAVTAQLAGVKCNQWSEEASMVFRNHVEKKPLVALVQTVIENANPWDRKVVVYLVDTSLPDTDTWIHDFMSEYLIELSKVN

SEQ ID NO: 38426 - protein, 1024 aa, Homo sapiens
MACTETARIAQLVARQRSSKRKTGRQVNCQMRVKKTMPFFLEGKPKATLRQPGFASNFSVGKKPNPAPLRDKGNSVGVKPDAEMSPYMLHTTLGNEAFKDIPVQRHVTMSTNNRFSPKASLQPPLQMHLSRTSTKEMSDNLNQTVEKPNVKPPASYTYKMDEVQNRIKEILNKHNNGIWISKLPHFYKELYKEDLNQGILQQFEHWPHICTVEKPCSGGQDLLLYPAKRKQLLRSELDTEKVPLSPLPGPKQTPPLKGCPTVMAGDFKEKVADLLVKYTSGLWASALPKAFEEMYKVKFPEDALKNLASLSDVCSIDYISGNPQKAILYAKLPLPTDKIQKDAGQAHGDNDIKAMVEQEYLQVEESIAESANTFMEDITVPPLMIPTEASPSVLVVELSNTNEVVIRYVGKDYSAAQELMEDEMKEYYSKNPKITPVQAVNVGQLLAVNAEEDAWLRAQVISTEENKIKVCYVDYGFSENVEKSKAYKLNPKFCSLSFQATKCKLAGLEVLSDDPDLVKVVESLTCGKIFAVEILDKADIPLVVLYDTSGEDDININATCLKAICDKSLEVHLQVDAMYTNVKVTNICSDGTLYCQVPCKGLNKLSDLLRKIEDYFHCKHMTSECFVSLPFCGKICLFHCKGKWLRVEITNVHSSRALDVQFLDSGTVTSVKVSELREIPPRFLQEMIAIPPQAIKCCLADLPQSIGMWTPDAVLWLRDSVLNCSDCSIKVTKVDETRGIAHVYLFTPKNFPDPHRSINRQITNADLWKHQKDVFLSAISSGADSPNSKNGNMPMSGNTGENFRKNLTDVIKKSMVDHTSAFSTEELPPPVHLSKPGEHMDVYVPVACHPGYFVIQPWQEIHKLEVLMEEMILYYSVSEERHIAVEKDQVYAAKVENKWHRVLLKGILTNGLVSVYELDYGKHELVNIRKVQPLVDMFRKLPFQAVTAQLAGVKCNQWSEEASMVFRNHVEKKPLVALVQTVIENANPWDRKVVVYLVDTSLPDTDTWIHDFMSEYLIELSKVN

SEQ ID NO: 38427 - protein, 418 aa, Homo sapiens
MYTNVKVTNICSDGTLYCQVPCKGLNKLSDLLRKIEDYFHCKITNVHSSRALDVQFLDSGTVTSVKVSELREIPPRFLQEMIAIPPQAIKCCLADLPQSIGMWTPDAVLWLRDSVLNCSDCSIKVTKVDETRGIAHVYLFTPKNFPDPHRSINRQITNADLWKHQKDVFLSAISSGADSPNSKNGNMPMSGNTGENFRKNLTDVIKKSMVDHTSAFSTEELPPPVHLSKPGEHMDVYVPVACHPGYFVIQPWQEIHKLEVLMEEMILYYSVSEERHIAVEKDQVYAAKVENKWHRVLLKGILTNGLVSVYELDYGKHELVNIRKVQPLVDMFRKLPFQAVTAQLAGVKCNQWSEEASMVFRNHVEKKPLVALVQTVIENANPWDRKVVVYLVDTSLPDTDTWIHDFMSEYLIELSKVN

SEQ ID NO: 38428 - protein, 405 aa, Homo sapiens
MSSSVKTPALEELVPGSEEKPKGRSPLSWGSLFGHRSEKIVFAKSDGGTDENVLTVTITETTVIESDLGVWSSRALLYLTLWFFFSFCTLFLNKYILSLLGGEPSMLGAVQMLSTTVIGCVKTLVPCCLYQHKARLSYPPNFLMTMLFVGLMRFATVVLGLVSLKNVAVSFAETVKSSAPIFTVIMSRMILGEYTGLLVNLSLIPVMGGLALCTATEISFNVLGFSAALSTNIMDCLQNVFSKKLLSGDKYRFSAPELQFYTSAAAVAMLVPARVFFTDVPVIGRSGKSFSYNQDVVLLLLTDGVLFHLQSVTAYALMGKISPVTFSVASTVKHALSIWLSVIVFGNKITSLSAVGTALVTVGVLLYNKARQHQQEALQSLAAATGRAPDDTVEPLLPQDPRQHP

SEQ ID NO: 38429 - protein, 837 aa, Homo sapiens
MEPAPSEVRLAVREAIHALSSSEDGGHIFCTLESLKRYLGEMEPPALPREKEEFASAHFSPVLRCLASRLSPAWLELLPHGRLEELWASFFLEGPADQAFLVLMETIEGAAGPSFRLMKMARLLARFLREGRLAVLMEAQCRQQTQPGFILLRETLLGKVVALPDHLGNRLQQENLAEFFPQNYFRLLGEEVVRVLQAVVDSLQGGLDSSVSFVSQVLGKACVHGRQQEILGVLVPRLAALTQGSYLHQRVCWRLVEQVPDRAMEAVLTGLVEAALGPEVLSRLLGNLVVKNKKAQFVMTQKLLFLQSRLTTPMLQSLLGHLAMDSQRRPLLLQVLKELLETWGSSSAIRHTPLPQQRHVSKAVLICLAQLGEPELRDSRDELLASMMAGVKCRLDSSLPPVRRLGMIVAEVVSARIHPEGPPLKFQYEEDELSLELLALASPQPAGDGASEAGTSLVPATAEPPAETPAEIVDGGVPQAQLAGSDSDLDSDDEFVPYDMSGDRELKSSKAPAYVRDCVEALTTSEDIERWEAALRALEGLVYRSPTATREVSVELAKVLLHLEEKTCVVGFAGLRQRALVAVTVTDPAPVADYLTSQFYALNYSLRQRMDILDVLTLAAQELSRPGCLGRTPQPGSPSPNTPCLPEAAVSQPGSAVASDWRVVVEERIRSKTQRLSKGGPRQGPAGSPSRFNSVAGHFFFPLLQRFDRPLVTFDLLGEDQLVLGRLAHTLGALMCLAVNTTVAVAMGKALLEFVWALRFHIDAYVRQGLLSAVSSVLLSLPAARLLEDLMDELLEARSWLADVAEKDPDEDCRTLALRALLLLQRLKNRLLPPASP

SEQ ID NO: 38430 - protein, 337 aa, Homo sapiens
MAAPRDNVTLLFKLYCLAVMTLMAAVYTIALRYTRTSDKELYFSTTAVCITEVIKLLLSVGILAKETGSLGRFKASLRENVLGSPKELLKLSVPSLVYAVQNNMAFLALSNLDAAVYQVTYQLKIPCTALCTVLMLNRTLSKLQWVSVFMLCAGVTLVQWKPAQATKVVVEQNPLLGFGAIAIAVLCSGFAGVYFEKVLKSSDTSLWVRNIQMYLSGIIVTLAGVYLSDGAEIKEKGFFYGYTYYVWFVIFLASVGGLYTSVVVKYTDNIMKGFSAAAAIVLSTIASVMLFGLQITLTFALGTLLVCVSIYLYGLPRQDTTSIQQGETASKERVIGV

SEQ ID NO: 38431 - protein, 278 aa, Homo sapiens
MAAPRDNVTLLFKLYCLAVMTLMAAVYTIALRYTRTSDKELYFSTTAVCITEVIKLLLSVGILAKETGSLGRFKASLRENVLGSPKELLKLSVPSLVYAVQNNMAFLALSNLDAAVYQVTYQLKIPCTALCTVLMLNRTLSKLQWVSVFMLCAGVTLVQWKPAQATKVVVEQNPLLGFGAIAIAVLCSGFAVLASVGGLYTSVVVKYTDNIMKGFSAAAAIVLSTIASVMLFGLQITLTFALGTLLVCVSIYLYGLPRQDTTSIQQGETASKERVIGV

SEQ ID NO: 38432 - protein, 669 aa, Homo sapiens
MEGNKLEEQDSSPPQSTPGLMKGNKREEQGLGPEPAAPQQPTAEEEALIEFHRSYRELFEFFCNNTTIHGAIRLVCSQHNRMKTAFWAVLWLCTFGMMYWQFGLLFGEYFSYPVSLNINLNSDKLVFPAVTICTLNPYRYPEIKEELEELDRITEQTLFDLYKYSSFTTLVAGSRSRRDLRGTLPHPLQRLRVPPPPHGARRARSVASSLRDNNPQVDWKDWKIGFQLCNQNKSDCFYQTYSSGVDAVREWYRFHYINILSRLPETLPSLEEDTLGNFIFACRFNQVSCNQANYSHFHHPMYGNCYTFNDKNNSNLWMSSMPGINNGLSLMLRAEQNDFIPLLSTVTGARVMVHGQDEPAFMDDGGFNLRPGVETSISMRKETLDRLGGDYGDCTKNGSDVPVENLYPSKYTQQVCIHSCFQESMIKECGCAYIFYPRPQNVEYCDYRKHSSWGYCYYKLQVDFSSDHLGCFTKCRKPCSVTSYQLSAGYSRWPSVTSQEWVFQMLSRQNNYTVNNKRNGVAKVNIFFKELNYKTNSESPSVTMVTLLSNLGSQWSLWFGSSVLSVVEMAELVFDLLVIMFLMLLRRFRSRYWSPGRGGRGAQEVASTLASSPPSHFCPHPMSLSLSQPGPAPSPALTAPPPAYATLGPRPSPGGSAGASSSTCPLGGP

SEQ ID NO: 38433 - protein, 728 aa, Homo sapiens
MGMARGSLTRVPGVMGEGTQGPELSLDPDPCSPQSTPGLMKGNKLEEQDPRPLQPIPGLMEGNKLEEQDSSPPQSTPGLMKGNKREEQGLGPEPAAPQQPTAEEEALIEFHRSYRELFEFFCNNTTIHGAIRLVCSQHNRMKTAFWAVLWLCTFGMMYWQFGLLFGEYFSYPVSLNINLNSDKLVFPAVTICTLNPYRYPEIKEELEELDRITEQTLFDLYKYSSFTTLVAGSRSRRDLRGTLPHPLQRLRVPPPPHGARRARSVASSLRDNNPQVDWKDWKIGFQLCNQNKSDCFYQTYSSGVDAVREWYRFHYINILSRLPETLPSLEEDTLGNFIFACRFNQVSCNQANYSHFHHPMYGNCYTFNDKNNSNLWMSSMPGINNGLSLMLRAEQNDFIPLLSTVTGARVMVHGQDEPAFMDDGGFNLRPGVETSISMRKETLDRLGGDYGDCTKNGSDVPVENLYPSKYTQQVCIHSCFQESMIKECGCAYIFYPRPQNVEYCDYRKHSSWGYCYYKLQVDFSSDHLGCFTKCRKPCSVTSYQLSAGYSRWPSVTSQEWVFQMLSRQNNYTVNNKRNGVAKVNIFFKELNYKTNSESPSVTMVTLLSNLGSQWSLWFGSSVLSVVEMAELVFDLLVIMFLMLLRRFRSRYWSPGRGGRGAQEVASTLASSPPSHFCPHPMSLSLSQPGPAPSPALTAPPPAYATLGPRPSPGGSAGASSSTCPLGGP

SEQ ID NO: 38434 - protein, 245 aa, Homo sapiens
MEGNKLEEQDSSPPQSTPGLMKGNKREEQGLGPEPAAPQQPTAEEEALIEFHRSYRELFEFFCNNTTIHGAIRLVCSQHNRMKTAFWAVLWLCTFGMMYWQFGLLFGEYFSYPVSLNINLNSDKLVFPAVTICTLNPYRYPEIKEELEELDRITEQTLFDLYKYSSFTTLVAGSRSRRDLRGTLPHPLQRLRVPPPPHGARRARSVASSLRDNNPQVDWKDWKIGFQLELLSLPPPDVWKLLYFG

SEQ ID NO: 38435 - protein, 650 aa, Homo sapiens
MEGNKLEEQDSSPPQSTPGLMKGNKREEQGLGPEPAAPQQPTAEEEALIEFHRSYRELFEFFCNNTTIHGAIRLVCSQHNRMKTAFWAVLWLCTFGMMYWQFGLLFGEYFSYPVSLNINLNSDKLVFPAVTICTLNPYRYPEIKEELEELDRITEQTLFDLYKYSSFTTLVAGSRSRRDLRGTLPHPLQRLRVPPPPHGARRARSVASSLRDNNPQVDWKDWKIGFQLCNQNKSDCFYQTYSSGVDAVREWYRFHYINILSRLPETLPSLEEDTLGNFIFACRFNQVSCNQANYSHFHHPMYGNCYTFNDKNNSNLWMSSMPGINNVTGARVMVHGQDEPAFMDDGGFNLRPGVETSISMRKETLDRLGGDYGDCTKNGSDVPVENLYPSKYTQQVCIHSCFQESMIKECGCAYIFYPRPQNVEYCDYRKHSSWGYCYYKLQVDFSSDHLGCFTKCRKPCSVTSYQLSAGYSRWPSVTSQEWVFQMLSRQNNYTVNNKRNGVAKVNIFFKELNYKTNSESPSVTMVTLLSNLGSQWSLWFGSSVLSVVEMAELVFDLLVIMFLMLLRRFRSRYWSPGRGGRGAQEVASTLASSPPSHFCPHPMSLSLSQPGPAPSPALTAPPPAYATLGPRPSPGGSAGASSSTCPLGGP

SEQ ID NO: 38436 - protein, 691 aa, Homo sapiens
MEGNKLEEQDSSPPQSTPGLMKGNKREEQGLGPEPAAPQQPTAEEEALIEFHRSYRELFEFFCNNTTIHGAIRLVCSQHNRMKTAFWAVLWLCTFGMMYWQFGLLFGEYFSYPVSLNINLNSDKLVFPAVTICTLNPYRYPEIKEELEELDRITEQTLFDLYKYSSFTTLVAGSRSRRDLRGTLPHPLQRLRVPPPPHGARRARSVASSLRDNNPQVDWKDWKIGFQLCNQNKSDCFYQTYSSGVDAVREWYRFHYINILSRLPETLPSLEEDTLGNFIFACRFNQVSCNQANYSHFHHPMYGNCYTFNDKNNSNLWMSSMPGINNGLSLMLRAEQNDFIPLLSTVTGARVMVHGQDEPAFMDDGGFNLRPGVETSISMRKETLDRLGGDYGDCTKNGSDVPVENLYPSKYTQQVCIHSCFQESMIKECGCAYIFYPRPQNVEYCDYRKHSSWGQVRSLTPVIPALWEAEAGGSRGYCYYKLQVDFSSDHLGCFTKCRKPCSVTSYQLSAGYSRWPSVTSQEWVFQMLSRQNNYTVNNKRNGVAKVNIFFKELNYKTNSESPSVTMVTLLSNLGSQWSLWFGSSVLSVVEMAELVFDLLVIMFLMLLRRFRSRYWSPGRGGRGAQEVASTLASSPPSHFCPHPMSLSLSQPGPAPSPALTAPPPAYATLGPRPSPGGSAGASSSTCPLGGP

SEQ ID NO: 38437 - protein, 692 aa, Homo sapiens
MSSIKGNKLEEQDPRPLQPIPGLMEGNKLEEQDSSPPQSTPGLMKGNKREEQGLGPEPAAPQQPTAEEEALIEFHRSYRELFEFFCNNTTIHGAIRLVCSQHNRMKTAFWAVLWLCTFGMMYWQFGLLFGEYFSYPVSLNINLNSDKLVFPAVTICTLNPYRYPEIKEELEELDRITEQTLFDLYKYSSFTTLVAGSRSRRDLRGTLPHPLQRLRVPPPPHGARRARSVASSLRDNNPQVDWKDWKIGFQLCNQNKSDCFYQTYSSGVDAVREWYRFHYINILSRLPETLPSLEEDTLGNFIFACRFNQVSCNQANYSHFHHPMYGNCYTFNDKNNSNLWMSSMPGINNGLSLMLRAEQNDFIPLLSTVTGARVMVHGQDEPAFMDDGGFNLRPGVETSISMRKETLDRLGGDYGDCTKNGSDVPVENLYPSKYTQQVCIHSCFQESMIKECGCAYIFYPRPQNVEYCDYRKHSSWGYCYYKLQVDFSSDHLGCFTKCRKPCSVTSYQLSAGYSRWPSVTSQEWVFQMLSRQNNYTVNNKRNGVAKVNIFFKELNYKTNSESPSVTMVTLLSNLGSQWSLWFGSSVLSVVEMAELVFDLLVIMFLMLLRRFRSRYWSPGRGGRGAQEVASTLASSPPSHFCPHPMSLSLSQPGPAPSPALTAPPPAYATLGPRPSPGGSAGASSSTCPLGGP

SEQ ID NO: 38438 - protein, 188 aa, Homo sapiens
MDCRKMVRFSYSVIWIMAISKAFELGLVAGLGHQEFARPSRGDLAFRDDSIWPQEEPAIRPRSSQRVLPMGIQHSKELNRTCCLNGGTCMLESFCACPPSFYGRNCEHDVRKENCGSVPHDTWLPKKCSLCKCWHGQLRCFPQAFLPGCDGLVMDEHLVASRTPELPPSARTTTFMLAGICLSIQSYY

SEQ ID NO: 38439 - protein, 100 aa, Homo sapiens
MKRREAVCAHRHFLGTGKPPHPLGRSIPVEPCPGLPAFAEVDLLSLLVPIKISSTPPSGSRLDPQIASSAFPGLGSLGGQDSSGSLVQRASCELESPYEL

SEQ ID NO: 38440 - protein, 410 aa, Homo sapiens
MEAENAGSYSLQQAQAFYTFPFQQLMAEAPNMAVVNEQQMPEEVPAPAPAQEPVQEAPKGRKRKPRTTEPKQPVEPKKPVESKKSGKSAKSKEKQEKITDTFKVKRKVDRFNGVSEAELLTKTLPDILTFNLDIVIIGINPGLMAAYKGHHYPGPGNHFWKCLFMSGLSEVQLNHMDDHTLPGKYGIGFTNMVERTTPGSKDLSSKEFREGGRILVQKLQKYQPRIAVFNGKCIYEIFSKEVFGVKVKNLEFGLQPHKIPDTETLCYVMPSSSARCAQFPRAQDKVHYYIKLKDLRDQLKGIERNMDVQEVQYTFDLQLAQEDAKKMAVKEEKYDPGYEAAYGGAYGENPCSSEPCGFSSNGLIESVELRGESAFSGIPNGQWMTQSFTDQIPSFSNHCGTQEQEEESHA

SEQ ID NO: 38441 - protein, 860 aa, Homo sapiens
MMSIKAFTLVSAVERELLMGDKERVNIECVECCGRDLYVGTNDCFVYHFLLEERPVPAGPATFTATKQLQRHLGFKKPVNELRAASALNRLLVLCDNSISLVNMLNLEPVPSGARIKGAATFALNENPVSGDPFCVEVCIISVKRRTIQMFLVYEDRVQIVKEVSTAEQPLAVAVDGHFLCLALTTQYIIHNYSTGVSQDLFPYCSEERPPIVKRIGRQEFLLAGPGGLGMFATVAGISQRAPVHWSENVIGAAVSFPYVIALDDEFITVHSMLDQQQKQTLPFKEGHILQDFEGRVIVATSKGVYILVPLPLEKQIQDLLASRRVEEALVLAKGARRNIPKEKFQVMYRRILQQAGFIQFAQLQFLEAKELFRSGQLDVRELISLYPFLLPTSSSFTRSHPPLHEYADLNQLTQGDQEKMAKCKRFLMSYLNEVRSTEVANGYKEDIDTALLKLYAEADHDSLLDLLVTENFCLLTDSAAWLEKHKKYFALGLLYHYNNQDAAAVQLWVNIVNGDVQDSTRSDLYEYIVDFLTYCLDEELVWAYADWVLQKSEEVGVQVFTKRPLDEQQKNSFNPDDIINCLKKYPKALVKYLEHLVIDKRLQKEEYHTHLAVLYLEEVLLQRASASGKGAEATETQAKLRRLLQKSDLYRVHFLLERLQGAGLPMESAILHGKLGEHEKALHILVHELQDFAAAEDYCLWCSEGRDPPHRQQLFHTLLAIYLHAGPTAHELAVAAVDLLNRHATEFDAAQVLQMLPDTWSVQLLCPFLMGAMRDSIHARRTMQVALGLARSENLIYTYDKMKLKGSSIQLSDKKLCQICQNPFCEPVFVRYPNGGLVHTHCAASRHTNPSSSSPGTRT

SEQ ID NO: 38442 - protein, 167 aa, Homo sapiens
MATSELSCEVSEENCERREAFWAEWKDLTLSTRPEEGCSLHEEDTQRHETYHQQGQCQVLVQRSPWLMMRMGILGRGLQEYQLPYQRVLPLPIFTPAKMGATKEEREDTPIQLQELLALETALGGQCVDRQEVAEITKQLPPVVPVSKPGALRRSLSRSMSQEAQRG

SEQ ID NO: 38443 - protein, 410 aa, Homo sapiens
MAKDAGLIEANGELKVFIDQNLSPGKGVVSLVAVHPSTVNPLGKQLLPKTFGQSNVNIAQQVVIGTPQRPAASNTLVVGSPHTPSTHFASQNQPSDSSPWSAGKRNRKGEKNGKGLRHFSMKVCEKVQRKGTTSYNEVADELVAEFSAADNHILPNESAYDQKNIRRRVYDALNVLMAMNIISKEKKEIKWIGLPTNSAQECQNLEVERQRRLERIKQKQSQLQELILQQIAFKNLVQRNRHAEQQASRPPPPNSVIHLPFIIVNTSKKTVIDCSISNDKFEYLFNFDNTFEIHDDIEVLKRMGMACGLESGSCSAEDLKMARSLVPKALEPYVTEMAQGTVGGVFITTAGSTSNGTRFSASDLTNGADGMLATSSNGSQYSGSRVETPVSYVGEDDEEDDDFNENDEDD

SEQ ID NO: 38444 - protein, 311 aa, Homo sapiens
MSTLPSKWKRNRKGEKNGKGLRHFSMKVCEKVQRKGTTSYNEVADELVAEFSAADNHILPNESAYDQKNIRRRVYDALNVLMAMNIISKEKKEIKWIGLPTNSAQECQNLEVERQRRLERIKQKQSQLQELILQQIAFKNLVQRNRHAEQQASRPPPPNSVIHLPFIIVNTSKKTVIDCSISNDKFEYLFNFDNTFEIHDDIEVLKRMGMACGLESGSCSAEDLKMARSLVPKALEPYVTEMAQGTVGGVFITTAGSTSNGTSDLTNGADGMLATSSNGSQYSGSRVETPVSYVGEDDEEDDDFNENDEDD

SEQ ID NO: 38445 - protein, 561 aa, Homo sapiens
MSTERTSWTSLSTIQKIALGLGIPASATVAYILYRRYRESREERLTFVGEDDIEIEMRVPQEAVKLIIGRQGANIKQLRKQTGARIDVDTEDVGDERVLLISGFPVQVCKAKAAIHQILTENTPVSEQLSVPQRSVGRIIGRGGETIRSICKASGAKITCDKESEGTLLLSRLIKISGTQKEVAAAKHLILEKVSEDEELRKRIAHSAETRVPRKQPISVRREDMTEPGGAGEPALWKNTSSSMEPTAPLVTPPPKGGGDMAVVVSKEGSWEKPSDDSFQKSEAQAIPEMPMFEIPSPDFSFHADEYLEVYVSASEHPNHFWIQIVGSRSLQLDKLVNEMTQHYENSVPEDLTVHVGDIVAAPLPTNGSWYRARVLGTLENGNLDLYFVDFGDNGDCPLKDLRALRSDFLSLPFQAIECSLARIAPSGDQWEEEALDEFDRLTHCADWKPLVAKISSYVQTGISTWPKIYLYDTSNGKKLDIGLELVHKGYAIELPEDIEENRAVPDMLKDMATETDASLSTLLTETKKSSGEITHTLSCLSLSEAASMSGDDNLEDDYLL

SEQ ID NO: 38446 - protein, 516 aa, Homo sapiens
MSTERTSWTSLSTIQKIALGLGIPASATVAYILYRRYRESREERLTFVGEDDIEIEMRVPQEAVKLIIGRQGANIKQLRKQTGARIDVDTEDVGDERVLLISGFPVQASGAKITCDKESEGTLLLSRLIKISGTQKEVAAAKHLILEKVSEDEELRKRIAHSAETRVPRKQPISVRREDMTEPGGAGEPALWKNTSSSMEPTAPLVTPPPKGGGDMAVVVSKEGSWEKPSDDSFQKSEAQAIPEMPMFEIPSPDFSFHADEYLEVYVSASEHPNHFWIQIVGSRSLQLDKLVNEMTQHYENSVPEDLTVHVGDIVAAPLPTNGSWYRARVLGTLENGNLDLYFVDFGDNGDCPLKDLRALRSDFLSLPFQAIECSLARIAPSGDQWEEEALDEFDRLTHCADWKPLVAKISSYVQTGISTWPKIYLYDTSNGKKLDIGLELVHKGYAIELPEDIEENRAVPDMLKDMATETDASLSTLLTETKKSSGEITHTLSCLSLSEAASMSGDDNLEDDYLL

SEQ ID NO: 38447 - protein, 123 aa, Homo sapiens
MMLPKPGTYYLPWEVSAGQVPDGSTLRTFGRLCLYDMIQSRVTLMAQHGSDQHQVLVCTKLVEPFHAQVGSLYIVLGELQHQQDRGSVVKARVLTCVEGMNLPLLEQAIREQRLYKQERGGSQ

SEQ ID NO: 38448 - protein, 160 aa, Homo sapiens
MVPSAGQLALFALGIVLAACQALENSTSPLSADPPVAAAVVSHFNDCPDSHTQFCFHGTCRFLVQEDKPACVCHSGYVGARCEHADLLAVVAASQKKQAITALVVVSIVALAVLIITCVLIHCCQVRKHCEWCRALICRHEKPSALLKGRTACCHSETVV

SEQ ID NO: 38449 - protein, 159 aa, Homo sapiens
MVPSAGQLALFALGIVLAACQALENSTSPLSDPPVAAAVVSHFNDCPDSHTQFCFHGTCRFLVQEDKPACVCHSGYVGARCEHADLLAVVAASQKKQAITALVVVSIVALAVLIITCVLIHCCQVRKHCEWCRALICRHEKPSALLKGRTACCHSETVV

SEQ ID NO: 38450 - protein, 161 aa, Homo sapiens
MVPSAGQLALFALGIVLAACQALENSTSPLSDPPVAAAVVSHFNDCPDSHTQFCFHGTCRFLVQEDKPACVCHSGYVGARCEHADLLAVVAASQKKQAITALVVVSIVALAVLIITCVLIHCCQVRKHCEWCRALICRHEKPSALLKGRTACCHSETATLG

SEQ ID NO: 38451 - protein, 163 aa, Homo sapiens
MVPSAGQLALFALGIVLAACQALENSTSPLSADPPVAAAVVSHFNDCPDSHTQFCFHGTCRFLVQEDKPACVCHSGYVGARCEHADLLAVVAASQKKQAITALVVVSIVALAVLIITCVLIHCCQVRKHCEWCRALICRHEKPSALLKGRTACCHSETGCRLY

SEQ ID NO: 38452 - protein, 162 aa, Homo sapiens
MVPSAGQLALFALGIVLAACQALENSTSPLSDPPVAAAVVSHFNDCPDSHTQFCFHGTCRFLVQEDKPACVCHSGYVGARCEHADLLAVVAASQKKQAITALVVVSIVALAVLIITCVLIHCCQVRKHCEWCRALICRHEKPSALLKGRTACCHSETGCRLY

SEQ ID NO: 38453 - protein, 185 aa, Homo sapiens
MWKLGRGRVLLDEPPEEEDGLRGGPPPAAAAAAQAQVQGASFRGWKEVTSLFNKDDEQHLLERCKSPKSKGTNLRLKEELKAEKKSGFWDNLVLKQNIQSKKPDEIEGWEPPKLALEDISADPEDTVGGHPSWSGWEDDAKGSTKYTSLASSANSSRWSLRAAGRLVSIRRQSKGHLTDSPEEAE

SEQ ID NO: 38454 - protein, 198 aa, Homo sapiens
MWKLGRGRVLLDEPPEEEDGLRGGPPPAAAAAAQAQVQGASFRGWKEVTSLFNKDDEQHLLERCKSPKSKGTNLRLKEELKAEKKSGFWDNLVLKQNIQSKKPDEIEGWEPPKLALEDISADPEDTVGGHPSWSGWEDDAKGSTKYTSLASSANSSRWSLRAAGRLIKEVWINFSQLIISFRKHCLAHYRELRLCIKY

SEQ ID NO: 38455 - protein, 446 aa, Homo sapiens
MTAKNVGLTSTNAEVRGFIDQNLSPTKGNISFVAFPVSNTNSPTKILPKTLGPINVNVGPQMIISTPQRLTSSGSVLIGSPYTPAPAMVTQTHIAEATGWVPGDRKRARKFIDSDFSESKRSKKGDKNGKGLRHFSMKVCEKVQRKGTTSYNEVADELVSEFTNSNNHLAADSAYDQKNIRRRVYDALNVLMAMNIISKEKKEIKWIGLPTNSAQECQNLEIEKQRRIERIKQKRAQLQELLLQQIAFKNLVQRNRQNEQQNQGPPALNSTIQLPFIIINTSRKTVIDCSISSDKFEYLFNFDNTFEIHDDIEVLKRMGMSFGLESGKCSLEDLKLAKSLVPKALEGYITDISTGPSWLNQGLLLNSTQSVSNLDLTTGATLPQSSVNQGLCLDAEVALATGQFLAPNSHQSSSAASHCSESRGETPCSFNDEDEEDDEEDSSSPE

SEQ ID NO: 38456 - protein, 369 aa, Homo sapiens
MIISTPQRLTSSGSVLIGSPYTPAPAMVTQTHIAEATGWVPSKRSKKGDKNGKGLRHFSMKVCEKVQRKGTTSYNEVADELVSEFTNSNNHLAADSAYDQKNIRRRVYDALNVLMAMNIISKEKKEIKWIGLPTNSAQECQNLEIEKQRRIERIKQKRAQLQELLLQQIAFKNLVQRNRQNEQQNQGPPALNSTIQLPFIIINTSRKTVIDCSISSDKFEYLFNFDNTFEIHDDIEVLKRMGMSFGLESGKCSLEDLKLAKSLVPKALEGYITDISTGPSWLNQGLLLNSTQSVSNLDLTTGATLPQSSVNQGLCLDAEVALATGQFLAPNSHQSSSAASHCSESRGETPCSFNDEDEEDDEEDSSSPE

SEQ ID NO: 38457 - protein, 370 aa, Homo sapiens
MIISTPQRLTSSGSVLIGSPYTPAPAMVTQTHIAEATGWVPSKRSKKGDKNGKGLRHFSMKVCEKVQRKGTTSYNEVADELVSEFTNSNNHLAADSQAYDQKNIRRRVYDALNVLMAMNIISKEKKEIKWIGLPTNSAQECQNLEIEKQRRIERIKQKRAQLQELLLQQIAFKNLVQRNRQNEQQNQGPPALNSTIQLPFIIINTSRKTVIDCSISSDKFEYLFNFDNTFEIHDDIEVLKRMGMSFGLESGKCSLEDLKLAKSLVPKALEGYITDISTGPSWLNQGLLLNSTQSVSNLDLTTGATLPQSSVNQGLCLDAEVALATGQFLAPNSHQSSSAASHCSESRGETPCSFNDEDEEDDEEDSSSPE

SEQ ID NO: 38458 - protein, 385 aa, Homo sapiens
MIISTPQRLTSSGSVLIGSPYTPAPAMVTQTHIAEATGWVPGDRKRARKFIDSDFSESKRSKKGDKNGKGLRHFSMKVCEKVQRKGTTSYNEVADELVSEFTNSNNHLAADSAYDQKNIRRRVYDALNVLMAMNIISKEKKEIKWIGLPTNSAQECQNLEIEKQRRIERIKQKRAQLQELLLQQIAFKNLVQRNRQNEQQNQGPPALNSTIQLPFIIINTSRKTVIDCSISSDKFEYLFNFDNTFEIHDDIEVLKRMGMSFGLESGKCSLEDLKLAKSLVPKALEGYITDISTGPSWLNQGLLLNSTQSVSNLDLTTGATLPQSSVNQGLCLDAEVALATGQFLAPNSHQSSSAASHCSESRGETPCSFNDEDEEDDEEDSSSPE

SEQ ID NO: 38459 - protein, 386 aa, Homo sapiens
MIISTPQRLTSSGSVLIGSPYTPAPAMVTQTHIAEATGWVPGDRKRARKFIDSDFSESKRSKKGDKNGKGLRHFSMKVCEKVQRKGTTSYNEVADELVSEFTNSNNHLAADSQAYDQKNIRRRVYDALNVLMAMNIISKEKKEIKWIGLPTNSAQECQNLEIEKQRRIERIKQKRAQLQELLLQQIAFKNLVQRNRQNEQQNQGPPALNSTIQLPFIIINTSRKTVIDCSISSDKFEYLFNFDNTFEIHDDIEVLKRMGMSFGLESGKCSLEDLKLAKSLVPKALEGYITDISTGPSWLNQGLLLNSTQSVSNLDLTTGATLPQSSVNQGLCLDAEVALATGQFLAPNSHQSSSAASHCSESRGETPCSFNDEDEEDDEEDSSSPE

SEQ ID NO: 38460 - protein, 349 aa, Homo sapiens
MLDPKCDRKRARKFIDSDFSESKRSKKGDKNGKGLRHFSMKVCEKVQRKGTTSYNEVADELVSEFTNSNNHLAADSAYDQKNIRRRVYDALNVLMAMNIISKEKKEIKWIGLPTNSAQECQNLEIEKQRRIERIKQKRAQLQELLLQQIAFKNLVQRNRQNEQQNQGPPALNSTIQLPFIIINTSRKTVIDCSISSDKFEYLFNFDNTFEIHDDIEVLKRMGMSFGLESGKCSLEDLKLAKSLVPKALEGYITDISTGPSWLNQGLLLNSTQSVSNLDLTTGATLPQSSVNQGLCLDAEVALATGQFLAPNSHQSSSAASHCSESRGETPCSFNDEDEEDDEEDSSSPE

SEQ ID NO: 38461 - protein, 310 aa, Homo sapiens
MKVCEKVQRKGTTSYNEVADELVSEFTNSNNHLAADSAYDQKNIRRRVYDALNVLMAMNIISKEKKEIKWIGLPTNSAQECQNLEIEKQRRIERIKQKRAQLQELLLQQIAFKNLVQRNRQNEQQNQGPPALNSTIQLPFIIINTSRKTVIDCSISSDKFEYLFNFDNTFEIHDDIEVLKRMGMSFGLESGKCSLEDLKLAKSLVPKALEGYITDISTGPSWLNQGLLLNSTQSVSNLDLTTGATLPQSSVNQGLCLDAEVALATGQFLAPNSHQSSSAASHCSESRGETPCSFNDEDEEDDEEDSSSPE

SEQ ID NO: 38462 - protein, 418 aa, Homo sapiens
MQPEGIIFEAENKPSPGTESAGTFILDLSATSRTIISTPQRLTSSGSVLIGSPYTPAPAMVTQTHIAEATGWVPGDRKRARKFIDSDFSESKRSKKGDKNGKGLRHFSMKVCEKVQRKGTTSYNEVADELVSEFTNSNNHLAADSAYDQKNIRRRVYDALNVLMAMNIISKEKKEIKWIGLPTNSAQECQNLEIEKQRRIERIKQKRAQLQELLLQQIAFKNLVQRNRQNEQQNQGPPALNSTIQLPFIIINTSRKTVIDCSISSDKFEYLFNFDNTFEIHDDIEVLKRMGMSFGLESGKCSLEDLKLAKSLVPKALEGYITDISTGPSWLNQGLLLNSTQSVSNLDLTTGATLPQSSVNQGLCLDAEVALATGQFLAPNSHQSSSAASHCSESRGETPCSFNDEDEEDDEEDSSSPE

SEQ ID NO: 38463 - protein, 405 aa, Homo sapiens
MAKYVSLTEANEELKVLMDENQTSRPVAVHTSTVNPLGKQLLPKTFGQSSVNIDQQVVIGMPQRPAASNIPVVGSPNPPSTHFASQNQHSYSSPPWAGQHNRKGEKNGMGLCRLSMKVWETVQRKGTTSCQEVVGELVAKFRAASNHASPNESAYDVKNIKRRTYDALNVLMAMNIISREKKKIKWIGLTTNSAQNCQNLRVERQKRLERIKQKQSELQQLILQQIAFKNLVLRNQYVEEQVSQRPLPNSVIHVPFIIISSSKKTVINCSISDDKSEYLFKFNSSFEIHDDTEVLMWMGMTFGLESGSCSAEDLKMARNLVPKALEPYVTEMAQGTFGGVFTTAGSRSNGTWLSASDLTNIAIGMLATSSGGSQYSGSRVETPAVEEEEEEDNNDDDLSENDEDD

SEQ ID NO: 38464 - protein, 654 aa, Homo sapiens
MNQPQRMAPVGTDKELSDLLDFSMMFPLPVTNGKGRPASLAGAQFGGSGLEDRPSSGSWGSGDQSSSSFDPSRTFSEGTHFTESHSSLSSSTFLGPGLGGKSGERGAYASFGRDAGVGGLTQAGFLSGELALNSPGPLSPSGMKGTSQYYPSYSGSSRRRAADGSLDTQPKKVRKVPPGLPSSVYPPSSGEDYGRDATAYPSAKTPSSTYPAPFYVADGSLHPSAELWSPPGQAGFGPMLGGGSSPLPLPPGSGPVGSSGSSSTFGGLHQHERMGYQLHGAEVNGGLPSASSFSSAPGATYGGVSSHTPPVSGADSLLGSRGTTAGSSGDALGKALASIYSPDHSSNNFSSSPSTPVGSPQGLAGTSQWPRAGAPGALSPSYDGGLHGLQSKIEDHLDEAIHVLRSHAVGTAGDMHTLLPGHGALASGFTGPMSLGGRHAGLVGGSHPEDGLAGSTSLMHNHAALPSQPGTLPDLSRPPDSYSGLGRAGATAAASEIKREEKEDEENTSAADHSEEEKKELKAPRARTSPDEDEDDLLPPEQKAEREKERRVANNARERLRVRDINEAFKELGRMCQLHLNSEKPQTKLLILHQAVSVILNLEQQVRERNLNPKAACLKRREEEKVSGVVGDPQMVLSAPHPGLSEAHNPAGHM

SEQ ID NO: 38465 - protein, 651 aa, Homo sapiens
MNQPQRMAPVGTDKELSDLLDFSMMFPLPVTNGKGRPASLAGAQFGGSGLEDRPSSGSWGSGDQSSSSFDPSRTFSEGTHFTESHSSLSSSTFLGPGLGGKSGERGAYASFGRDAGVGGLTQAGFLSGELALNSPGPLSPSGMKGTSQYYPSYSGSSRRRAADGSLDTQPKKVRKVPPGLPSSVYPPSSGEDYGRDATAYPSAKTPSSTYPAPFYVADGSLHPSAELWSPPGQAGFGPMLGGGSSPLPLPPGSGPVGSSGSSSTFGGLHQHERMGYQLHGAEVNGGLPSASSFSSAPGATYGGVSSHTPPVSGADSLLGSRGTTAGSSGDALGKALASIYSPDHSSNNFSSSPSTPVGSPQGLAGTSQWPRAGAPGALSPSYDGGLHGLQSKIEDHLDEAIHVLRSHAVGTAGDMHTLLPGHGALASGFTGPMSLGGRHAGLVGGSHPEDGLAGSTSLMHNHAALPSQPGTLPDLSRPPDSYSGLGRAGATAAASEIKREEKEDEENTSAADHSEEEKKELKAPRARTSSTDEVLSLEEKDLRDRERRMANNARERVRVRDINEAFRELGRMCQMHLKSDKAQTKLLILQQAVQVILGLEQQVRERNLNPKAACLKRREEEKVSGVVGDPQMVLSAPHPGLSEAHNPAGHM

SEQ ID NO: 38466 - protein, 658 aa, Homo sapiens
MNQPQRMAPVGTDKELSDLLDFSMMFPLPVTNGKGRPASLAGAQFGGSGKSGERGAYASFGRDAGVGGLTQAGFLSGELALNSPGPLSPSGMKGTSQYYPSYSGSSRRRAADGSLDTQPKKVRKVPPGLPSSVYPPSSGEDYGRDATAYPSAKTPSSTYPAPFYVADGSLHPSAELWSPPGQAGFGPMLGGGSSPLPLPPGSGPVGSSGSSSTFGGLHQHERMGYQLHGAEVNGGLPSASSFSSAPGATYGGVSSHTPPVSGADSLLGSRGTTAGSSGDALGKALASIYSPDHSSNNFSSSPSTPVGSPQGLAGTSQWPRAGAPGALSPSYDGGLHGLQSKIEDHLDEAIHVLRSHAVGTAGDMHTLLPGHGALASGFTGPMSLGGRHAGLVGGSHPEDGLAGSTSLMHNHAALPSQPGTLPDLSRPPDSYSGLGRAGATAAASEIKREEKEDEENTSAADHSEEEKKELKAPRARTRCQPTPRHSPPSPHQDAHVHRPHAHRTHTGRPSAGPTLFPQPHCLPLAPSRRPPHSPDEDEDDLLPPEQKAEREKERRVANNARERLRVRDINEAFKELGRMCQLHLNSEKPQTKLLILHQAVSVILNLEQQVRERNLNPKAACLKRREEEKVSGVVGDPQMVLSAPHPGLSEAHNPAGHM

SEQ ID NO: 38467 - protein, 509 aa, Homo sapiens
MDPPRASHLSPRKKRPRQTGALMASSPQDIKFQDLVVFILEKKMGTTRRAFLMELARRKGFRVENELSDSVTHIVAENNSGSDVLEWLQAQKVQVSSQPELLDVSWLIECIRAGKPVEMTGKHQLVVRRDYSDSTNPGPPKTPPIAVQKISQYACQRRTTLNNCNQIFTDAFDILAENCEFRENEDSCVTFMRAASVLKSLPFTIISMKDTEGIPCLGSKVKGIIEEIIEDGESSEVKAVLNDERYQSFKLFTSVFGVGLKTSEKWFRMGFRTLSKVRSDKSLKFTRMQKAGFLYYEDLVSCVTRAEAEAVSVLVKEAVWAFLPDAFVTMTGGFRRGKKMGHDVDFLITSPGSTEDEEQLLQKVMNLWEKKGLLLYYDLVESTFEKLRLPSRKVDALDHFQKCFLIFKLPRQRVDSDQSSWQEGKTWKAIRVDLVLCPYERRAFALLGWTGSRQFERDLRRYATHERKMILDNHALYDKTKRIFLKAESEEEIFAHLGLDYIEPWERNA

SEQ ID NO: 38468 - protein, 508 aa, Homo sapiens
MDPPRASHLSPRKKRPRQTGALMASSPQDIKFQDLVVFILEKKMGTTRRAFLMELARRKGFRVENELSDSVTHIVAENNSGSDVLEWLQAQKVQVSSQPELLDVSWLIECIRAGKPVEMTGKHQLVVRRDYSDSTNPGPPKTPPIAVQKISQYACQRRTTLNNCNQIFTDAFDILAENCEFRENEDSCVTFMRAASVLKSLPFTIISMKDTEGIPCLGSKVKGIIEEIIEDGESSEVKAVLNDERYQSFKLFTSVFGVGLKTSEKWFRMGFRTLSKVRSDKSLKFTRMQKAGFLYYEDLVSCVTRAEAEAVSVLVKEAVWAFLPDAFVTMTGGFRRGKKMGHDVDFLITSPGSTEDEEQLLQKVMNLWEKKGLLLYYDLVESTFEKLRLPSRKVDALDHFQKCFLIFKLPRQRVDSDQSSWQEGKTWKAIRVDLVLCPYERRAFALLGWTGSRFERDLRRYATHERKMILDNHALYDKTKRIFLKAESEEEIFAHLGLDYIEPWERNA

SEQ ID NO: 38469 - protein, 2774 aa, Homo sapiens
MDVKDRRHRSLTRGRCGKECRYTSSSLDSEDCRVPTQKSYSSSETLKAYDHDSRMHYGNRVTDLIHRESDEFPRQGTNFTLAELGICEPSPHRSGYCSDMGILHQGYSLSTGSDADSDTEGGMSPEHAIRLWGRGIKSRRSSGLSSRENSALTLTDSDNENKSDDENGRPIPPTSSPSLLPSAQLPSSHNPPPVSCQMPLLDSNTSHQIMDTNPDEEFSPNSYLLRACSGPQQASSSGPPNHHSQSTLRPPLPPPHNHTLSHHHSSANSLNRNSLTNRRSQIHAPAPAPNDLATTPESVQLQDSWVLNSNVPLETRHFLFKTSSGSTPLFSSSSPGYPLTSGTVYTPPPRLLPRNTFSRKAFKLKKPSKYCSWKCAALSAIAAALLLAILLAYFIAMHLLGLNWQLQPADGHTFNNGIRTGLPGNDDVATMPSGGKVPWSLKNSSIDSGEAEVGRRVTQEVPPGVFWRSQIHISQPQFLKFNISLGKDALFGVYIRRGLPPSHAQYDFMERLDGKEKWSVVESPRERRSIQTLVQNEAVFVQYLDVGLWHLAFYNDGKDKEMVSFNTVVLDSVQDCPRNCHGNGECVSGVCHCFPGFLGADCAKAACPVLCSGNGQYSKGTCQCYSGWKGAECDVPMNQCIDPSCGGHGSCIDGNCVCSAGYKGEHCEEVDCLDPTCSSHGVCVNGECLCSPGWGGLNCELARVQCPDQCSGHGTYLPDTGLCSCDPNWMGPDCSVEVCSVDCGTHGVCIGGACRCEEGWTGAACDQRVCHPRCIEHGTCKDGKCECREGWNGEHCTIGRQTAGTETDGCPDLCNGNGRCTLGQNSWQCVCQTGWRGPGCNVAMETSCADNKDNEGDGLVDCLDPDCCLQSACQNSLLCRGSRDPLDIIQQGQTDWPAVKSFYDRIKLLAGKDSTHIIPGENPFNSSLVSLIRGQVVTTDGTPLVGVNVSFVKYPKYGYTITRQDGTFDLIANGGASLTLHFERAPFMSQERTVWLPWNSFYAMDTLVMKTEENSIPSCDLSGFVRPDPIIISSPLSTFFSAAPGQNPIVPETQVLHEEIELPGSNVKLRYLSSRTAGYKSLLKITMTQSTVPLNLIRVHLMVAVEGHLFQKSFQASPNLAYTFIWDKTDAYGQRVYGLSDAVVSVGFEYETCPSLILWEKRTALLQGFELDPSNLGGWSLDKHHILNVKSGILHKGTGENQFLTQQPAIITSIMGNGRRRSISCPSCNGLAEGNKLLAPVALAVGIDGSLYVGDFNYIRRIFPSRNVTSILELRNKEFKHSNNPAHKYYLAVDPVSGSLYVSDTNSRRIYRVKSLSGTKDLAGNSEVVAGTGEQCLPFDEARCGDGGKAIDATLMSPRGIAVDKNGLMYFVDATMIRKVDQNGIISTLLGSNDLTAVRPLSCDSSMDVAQVRLEWPTDLAVNPMDNSLYVLENNVILRITENHQVSIIAGRPMHCQVPGIDYSLSKLAIHSALESASAIAISHTGVLYITETDEKKINRLRQVTTNGEICLLAGAASDCDCKNDVNCNCYSGDDAYATDAILNSPSSLAVAPDGTIYIADLGNIRIRAVSKNKPVLNAFNQYEAASPGEQELYVFNADGIHQYTVSLVTGEYLYNFTYSTDNDVTELIDNNGNSLKIRRDSSGMPRHLLMPDNQIITLTVGTNGGLKVVSTQNLELGLMTYDGNTGLLATKSDETGWTTFYDYDHEGRLTNVTRPTGVVTSLHREMEKSITIDIENSNRDDDVTVITNLSSVEASYTVVQDQVRNSYQLCNNGTLRVMYANGMGISFHSEPHVLAGTITPTIGRCNISLPMENGLNSIEWRLRKEQIKGKVTIFGRKLRVHGRNLLSIDYDRNIRTEKIYDDHRKFTLRIIYDQVGRPFLWLPSSGLAAVNVSYFFNGRLAGLQRGAMSERTDIDKQGRIVSRMFADGKVWSYSYLDKSMVLLLQSQRQYIFEYDSSDRLLAVTMPSVARHSMSTHTSIGYIRNIYNPPESNASVIFDYSDDGRILKTSFLGTGRQVFYKYGKLSKLSEIVYDSTAVTFGYDETTGVLKMVNLQSGGFSCTIRYRKIGPLVDKQIYRFSEEGMVNARFDYTYHDNSFRIASIKPVISETPLPVDLYRYDEISGKVEHFGKFGVIYYDINQIITTAVMTLSKHFDTHGRIKEVQYEMFRSLMYWMTVQYDSMGRVIKRELKLGPYANTTKYTYDYDGDGQLQSVAVNDRPTWRYSYDLNGNLHLLNPGNSVRLMPLRYDLRDRITRLGDVQYKIDDDGYLCQRGSDIFEYNSKGLLTRAYNKASGWSVQYRYDGVGRRASYKTNLGHHLQYFYSDLHNPTRITHVYNHSNSEITSLYYDLQGHLFAMESSSGEEYYVASDNTGTPLAVFSINGLMIKQLQYTAYGEIYYDSNPDFQMVIGFHGGLYDPLTKLVHFTQRDYDVLAGRWTSPDYTMWKNVGKEPAPFNLYMFKSNNPLSSELDLKNYVTDVKSWLVMFGFQLSNIIPGFPRAKMYFVPPPYELSESQASENGQLITGVQQTTERHNQAFMALEGQVITKKLHASIREKAGHWFATTTPIIGKGIMFAIKEGRVTTGVSSIASEDSRKVASVLNNAYYLDKMHYSIEGKDTHYFVKIGSADGDLVTLGTTIGRKVLESGVNVTVSQPTLLVNGRTRRFTNIEFQYSTLLLSIRYGLTPDTLDEEKARVLDQARQRALGTAWAKEQQKARDGREGSRLWTEGEKQQLLSTGRVQGYEGYYVLPVEQYPELADSSSNIQFLRQNEMGKR

SEQ ID NO: 38470 - protein, 2637 aa, Homo sapiens
MVSPPLLIISVAGTIECKPDHLLWRPGSTSPQSVSFLHGKVAMESLGRPIPPTSSPSLLPSAQLPSSHNPPPVSCQMPLLDSNTSHQIMDTNPDEEFSPNSYLLRACSGPQQASSSGPPNHHSQSTLRPPLPPPHNHTLSHHHSSANSLNRNSLTNRRSQIHAPAPAPNDLATTPESVQLQDSWVLNSNVPLETRHFLFKTSSGSTPLFSSSSPGYPLTSGTVYTPPPRLLPRNTFSRKAFKLKKPSKYCSWKCAALSAIAAALLLAILLAYFIAMHLLGLNWQLQPADGHTFNNGIRTGLPGNDDVATMPSGGKVPWSLKNSSIDSGEAEVGRRVTQEVPPGVFWRSQIHISQPQFLKFNISLGKDALFGVYIRRGLPPSHAQYDFMERLDGKEKWSVVESPRERRSIQTLVQNEAVFVQYLDVGLWHLAFYNDGKDKEMVSFNTVVLDSVQDCPRNCHGNGECVSGVCHCFPGFLGADCAKAACPVLCSGNGQYSKGTCQCYSGWKGAECDVPMNQCIDPSCGGHGSCIDGNCVCSAGYKGEHCEEVDCLDPTCSSHGVCVNGECLCSPGWGGLNCELARVQCPDQCSGHGTYLPDTGLCSCDPNWMGPDCSVEVCSVDCGTHGVCIGGACRCEEGWTGAACDQRVCHPRCIEHGTCKDGKCECREGWNGEHCTIDGCPDLCNGNGRCTLGQNSWQCVCQTGWRGPGCNVAMETSCADNKDNEGDGLVDCLDPDCCLQSACQNSLLCRGSRDPLDIIQQGQTDWPAVKSFYDRIKLLAGKDSTHIIPGENPFNSSLVSLIRGQVVTTDGTPLVGVNVSFVKYPKYGYTITRQDGTFDLIANGGASLTLHFERAPFMSQERTVWLPWNSFYAMDTLVMKTEENSIPSCDLSGFVRPDPIIISSPLSTFFSAAPGQNPIVPETQVLHEEIELPGSNVKLRYLSSRTAGYKSLLKITMTQSTVPLNLIRVHLMVAVEGHLFQKSFQASPNLAYTFIWDKTDAYGQRVYGLSDAVVSVGFEYETCPSLILWEKRTALLQGFELDPSNLGGWSLDKHHILNVKSGILHKGTGENQFLTQQPAIITSIMGNGRRRSISCPSCNGLAEGNKLLAPVALAVGIDGSLYVGDFNYIRRIFPSRNVTSILELRNNPAHKYYLAVDPVSGSLYVSDTNSRRIYRVKSLSGTKDLAGNSEVVAGTGEQCLPFDEARCGDGGKAIDATLMSPRGIAVDKNGLMYFVDATMIRKVDQNGIISTLLGSNDLTAVRPLSCDSSMDVAQVRLEWPTDLAVNPMDNSLYVLENNVILRITENHQVSIIAGRPMHCQVPGIDYSLSKLAIHSALESASAIAISHTGVLYITETDEKKINRLRQVTTNGEICLLAGAASDCDCKNDVNCNCYSGDDAYATDAILNSPSSLAVAPDGTIYIADLGNIRIRAVSKNKPVLNAFNQYEAASPGEQELYVFNADGIHQYTVSLVTGEYLYNFTYSTDNDVTELIDNNGNSLKIRRDSSGMPRHLLMPDNQIITLTVGTNGGLKVVSTQNLELGLMTYDGNTGLLATKSDETGWTTFYDYDHEGRLTNVTRPTGVVTSLHREMEKSITIDIENSNRDDDVTVITNLSSVEASYTVVQDQVRNSYQLCNNGTLRVMYANGMGISFHSEPHVLAGTITPTIGRCNISLPMENGLNSIEWRLRKEQIKGKVTIFGRKLRVHGRNLLSIDYDRNIRTEKIYDDHRKFTLRIIYDQVGRPFLWLPSSGLAAVNVSYFFNGRLAGLQRGAMSERTDIDKQGRIVSRMFADGKVWSYSYLDKSMVLLLQSQRQYIFEYDSSDRLLAVTMPSVARHSMSTHTSIGYIRNIYNPPESNASVIFDYSDDGRILKTSFLGTGRQVFYKYGKLSKLSEIVYDSTAVTFGYDETTGVLKMVNLQSGGFSCTIRYRKIGPLVDKQIYRFSEEGMVNARFDYTYHDNSFRIASIKPVISETPLPVDLYRYDEISGKVEHFGKFGVIYYDINQIITTAVMTLSKHFDTHGRIKEVQYEMFRSLMYWMTVQYDSMGRVIKRELKLGPYANTTKYTYDYDGDGQLQSVAVNDRPTWRYSYDLNGNLHLLNPGNSVRLMPLRYDLRDRITRLGDVQYKIDDDGYLCQRGSDIFEYNSKGLLTRAYNKASGWSVQYRYDGVGRRASYKTNLGHHLQYFYSDLHNPTRITHVYNHSNSEITSLYYDLQGHLFAMESSSGEEYYVASDNTGTPLAVFSINGLMIKQLQYTAYGEIYYDSNPDFQMVIGFHGGLYDPLTKLVHFTQRDYDVLAGRWTSPDYTMWKNVGKEPAPFNLYMFKSNNPLSSELDLKNYVTDVKSWLVMFGFQLSNIIPGFPRAKMYFVPPPYELSESQASENGQLITGVQQTTERHNQAFMALEGQVITKKLHASIREKAGHWFATTTPIIGKGIMFAIKEGRVTTGVSSIASEDSRKVASVLNNAYYLDKMHYSIEGKDTHYFVKIGSADGDLVTLGTTIGRKVLESGVNVTVSQPTLLVNGRTRRFTNIEFQYSTLLLSIRYGLTPDTLDEEKARVLDQARQRALGTAWAKEQQKARDGREGSRLWTEGEKQQLLSTGRVQGYEGYYVLPVEQYPELADSSSNIQFLRQNEMGKR

SEQ ID NO: 38471 - protein, 390 aa, Homo sapiens
MPPSGLRLLLLLLPLLWLLVLTPGRPAAGLSTCKTIDMELVKRKRIEAIRGQILSKLRLASPPSQGEVPPGPLPEAVLALYNSTRDRVAGESAEPEPEPEADYYAKEVTRVLMVETHNEIYDKFKQSTHSIYMFFNTSELREAVPEPVLLSRAELRLLRLKLKVEQHVELYQKYSNNSWRYLSNRLLAPSDSPEWLSFDVTGVVRQWLSRGGEIEGFRLSAHCSCDSRDNTLQVDINGFTTGRRGDLATIHGMNRPFLLLMATPLERAQHLQSSRHRRALDTNYCFSSTEKNCCVRQLYIDFRKDLGWKWIHEPKGYHANFCLGPCPYIWSLDTQYSKVLALYNQHNPGASAAPCCVPQALEPLPIVYYVGRKPKVEQLSNMIVRSCKCS

SEQ ID NO: 38472 - protein, 575 aa, Homo sapiens
MSHAAEPARDGVEASAEGPRAVFVLLEERRPADSAQLLSLNSLLPESGIVADIELENVLDPDSFYELKSQPLPLRSSLPISLQATPATPATLSASSSAGGSRTPAMSSSSSSRVLLRQQLMRAQAQEQERRERREQAAAAPFPSPAPASPAISVVGVSAGGHTLSRPPPAQVPREVLKVQTHLENPTRYHLQQARRQQVKQYLSTTLGPKLASQALTPPPGPASAQPLPAPEAAHTTGPTGSAPNSPMALLTIGSSSEKEIDDVIDEIISLESSYNDEMLSYLPGGTTGLQLPSTLPVSGNLLDVYSSQGVATPAITVSNSCPAELPNIKREISETEAKALLKERQKKDNHNLIERRRRFNINDRIKELGTLIPKSSDPEMRWNKGTILKASVDYIRKLQKEQQRSKDLESRQRSLEQANRSLQLRIQELELQAQIHGLPVPPTPGLLSLATTSASDSLKPEQLDIEEEGRPGAATFHVGGGPAQNAPHQQPPAPPSDALLDLHFPSDHLGDLGDPFHLGLEDILMEEEEGVVGGLSGGALSPLRAASDPLLSSVSPAVSKASSRRSSFSMEEES

SEQ ID NO: 38473 - protein, 109 aa, Homo sapiens
MSHAAEPARDGVEASAEGPRAVFVLLEERRPADSAQLLSLNSLLPESGIVADIELENVLDPDSFYELKSQPLPLRSRGLQDPCHVVIFFIEGLAAAAANAGPGAGAGEA

SEQ ID NO: 38474 - protein, 2699 aa, Homo sapiens
MDVKERRPYCSLTKSRREKERRYTNSSADNEECRVPTQKSYSSSETLKAFDHDSSRLLYGNRVKDLVHREADEFTRQGQNFTLRQLGVCEPATRRGLAFCAEMGLPHRGYSISAGSDADTENEAVMSPEHAMRLWGRGVKSGRSSCLSSRSNSALTLTDTEHENKSDSENEQPASNQGQSTLQPLPPSHKQHSAQHHPSITSLNRNSLTNRRNQSPAPPAALPAELQTTPESVQLQDSWVLGSNVPLESRHFLFKTGTGTTPLFSTATPGYTMASGSVYSPPTRPLPRNTLSRSAFKFKKSSKYCSWKCTALCAVGVSVLLAILLSYFIAMHLFGLNWQLQQTENDTFENGKVNSDTMPTNTVSLPSGDNGKLGGFTQENNTIDSGELDIGRRAIQEIPPGIFWRSQLFIDQPQFLKFNISLQKDALIGVYGRKGLPPSHTQYDFVELLDGSRLIAREQRSLLETERAGRQARSVSLHEAGFIQYLDSGIWHLAFYNDGKNAEQVSFNTIVIESVVECPRNCHGNGECVSGTCHCFPGFLGPDCSRAACPVLCSGNGQYSKGRCLCFSGWKGTECDVPTTQCIDPQCGGRGICIMGSCACNSGYKGESCEEADCIDPGCSNHGVCIHGECHCSPGWGGSNCEILKTMCPDQCSGHGTYLQESGSCTCDPNWTGPDCSNEICSVDCGSHGVCMGGTCRCEEGWTGPACNQRACHPRCAEHGTCKDGKCECSQGWNGEHCTIEGCPGLCNSNGRCTLDQNGWHCVCQPGWRGAGCDVAMETLCTDSKDNEGDGLIDCMDPDCCLQSSCQNQPYCRGLPDPQDIISQSLQSPSQQAAKSFYDRISFLIGSDSTHVIPGESPFNKSLASVIRGQVLTADGTPLIGVNVSFFHYPEYGYTITRQDGMFDLVANGGASLTLVFERSPFLTQYHTVWIPWNVFYVMDTLVMKKEENDIPSCDLSGFVRPNPIIVSSPLSTFFRSSPEDSPIIPETQVLHEETTIPGTDLKLSYLSSRAAGYKSVLKITMTQSIIPFNLMKVHLMVAVVGRLFQKWFPASPNLAYTFIWDKTDAYNQKVYGLSEAVVSVGYEYESCLDLTLWEKRTAILQGYELDASNMGGWTLDKHHVLDVQNGILYKGNGENQFISQQPPVVSSIMGNGRRRSISCPSCNGQADGNKLLAPVALACGIDGSLYVGDFNYVRRIFPSGNVTSVLELSSNPAHRYYLATDPVTGDLYVSDTNTRRIYRPKSLTGAKDLTKNAEVVAGTGEQCLPFDEARCGDGGKAVEATLMSPKGMAVDKNGLIYFVDGTMIRKVDQNGIISTLLGSNDLTSARPLTCDTSMHISQVRLEWPTDLAINPMDNSIYVLDNNVVLQITENRQVRIAAGRPMHCQVPGVEYPVGKHAVQTTLESATAIAVSYSGVLYITETDEKKINRIRQVTTDGEISLVAGIPSECDCKNDANCDCYQSGDGYAKDAKLSAPSSLAASPDGTLYIADLGNIRIRAVSKNKPLLNSMNFYEVASPTDQELYIFDINGTHQYTVSLVTGDYLYNFSYSNDNDITAVTDSNGNTLRIRRDPNRMPVRVVSPDNQVIWLTIGTNGCLKSMTAQGLELVLFTYHGNSGLLATKSDETGWTTFFDYDSEGRLTNVTFPTGVVTNLHGDMDKAITVDIESSSREEDVSITSNLSSIDSFYTMVQDQLRNSYQIGYDGSLRIIYASGLDSHYQTEPHVLAGTANPTVAKRNMTLPGENGQNLVEWRFRKEQAQGKVNVFGRKLRVNGRNLLSVDFDRTTKTEKIYDDHRKFLLRIAYDTSGHPTLWLPSSKLMAVNVTYSSTGQIASIQRGTTSEKVDYDGQGRIVSRVFADGKTWSYTYLEKSMVLLLHSQRQYIFEYDMWDRLSAITMPSVARHTMQTIRSIGYYRNIYNPPESNASIITDYNEEGLLLQTAFLGTSRRVLFKYRRQTRLSEILYDSTRVSFTYDETAGVLKTVNLQSDGFICTIRYRQIGPLIDRQIFRFSEDGMVNARFDYSYDNSFRVTSMQGVINETPLPIDLYQFDDISGKVEQFGKFGVIYYDINQIISTAVMTYTKHFDAHGRIKEIQYEIFRSLMYWITIQYDNMGRVTKREIKIGPFANTTKYAYEYDVDGQLQTVYLNEKIMWRYNYDLNGNLHLLNPSNSARLTPLRYDLRDRITRLGDVQYRLDEDGFLRQRGTEIFEYSSKGLLTRVYSKGSGWTVIYRYDGLGRRVSSKTSLGQHLQFFYADLTYPTRITHVYNHSSSEITSLYYDLQGHLFAMEISSGDEFYIASDNTGTPLAVFSSNGLMLKQIQYTAYGEIYFDSNIDFQLVIGFHGGLYDPLTKLIHFGERDYDILAGRWTTPDIEIWKRIGKDPAPFNLYMFRNNNPASKIHDVKDYITDVNSWLVTFGFHLHNAIPGFPVPKFDLTEPSYELVKSQQWDDIPPIFGVQQQVARQAKAFLSLGKMAEVQVSRRRAGGAQSWLWFATVKSLIGKGVMLAVSQGRVQTNVLNIANEDCIKVAAVLNNAFYLENLHFTIEGKDTHYFIKTTTPESDLGTLRLTSGRKALENGINVTVSQSTTVVNGRTRRFADVEMQFGALALHVRYGMTLDEEKARILEQARQRALARAWAREQQRVRDGEEGARLWTEGEKRQLLSAGKVQGYDGYYVLSVEQYPELADSANNIQFLRQSEIGRR

SEQ ID NO: 38475 - protein, 586 aa, Homo sapiens
MKKSYSGGTRTSSGRLRRLGDSSGPALKRSFEVEEVETPNSTPPRRVQTPLLRATVASSTQKFQDLGVKNSEPSARHVDSLSQRSPKASLRRVELSGPKAAEPVSRRTELSIDISSKQVENAGAIGPSRFGLKRAEVLGHKTPEPAPRRTEITIVKPQESAHRRMEPPASKVPEVPTAPATDAAPKRVEIQMPKPAEAPTAPSPAQTLENSEPAPVSQLQSRLEPKPQPPVAEATPRSQEATEAAPSCVGDMADTPRDAGLKQAPASRNEKAPVDFGYVGIDSILEQMRRKAMKQGFEFNIMVVGQSGLGKSTLINTLFKSKISRKSVQPTSEERIPKTIEIKSITHDIEEKGVRMKLTVIDTPGFGDHINNENCWQPIMKFINDQYEKYLQEEVNINRKKRIPDTRVHCCLYFIPATGHSLRPLDIEFMKRLSKVVNIVPVIAKADTLTLEERVHFKQRITADLLSNGIDVYPQKEFDEDSEDRLVNEKFREMIPFAVVGSDHEYQVNGKRILGRKTKWGTIEVENTTHCEFAYLRDLLIRTHMQNIKDITSSIHFEAYRVKRLNEGSSAMANGMEEKEPEAPEM

SEQ ID NO: 38476 - protein, 568 aa, Homo sapiens
MERDRISALKRSFEVEEVETPNSTPPRRVQTPLLRATVASSTQKFQDLGVKNSEPSARHVDSLSQRSPKASLRRVELSGPKAAEPVSRRTELSIDISSKQVENAGAIGPSRFGLKRAEVLGHKTPEPAPRRTEITIVKPQESAHRRMEPPASKVPEVPTAPATDAAPKRVEIQMPKPAEAPTAPSPAQTLENSEPAPVSQLQSRLEPKPQPPVAEATPRSQEATEAAPSCVGDMADTPRDAGLKQAPASRNEKAPVDFGYVGIDSILEQMRRKAMKQGFEFNIMVVGQSGLGKSTLINTLFKSKISRKSVQPTSEERIPKTIEIKSITHDIEEKGVRMKLTVIDTPGFGDHINNENCWQPIMKFINDQYEKYLQEEVNINRKKRIPDTRVHCCLYFIPATGHSLRPLDIEFMKRLSKVVNIVPVIAKADTLTLEERVHFKQRITADLLSNGIDVYPQKEFDEDSEDRLVNEKFREMIPFAVVGSDHEYQVNGKRILGRKTKWGTIEVENTTHCEFAYLRDLLIRTHMQNIKDITSSIHFEAYRVKRLNEGSSAMANGMEEKEPEAPEM

SEQ ID NO: 38477 - protein, 422 aa, Homo sapiens
MEPPASKVPEVPTAPATDAAPKRVEIQMPKPAEAPTAPSPAQTLENSEPAPVSQLQSRLEPKPQPPVAEATPRSQEATEAAPSCVGDMADTPRDAGLKQAPASRNEKAPVDFGYVGIDSILEQMRRKAMKQGFEFNIMVVGQSGLGKSTLINTLFKSKISRKSVQPTSEERIPKTIEIKSITHDIEEKGVRMKLTVIDTPGFGDHINNENCWQPIMKFINDQYEKYLQEEVNINRKKRIPDTRVHCCLYFIPATGHSLRPLDIEFMKRLSKVVNIVPVIAKADTLTLEERVHFKQRITADLLSNGIDVYPQKEFDEDSEDRLVNEKFREMIPFAVVGSDHEYQVNGKRILGRKTKWGTIEVENTTHCEFAYLRDLLIRTHMQNIKDITSSIHFEAYRVKRLNEGSSAMANGMEEKEPEAPEM

SEQ ID NO: 38478 - protein, 335 aa, Homo sapiens
MADTPRDAGLKQAPASRNEKAPVDFGYVGIDSILEQMRRKAMKQGFEFNIMVVGQSGLGKSTLINTLFKSKISRKSVQPTSEERIPKTIEIKSITHDIEEKGVRMKLTVIDTPGFGDHINNENCWQPIMKFINDQYEKYLQEEVNINRKKRIPDTRVHCCLYFIPATGHSLRPLDIEFMKRLSKVVNIVPVIAKADTLTLEERVHFKQRITADLLSNGIDVYPQKEFDEDSEDRLVNEKFREMIPFAVVGSDHEYQVNGKRILGRKTKWGTIEVENTTHCEFAYLRDLLIRTHMQNIKDITSSIHFEAYRVKRLNEGSSAMANGMEEKEPEAPEM

SEQ ID NO: 38479 - protein, 579 aa, Homo sapiens
MSDPAVNAQLDGIISDFEALKRSFEVEEVETPNSTPPRRVQTPLLRATVASSTQKFQDLGVKNSEPSARHVDSLSQRSPKASLRRVELSGPKAAEPVSRRTELSIDISSKQVENAGAIGPSRFGLKRAEVLGHKTPEPAPRRTEITIVKPQESAHRRMEPPASKVPEVPTAPATDAAPKRVEIQMPKPAEAPTAPSPAQTLENSEPAPVSQLQSRLEPKPQPPVAEATPRSQEATEAAPSCVGDMADTPRDAGLKQAPASRNEKAPVDFGYVGIDSILEQMRRKAMKQGFEFNIMVVGQSGLGKSTLINTLFKSKISRKSVQPTSEERIPKTIEIKSITHDIEEKGVRMKLTVIDTPGFGDHINNENCWQPIMKFINDQYEKYLQEEVNINRKKRIPDTRVHCCLYFIPATGHSLRPLDIEFMKRLSKVVNIVPVIAKADTLTLEERVHFKQRITADLLSNGIDVYPQKEFDEDSEDRLVNEKFREMIPFAVVGSDHEYQVNGKRILGRKTKWGTIEVENTTHCEFAYLRDLLIRTHMQNIKDITSSIHFEAYRVKRLNEGSSAMANGMEEKEPEAPEM

SEQ ID NO: 38480 - protein, 567 aa, Homo sapiens
MKKSYSALKRSFEVEEVETPNSTPPRRVQTPLLRATVASSTQKFQDLGVKNSEPSARHVDSLSQRSPKASLRRVELSGPKAAEPVSRRTELSIDISSKQVENAGAIGPSRFGLKRAEVLGHKTPEPAPRRTEITIVKPQESAHRRMEPPASKVPEVPTAPATDAAPKRVEIQMPKPAEAPTAPSPAQTLENSEPAPVSQLQSRLEPKPQPPVAEATPRSQEATEAAPSCVGDMADTPRDAGLKQAPASRNEKAPVDFGYVGIDSILEQMRRKAMKQGFEFNIMVVGQSGLGKSTLINTLFKSKISRKSVQPTSEERIPKTIEIKSITHDIEEKGVRMKLTVIDTPGFGDHINNENCWQPIMKFINDQYEKYLQEEVNINRKKRIPDTRVHCCLYFIPATGHSLRPLDIEFMKRLSKVVNIVPVIAKADTLTLEERVHFKQRITADLLSNGIDVYPQKEFDEDSEDRLVNEKFREMIPFAVVGSDHEYQVNGKRILGRKTKWGTIEVENTTHCEFAYLRDLLIRTHMQNIKDITSSIHFEAYRVKRLNEGSSAMANGMEEKEPEAPEM

SEQ ID NO: 38481 - protein, 474 aa, Homo sapiens
MGSSFWEGLQVAVGLPQGCWPQGLDSGEPAEGGQLEAAPVCIVTRQSKETAGPTLGRGGWRQGSLRRGKGTSCRCRQLSPGHGPGRLTGCGECHRLPCRGLVSGFTGLRGQEEDDLAFCLATIGSDRQATEAAPSCVGDMADTPRDAGLKQAPASRNEKAPVDFGYVGIDSILEQMRRKAMKQGFEFNIMVVGQSGLGKSTLINTLFKSKISRKSVQPTSEERIPKTIEIKSITHDIEEKGVRMKLTVIDTPGFGDHINNENCWQPIMKFINDQYEKYLQEEVNINRKKRIPDTRVHCCLYFIPATGHSLRPLDIEFMKRLSKVVNIVPVIAKADTLTLEERVHFKQRITADLLSNGIDVYPQKEFDEDSEDRLVNEKFREMIPFAVVGSDHEYQVNGKRILGRKTKWGTIEVENTTHCEFAYLRDLLIRTHMQNIKDITSSIHFEAYRVKRLNEGSSAMANGMEEKEPEAPEM

SEQ ID NO: 38482 - protein, 362 aa, Homo sapiens
MAGAGCTGTWSWLWGTATEAAPSCVGDMADTPRDAGLKQAPASRNEKAPVDFGYVGIDSILEQMRRKAMKQGFEFNIMVVGQSGLGKSTLINTLFKSKISRKSVQPTSEERIPKTIEIKSITHDIEEKGVRMKLTVIDTPGFGDHINNENCWQPIMKFINDQYEKYLQEEVNINRKKRIPDTRVHCCLYFIPATGHSLRPLDIEFMKRLSKVVNIVPVIAKADTLTLEERVHFKQRITADLLSNGIDVYPQKEFDEDSEDRLVNEKFREMIPFAVVGSDHEYQVNGKRILGRKTKWGTIEVENTTHCEFAYLRDLLIRTHMQNIKDITSSIHFEAYRVKRLNEGSSAMANGMEEKEPEAPEM

SEQ ID NO: 38483 - protein, 424 aa, Homo sapiens
MEKQCCSHPVICSLSTMYTFLLGAIFIALSSSRILLVKYSANEENKYDYLPTTVNVCSELVKLVFCVLVSFCVIKKDHQSRNLKYASWKEFSDFMKWSIPAFLYFLDNLIVFYVLSYLQPAMAVIFSNFSIITTALLFRIVLKRRLNWIQWASLLTLFLSIVALTAGTKTLQHNLAGRGFHHDAFFSPSNSCLLFRSECPRKDNCTAKEWTFPEAKWNTTARVFSHIRLGMGHVLIIVQCFISSMANIYNEKILKEGNQLTESIFIQNSKLYFFGILFNGLTLGLQRSNRDQIKNCGFFYGHSAFSVALIFVTAFQGLSVAFILKFLDNMFHVLMAQVTTVIITTVSVLVFDFRPSLEFFLEAPSVLLSIFIYNASKPQVPEYAPRQERIRDLSGNLWERSSGDGEELERLTKPKSDESDEDTF

SEQ ID NO: 38484 - protein, 1118 aa, Homo sapiens
MEIKDQGAQMEPLLPTRNDEEAVVDRGGTRSILKTHFEKEDLEGHRTLFIGVHVPLGGRKSHRRHRHRGHKHRKRDRERDSGLEDGRESPSFDTPSQRVQFILGTEDDDEEHIPHDLFTELDEICWREGEDAEWRETARWLKFEEDVEDGGERWSKPYVATLSLHSLFELRSCILNGTVLLDMHANTLEEIADMVLDQQVSSGQLNEDVRHRVHEALMKQHHHQNQKKLTNRIPIVRSFADIGKKQSEPNSMDKNAGQVVSPQSAPACVENKNDVSRENSTVDFSKGLGGQQKGHTSPCGMKQRHEKGPPHQQEREVDLHFMKKIPPGAEASNILVGELEFLDRTVVAFVRLSPAVLLQGLAEVPIPTRFLFILLGPLGKGQQYHEIGRSIATLMTDEVFHDVAYKAKDRNDLVSGIDEFLDQVTVLPPGEWDPSIRIEPPKNVPSQEKRKIPAVPNGTAAHGEAEPHGGHSGPELQRTGRIFGGLILDIKRKAPYFWSDFRDAFSLQCLASFLFLYCACMSPVITFGGLLGEATEGRISAIESLFGASMTGIAYSLFGGQPLTILGSTGPVLVFEKILFKFCKEYGLSYLSLRASIGLWTATLCIILVATDASSLVCYITRFTEEAFASLICIIFIYEALEKLFELSEAYPINMHNDLELLTQYSCNCVEPHNPSNGTLKEWRESNISASDIIWENLTVSECKSLHGEYVGRACGHDHPYVPDVLFWSVILFFSTVTLSATLKQFKTSRYFPTKVRSIVSDFAVFLTILCMVLIDYAIGIPSPKLQVPSVFKPTRDDRGWFVTPLGPNPWWTVIAAIIPALLCTILIFMDQQITAVIINRKEHKLKKGCGYHLDLLMVAVMLGVCSIMGLPWFVAATVLSITHVNSLKLESECSAPGEQPKFLGIREQRVTGLMIFILMGSSVFMTSILKFIPMPVLYGVFLYMGASSLKGIQFFDRIKLFWMPAKHQPDFIYLRHVPLRKVHLFTIIQMSCLGLLWIIKVSRAAIVFPMMVLALVFVRKLMDLLFTKRELSWLDDLMPESKKKKLEDAEKEEEQSMLAMEDEGTVQLPLEGHYRDDPSVINISDEMSKTALWRNLLITADNSKDKESSFPSKSSPS

SEQ ID NO: 38485 - protein, 1088 aa, Homo sapiens
MEIKDQGAQMEPLLPTRNDEEAVVDRGGTRSILKTHFEKEDLEGHRTLFIGVHVPLGGRKSHRRHRHRGHKHRKRDRERDSGLEDGRESPSFDTPSQRVQFILGTEDDDEEHIPHDLFTELDEICWREGEDAEWRETARWLKFEEDVEDGGERWSKPYVATLSLHSLFELRSCILNGTVLLDMHANTLEEIADMVLDQQVSSGQLNEDVRHRVHEALMKQHHHQNQKKLTNRIPIVRSFADIGKKQSEPNSMDKNAGQVVSPQSAPACVENKNDVSRENSTVDFSKVDLHFMKKIPPGAEASNILVGELEFLDRTVVAFVRLSPAVLLQGLAEVPIPTRFLFILLGPLGKGQQYHEIGRSIATLMTDEVFHDVAYKAKDRNDLVSGIDEFLDQVTVLPPGEWDPSIRIEPPKNVPSQEKRKIPAVPNGTAAHGEAEPHGGHSGPELQRTGRIFGGLILDIKRKAPYFWSDFRDAFSLQCLASFLFLYCACMSPVITFGGLLGEATEGRISAIESLFGASMTGIAYSLFGGQPLTILGSTGPVLVFEKILFKFCKEYGLSYLSLRASIGLWTATLCIILVATDASSLVCYITRFTEEAFASLICIIFIYEALEKLFELSEAYPINMHNDLELLTQYSCNCVEPHNPSNGTLKEWRESNISASDIIWENLTVSECKSLHGEYVGRACGHDHPYVPDVLFWSVILFFSTVTLSATLKQFKTSRYFPTKVRSIVSDFAVFLTILCMVLIDYAIGIPSPKLQVPSVFKPTRDDRGWFVTPLGPNPWWTVIAAIIPALLCTILIFMDQQITAVIINRKEHKLKKGCGYHLDLLMVAVMLGVCSIMGLPWFVAATVLSITHVNSLKLESECSAPGEQPKFLGIREQRVTGLMIFILMGSSVFMTSILKFIPMPVLYGVFLYMGASSLKGIQFFDRIKLFWMPAKHQPDFIYLRHVPLRKVHLFTIIQMSCLGLLWIIKVSRAAIVFPMMVLALVFVRKLMDLLFTKRELSWLDDLMPESKKKKLEDAEKEEEQSMLAMEDEGTVQLPLEGHYRDDPSVINISDEMSKTALWRNLLITADNSKDKESSFPSKSSPS

SEQ ID NO: 38486 - protein, 1099 aa, Homo sapiens
MQSLGVSGNRKVMQSGTCEPFQSLSHQRNDEEAVVDRGGTRSILKTHFEKEDLEGHRTLFIGVHVPLGGRKSHRRHRHRGHKHRKRDRERDSGLEDGRESPSFDTPSQRVQFILGTEDDDEEHIPHDLFTELDEICWREGEDAEWRETARWLKFEEDVEDGGERWSKPYVATLSLHSLFELRSCILNGTVLLDMHANTLEEIADMVLDQQVSSGQLNEDVRHRVHEALMKQHHHQNQKKLTNRIPIVRSFADIGKKQSEPNSMDKNAGQVVSPQSAPACVENKNDVSRENSTVDFSKVDLHFMKKIPPGAEASNILVGELEFLDRTVVAFVRLSPAVLLQGLAEVPIPTRFLFILLGPLGKGQQYHEIGRSIATLMTDEVFHDVAYKAKDRNDLVSGIDEFLDQVTVLPPGEWDPSIRIEPPKNVPSQEKRKIPAVPNGTAAHGEAEPHGGHSGPELQRTGRIFGGLILDIKRKAPYFWSDFRDAFSLQCLASFLFLYCACMSPVITFGGLLGEATEGRISAIESLFGASMTGIAYSLFGGQPLTILGSTGPVLVFEKILFKFCKEYGLSYLSLRASIGLWTATLCIILVATDASSLVCYITRFTEEAFASLICIIFIYEALEKLFELSEAYPINMHNDLELLTQYSCNCVEPHNPSNGTLKEWRESNISASDIIWENLTVSECKSLHGEYVGRACGHDHPYVPDVLFWSVILFFSTVTLSATLKQFKTSRYFPTKVRSIVSDFAVFLTILCMVLIDYAIGIPSPKLQVPSVFKPTRDDRGWFVTPLGPNPWWTVIAAIIPALLCTILIFMDQQITAVIINRKEHKLKKGCGYHLDLLMVAVMLGVCSIMGLPWFVAATVLSITHVNSLKLESECSAPGEQPKFLGIREQRVTGLMIFILMGSSVFMTSILKFIPMPVLYGVFLYMGASSLKGIQFFDRIKLFWMPAKHQPDFIYLRHVPLRKVHLFTIIQMSCLGLLWIIKVSRAAIVFPMMVLALVFVRKLMDLLFTKRELSWLDDLMPESKKKKLEDAEKEEEQSMLAMEDEGTVQLPLEGHYRDDPSVINISDEMSKTALWRNLLITADNSKDKESSFPSKSSPS

SEQ ID NO: 38487 - protein, 408 aa, Homo sapiens
MEIKDQGAQMEPLLPTRNDEEAVVDRGGTRSILKTHFEKEDLEGHRTLFIGVHVPLGGRKSHRRHRHRGHKHRKRDRERDSGLEDGRESPSFDTPSQRVQFILGTEDDDEEHIPHDLFTELDEICWREGEDAEWRETARWLKFEEDVEDGGERWSKPYVATLSLHSLFELRSCILNGTVLLDMHANTLEEIADMVLDQQVSSGQLNEDVRHRVHEALMKQHHHQNQKKLTNRIPIVRSFADIGKKQSEPNSMDKNAGQVVSPQSAPACVENKNDVSRENSTVDFSKGLGGQQKGHTSPCGMKQRHEKGPPHQQEREVDLHFMKKIPPGAEASNILVGELEFLDRTVVAFVRLSPAVLLQGLAEVPIPTRYFMMLPIKLKIVMTWYQELMSFWIRLLFSLLENGIQAFE

SEQ ID NO: 38488 - protein, 476 aa, Homo sapiens
MASRIGLRMQLMREQAQQEEQRERMQQQAVMHYMQQQQQQQQQQLGGPPTPAINTPVHFQSPPPVPGEVLKVQSYLENPTSYHLQQSQHQKVREYLSETYGNKFAAHISPAQGSPKPPPAASPGVRAGHVLSSSAGNSAPNSPMAMLHIGSNPERELDDVIDNIMRLDDVLGYINPEMQMPNTLPLSSSHLNVYSSDPQVTASLVGVTSSSCPADLTQKRELTDAESRALAKERQKKDNHNLIERRRRFNINDRIKELGMLIPKANDLDVRWNKGTILKASVDYIRRMQKDLQKSRELENHSRRLEMTNKQLWLRIQELEMQARVHGLPTTSPSGMNMAELAQQVVKQELPSEEGPGEALMLGAEVPDPEPLPALPPQAPLPLPTQPPSPFHHLDFSHSLSFGGREDEGPPGYPEPLAPGHGSPFPSLSKKDLDLMLLDDSLLPLASDPLLSTMSPEASKASSRRSSFSMEEGDVL

SEQ ID NO: 38489 - protein, 391 aa, Homo sapiens
MASRIGLRMQLMREQAQQEEQRERMQQQAVMHYMQQQQQQQQQQLGGPPTPAINTPVHFQSPPPVPGEVLKLDDVIDNIMRLDDVLGYINPEMQMPNTLPLSSSHLNVYSSDPQVTASLVGVTSSSCPADLTQKRELTDAESRALAKERQKKDNHNLIERRRRFNINDRIKELGMLIPKANDLDVRWNKGTILKASVDYIRRMQKDLQKSRELENHSRRLEMTNKQLWLRIQELEMQARVHGLPTTSPSGMNMAELAQQVVKQELPSEEGPGEALMLGAEVPDPEPLPALPPQAPLPLPTQPPSPFHHLDFSHSLSFGGREDEGPPGYPEPLAPGHGSPFPSLSKKDLDLMLLDDSLLPLASDPLLSTMSPEASKASSRRSSFSMEEGDVL

SEQ ID NO: 38490 - protein, 649 aa, Homo sapiens
MAPGEKIKAKIKKNLPVTGPQAPTIKELMRWYCLNTNTHGCRRIVVSRGRLRRLLWIGFTLTAVALILWQCALLVFSFYTVSVSIKVHFRKLDFPAVTICNINPYKYSTVRHLLADLEQETREALKSLYGFPESRKRREAESWNSVSEGKQPRFSHRIPLLIFDQDEKGKARDFFTGRKRKVGGSIIHKASNVMHIESKQVVGFQLCSNDTSDCATYTFSSGINAIQEWYKLHYMNIMAQVPLEKKINMSYSAEELLVTCFFDGVSCDARNFTLFHHPMHGNCYTFNNRENETILSTSMGGSEYGLQVILYINEEEYNPFLVSSTGAKVIIHRQDEYPFVEDVGTEIETAMVTSIGMHLTESFKLSEPYSQCTEDGSDVPIRNIYNAAYSLQICLHSCFQTKMVEKCGCAQYSQPLPPAANYCNYQQHPNWMYCYYQLHRAFVQEELGCQSVCKEACSFKEWTLTTSLAQWPSVVSEKWLLPVLTWDQGRQVNKKLNKTDLAKLLIFYKDLNQRSIMESPANSIEMLLSNFGGQLGLWMSCSVVCVIEIIEVFFIDFFSIIARRQWQKAKEWWAWKQAPPCPEAPRSPQGQDNPALDIDDDLPTFNSALHLPPALGTQVPGTPPPKYNTLRLERAFSNQLTDTQMLDEL

SEQ ID NO: 38491 - protein, 2769 aa, Homo sapiens
MDVKERKPYRSLTRRRDAERRYTSSSADSEEGKAPQKSYSSSETLKAYDQDARLAYGSRVKDIVPQEAEEFCRTGANFTLRELGLEEVTPPHGTLYRTDIGLPHCGYSMGAGSDADMEADTVLSPEHPVRLWGRSTRSGRSSCLSSRANSNLTLTDTEHENTETDHPGGLQNHARLRTPPPPLSHAHTPNQHHAASINSLNRGNFTPRSNPSPAPTDHSLSGEPPAGGAQEPAHAQENWLLNSNIPLETRNLGKQPFLGTLQDNLIEMDILGASRHDGAYSDGHFLFKPGGTSPLFCTTSPGYPLTSSTVYSPPPRPLPRSTFARPAFNLKKPSKYCNWKCAALSAIVISATLVILLAYFVAMHLFGLNWHLQPMEGQMYEITEDTASSWPVPTDVSLYPSGGTGLETPDRKGKGTTEGKPSSFFPEDSFIDSGEIDVGRRASQKIPPGTFWRSQVFIDHPVHLKFNVSLGKAALVGIYGRKGLPPSHTQFDFVELLDGRRLLTQEARSLEGTPRQSRGTVPPSSHETGFIQYLDSGIWHLAFYNDGKESEVVSFLTTAIESVDNCPSNCYGNGDCISGTCHCFLGFLGPDCGRASCPVLCSGNGQYMKGRCLCHSGWKGAECDVPTNQCIDVACSNHGTCITGTCICNPGYKGESCEEVDCMDPTCSGRGVCVRGECHCSVGWGGTNCETPRATCLDQCSGHGTFLPDTGLCSCDPSWTGHDCSIEICAADCGGHGVCVGGTCRCEDGWMGAACDQRACHPRCAEHGTCRDGKCECSPGWNGEHCTIAHYLDRVVKEGCPGLCNGNGRCTLDLNGWHCVCQLGWRGAGCDTSMETACGDSKDNDGDGLVDCMDPDCCLQPLCHINPLCLGSPNPLDIIQETQVPVSQQNLHSFYDRIKFLVGRDSTHIIPGENPFDGGHACVIRGQVMTSDGTPLVGVNISFVNNPLFGYTISRQDGSFDLVTNGGISIILRFERAPFITQEHTLWLPWDRFFVMETIIMRHEENEIPSCDLSNFARPNPVVSPSPLTSFASSCAEKGPIVPEIQALQEEISISGCKMRLSYLSSRTPGYKSVLRISLTHPTIPFNLMKVHLMVAVEGRLFRKWFAAAPDLSYYFIWDKTDVYNQKVFGLSEAFVSVGYEYESCPDLILWEKRTTVLQGYEIDASKLGGWSLDKHHALNIQSGILHKGNGENQFVSQQPPVIGSIMGNGRRRSISCPSCNGLADGNKLLAPVALTCGSDGSLYVGDFNYIRRIFPSGNVTNILELRNKDFRHSHSPAHKYYLATDPMSGAVFLSDSNSRRVFKIKSTVVVKDLVKNSEVVAGTGDQCLPFDDTRCGDGGKATEATLTNPRGITVDKFGLIYFVDGTMIRRIDQNGIISTLLGSNDLTSARPLSCDSVMDISQVHLEWPTDLAINPMDNSLYVLDNNVVLQISENHQVRIVAGRPMHCQVPGIDHFLLSKVAIHATLESATALAVSHNGVLYIAETDEKKINRIRQVTTSGEISLVAGAPSGCDCKNDANCDCFSGDDGYAKDAKLNTPSSLAVCADGELYVADLGNIRIRFIRKNKPFLNTQNMYELSSPIDQELYLFDTTGKHLYTQSLPTGDYLYNFTYTGDGDITLITDNNGNMVNVRRDSTGMPLWLVVPDGQVYWVTMGTNSALKSVTTQGHELAMMTYHGNSGLLATKSNENGWTTFYEYDSFGRLTNVTFPTGQVSSFRSDTDSSVHVQVETSSKDDVTITTNLSASGAFYTLLQDQVRNSYYIGADGSLRLLLANGMEVALQTEPHLLAGTVNPTVGKRNVTLPIDNGLNLVEWRQRKEQARGQVTVFGRRLRVHNRNLLSLDFDRVTRTEKIYDDHRKFTLRILYDQAGRPSLWSPSSRLNGVNVTYSPGGYIAGIQRGIMSERMEYDQAGRITSRIFADGKTWSYTYLEKSMVLLLHSQRQYIFEFDKNDRLSSVTMPNVARQTLETIRSVGYYRNIYQPPEGNASVIQDFTEDGHLLHTFYLGTGRRVIYKYGKLSKLAETLYDTTKVSFTYDETAGMLKTINLQNEGFTCTIRYRQIGPLIDRQIFRFTEEGMVNARFDYNYDNSFRVTSMQAVINETPLPIDLYRYDDVSGKTEQFGKFGVIYYDINQIITTAVMTHTKHFDAYGRMKEVQYEIFRSLMYWMTVQYDNMGRVVKKELKVGPYANTTRYSYEYDADGQLQTVSINDKPLWRYSYDLNGNLHLLSPGNSARLTPLRYDIRDRITRLGDVQYKMDEDGFLRQRGGDIFEYNSAGLLIKAYNRAGSWSVRYRYDGLGRRVSSKSSHSHHLQFFYADLTNPTKVTHLYNHSSSEITSLYYDLQGHLFAMELSSGDEFYIACDNIGTPLAVFSGTGLMIKQILYTAYGEIYMDTNPNFQIIIGYHGGLYDPLTKLVHMGRRDYDVLAGRWTSPDHELWKHLSSSNVMPFNLYMFKNNNPISNSQDIKCFMTDVNSWLLTFGFQLHNVIPGYPKPDMDAMEPSYELIHTQMKTQEWDNSKSILGVQCEVQKQLKAFVTLERFDQLYGSTITSCQQAPKTKKFASSGSVFGKGVKFALKDGRVTTDIISVANEDGRRVAAILNHAHYLENLHFTIDGVDTHYFVKPGPSEGDLAILGLSGGRRTLENGVNVTVSQINTVLNGRTRRYTDIQLQYGALCLNTRYGTTLDEEKARVLELARQRAVRQAWAREQQRLREGEEGLRAWTEGEKQQVLSTGRVQGYDGFFVISVEQYPELSDSANNIHFMRQSEMGRR

SEQ ID NO: 38492 - protein, 347 aa, Homo sapiens
MTLDHQIINPTLKWSQPAVPSGGPLVQHAHTTLDSDAGLTENPLTKLLAIGKEDDNAQWHMEDVIEDIIGMESSFKEEGADSPLLMQRTLSGSILDVYSGEQGISPINMGLTSASCPSSLPMKREITETDTRALAKERQKKDNHNLIERRRRYNINYRIKELGTLIPKSNDPDMRWNKGTILKASVEYIKWLQKEQQRARELEHRQKKLEQANRRLLLRIQELEIQARTHGLPTLASLGTVDLGAHVTKQQSHPEQNSVDYCQQLTVSQGPSPELCDQAIAFSDPLSYFTDLSFSAALKEEQRLDGMLLDDTISPFGTDPLLSATSPAVSKESSRRSSFSSDDGDEL

SEQ ID NO: 38493 - protein, 318 aa, Homo sapiens
MTLDHQIINPTLKWSQPAVPSGGPLVQHAHTTLDSDAGLTENPLTKLLAIGKEDDNAQWHLSGSILDVYSGEQGISPINMGLTSASCPSSLPMKREITETDTRALAKERQKKDNHNLIERRRRYNINYRIKELGTLIPKSNDPDMRWNKGTILKASVEYIKWLQKEQQRARELEHRQKKLEQANRRLLLRIQELEIQARTHGLPTLASLGTVDLGAHVTKQQSHPEQNSVDYCQQLTVSQGPSPELCDQAIAFSDPLSYFTDLSFSAALKEEQRLDGMLLDDTISPFGTDPLLSATSPAVSKESSRRSSFSSDDGDEL

SEQ ID NO: 38494 - protein, 197 aa, Homo sapiens
MTLDHQIINPTLKWSQPAVPSGGPLVQHAHTTLDSDAGLTENPLTKLLAIGKEDDNAQWHLSGSILDVYSGEQGISPINMGLTSASCPSSLPMKREITETDTRALAKERQKKDNHNLIERRRRYNINYRIKELGTLIPKSNDPDMRWNKGTILKASVEYIKWLQKEQQRARELEHRQKKLEQANRRLLLRIQVFIRM

SEQ ID NO: 38495 - protein, 280 aa, Homo sapiens
MMKEKEKTIAIVKVIDTSKLKLLSGSILDVYSGEQGISPINMGLTSASCPSSLPMKREITETDTRALAKERQKKDNHNLIERRRRYNINYRIKELGTLIPKSNDPDMRWNKGTILKASVEYIKWLQKEQQRARELEHRQKKLEQANRRLLLRIQELEIQARTHGLPTLASLGTVDLGAHVTKQQSHPEQNSVDYCQQLTVSQGPSPELCDQAIAFSDPLSYFTDLSFSAALKEEQRLDGMLLDDTISPFGTDPLLSATSPAVSKESSRRSSFSSDDGDEL

SEQ ID NO: 38496 - protein, 448 aa, Homo sapiens
MRECISVHVGQAGVQMGNACWELYCLEHGIQPDGQMPSDKTIGGGDDSFTTFFCETGAGKHVPRAVFVDLEPTVIDEIRNGPYRQLFHPEQLITGKEDAANNYARGHYTIGKEIIDPVLDRIRKLSDQCTGLQGFLVFHSFGGGTGSGFTSLLMERLSVDYGKKSKLEFSIYPAPQVSTAVVEPYNSILTTHTTLEHSDCAFMVDNEAIYDICRRNLDIERPTYTNLNRLISQIVSSITASLRFDGALNVDLTEFQTNLVPYPRIHFPLATYAPVISAEKAYHEQLSVAEITNACFEPANQMVKCDPRHGKYMACCLLYRGDVVPKDVNAAIAAIKTKRSIQFVDWCPTGFKVGINYQPPTVVPGGDLAKVQRAVCMLSNTTAIAEAWARLDHKFDLMYAKRAFVHWYVGEGMEEGEFSEAREDMAALEKDYEEVGIDSYEDEDEGEE

SEQ ID NO: 38497 - protein, 433 aa, Homo sapiens
MGNACWELYCLEHGIQPDGQMPSDKTIGGGDDSFTTFFCETGAGKHVPRAVFVDLEPTVIDEIRNGPYRQLFHPEQLITGKEDAANNYARGHYTIGKEIIDPVLDRIRKLSDQCTGLQGFLVFHSFGGGTGSGFTSLLMERLSVDYGKKSKLEFSIYPAPQVSTAVVEPYNSILTTHTTLEHSDCAFMVDNEAIYDICRRNLDIERPTYTNLNRLISQIVSSITASLRFDGALNVDLTEFQTNLVPYPRIHFPLATYAPVISAEKAYHEQLSVAEITNACFEPANQMVKCDPRHGKYMACCLLYRGDVVPKDVNAAIAAIKTKRSIQFVDWCPTGFKVGINYQPPTVVPGGDLAKVQRAVCMLSNTTAIAEAWARLDHKFDLMYAKRAFVHWYVGEGMEEGEFSEAREDMAALEKDYEEVGIDSYEDEDEGEE

SEQ ID NO: 38498 - protein, 156 aa, Homo sapiens
MSARPSLPPLPAKPAGSPRLRERPAPVGPGGEDAYSLLLRPQLGTRKVARAEEAGGEEGKREAEAWTRRAAASARRGGELRTEEPPPPAARLCCLGGGCGGGGGGGQKVSATASIPFSCKRALLTSTIPLSPPAKRRGIRTWGHPSYLTPSPTMRD

SEQ ID NO: 38499 - protein, 82 aa, Homo sapiens
MSARPSLPPLPAKPAGSPRLRERPAPVGPGGEDAYSLLLRPQLGTRKVARAEEAGGEEGKREAEAWTRRAAASARRGVILRL

SEQ ID NO: 38500 - protein, 115 aa, Homo sapiens
MSRHSRLQRQVLSLYRDLLRAGRGKPGAEARVRAEFRQHAGLPRSDVLRIEYLYRRGRRQLQLLRSGHATAMGAFVRPRAPTGEPGGVGCQPDDGDSPRNPHDSTGAPETRPDGR

SEQ ID NO: 38501 - protein, 794 aa, Homo sapiens
MRVRIGLTLLLCAVLLSLASASSDEEGSQDESLDSKTTLTSDESVKDHTTAGRVVAGQIFLDSEESELESSIQEEEDSLKSQEGESVTEDISFLESPNPENKDYEEPKKVRKPALTAIEGTAHGEPCHFPFLFLDKEYDECTSDGREDGRLWCATTYDYKADEKWGFCETEEEAAKRRQMQEAEMMYQTGMKILNGSNKKSQKREAYRYLQKAASMNHTKALERVSYALLFGDYLPQNIQAAREMFEKLTEEGSPKGQTALGFLYASGLGVNSSQAKALVYYTFGALGGNLIAHMVLGYRYWAGIGVLQSCESALTHYRLVANHVASDISLTGGSVVQRIRLPDEVENPGMNSGMLEEDLIQYYQFLAEKGDVQAQVGLGQLHLHGGRGVEQNHQRAFDYFNLAANAGNSHAMAFLGKMYSEGSDIVPQSNETALHYFKKAADMGNPVGQSGLGMAYLYGRGVQVNYDLALKYFQKAAEQGWVDGQLQLGSMYYNGIGVKRDYKQALKYFNLASQGGHILAFYNLAQMHASGTGVMRSCHTAVELFKNVCERGRWSERLMTAYNSYKDGDYNAAVIQYLLLAEQGYEVAQSNAAFILDQREASIVGENETYPRALLHWNRAASQGYTVARIKLGDYHFYGFGTDVDYETAFIHYRLASEQQHSAQAMFNLGYMHEKGLGIKQDIHLAKRFYDMAAEASPDAQVPVFLALCKLGVVYFLQYIRETNIRDMFTQLDMDQLLGPEWDLYLMTIIALLLGTVIAYRQRQHQDMPAPRPPGPRPAPPQQEGPPEQQPPQ

SEQ ID NO: 38502 - protein, 301 aa, Homo sapiens
MRVRIGLTLLLCAVLLSLASASSDEEGSQDESLDSKTTLTSDESVKDHTTAGRVVAGQIFLDSEESELESSIQEEEDSLKSQEGESVTEDISFLESPNPENKDYEEPKKVRKPALTAIEGTAHGEPCHFPFLFLDKEYDECTSDGREDGRLWCATTYDYKADEKWGFCETEEEAAKRRQMQEAEMMYQTGMKILNGSNKKSQKREAYRYLQKAASMNHTKALERVSYALLFGDYLPQNIQAAREMFEKLTEEGSPKGQTALGFLYASGLGVNSSQAKALVYYTFGALGGNLIAHMVLVSRL

SEQ ID NO: 38503 - protein, 1006 aa, Homo sapiens
MGSAEDAVKEKLLWNVKKEVKQIMEEAVTRKFVHEDSSHIIALCGAVEACLLHQLRRRAAGFLRSDKMAALFTKVGKTCPVAGEICHKVQELQQQAEGRKPSGVSQEALRRQGSASGKAPALSPQALKHVWVRTALIEKVLDKVVQYLAENCSKYYEKEALLADPVFGPILASLLVGPCALEYTKLKTADHYWTDPSADELVQRHRIRGPPTRQDSPAKRPALGIRKRHSSGSASEDRLAACARECVESLHQNSRTRLLYGKNHVLVQPKEDMEAVPGYLSLHQSAESLTLKWTPNQLMNGTLGDSELEKSVYWDYALVVPFSQVVCIHCHQQKSGGTLVLVSQDGIQRPPLHFPQGGHLLSFLSCLENGLLPRGQLEPPLWTQQGKGKVFPKLRKRSSIRSVDMEEMGTGRATDYVFRIIYPGHRHEHNAGDMIEMQGFGPSLPAWHLEPLCSQGSSCLSCSSSSSPHATPSHCSCIPDRLPLRLLCESMKRQIVSRAFYGWLAHCRHLSTVRTHLSALVHHSVIPPDRPPGASAGLTKDVWSKYQKDKKNYKELELLRQVYYGGIEHEIRKDVWPFLLGHYKFGMSKKEMEQVDAVVAARYQQVLAEWKACEVVVRQREREAHPATRTKFSSGSSIDSHVQRLIHRDSTISNDVFISVDDLEPPEPQDPEDSRPKPEQEAGPGTPGTAVVEQQHSVEFDSPDSGLPSSRNYSVASGIQSSLDEGQSVGFEEEDGGGEEGSSGPGPAAHTLREPQDPSQEKPQAGELEAGEELAAVCAAAYTIELLDTVALNLHRIDKDVQRCDRNYWYFTPPNLERLRDVMCSYVWEHLDVGYVQGMCDLLAPLLVTLDNDQLAYSCFSHLMKRMSQNFPNGGAMDTHFANMRSLIQILDSELFELMHQNGDYTHFYFCYRWFLLDFKRELLYEDVFAVWEVIWAARHISSEHFVLFIALALVEAYREIIRDNNMDFTDIIKFFNERAEHHDAQEILRIARDLVHKVQMLIENK

SEQ ID NO: 38504 - protein, 1051 aa, Homo sapiens
MGSAEDAVKEKLLWNVKKEVKQIMEEAVTRKFVHEDSSHIIALCGAVEACLLHQLRRRAAGFLRSDKMAALFTKVGKTCPVAGEICHKVQELQQQAEGRKPSGVSQEALRRQGSASGKAPALSPQALKHVWVRTALIEKVLDKVVQYLAENCSKYYEKEALLADPVFGPILASLLVGPCALEYTKLKTADHYWTDPSADELVQRHRIRGPPTRQDSPAKRPALGIRKRHSSGSASEDRLAACARECVESLHQNSRTRLLYGKNHVLVQPKEDMEAVPGYLSLHQSAESLTLKWTPNQLMNGTLGDSELEKSVYWDYALVVPFSQVVCIHCHQQKSGGTLVLVSQDGIQRPPLHFPQGGHLLSFLSCLENGLLPRGQLEPPLWTQQGKGKVFPKLRKRSSIRSVDMEEMGTGRATDYVFRIIYPGHRHEHITINYHHLAASRAASVDDDEEEEDKLHAMLSMICSRNLTAPNPMKDAGDMIEMQGFGPSLPAWHLEPLCSQGSSCLSCSSSSSPHATPSHCSCIPDRLPLRLLCESMKRQIVSRAFYGWLAHCRHLSTVRTHLSALVHHSVIPPDRPPGASAGLTKDVWSKYQKDKKNYKELELLRQVYYGGIEHEIRKDVWPFLLGHYKFGMSKKEMEQVDAVVAARYQQVLAEWKACEVVVRQREREAHPATRTKFSSGSSIDSHVQRLIHRDSTISNDVFISVDDLEPPEPQDPEDSRPKPEQEAGPGTPGTAVVEQQHSVEFDSPDSGLPSSRNYSVASGIQSSLDEGQSVGFEEEDGGGEEGSSGPGPAAHTLREPQDPSQEKPQAGELEAGEELAAVCAAAYTIELLDTVALNLHRIDKDVQRCDRNYWYFTPPNLERLRDVMCSYVWEHLDVGYVQGMCDLLAPLLVTLDNDQLAYSCFSHLMKRMSQNFPNGGAMDTHFANMRSLIQILDSELFELMHQNGDYTHFYFCYRWFLLDFKRELLYEDVFAVWEVIWAARHISSEHFVLFIALALVEAYREIIRDNNMDFTDIIKFFNERAEHHDAQEILRIARDLVHKVQMLIENK

SEQ ID NO: 38505 - protein, 157 aa, Homo sapiens
MLSMICSRNLTAPNPMKDAGDMIEMQGFGPSLPAWHLEPLCSQGSSCLSCSSSSSPHATPSHCSCIPDRLPLRLLCESMKRQIVSRAFYGWLAHCRHLSTVRTHLSALVHHSVIPPDRPPGASAGLTKDVWSKYQKDKKVPTLGFQGHRSRGWGGQE

SEQ ID NO: 38506 - protein, 987 aa, Homo sapiens
MGSAEDAVKEKLLWNVKKEVKQIMEEAVTRKFVHEDSSHIIALCGAVEACLLHQLRRRAAGFLRSDKMAALFTKVGKTCPVAGEICHKVQELQQQAEGRKPSGVSQEALRRQGSASGKAPALSPQALKHVWVRTALIEKVLDKVVQYLAENCSKYYEKEALLADPVFGPILASLLVGPCALEYTKLKTADHYWTDPSADELVQRHRIRGPPTRQDSPAKRPALGIRKRHSSGSASEDRLAACARECVESLHQNSRTRLLYGKNHVLVQPKEDMEAVPGYLSLHQSAESLTLKWTPNQLMNGTLGDSELEKSVYWDYALVVPFSQVVCIHCHQQKSGGTLVLVSQDGIQRPPLHFPQGGHLLSFLSCLENGLLPRGQLEPPLWTQQGKGKVFPKLRKRSSIRSVDMEEMGTGRATDYVFRIIYPGHRHEHNAGDMIEMQGFGPSLPAWHLEPLCSQGSSCLSCSSSSSPHATPSHCSCIPDRLPLRLLCESMKRQIVSRAFYGWLAHCRHLSTVRTHLSALVHHSVIPPDRPPGASAGLTKDVWSKYQKDKKNYKELELLRQVYYGGIEHEIRKDVWPFLLGHYKFGMSKKEMEQVDAVVAARYQQVLAEWKACEVVVRQREREAHPATRTKFSSGSSIDSHVQRLIHRDSTISNDVFISVDDLEPPEPQDPEDSRPKPEQEAGPGTPGTAVVEQQHSVEFDSPDSGLPSSRNYSVASGIQSSLDEGQSVGFEEEDGGGEEGSSGPGPAAHTLREPQDPSQEKPQAGELEAGEELAAVCAAAYTIELLDTVALNLHRIDKDVQRCDRNYWYFTPPNLERLRDVMCSYVWEHLDVGYVQGMCDLLAPLLVTLDNDQLAYSCFSHLMKRMSQNFPNGGAMDTHFANMRSLIQILDSELFELMHQNGDYTHFYFCYRWFLLDFKRELLYEDVFAVWEVIWAARHISSEHFVLFIALALVEAYREIIRDNNMDFTDIIKFFNGTSLKTTCKK

SEQ ID NO: 38507 - protein, 450 aa, Homo sapiens
MEQAPPDPERQLQPAPLEPLGSPDAGLGAAVGKEAEGAGEESSGVDTMTHNNFWLKKIEISVSEAEKRTGRNAMNMQETYTAYLIETRSVEHTDGQSVLTDSLWRRYSEFELLRSYLLVYYPHIVVPPLPEKRAEFVWHKLSADNMDPDFVERRRIGLENFLLRIASHPILCRDKIFYLFLTQEGNWKETVNETGFQLKADSRLKALNATFRVKNPDKRFTDLKHYSDELQSVISHLLRVRARVADRLYGVYKVHGNYGRVFSEWSAIEKEMGDGLQSAGHHMDVYASSIDDILEDEEHYADQLKEYLFYAEALRAVCRKHELMQYDLEMAAQDLASKKQQCEELVTGTVRTFSLKGMTTKLFGQETPEQREARIKVLEEQINEGEQQLKSKNLEGREFVKNAWADIERFKEQKNRDLKEALISYAVMQISMCKKGIQVWTNAKECFSKM

SEQ ID NO: 38508 - protein, 305 aa, Homo sapiens
MDPDFVERRRIGLENFLLRIASHPILCRDKIFYLFLTQEGNWKETVNETGFQLKADSRLKALNATFRVKNPDKRFTDLKHYSDELQSVISHLLRVRARVADRLYGVYKVHGNYGRVFSEWSAIEKEMGDGLQSAGHHMDVYASSIDDILEDEEHYADQLKEYLFYAEALRAVCRKHELMQYDLEMAAQDLASKKQQCEELVTGTVRTFSLKGMTTKLFGQETPEQREARIKVLEEQINEGEQQLKSKNLEGREFVKNAWADIERFKEQKNRDLKEALISYAVMQISMCKKGIQVWTNAKECFSKM

SEQ ID NO: 38509 - protein, 464 aa, Homo sapiens
MRAARRGLHCAGAERPRRRGRLWDSSGVPQRQKRPGPWRTQTQEQMSRDVCIHTWPCTYYLEPKRRWVTGQLSLTSLSLRFMTDSTGEILVSFPLSSIVEIKKEASHFIFSSITILEKGHAKHWFSSLRPSRNVVFSIIEHFWRELLLSQPGAVADASVPRTRGEELTGLMAGSQKRLEDTARVLHHQGQQLDSVMRGLDKMESDLEVADRLLTELESPAWWPFSSKLWKTPPETKPREDVSMTSCEPFGKEGILIKIPAVISHRTESHVKPGRLTVLVSGLEIHDSSSLLMHRFEREDVDDIKVHSPYEISIRQRFIGKPDMAYRLISAKMPEVIPILEVQFSKKMELLEDALVLRSARTSSPAEKSCSVWHAASGLMGRTLHREPPAGDQEGTALHLQTSLPALSEADTQELTQILRRMKGLALEAESELERQDEALDGVAAAVDRATLTIDKHNRRMKRLT

SEQ ID NO: 38510 - protein, 446 aa, Homo sapiens
MRAARRGLHCAGAERPRRRGRLWDSSGVPQRQKRPGPWRTQTQEQMSRDVCIHTWPCTYYLEPKRRWVTGQLSLTSLSLRFMTDSTGEILVSFPLSSIVEIKKEASHFIFSSITILEKGHAKHWFSSLRPSRNVVFSIIEHFWRELLLSQPGAVADASVPRTRGEELTGLMAGSQKRLEDTARVLHHQGQQLDSVMRGLDKMESDLEVADRLLTELESPAWWPFSSKLWKTPPETKPREDVSMTSCEPFGKEGILIKIPAVISHRTESHVKPGRLTVLVSGLEIHDSSSLLMHRFEREDVDDIKVHSPYEISIRQRFIGKPDMAYRLISAKMPEVIPILEVQFSKKMELLEDALVLRSARTSSPAEKSCSVWHAASGLMGRTLHREPPAGDQEGTALHLQTSLPALSEADTQELTQGFRPMSLSTQTVLVMLCSESAGALWRQRLS

SEQ ID NO: 38511 - protein, 204 aa, Homo sapiens
MTSCEPFGKEGILIKIPAVISHRTESHVKPGRLTVLVSGLEIHDSSSLLMHRFEREDVDDIKVHSPYEISIRQRFIGKPDMAYRLISAKMPEVIPILEVQFSKKMELLEDALVLRSARTSSPAEKSCSVWHAASGLMGRTLHREPPAGDQEGTALHLQTSLPALSEADTQELTQGFRPMSLSTQTVLVMLCSESAGALWRQRLS

SEQ ID NO: 38512 - protein, 222 aa, Homo sapiens
MTSCEPFGKEGILIKIPAVISHRTESHVKPGRLTVLVSGLEIHDSSSLLMHRFEREDVDDIKVHSPYEISIRQRFIGKPDMAYRLISAKMPEVIPILEVQFSKKMELLEDALVLRSARTSSPAEKSCSVWHAASGLMGRTLHREPPAGDQEGTALHLQTSLPALSEADTQELTQILRRMKGLALEAESELERQDEALDGVAAAVDRATLTIDKHNRRMKRLT

SEQ ID NO: 38513 - protein, 709 aa, Homo sapiens
MGPRIGPAGEVPQVPDKETKATMGTENTPGGKASPDPQDVRPSVFHNIKLFVLCHSLLQLAQLMISGYLKSSISTVEKRFGLSSQTSGLLASFNEVGNTALIVFVSYFGSRVHRPRMIGYGAILVALAGLLMTLPHFISEPYRYDNTSPEDMPQDFKASLCLPTTSAPASAPSNGNCSSYTETQHLSVVGIMFVAQTLLGVGGVPIQPFGISYIDDFAHNSNSPLYLGILFAVTMMGPGLAFGLGSLMLRLYVDINQMPEGGISLTIKDPRWVGAWWLGFLIAAGAVALAAIPYFFFPKEMPKEKRELQFRRKVLAVTDSPARKGKDSPSKQSPGESTKKQDGLVQIAPNLTVIQFIKVFPRVLLQTLRHPIFLLVVLSQVCLSSMAAGMAIFLPKFLERQFSITASYANLLIGCLSFPSVIVGIVVGGVLVKRLHLGPVGCGALCLLGMLLCLFFSLPLFFIGCSSHQIAGITHQTSAHPGLELSPSCMEACSCPLDGFNPVCDPSTRVEYITPCHAGCSSWVVQDALDNSQVFYTNCSCVVEGNPVLAGSCDSTCSHLVVPFLLLVSLGSALACLTHTPSFMLILRGVKKEDKTLAVGIQFMFLRILAWMPSPVIHGSAIDTTCVHWALSCGRRAVCRYYNNDLLRNRFIGLQFFFKTGSVICFALVLAVLRQQDKEARTKESRSSPAVEQQLLVSGPGKKPEDSRV

SEQ ID NO: 38514 - protein, 482 aa, Homo sapiens
MIGYGAILVALAGLLMTLPHFISEPYRYDNTSPGGISLTIKDPRWVGAWWLGFLIAAGAVALAAIPYFFFPKEMPKEKRELQFRRKVLAVTDSPARKGKDSPSKQSPGESTKKQDGLVQIAPNLTVIQFIKVFPRVLLQTLRHPIFLLVVLSQVCLSSMAAGMAIFLPKFLERQFSITASYANLLIGCLSFPSVIVGIVVGGVLVKRLHLGPVGCGALCLLGMLLCLFFSLPLFFIGCSSHQIAGITHQTSAHPGLELSPSCMEACSCPLDGFNPVCDPSTRVEYITPCHAGCSSWVVQDALDNSQVFYTNCSCVVEGNPVLAGSCDSTCSHLVVPFLLLVSLGSALACLTHTPSFMLILRGVKKEDKTLAVGIQFMFLRILAWMPSPVIHGSAIDTTCVHWALSCGRRAVCRYYNNDLLRNRFIGLQFFFKTGSVICFALVLAVLRQQDKEARTKESRSSPAVEQQLLVSGPGKKPEDSRV

SEQ ID NO: 38515 - protein, 687 aa, Homo sapiens
MGTENTPGGKASPDPQDVRPSVFHNIKLFVLCHSLLQLAQLMISGYLKSSISTVEKRFGLSSQTSGLLASFNEVGNTALIVFVSYFGSRVHRPRMIGYGAILVALAGLLMTLPHFISEPYRYDNTSPEDMPQDFKASLCLPTTSAPASAPSNGNCSSYTETQHLSVVGIMFVAQTLLGVGGVPIQPFGISYIDDFAHNSNSPLYLGILFAVTMMGPGLAFGLGSLMLRLYVDINQMPEGGISLTIKDPRWVGAWWLGFLIAAGAVALAAIPYFFFPKEMPKEKRELQFRRKVLAVTDSPARKGKDSPSKQSPGESTKKQDGLVQIAPNLTVIQFIKVFPRVLLQTLRHPIFLLVVLSQVCLSSMAAGMAIFLPKFLERQFSITASYANLLIGCLSFPSVIVGIVVGGVLVKRLHLGPVGCGALCLLGMLLCLFFSLPLFFIGCSSHQIAGITHQTSAHPGLELSPSCMEACSCPLDGFNPVCDPSTRVEYITPCHAGCSSWVVQDALDNSQVFYTNCSCVVEGNPVLAGSCDSTCSHLVVPFLLLVSLGSALACLTHTPSFMLILRGVKKEDKTLAVGIQFMFLRILAWMPSPVIHGSAIDTTCVHWALSCGRRAVCRYYNNDLLRNRFIGLQFFFKTGSVICFALVLAVLRQQDKEARTKESRSSPAVEQQLLVSGPGKKPEDSRV

SEQ ID NO: 38516 - protein, 565 aa, Homo sapiens
MGPRIEDMPQDFKASLCLPTTSAPASAPSNGNCSSYTETQHLSVVGIMFVAQTLLGVGGVPIQPFGISYIDDFAHNSNSPLYLGILFAVTMMGPGLAFGLGSLMLRLYVDINQMPEGGISLTIKDPRWVGAWWLGFLIAAGAVALAAIPYFFFPKEMPKEKRELQFRRKVLAVTDSPARKGKDSPSKQSPGESTKKQDGLVQIAPNLTVIQFIKVFPRVLLQTLRHPIFLLVVLSQVCLSSMAAGMAIFLPKFLERQFSITASYANLLIGCLSFPSVIVGIVVGGVLVKRLHLGPVGCGALCLLGMLLCLFFSLPLFFIGCSSHQIAGITHQTSAHPGLELSPSCMEACSCPLDGFNPVCDPSTRVEYITPCHAGCSSWVVQDALDNSQVFYTNCSCVVEGNPVLAGSCDSTCSHLVVPFLLLVSLGSALACLTHTPSFMLILRGVKKEDKTLAVGIQFMFLRILAWMPSPVIHGSAIDTTCVHWALSCGRRAVCRYYNNDLLRNRFIGLQFFFKTGSVICFALVLAVLRQQDKEARTKESRSSPAVEQQLLVSGPGKKPEDSRV

SEQ ID NO: 38517 - protein, 465 aa, Homo sapiens
MTGRAMDPLPAAAVGAAAEAEADEEADPPASDLPTPQAIEPQAIVQQVPAPSRMQMPQGNPLLLSHTLQELLARDTVQVELIPEKKGLFLKHVEYEVSSQRFKSSVYRRYNDFVVFQEMLLHKFPYRMVPALPPKRMLGADREFIEARRRALKRFVNLVARHPLFSEDVVLKLFLSFSGSDVQNKLKESAQCVGDEFLNCKLATRAKDFLPADIQAQFAISRELIRNIYNSFHKLRDRAERIASRAIDNAADLLIFGKELSAIGSDTTPLPSWAALNSSTWGSLKQALKGLSVEFALLADKAAQQGKQEENDVVEKLNLFLDLLQSYKDLCERHEKGVLHKHQRALHKYSLMKRQMMSATAQNREPESVEQLESRIVEQENAIQTMELRNYFSLYCLHQETQLIHVYLPLTSHILRAFVNSQIQGHKEMSKVWNDLRPKLSCLFAGPHSTLTPPCSPPEDGLCPH

SEQ ID NO: 38518 - protein, 963 aa, Homo sapiens
MAAQRIRAANSNGLPRCKSEGTLIDLSEGFSETSFNDIKVPSPSALLVDNPTPFGNAKEVIAIKDYCPTNFTTLKFSKGDHLYVLDTSGGEWWYAHNTTEMGYIPSSYVQPLNYRNSTLSDSGMIDNLPDSPDEVAKELELLGGWTDDKKVPGRMYSNNPFWNGVQTNPFLNGNVPVMPSLDELNPKSTVDLLLFDAGTSSFTESSSATTNSTGNIFDELPVTNGLHAEPPVRRDNPFFRSKRSYSLSELSVLQAKSDAPTSSSFFTGLKSPAPEQFQSREDFRTAWLNHRKLARSCHDLDLLGQSPGWGQTQAVETNIVCKLDSSGGAVQLPDTSISIHVPEGHVAPGETQQISMKALLDPPLELNSDRSCSISPVLEVKLSNLEVKTSIILEMKVSAEIKNDLFSKSTVGLQCLRSDSKEGPYVSVPLNCSCGDTVQAQLHNLEPCMYVAVVAHGPSILYPSTVWDFINKKVTVGLYGPKHIHPSFKTVVTIFGHDCAPKTLLVSEVTRQAPNPAPVALQLWGKHQFVLSRPQDLKVCMFSNMTNYEVKASEQAKVVRGFQLKLGKVSRLIFPITSQNPNELSDFTLRVQVKDDQEAILTQFCVQTPQPPPKSAIKPSGQRRFLKKNEVGKIILSPFATTTKYPTFQDRPVSSLKFGKLLKTVVRQNKNHYLLEYKKGDGIALLSEERVRLRGQLWTKEWYIGYYQGRVGLVHTKNVLVVGRARPSLCSGPELSTSVLLEQILRPCKFLTYIYASVRTLLMENISSWRSFADALGYVNLPLTFFCRAELDSEPERVASVLEKLKEDCNNTENKERKSFQKELVMALLKMDCQGLVVRLIQDFVLLTTAVEVAQRWRELAEKLAKVSKQQMDAYESPHRDRNGVVDSEAMWKPAYDFLLTWSHQIGDSYRDVIQELHLGLDKMKNPITKRWKHLTGTLILVNSLDVLRAAAFSPADQDDFVI

SEQ ID NO: 38519 - protein, 552 aa, Homo sapiens
MAAQRIRAANSNGLPRCKSEGTLIDLSEGFSETSFNDIKVPSPSALLVDNPTPFGNAKEVIAIKDYCPTNFTTLKFSKGDHLYVLDTSGGEWWYAHNTTEMGYIPSSYVQPLNYRNSTLSDSGMIDNLPDSPDEVAKELELLGGWTDDKKVPGRMYSNNPFWNGVQTNPFLNGNVPVMPSLDELNPKSTVDLLLFDAGTSSFTESSSATTNSTGNIFDELPVTNGLHAEPPVRRDNPFFRSKRSYSLSELSVLQAKSDAPTSSSFFTGLKSPAPEQFQSREDFRTAWLNHRKLARSCHDLDLLGQSPGWGQTQAVETNIVCKLDSSGGAVQLPDTSISIHVPEGHVAPGETQQISMKALLDPPLELNSDRSCSISPVLEVKLSNLEVKTSIILEMKVSAEIKNDLFSKSTVGLQCLRSDSKEGPYVSVPLNCSCGDTVQAQLHNLEPCMYVAVVAHGPSILYPSTVWDFINKKVTVGLYGPKHIHPSFKTVVTIFGHDCAPKTLLVSEVTRQAPNPITKRWKHLTGTLILVNSLDVLRAAAFSPADQDDFVI

SEQ ID NO: 38520 - protein, 75 aa, Homo sapiens
MIGDILLFGTLLMNAGAVLNFKLKKKDTQGFGEESREPSTGDNIREFLLSLRYFRIFIALWNIFMMFCMIVLFGS

SEQ ID NO: 38521 - protein, 389 aa, Homo sapiens
MEFPLAQICPQGSHEAPIPTFSTFQITDMTRRSCQNLGYTAASPQAPEAASNTGNAERAEEVPGEGSLFLQAETRAWFQKTQAHWLLQHGAAPAWFHGFITRREAERLLEPKPQGCYLVRFSESAVTFVLTYRSRTCCRHFLLAQLRDGRHVVLGEDSAHARLQDLLLHYTAHPLSPYGETLTEPLARQTPEPAGLSLRTEESNFGSKSQDPNPQYSPIIKQGQAPVPMQKEGAGEKEPSQLLRPKPPIPAKPQLPPEVYTIPVPRHRPAPRPKPSNPIYNEPDEPIAFYAMGRGSPGEAPSNIYVEVEDEGLPATLGHPVLRKSWSRPVPGGQNTGGSQLHSENSVIGQGPPLPHQPPPAWRHTLPHNLSRQVLQDRGQAWLPLGPPQ

SEQ ID NO: 38522 - protein, 399 aa, Homo sapiens
MEFPLAQICPQGSHEAPIPTFSTFQITDMTRRSCQNLGYTAASPQAPEAASNTGNAERAEEVPGEGSLFLQAETRAWFQKTQAHWLLQHGAAPAWFHGFITRRVRPPLSVTHREAERLLEPKPQGCYLVRFSESAVTFVLTYRSRTCCRHFLLAQLRDGRHVVLGEDSAHARLQDLLLHYTAHPLSPYGETLTEPLARQTPEPAGLSLRTEESNFGSKSQDPNPQYSPIIKQGQAPVPMQKEGAGEKEPSQLLRPKPPIPAKPQLPPEVYTIPVPRHRPAPRPKPSNPIYNEPDEPIAFYAMGRGSPGEAPSNIYVEVEDEGLPATLGHPVLRKSWSRPVPGGQNTGGSQLHSENSVIGQGPPLPHQPPPAWRHTLPHNLSRQVLQDRGQAWLPLGPPQ

SEQ ID NO: 38523 - protein, 361 aa, Homo sapiens
MTRRSCQNLGYTAASPQAPEAASNTGNAERAEEVPGEGSLFLQAETRAWFQKTQAHWLLQHGAAPAWFHGFITRREAERLLEPKPQGCYLVRFSESAVTFVLTYRSRTCCRHFLLAQLRDGRHVVLGEDSAHARLQDLLLHYTAHPLSPYGETLTEPLARQTPEPAGLSLRTEESNFGSKSQDPNPQYSPIIKQGQAPVPMQKEGAGEKEPSQLLRPKPPIPAKPQLPPEVYTIPVPRHRPAPRPKPSNPIYNEPDEPIAFYAMGRGSPGEAPSNIYVEVEDEGLPATLGHPVLRKSWSRPVPGGQNTGGSQLHSENSVIGQGPPLPHQPPPAWRHTLPHNLSRQVLQDRGQAWLPLGPPQ

SEQ ID NO: 38524 - protein, 371 aa, Homo sapiens
MSPSTFQITDMTRRSCQNLGYTAASPQAPEAASNTGNAERAEEVPGEGSLFLQAETRAWFQKTQAHWLLQHGAAPAWFHGFITRREAERLLEPKPQGCYLVRFSESAVTFVLTYRSRTCCRHFLLAQLRDGRHVVLGEDSAHARLQDLLLHYTAHPLSPYGETLTEPLARQTPEPAGLSLRTEESNFGSKSQDPNPQYSPIIKQGQAPVPMQKEGAGEKEPSQLLRPKPPIPAKPQLPPEVYTIPVPRHRPAPRPKPSNPIYNEPDEPIAFYAMGRGSPGEAPSNIYVEVEDEGLPATLGHPVLRKSWSRPVPGGQNTGGSQLHSENSVIGQGPPLPHQPPPAWRHTLPHNLSRQVLQDRGQAWLPLGPPQ

SEQ ID NO: 38525 - protein, 377 aa, Homo sapiens
MRANCSSSSACPANSSEEELPVGLEVHGNLELVFTVVSTVMMGLLMFSLGCSVEIRKLWSHIRRPWGIAVGLLCQFGLMPFTAYLLAISFSLKPVQAIAVLIMGCCPGGTISNIFTFWVDGDMDLSISMTTCSTVAALGMMPLCIYLYTWSWSLQQNLTIPYQNIGITLVCLTIPVAFGVYVNYRWPKQSKIILKIGAVVGGVLLLVVAVAGVVLAKGSWNSDITLLTISFIFPLIGHVTGFLLALFTHQSWQRCRTISLETGAQNIQMCITMLQLSFTAEHLVQMLSFPLAYGLFQLIDGFLIVAAYQTYKRRLKNKHGKKNSGCTEVCHTRKSTSSRETNAFLEVNEEGAITPGPPGPMDCHRALEPVGHITSCE

SEQ ID NO: 38526 - protein, 451 aa, Homo sapiens [sequence omitted]

SEQ ID NO: 38527 - protein, 335 aa, Homo sapiens
MRECISIHVGQAGVQIGNACWELYCLEHGIQPDGQMPSDKTIGGGDDSFNTFFSETGAGKHVPRAVFVDLEPTVIDEVRTGTYRQLFHPEQLITGKEDAANNYARGHYTNLNRLISQIVSSITASLRFDGALNVDLTEFQTNLVPYPRIHFPLATYAPVISAEKAYHEQLSVAEITNACFEPANQMVKCDPRHGKYMACCLLYRGDVVPKDVNAAIATIKTKRSIQFVDWCPTGFKVGINYQPPTVVPGGDLAKVQRAVCMLSNTTAIAEAWARLDHKFDLMYAKRAFVHWYVGEGMEEGEFSEAREDMAALEKDYEEVGVDSVEGEGEEEGEEY

SEQ ID NO: 38528 - protein, 1731 aa, Homo sapiens
MDGPGASAVVVRVGIPDLQQTKCLRLDPAAPVWAAKQRVLCALNHSLQDALNYGLFQPPSRGRAGKFLDEERLLQEYPPNLDTPLPYLEFRYKRRVYAQNLIDDKQFAKLHTKANLKKFMDYVQLHSTDKVARLLDKGLDPNFHDPDSGECPLSLAAQLDNATDLLKVLKNGGAHLDFRTRDGLTAVHCATRQRNAAALTTLLDLGASPDYKDSRGLTPLYHSALGGGDALCCELLLHDHAQLGITDENGWQEIHQACRFGHVQHLEHLLFYGADMGAQNASGNTALHICALYNQESCARVLLFRGANRDVRNYNSQTAFQVAIIAGNFELAEVIKTHKDSDVVPFRETPSYAKRRRLAGPSGLASPRPLQRSASDINLKGEAQPAASPGPSLRSLPHQLLLQRLQEEKDRDRDADQESNISGPLAGRAGQSKISPSGPGGPGPAPGPGPAPPAPPAPPPRGPKRKLYSAVPGRKFIAVKAHSPQGEGEIPLHRGEAVKVLSIGEGGFWEGTVKGRTGWFPADCVEEVQMRQHDTRPETREDRTKRLFRHYTVGSYDSLTSHSDYVIDDKVAVLQKRDHEGFGFVLRGAKAETPIEEFTPTPAFPALQYLESVDVEGVAWRAGLRTGDFLIEVNGVNVVKVGHKQVVALIRQGGNRLVMKVVSVTRKPEEDGARRRAPPPPKRAPSTTLTLRSKSMTAELEELASIRRRKGEKLDEMLAAAAEPTLRPDIADADSRAATVKQRPTSRRITPAEISSLFERQGLPGPEKLPGSLRKGIPRTKSVGEDEKLASLLEGRFPRSTSMQDPVREGRGIPPPPQTAPPPPPAPYYFDSGPPPAFSPPPPPGRAYDTVRSSFKPGLEARLGAGAAGLYEPGAALGPLPYPERQKRARSMIILQDSAPESGDAPRPPPAATPPERPKRRPRPPGPDSPYANLGAFSASLFAPSKPQRRKSPLVKQLQVEDAQERAALAVGSPGPGGGSFAREPSPTHRGPRPGGLDYGAGDGPGLAFGGPGPAKDRRLEERRRSTVFLSVGAIEGSAPGADLPSLQPSRSIDERLLGTGPTAGRDLLLPSPVSALKPLVSGPSLGPSGSTFIHPLTGKPLDPSSPLALALAARERALASQAPSRSPTPVHSPDADRPGPLFVDVQARDPERGSLASPAFSPRSPAWIPVPARREAEKVPREERKSPEDKKSMILSVLDTSLQRPAGLIVVHATSNGQEPSRLGGAEEERPGTPELAPAPMQSAAVAEPLPSPRAQPPGGTPADAGPGQGSSEEEPELVFAVNLPPAQLSSSDEETREELARIGLVPPPEEFANGVLLATPLAGPGPSPTTVPSPASGKPSSEPPPAPESAADSGVEEADTRSSSDPHLETTSTISTVSSMSTLSSESGELTDTHTSFADGHTFLLEKPPVPPKPKLKSPLGKGPVTFRDPLLKQSSDSELMAQQHHAASAGLASAAGPARPRYLFQRRSKLWGDPVESRGLPGPEDDKPTVISELSSRLQQLNKDTRSLGEEPVGGLGSLLDPAKKSPIAAARLFSSLGELSSISAQRSPGGPGGGASYSVRPSGRYPVARRAPSPVKPASLERVEGLGAGAGGAGRPFGLTPPTILKSSSLSIPHEPKEVRFVVRSVSARSRSPSPSPLPSPASGPGPGAPGPRRPFQQKPLQLWSKFDVGDWLESIHLGEHRDRFEDHEIEGAHLPALTKDDFVELGVTRVGHRMNIERALRQLDGS

SEQ ID NO: 38529 - protein, 1612 aa, Homo sapiens
MDYVQLHSTDKVARLLDKGLDPNFHDPDSGECPLSLAAQLDNATDLLKVLKNGGAHLDFRTRDGLTAVHCATRQRNAAALTTLLDLGASPDYKDSRGLTPLYHSALGGGDALCCELLLHDHAQLGITDENGWQEIHQACRFGHVQHLEHLLFYGADMGAQNASGNTALHICALYNQESCARVLLFRGANRDVRNYNSQTAFQVAIIAGNFELAEVIKTHKDSDVVPFRETPSYAKRRRLAGPSGLASPRPLQRSASDINLKGEAQPAASPGPSLRSLPHQLLLQRLQEEKDRDRDADQESNISGPLAGRAGQSKISPSGPGGPGPAPGPGPAPPAPPAPPPRGPKRKLYSAVPGRKFIAVKAHSPQGEGEIPLHRGEAVKVLSIGEGGFWEGTVKGRTGWFPADCVEEVQMRQHDTRPETREDRTKRLFRHYTVGSYDSLTSHSDYVIDDKVAVLQKRDHEGFGFVLRGAKAETPIEEFTPTPAFPALQYLESVDVEGVAWRAGLRTGDFLIEVNGVNVVKVGHKQVVALIRQGGNRLVMKVVSVTRKPEEDGARRRAPPPPKRAPSTTLTLRSKSMTAELEELASIRRRKGEKLDEMLAAAAEPTLRPDIADADSRAATVKQRPTSRRITPAEISSLFERQGLPGPEKLPGSLRKGIPRTKSVGEDEKLASLLEGRFPRSTSMQDPVREGRGIPPPPQTAPPPPPAPYYFDSGPPPAFSPPPPPGRAYDTVRSSFKPGLEARLGAGAAGLYEPGAALGPLPYPERQKRARSMIILQDSAPESGDAPRPPPAATPPERPKRRPRPPGPDSPYANLGAFSASLFAPSKPQRRKSPLVKQLQVEDAQERAALAVGSPGPGGGSFAREPSPTHRGPRPGGLDYGAGDGPGLAFGGPGPAKDRRLEERRRSTVFLSVGAIEGSAPGADLPSLQPSRSIDERLLGTGPTAGRDLLLPSPVSALKPLVSGPSLGPSGSTFIHPLTGKPLDPSSPLALALAARERALASQAPSRSPTPVHSPDADRPGPLFVDVQARDPERGSLASPAFSPRSPAWIPVPARREAEKVPREERKSPEDKKSMILSVLDTSLQRPAGLIVVHATSNGQEPSRLGGAEEERPGTPELAPAPMQSAAVAEPLPSPRAQPPGGTPADAGPGQGSSEEEPELVFAVNLPPAQLSSSDEETREELARIGLVPPPEEFANGVLLATPLAGPGPSPTTVPSPASGKPSSEPPPAPESAADSGVEEADTRSSSDPHLETTSTISTVSSMSTLSSESGELTDTHTSFADGHTFLLEKPPVPPKPKLKSPLGKGPVTFRDPLLKQSSDSELMAQQHHAASAGLASAAGPARPRYLFQRRSKLWGDPVESRGLPGPEDDKPTVISELSSRLQQLNKDTRSLGEEPVGGLGSLLDPAKKSPIAAARLFSSLGELSSISAQRSPGGPGGGASYSVRPSGRYPVARRAPSPVKPASLERVEGLGAGAGGAGRPFGLTPPTILKSSSLSIPHEPKEVRFVVRSVSARSRSPSPSPLPSPASGPGPGAPGPRRPFQQKPLQLWSKFDVGDWLESIHLGEHRDRFEDHEIEGAHLPALTKDDFVELGVTRVGHRMNIERALRQLDGS

SEQ ID NO: 38530 - protein, 2161 aa, Homo sapiens
MTHSPATSEDEERHSASECPEGGSESDSSPDGPGRGPRGTRGQGSGAPGSLASVRGLQGRSMSVPDDAHFSMMVFRIGIPDLHQTKCLRFNPDATIWTAKQQVLCALSESLQDVLNYGLFQPATSGRDANFLEEERLLREYPQSFEKGVPYLEFRYKTRVYKQTNLDEKQLAKLHTKTGLKKFLEYVQLGTSDKVARLLDKGLDPNYHDSDSGETPLTLAAQTEGSVEVIRTLCLGGAHIDFRARDGMTALHKAACARHCLALTALLDLGGSPNYKDRRGLTPLFHTAMVGGDPRCCELLLFNRAQLGIADENGWQEIHQACQRGHSQHLEHLLFYGAEPGAQNASGNTALHICALYNKETCARILLYRGADKDVKNNNGQTPFQVAVIAGNFELGELIRNHREQDVVPFQESPKYAARRRGPPGTGLTVPPALLRANSDTSMALPDWMVFSAPGAASSGAPGPTSGSQGQSQPSAPTTKLSSGTLRSASSPRGARARSPSRGRHPEDAKRQPRGRPSSSGTPREGPAGGTGGSGGPGGSLGSRGRRRKLYSAVPGRSFMAVKSYQAQAEGEISLSKGEKIKVLSIGEGGFWEGQVKGRVGWFPSDCLEEVANRSQESKQESRSDKAKRLFRHYTVGSYDSFDAPSLMDGIGPGSDYIIKEKTVLLQKKDSEGFGFVLRGAKAQTPIEEFTPTPAFPALQYLESVDEGGVAWRAGLRMGDFLIEVNGQNVVKVGHRQVVNMIRQGGNTLMVKVVMVTRHPDMDEAVHKKAPQQAKRLPPPTISLRSKSMTSELEEMEYEQQPAPVPSMEKKRTVYQMALNKLDEILAAAQQTISASESPGPGGLASLGKHRPKGFFATESSFDPHHRAQPSYERPSFLPPGPGLMLRQKSIGAAEDDRPYLAPPAMKFSRSLSVPGSEDIPPPPTTSPPEPPYSTPPVPSSSGRLTPSPRGGPFNPGSGGPLPASSPASFDGPSPPDTRVGSREKSLYHSGPLPPAHHHPPHHHHHHAPPPQPHHHHAHPPHPPEMETGGSPDDPPPRLALGPQPSLRGWRGGGPSPTPGAPSPSHHGSAGGGGGSSQGPALRYFQLPPRAASAAMYVPARSGRGRKGPLVKQTKVEGEPQKGGGLPPAPSPTSPASPQPPPAVAAPSEKNSIPIPTIIIKAPSTSSSGRSSQGSSTEAEPPTQPEPTGGGGGGGSSPSPAPAMSPVPPSPSPVPTPASPSGPATLDFTSQFGAALVGAARREGGWQNEARRRSTLFLSTDAGDEDGGDGGLGTGAAPGPRLRHSKSIDEGMFSAEPYLRLESAGSGAGYGGYGAGSRAYGGGGGSSAFTSFLPPRPLVHPLTGKALDPASPLGLALAARERALKESSEGGGAPQPPPRPPSPRYEAPPPTPHHHSPHAHHEPVLRLWGASPPDPARRELGYRAGLGSQEKSLPASPPAARRSLLHRLPPTAPGVGPLLLQLGTEPPAPHPGVSKPWRSAAPEEPERLPLHVRFLENCQPRAPVTSGRGPPSEDGPGVPPPSPRRSVPPSPTSPRASEENGLPLLVLPPPAPSVDVEDGEFLFVEPLPPPLEFSNSFEKPESPLTPGPPHPLPDTPAPATPLPPVPPPAVAAAPPTLDSTASSLTSYDSEVATLTQGASAAPGDPHPPGPPAPAAPAPAAPQPGPDPPPGTDSGIEEVDSRSSSDHPLETISSASTLSSLSAEGGGSAGGGGGAGAGVASGPELLDTYVAYLDGQAFGGSSTPGPPYPPQLMTPSKLRGRALGASGGLRPGPSGGLRDPVTPTSPTVSVTGAGTDGLLALRACSGPPTAGVAGGPVAVEPEVPPVPLPTASSLPRKLLPWEEGPGPPPPPLPGPLAQPQASALATVKASIISELSSKLQQFGGSSAAGGALPWARGGSGGGGDSHHGGASYVPERTSSLQRQRLSDDSQSSLLSKPVSSLFQNWPKPPLPPLPTGTGVSPTAAAAPGATSPSASSSSTSTRHLQGVEFEMRPPLLRRAPSPSLLPASEHKVSPAPRPSSLPILPSGPLYPGLFDIRGSPTGGAGGSADPFAPVFVPPHPGISGGLGGALSGASRSLSPTRLLSLPPDKPFGAKPLGFWTKFDVADWLEWLGLAEHRAQFLDHEIDGSHLPALTKEDYVDLGVTRVGHRMNIDRALKFFLER

SEQ ID NO: 38531 - protein, 1548 aa, Homo sapiens
MQLMALEQRFGSGLPGGGQPLCLMMSSPLPPPPPHFSCLPASDYIIKEKTVLLQKKDSEGFGFVLRGAKAQTPIEEFTPTPAFPALQYLESVDEGGVAWRAGLRMGDFLIEVNGQNVVKVGHRQVVNMIRQGGNTLMVKVVMVTRHPDMDEAVHKKAPQQAKRLPPPTISLRSKSMTSELEEMEYEQQPAPVPSMEKKRTVYQMALNKLDEILAAAQQTISASESPGPGGLASLGKHRPKGFFATESSFDPHHRAQPSYERPSFLPPGPGLMLRQKSIGAAEDDRPYLAPPAMKFSRSLSVPGSEDIPPPPTTSPPEPPYSTPPVPSSSGRLTPSPRGGPFNPGSGGPLPASSPASFDGPSPPDTRVGSREKSLYHSGPLPPAHHHPPHHHHHHAPPPQPHHHHAHPPHPPEMETGGSPDDPPPRLALGPQPSLRGWRGGGPSPTPGAPSPSHHGSAGGGGGSSQGPALRYFQLPPRAASAAMYVPARSGRGRKGPLVKQTKVEGEPQKGGGLPPAPSPTSPASPQPPPAVAAPSEKNSIPIPTIIIKAPSTSSSGRSSQGSSTEAEPPTQPEPTGGGGGGGSSPSPAPAMSPVPPSPSPVPTPASPSGPATLDFTSQFGAALVGAARREGGWQNEARRRSTLFLSTDAGDEDGGDGGLGTGAAPGPRLRHSKSIDEGMFSAEPYLRLESAGSGAGYGGYGAGSRAYGGGGGSSAFTSFLPPRPLVHPLTGKALDPASPLGLALAARERALKESSEGGGAPQPPPRPPSPRYEAPPPTPHHHSPHAHHEPVLRLWGASPPDPARRELGYRAGLGSQEKSLPASPPAARRSLLHRLPPTAPGVGPLLLQLGTEPPAPHPGVSKPWRSAAPEEPERLPLHVRFLENCQPRAPVTSGRGPPSEDGPGVPPPSPRRSVPPSPTSPRASEENGLPLLVLPPPAPSVDVEDGEFLFVEPLPPPLEFSNSFEKPESPLTPGPPHPLPDTPAPATPLPPVPPPAVAAAPPTLDSTASSLTSYDSEVATLTQGASAAPGDPHPPGPPAPAAPAPAAPQPGPDPPPGTDSGIEEVDSRSSSDHPLETISSASTLSSLSAEGGGSAGGGGGAGAGVASGPELLDTYVAYLDGQAFGGSSTPGPPYPPQLMTPSKLRGRALGASGGLRPGPSGGLRDPVTPTSPTVSVTGAGTDGLLALRACSGPPTAGVAGGPVAVEPEVPPVPLPTASSLPRKLLPWEEGPGPPPPPLPGPLAQPQASALATVKASIISELSSKLQQFGGSSAAGGALPWARGGSGGGGDSHHGGASYVPERTSSLQRQRLSDDSQSSLLSKPVSSLFQNWPKPPLPPLPTGTGVSPTAAAAPGATSPSASSSSTSTRHLQGVEFEMRPPLLRRAPSPSLLPASEHKVSPAPRPSSLPILPSGPLYPGLFDIRGSPTGGAGGSADPFAPVFVPPHPGISGGLGGALSGASRSLSPTRLLSLPPDKPFGAKPLGFWTKFDVADWLEWLGLAEHRAQFLDHEIDGSHLPALTKEDYVDLGVTRVGHRMNIDRALKFFLER

SEQ ID NO: 38532 - protein, 2152 aa, Homo sapiens
MTHSPATSEDEERHSASECPEGGSESDSSPDGPGRGPRGTRGQGSGAPGSLASVRGLQGRSMSVPDDAHFSMMVFRIGIPDLHQTKCLRFNPDATIWTAKQQVLCALSESLQDVLNYGLFQPATSGRDANFLEEERLLREYPQSFEKGVPYLEFRYKTRVYKQTNLDEKQLAKLHTKTGLKKFLEYVQLGTSDKVARLLDKGLDPNYHDSDSGETPLTLAAQTEGSVEVIRTLCLGGAHIDFRARDGMTALHKAACARHCLALTALLDLGGSPNYKDRRGLTPLFHTAMVGGDPRCCELLLFNRAQLGIADENGWQEIHQACQRGHSQHLEHLLFYGAEPGAQNASGNTALHICALYNKETCARILLYRGADKDVKNNNGQTPFQVAVIAGNFELGELIRNHREQDVVPFQESPKYAARRRGPPGTGLTVPPALLRANSDTSMALPDWMVFSAPGAASSGAPGPTSGSQGQSQPSAPTTKLSSGTLRSASSPRGARARSPSRGRHPEDAKRQPRGRPSSSGTPREGPAGGTGGSGGPGGSLGSRGRRRKLYSAVPGRSFMAVKSYQAQAEGEISLSKGEKIKVLSIGEGGFWEGQVKGRVGWFPSDCLEEVANRSQESKQESRSDKAKRLFRHYTVGSYDSFDAPSDYIIKEKTVLLQKKDSEGFGFVLRGAKAQTPIEEFTPTPAFPALQYLESVDEGGVAWRAGLRMGDFLIEVNGQNVVKVGHRQVVNMIRQGGNTLMVKVVMVTRHPDMDEAVHKKAPQQAKRLPPPTISLRSKSMTSELEEMEYEQQPAPVPSMEKKRTVYQMALNKLDEILAAAQQTISASESPGPGGLASLGKHRPKGFFATESSFDPHHRAQPSYERPSFLPPGPGLMLRQKSIGAAEDDRPYLAPPAMKFSRSLSVPGSEDIPPPPTTSPPEPPYSTPPVPSSSGRLTPSPRGGPFNPGSGGPLPASSPASFDGPSPPDTRVGSREKSLYHSGPLPPAHHHPPHHHHHHAPPPQPHHHHAHPPHPPEMETGGSPDDPPPRLALGPQPSLRGWRGGGPSPTPGAPSPSHHGSAGGGGGSSQGPALRYFQLPPRAASAAMYVPARSGRGRKGPLVKQTKVEGEPQKGGGLPPAPSPTSPASPQPPPAVAAPSEKNSIPIPTIIIKAPSTSSSGRSSQGSSTEAEPPTQPEPTGGGGGGGSSPSPAPAMSPVPPSPSPVPTPASPSGPATLDFTSQFGAALVGAARREGGWQNEARRRSTLFLSTDAGDEDGGDGGLGTGAAPGPRLRHSKSIDEGMFSAEPYLRLESAGSGAGYGGYGAGSRAYGGGGGSSAFTSFLPPRPLVHPLTGKALDPASPLGLALAARERALKESSEGGGAPQPPPRPPSPRYEAPPPTPHHHSPHAHHEPVLRLWGASPPDPARRELGYRAGLGSQEKSLPASPPAARRSLLHRLPPTAPGVGPLLLQLGTEPPAPHPGVSKPWRSAAPEEPERLPLHVRFLENCQPRAPVTSGRGPPSEDGPGVPPPSPRRSVPPSPTSPRASEENGLPLLVLPPPAPSVDVEDGEFLFVEPLPPPLEFSNSFEKPESPLTPGPPHPLPDTPAPATPLPPVPPPAVAAAPPTLDSTASSLTSYDSEVATLTQGASAAPGDPHPPGPPAPAAPAPAAPQPGPDPPPGTDSGIEEVDSRSSSDHPLETISSASTLSSLSAEGGGSAGGGGGAGAGVASGPELLDTYVAYLDGQAFGGSSTPGPPYPPQLMTPSKLRGRALGASGGLRPGPSGGLRDPVTPTSPTVSVTGAGTDGLLALRACSGPPTAGVAGGPVAVEPEVPPVPLPTASSLPRKLLPWEEGPGPPPPPLPGPLAQPQASALATVKASIISELSSKLQQFGGSSAAGGALPWARGGSGGGGDSHHGGASYVPERTSSLQRQRLSDDSQSSLLSKPVSSLFQNWPKPPLPPLPTGTGVSPTAAAAPGATSPSASSSSTSTRHLQGVEFEMRPPLLRRAPSPSLLPASEHKVSPAPRPSSLPILPSGPLYPGLFDIRGSPTGGAGGSADPFAPVFVPPHPGISGGLGGALSGASRSLSPTRLLSLPPDKPFGAKPLGFWTKFDVADWLEWLGLAEHRAQFLDHEIDGSHLPALTKEDYVDLGVTRVGHRMNIDRALKFFLER

SEQ ID NO: 38533 - protein, 193 aa, Homo sapiens
MLEVHIPSVGPEAEGPRQSPEKSHMVFRVEVLCSGRRHTVPRRYSEFHALHKRIKKLYKVPDFPSKRLPNWRTRGLEQRRQGLEAYIQGILYLNQEVPKELLEFLRLRHFPTDPKASNWGTLREFLPGDSSSQQHQRPVLSFHVDPYVCNPSPESLPNVVVNGVLQGLYSFSISPDKAQPKAACHPAPLPPMP

SEQ ID NO: 38534 - protein, 120 aa, Homo sapiens
MLEVHIPSVGPEAEGPRQSPEKSHMVFRVEVLCSGRRHTVPRRYSEFHALHKRIKKLYKVPDFPSKRLPNWRTRGLEQRRQGLEAYIQGILYLNQEVPKELLEFLRLRHFPTDPKASNWG

SEQ ID NO: 38535 - protein, 484 aa, Homo sapiens
MATSILGEEPRFGTTPLAMLAATCNKIGNTSPLTTLPESSAFAKGGFHPWKRSSSSCNLGSSLSGFAVATGGRGSGGLAGGSGAANSAFCLASTSPTSSAFSSDYGGLFSNSAAAAAAAAGVSPQEAGGQSAFISKVHTTAADGLYPRVGMAHPYESWYKSGFHSTLAAGEVTNGAASSWWDVHSSPGSWLEVQNPAGGLQSSLHSGAPQASLHSQLGTYNPDFSSLTHSAFSSTGLGSSAAAASHLLSTSQHLLAQDGFKPVLPSYSDSSAAVAAAAASAMISGAAAAAAGGSSARSARRYSGRATCDCPNCQEAERLGPAGASLRRKGLHSCHIPGCGKVYGKTSHLKAHLRWHTGERPFVCNWLFCGKRFTRSDELQRHLRTHTGEKRFACPVCNKRFMRSDHLSKHIKTHNGGGGGKKGSDSDTDASNLETPRSESPDLILHDSGVSAARAAAAAAAAAAAAAAAASAGGKEAASGPNDS

SEQ ID NO: 38536 - protein, 437 aa, Homo sapiens
MRRSSRPGSASSSRKHTPNFFSENSSMSITSEDSKGLRSAEPGPGEPEGRRARGPSCGEPALSAGVPGGTTWAGSSQQKPAPRSHNWQTACGAATVRGGASEPTGSPVVSEEPLDLLPTLDLRQEMPPPRVFKSFLSLLFQGLSVLLSLAGDVLVSMYREVCSIRFLFTAVSLLSLFLSAFWLGLLYLVSPLENEPKEMLTLSEYHERVRSQGQQLQQLQAELDKLHKEVSTVRAANSERVAKLVFQRLNEDFVRKPDYALSSVGASIDLQKTSHDYADRNTAYFWNRFSFWNYARPPTVILEPHVFPGNCWAFEGDQGQVVIQLPGRVQLSDITLQHPPPSVEHTGGANSAPRDFAVFGLQVYDETEVSLGKFTFDVEKSEIQTFHLQNDPPAAFPKVKIQILSNWGHPRFTCLYRVRAHGVRTSEGAEGSAQGPH

SEQ ID NO: 38537 - protein, 227 aa, Homo sapiens
MADLLGSILSSMEKPPSLGDQETRRKAREQAARLKKLQEQEKQQKVEFRKRMEKEVSDFIQDSGQIKKKFQPMNKIERSILHDVVEVAGLTSFSFGEDDDCRYVMIFKKEFAPSDEELDSYRRGEEWDPQKAEEKRKLKELAQRQEEEAAQQGPVVVSPASDYKDKYSHLIGKGAAKDAAHMLQANKTYGCVPVANKRDTRSIEEAMNEIRAKKRLRQSGEELPPTS

SEQ ID NO: 38538 - protein, 867 aa, Homo sapiens
MAQQGQQGQMASGDSNLNFRMVAEIQNVEGQNLQEQVCPEPIFRFFRENKVEIASAITRPFPFLMGLRDRSFISEQMYEHFQEAFRNLVPVTRVMYCVLSELEKTFGWSHLEALFSRINLMAYPDLNEIYRSFQNVCYEHSPLQMNNVNDLEDRPRLLPYGKQENSNACHEMDDIAVPQEALSSSPRCEPGFSSESCEQLALPKAGGGDAEDAPSLLPGGGVSCKLAIQIDEGESEEMPKLLPYDTEVLESNGMIDAARTYSTAPGEKQGEEEGRNSPRKRNQDKEKYQESPEGRDKETFDLKTPQVTNEGEPEKGLCLLPGEGEEGSDDCSEMCDGEEPQEASSSLARCGSVSCLSAETFDLKTPQVTNEGEPEKELSLLPGEGEEGSDDCSEMCDGEERQEASSSLARRGSVSSELENHPMNEEGESEELASSLLYDNVPGAEQSAYENEKCSCVMCFSEEVPGSPEARTESDQACGTMDTVDIANNSTLGKPKRKRRKKRGHGWSRMRMRRQENSQQNDNSKADGQVVSSEKKANVNLKDLSKIRGRKRGKPGTRFTQSDRAAQKRVRSRASRKHKDETVDFKAPLLPVTCGGVKGILHKKKLQQGILVKCIQTEDGKWFTPTEFEIKGGHARSKNWRLSVRCGGWPLRWLMENGFLPDPPRIRYRKKKRILKSQNNSSVDPCMRNLDECEVCRDGGELFCCDTCSRVFHEDCHIPPVEAERTPWNCIFCRMKESPGSQQCCQESEVLERQMCPEEQLKCEFLLLKVYCCSESSFFAKIPYYYYIREACQGLKEPMWLDKIKKRLNEHGYPQVEGFVQDMRLIFQNHRASYKYKDFGQMGFRLEAEFEKNFKEVFAIQETNGNN

SEQ ID NO: 38539 - protein, 412 aa, Homo sapiens
MAQQGQQGQMASGDSNLNFRMVAEIQNVEGQNLQEQVCPEPIFRFFRENKVEIASAITRPFPFLMGLRDRSFISEQMYEHFQEAFRNLVPVTRVMYCVLSELEKTFGWSHLEALFSRINLMAYPDLNEIYRSFQNVCYEHSPLQMNNVNDLEDRPRLLPYGKQENSNACHEMDDIAVPQEALSSSPRCEPGFSSESCEQLALPKAGGGDAEDAPSLLPGGGVSCKLAIQIDEGESEEMPKLLPYDTEVLESNGMIDAARTYSTAPGEKQGEEEGRNSPRKRNQDKEKYQESPEGRDKETFDLKTPQVTNEGEPEKGLCLLPGEGEEGSDDCSEMCDGEEPQEASSSLARCGSEGSDDCSEMCDGEERQEAQKQGRKVIKRVAQWILWILQTTPLWENPRGKEEKRGGMAGAE

SEQ ID NO: 38540 - protein, 753 aa, Homo sapiens
MAQQGQQGQMASGDSNLNFRMVAEIQNVEGQNLQEQVCPEPIFRFFRENKVEIASAITRPFPFLMGLRDRSFISEQMYEHFQEAFRNLVPVTRVMYCVLSELEKTFGWSHLEALFSRINLMAYPDLNEIYRSFQNVCYEHSPLQMNNVNDLEDRPRLLPYGKQENSNACHEMDDIAVPQEALSSSPRCEPGFSSESCEQLALPKAGGGDAEDAPSLLPVSCKLAIQIDEGESEEMPKLLPYDTEETFDLKTPQVTNEGEPEKGLCLLPGEGEEGSDDCSEMCDGEERQEASSSLARRGSVSSELENHPMNEEGESEELASSLLYDNVPGAEQSAYENEKCSCVMCFSEEVPGSPEARTESDQACGTMDTVDIANNSTLGKPKRKRRKKRGHGWSRMRMRRQENSQQNDNSKADGQVVSSEKKANVNLKDLSKIRGRKRGKPGTRFTQSDRAAQKRVRSRASRKHKDETVDFKAPLLPVTCGGVKGILHKKKLQQGILVKCIQTEDGKWFTPTEFEIKGGHARSKNWRLSVRCGGWPLRWLMENGFLPDPPRIRYRKKKRILKSQNNSSVDPCMRNLDECEVCRDGGELFCCDTCSRVFHEDCHIPPVEAERTPWNCIFCRMKESPGSQQCCQESEVLERQMCPEEQLKCEFLLLKVYCCSESSFFAKIPYYYYIREACQGLKEPMWLDKIKKRLNEHGYPQVEGFVQDMRLIFQNHRASYKYKDFGQMGFRLEAEFEKNFKEVFAIQETNGNN

SEQ ID NO: 38541 - protein, 172 aa, Homo sapiens
MAQQGQQGQMASGDSNLNFRMVAEIQNVEGQNLQEQVCPEPIFRFFRENKVEIASAITRPFPFLMGLRDRSFISEQMYEHFQEAFRNLVPVTRVMYCVLSELEKTFGWSHLEALFSRINLMAYPDLNEIYRSFQNENLSSSAVLCQLVSPNKDWRSHEESLAHTGTLRRSCM

SEQ ID NO: 38542 - protein, 840 aa, Homo sapiens
MAQQGQQGQMASGDSNLNFRMVAEIQNVEGQNLQEQVCPEPIFRFFRENKVEIASAITRPFPFLMGLRDRSFISEQMYEHFQEAFRNLVPVTRVMYCVLSELEKTFGWSHLEALFSRINLMAYPDLNEIYRSFQNVCYEHSPLQMNNVNDLEDRPRLLPYGKQENSNACHEMDDIAVPQEALSSSPRCEPGFSSESCEQLALPKAGGGDAEDAPSLLPGGGVSCKLAIQIDEGESEEMPKLLPYDTEVLESNGMIDAARTYSTAPGEKQGEEEGRNSPRKRNQDKEKYQESPEGRDKETFDLKTPQVTNEGEPEKGLCLLPGEGEEGSDDCSEMCDGEEPQEASSSLARCGSVSCLSAETFDLKTPQVTNEGEPEKELSLLPGEGEVSSELENHPMNEEGESEELASSLLYDNVPGAEQSAYENEKCSCVMCFSEEVPGSPEARTESDQACGTMDTVDIANNSTLGKPKRKRRKKRGHGWSRMRMRRQENSQQNDNSKADGQVVSSEKKANVNLKDLSKIRGRKRGKPGTRFTQSDRAAQKRVRSRASRKHKDETVDFKAPLLPVTCGGVKGILHKKKLQQGILVKCIQTEDGKWFTPTEFEIKGGHARSKNWRLSVRCGGWPLRWLMENGFLPDPPRIRYRKKKRILKSQNNSSVDPCMRNLDECEVCRDGGELFCCDTCSRVFHEDCHIPPVEAERTPWNCIFCRMKESPGSQQCCQESEVLERQMCPEEQLKCEFLLLKVYCCSESSFFAKIPYYYYIREACQGLKEPMWLDKIKKRLNEHGYPQVEGFVQDMRLIFQNHRASYKYKDFGQMGFRLEAEFEKNFKEVFAIQETNGNN

SEQ ID NO: 38543 - protein, 807 aa, Homo sapiens
MAQQGQQGQMASGDSNLNFRMVAEIQNVEGQNLQEQVCPEPIFRFFRENKVEIASAITRPFPFLMGLRDRSFISEQMYEHFQEAFRNLVPVTRVMYCVLSELEKTFGWSHLEALFSRINLMAYPDLNEIYRSFQNVCYEHSPLQMNNVNDLEDRPRLLPYGKQENSNACHEMDDIAVPQEALSSSPRCEPGFSSESCEQLALPKAGGGDAEDAPSLLPGGGVLESNGMIDAARTYSTAPGEKQGEEEGRNSPRKRNQDKEKYQESPEGRDKETFDLKTPQVTNEGEPEKGLCLLPGEGEEGSDDCSEMCDGEEPQEASSSLARCGSEGSDDCSEMCDGEERQEASSSLARRGSVSSELENHPMNEEGESEELASSLLYDNVPGAEQSAYENEKCSCVMCFSEEVPGSPEARTESDQACGTMDTVDIANNSTLGKPKRKRRKKRGHGWSRMRMRRQENSQQNDNSKADGQVVSSEKKANVNLKDLSKIRGRKRGKPGTRFTQSDRAAQKRVRSRASRKHKDETVDFKAPLLPVTCGGVKGILHKKKLQQGILVKCIQTEDGKWFTPTEFEIKGGHARSKNWRLSVRCGGWPLRWLMENGFLPDPPRIRYRKKKRILKSQNNSSVDPCMRNLDECEVCRDGGELFCCDTCSRVFHEDCHIPPVEAERTPWNCIFCRMKESPGSQQCCQESEVLERQMCPEEQLKCEFLLLKVYCCSESSFFAKIPYYYYIREACQGLKEPMWLDKIKKRLNEHGYPQVEGFVQDMRLIFQNHRASYKYKDFGQMGFRLEAEFEKNFKEVFAIQETNGNN

SEQ ID NO: 38544 - protein, 437 aa, Homo sapiens
MQLPRWWELGDPCAWTGQGRGTRRMSPATTGTFLLTVYSIFSKVHSDRNVYPSAGVLFVHVLEREYFKGEFPPYPKPGEISNDPITFNTNLMGYPDRPGWLRYIQRTPYSDGVLYGSPTAENVGKPTIIEITAYNRRTFETARHNLIINIMSAEDFPLPYQAEFFIKNMNVEEMLASEVLGDFLGAVKNVWQPERLNAINITSALDRGGRVPLPINDLKEGVYVMVGADVPFSSCLREVENPQNQLRCSQEMEPVITCDKKFRTQFYIDWCKISLVDKTKQVSTYQEVIRGEGILPDGGEYKPPSDSLKSRDYYTDFLITLAVPSAVALVLFLILAYIMCCRREGVEKRNMQTPDIQLVHHSAIQKSTKELRDMSKNREIAWPLSTLPVFHPVTGEIIPPLHTDNYDSTNMPLMQTQQNLPHQTQIPQQQTTGKWYP

SEQ ID NO: 38545 - protein, 451 aa, Homo sapiens
MQLPRWWELGDPCAWTGQGRGTRRMSPATTGTFLLTVYSIFSKVHSDRNVYPSAGVLFVHVLEREYFKGEFPPYPKPGEISNDPITFNTNLMGYPDRPGWLRYIQRTPYSDGVLYGSPTAENVGKPTIIEITAYNRRTFETARHNLIINIMSAEDFPLPYQAEFFIKNMNVEEMLASEVLGDFLGAVKNVWQPERLNAINITSALDRGGRVPLPINDLKEGVYVMVGADVPFSSCLREVENPQNQLRCSQEMEPVITCDKKFRTQFYIDWCKISLVDKTKQVSTYQEVIRGEGILPDGGEYKPPSDSLKSRDYYTDFLITLAVPSAVALVLFLILAYIMCCRREGVIQLVHHSAIQKSTKELRDMSKNREIAWPLSTLPVFHPVTGEIIPPLHTDNYDSTNMPLMQTQQNLPHQTQIPQQQTTGDFRLTTFQRFEVNGIPEERKLTEAMNL

SEQ ID NO: 38546 - protein, 462 aa, Homo sapiens
MQLPRWWELGDPCAWTGQGRGTRRMSPATTGTFLLTVYSIFSKVHSDRNVYPSAGVLFVHVLEREYFKGEFPPYPKPGEISNDPITFNTNLMGYPDRPGWLRYIQRTPYSDGVLYGSPTAENVGKPTIIEITAYNRRTFETARHNLIINIMSAEDFPLPYQAEFFIKNMNVEEMLASEVLGDFLGAVKNVWQPERLNAINITSALDRGGRVPLPINDLKEGVYVMVGADVPFSSCLREVENPQNQLRCSQEMEPVITCDKKFRTQFYIDWCKISLVDKTKQVSTYQEVIRGEGILPDGGEYKPPSDSLKSRDYYTDFLITLAVPSAVALVLFLILAYIMCCRREGVEKRNMQTPDIQLVHHSAIQKSTKELRDMSKNREIAWPLSTLPVFHPVTGEIIPPLHTDNYDSTNMPLMQTQQWSFAPVAQAGVQWSDLGSLQPPPPRNLPHQTQIPQQQTTGKWYP

SEQ ID NO: 38547 - protein, 255 aa, Homo sapiens
MASSDLEQLCSHVNEKIGNIKKTLSLRNCGQEPTLKTVLNKIGDEIIVINELLNKLELEIQYQEQTNNSLKELCESLEEDYKDIEHLKENVPSHLPQVTVTQSCVKGSDLDPEEPIKVEEPEPVKKPPKEQRSIKEMPFITCDEFNGVPSYMKSRLTYNQINDVIKEINKAVISKYKILHQPKKSMNSVTRNLYHRFIDEETKDTKGRYFIVEADIKEFTTLKADKKFHVLLNILRHCRRLSEVRGGGLTRYVIT

SEQ ID NO: 38548 - protein, 209 aa, Homo sapiens
MASSDLEQLCSHVNEKIGNIKKTLSLRNCGQEPTLKTVLNKIGDEIIVINELLNKLELEIQYQEQTNNSLKELCESLEEDYKDIEHLKENVPSHLPQVTVTQSWYMKSRLTYNQINDVIKEINKAVISKYKILHQPKKSMNSVTRNLYHRFIDEETKDTKGRYFIVEADIKEFTTLKADKKFHVLLNILRHCRRLSEVRGGGLTRYVIT

SEQ ID NO: 38549 - protein, 86 aa, Homo sapiens
MGRKDAATIKLPVDQYRKQIGKQDYKKTKPILRATKLKAEAKKTAIGIKEVGLVLAAILALLLAFYAFFYLRLTTDVDPDLDQDED

SEQ ID NO: 38550 - protein, 402 aa, Homo sapiens
MDRTETRFRKRGQITGKITTSRQPHPQNEQSPQRSTSGYPLQEVVDDEMLGPSAPGVDPSPPCRSLGWKRKREWSDESEEEPEKELAPEPEETWVVEMLCGLKMKLKQQRVSSILPEHHKDFNSQLAPGVDPSPPHRSFCWKRKMEWWDESEESLEEEPRKVLAPEPEEIWVAEMLCGLKMKLKRRRVSLVLPEHHEAFNRLLEDPVIKRFLAWDKDLRVSDKYLLAMVIAYFSRAGFPSWQYQRIHFFLALYLANDMEEDDEDSKQNIFHFLYRKNRSRIPLLRKRWFQLGHSMNPRARKNRSRIPLLRKRRFQLYRSTNPRARKNRSRIPLLRKHRFQLYRSMNSRARKNRSQIVLFQKRRFHFFCSMSCRAWVSPEELEEIQAYDPEHWVWARDRAHLS

SEQ ID NO: 38551 - protein, 461 aa, Homo sapiens
MDYSYDEDLDELCPVCGDKVSGYHYGLLTCESCKGFFKRTVQNNKHYTCTESQSCKIDKTQRKRCPFCRFQKCLTVGMRLEAVRADRMRGGRNKFGPMYKRDRALKQQKKAQIRANGFKLETGPPMGVPPPPPPAPDYVLPPSLHGPEPKGLAAGPPAGPLGDFGAPALPMAVPGAHGPLAGYLYPAFPGRAIKSEYPEPYASPPQPGLPYGYPEPFSGGPNVPELILQLLQLEPDEDQVRARILGCLQEPTKSRPDQPAAFGLLCRMADQTFISIVDWARRCMVFKELEVADQMTLLQNCWSELLVFDHIYRQVQHGKEGSILLVTGQEVELTTVATQAGSLLHSLVLRAQELVLQLLALQLDRQEFVCLKFIILFSLDLKFLNNHILVKDAQEKANAALLDYTLCHYPHCGDKFQQLLLCLVEVRALSMQAKEYLYHKHLGNEMPRNNLLIEMLQAKQT

SEQ ID NO: 38552 - protein, 288 aa, Homo sapiens
MKDRTQELRSAKDSDDEEEVVHVDRDHFMDEFFEQVEEIRGCIEKLSEDVEQVKKQHSAILAAPNPDEKTKQELEDLTADIKKTANKVRSKLKAIEQSIEQEEGLNRSSADLRIRKTQHSTLSRKFVEVMTEYNATQSKYRDRCKDRIQRQLEITGRTTTNEELEDMLESGKLAIFTDDIKMDSQMTKQALNEIETRHNEIIKLETSIRELHDMFVDMAMLVESQGEMIDRIEYNVEHSVDYVERAVSDTKKAVKYQSKARRKKIMIIICCVVLGVVLASSIGGTLGL

SEQ ID NO: 38553 - protein, 277 aa, Homo sapiens
MKDRTQELRSAKDSDDEEEVVHVDRDHFMDEFFEQVEEIRGCIEKLSEDVEQVKKQHSAILAAPNPDEKTKQELEDLTADIKKTANKVRSKLKAIEQSIEQEEGLNRSSADLRIRKTQHSTLSRKFVEVMTEYNATQSKYRDRCKDRIQRQLEITGRTTTNEELEDMLESGKLAIFTDDIKMDSQMTKQALNEIETRHNEIIKLETSIRELHDMFVDMAMLVESQGEMIDRIEYNVEHSVDYVERAVSDTKKAVKYQSKARRVSGAGGLGVGGGAQG

SEQ ID NO: 38554 - protein, 164 aa, Homo sapiens
MHRDSCPLDCKVYVGNLGNNGNKTELERAFGYYGPLRSVWVARNPPGFAFVEFEDPRDAADAVRELDGRTLCGCRVRVELSNGEKRSRNRGPPPSWGRRPRDDYRRRSPPPRRRSPRRRSFSRSRSRSLSRDRRRERSLSRERNHKPSRSFSRSRSRSRSNERK

SEQ ID NO: 38555 - protein, 124 aa, Homo sapiens
MHRDSCPLDCKVYVGNLGNNGNKTELERAFGYYGPLRSVWVARNPPGFAFVEFEDPRDAADAVRELDGRTLCGCRVRVELSNGEKRSRNRGPPPSWGRRPRDDYRRRSPPPRRRVTIMSLLTTL

SEQ ID NO: 38556 - protein, 1047 aa, Homo sapiens
MDAEAEDKTLRTRSKGTEVPMDSLIQELSVAYDCSMAKKRTAEDQALGVPVNKRKSLLMKPRHYSPKADCQEDRSDRTEDDGPLETHGHSTAEEIMIKPMDESLLSTAQENSSRKEDRYSCYQELMVKSLMHLGKFEKNVSVQTVSENLNDSGIQSLKAESDEADECFLIHSDDGRDKIDDSQPPFCSSDDNESNSESAENGWDSGSNFSEETKPPRVPKYVLTDHKKDLLEVPEIKTEGDKFIPCENRCDSETERKDPQNALAEPLDGNAQPSFPDVEEEDSESLAVMTEEGSDLEKAKGNLSLLEQAIALQAERGCVFHNTYKELDRFLLEHLAGERRQTKVIDMGGRQIFNNKHSPRPEKRETKCPIPGCDGTGHVTGLYPHHRSLSGCPHKVRVPLEILAMHENVLKCPTPGCTGRGHVNSNRNTHRSLSGCPIAAAEKLAMSQDKNQLDSPQTGQCPDQAHRTSLVKQIEFNFPSQAITSPRATVSKEQEKFGKVPFDYASFDAQVFGKRPLIQTVQGRKTPPFPESKHFPNPVKFPNRLPSAGAHTQSPGRASSYSYGQCSEDTHIAAAAAILNLSTRCREATDILSNKPQSLHAKGAEIEVDENGTLDLSMKKNRILDKSAPLTSSNTSIPTPSSSPFKTSSILVNAAFYQALCDQEGWDTPINYSKTHGKTEEEKEKDPVSSLENLEEKKFPGEASIPSPKPKLHARDLKKELITCPTPGCDGSGHVTGNYASHRSVSGCPLADKTLKSLMAANSQELKCPTPGCDGSGHVTGNYASHRSLSGCPRARKGGVKMTPTKEEKEDPELKCPVIGCDGQGHISGKYTSHRTASGCPLAAKRQKENPLNGASLSWKLNKQELPHCPLPGCNGLGHVNNVFVTHRSLSGCPLNAQVIKKGKVSEELMTIKLKATGGIESDEEIRHLDEEIKELNESNLKIEADMMKLQTQITSMESNLKTIEEENKLIEQNNESLLKELAGLSQALISSLADIQLPQMGPISEQNFEAYVNTLTDMYSNLERDYSPECKALLESIKQAVKGIHV

SEQ ID NO: 38557 - protein, 356 aa, Homo sapiens
MLARAARGTGALLLRGSLLASGRAPRRASSGLPRNTVVLFVPQQEAWVVERMGRFHRILEPGLNILIPVLDRIRYVQSLKEIVINVPEQSAVTLDNVTLQIDGVLYLRIMDPYKASYGVEDPEYAVTQLAQTTMRSELGKLSLDKVFRERESLNASIVDAINQAADCWGIRCLRYEIKDIHVPPRVKESMQMQVEAERRKRATVLESEGTRESAINVAEGKKQAQILASEAEKAEQINQAAGEASAVLAKAKAKAEAIRILAAALTQHNGDAAASLTVAEQYVSAFSKLAKDSNTILLPSNPGDVTSMVAQAMGVYGALTKAPVPGTPDSLSSGSSRDVQGTDASLDEELDRVKMS

SEQ ID NO: 38558 - protein, 311 aa, Homo sapiens
MLARAARGTGALLLRGSLLASGRAPRRASSGLPRNTVVLFVPQQEAWVVERMGRFHRILEPGLNILIPVLDRIRYVQSLKEIVINVPEQSAVTLDNVTLQIDGVLYLRIMDPYKASYGVEDPEYAVTQLAQTTMRSELGKLSLDKVFRVEAERRKRATVLESEGTRESAINVAEGKKQAQILASEAEKAEQINQAAGEASAVLAKAKAKAEAIRILAAALTQHNGDAAASLTVAEQYVSAFSKLAKDSNTILLPSNPGDVTSMVAQAMGVYGALTKAPVPGTPDSLSSGSSRDVQGTDASLDEELDRVKMS

SEQ ID NO: 38559 - protein, 289 aa, Homo sapiens
MKDRLEQLKAKQLTQDDDTDAVEIAIDNTAFMDEFFSEIEETRLNIDKISEHVEEAKKLYSIILSAPIPEPKTKDDLEQLTTEIKKRANNVRNKLKSMEKHIEEDEVRSSADLRIRKSQHSVLSRKFVEVMTKYNEAQVDFRERSKGRIQRQLEITGKKTTDEELEEMLESGNPAIFTSGIIDSQISKQALSEIEGRHKDIVRLESSIKELHDMFMDIAMLVENQGEMLDNIELNVMHTVDHVEKARDETKKAVKYQSQARKKLIIIIVLVVVLLGILALIIGLSVGLN

SEQ ID NO: 38560 - protein, 252 aa, Homo sapiens
MKDRLEQLKAKQLTQDDDTDAVEIAIDNTAFMDEFFSEIEETRLNIDKISEHVEEAKKLYSIILSAPIPEPKTKDDLEQLTTEIKKRANNVRNKLKSMEKHIEEDEVRSSADLRIRKSQHSVLSRKFVEVMTKYNEAQVDFRERSKGRIQRQLEITGKKTTDEELEEMLESGNPAIFTSGIIDSQISKQALSEIEGRHKDIVRLESSIKELHDMFMDIAMLVENQKLIIIIVLVVVLLGILALIIGLSVGLN

SEQ ID NO: 38561 - protein, 277 aa, Homo sapiens
MKDRLEQLKAKQLTQDDDTDAVEIAIDNTAFMDEFFSEIEETRLNIDKISEHVEEAKKLYSIILSAPIPEPKTKDDLEQLTTEIKKRANNVRNKLKSMEKHIEEDEVRSSADLRIRKSQHSVLSRKFVEVMTKYNEAQVDFRERSKGRIQRQLEITGKKTTDEELEEMLESGNPAIFTSGIIDSQISKQALSEIEGRHKDIVRLESSIKELHDMFMDIAMLVENQGEMLDNIELNVMHTVDHVEKARDETKKAVKYQSQARKKLISLQTGVATLVFR

SEQ ID NO: 38562 - protein, 488 aa, Homo sapiens
MPGGRRGPSRQQLSRSALPSLQTLVGGGCGNGTGLRNRNGSAIGLPVPPITALITPGPVRHCQIPDLPVDGSLLFEFLFFIYLLVALFIQYINIYKTVWWYPYNHPASCTSLNFHLIDYHLAAFITVMLARRLVWALISEATKAGAASMIHYMVLISARLVLLTLCGWVLCWTLVNLFRSHSVLNLLFLGYPFGVYVPLCCFHQDSRAHLLLTDYNYVVQHEAVEESASTVGGLAKSKDFLSLLLESLKEQFNNATPIPTHSCPLSPDLIRNEVECLKADFNHRIKEVLFNSLFSAYYVAFLPLCFVKSTQYYDMRWSCEHLIMVWINAFVMLTTQLLPSKYCDLLHKSAAHLGKWQKLEHGSYSNAPQHIWSENTIWPQGVLVRHSRCLYRAMGPYNVAVPSDVSHARFYFLFHRPLRLLNLLILIEGSVVFYQLYSLLRSEKWNHTLSMALILFCNYYVLFKLLRDRIVLGRAYSYPLNSYELKAN

SEQ ID NO: 38563 - protein, 146 aa, Homo sapiens
MPGGRRGPSRQQLSRSALPSLQTLVGGGCGNGTGLRNRNGSAIGLPVPPITALITPGPVRHCQIPDLPVDGSLLFEFLFFIYLLVALFIQYINIYKTVWWYPYNHPASCTSLNFHLIDYHLAAFITVMLARRLVWALISEVCVCKL

SEQ ID NO: 38564 - protein, 296 aa, Homo sapiens
MLSPKDILRKDLKLVHGYPMTCAFASNWEKIEQFHSRPDDIVIATYPKSGTTWVSEIIDMILNDGDIEKCKRGFITEKVPMLEMTLPGLRTSGIEQLEKNPSPRIVKTHLPTDLLPKSFWENNCKMIYLARNAKDVSVSYYHFDLMNNLQPFPGTWEEYLEKFLTGKVAYGSWFTHVKNWWKKKEEHPILFLYYEDMKENPKEEIKKIIRFLEKNLNDEILDRIIHHTSFEVMKDNPLVNYTHLPTTVMDHSKSPFMRKGTAGDWKNYFTVAQNEKFDAIYETEMSKTALQFRTEI

SEQ ID NO: 38565 - protein, 128 aa, Homo sapiens
MSEGGGQVSCIFAAPTRLCRWPALIECGVNLTQPLCEWMIQVARDRTLSLAWEVASLLTLSSSEVGLEGVGTIWPSSYSSEESSRNGAEQGRQLSIEGPFQGQNCPSHPAAALPLPMRGESQATSCQV

SEQ ID NO: 38566 - protein, 255 aa, Homo sapiens
MSMEDPFFVVKGEVQKAVNTAQGLFQRWTELLQDPSTATREEIDWTTNELRNNLRSIEWDLEDLDETISIVEANPRKFNLDATELSIRKAFITSTRQVVRDMKDQMSTSSVQALAERKNRQALLGDSGSQNWSTGTTDKYGRLDRELQRANSHFIEEQQAQQQLIVEQQDEQLELVSGSIGVLKNMSQRIGGELEEQAVMLEDFSHELESTQSRLDNVMKKLAKVSHMTSDRRQWCAIAILFAVLLVVLILFLVL

SEQ ID NO: 38567 - protein, 154 aa, Homo sapiens
MKDQMSTSSVQALAERKNRQALLGDSGSQNWSTGTTDKYGRLDRELQRANSHFIEEQQAQQQLIVEQQDEQLELVSGSIGVLKNMSQRIGGELEEQAVMLEDFSHELESTQSRLDNVMKKLAKVSHMTSDRRQWCAIAILFAVLLVVLILFLVL

SEQ ID NO: 38568 - protein, 325 aa, Homo sapiens
MSDLQAAEGPGSWSPTARPGSAGGVGDCQGVEGSQAAASENEDLENKDTSLLASATDPEPCSSPHRPQMVSPVSKDATEDLRKATGPLEAQALVKQDLLPADQAQVLNEMAKYQVPQRSGDIVMIQSEHTGAIDVLSADLESADLLGDHRKVSPPLMAPPCIWTFAKVKEFKSKLGKEKNSRLVVKRGEVVTIRVPTHPEGKRVCWEFATDDYDIGFGVYFDWTPVTSTDITVQVSDSSDDEDEEEEEEEEIEEPVPAGDVERGSRSSLRGRYGEVMPVYRRDSHRDVQAGSHDYPGEGIYLLKFDNSYSLLRNKTLYFHIYYTS

SEQ ID NO: 38569 - protein, 543 aa, Homo sapiens
MEQVNELKEKGNKALSVGNIDDALQCYSEAIKLDPHNHVLYSNRSAAYAKKGDYQKAYEDGCKTVDLKPDWGKGYSRKAAALEFLNRFEEAKRTYEEGLKHEANNPQLKEGLQNMEARLAERKFMNPFNMPNLYQKLESDPRTRTLLSDPTYRELIEQLRNKPSDLGTKLQDPRIMTTLSVLLGVDLGSMDEEEEIATPPPPPPPKKETKPEPMEEDLPENKKQALKEKELGNDAYKKKDFDTALKHYDKAKELDPTNMTYITNQAAVYFEKGDYNKCRELCEKAIEVGRENREDYRQIAKAYARIGNSYFKEEKYKDAIHFYNKSLAEHRTPDVLKKCQQAEKILKEQERLAYINPDLALEEKNKGNECFQKGDYPQAMKHYTEAIKRNPKDAKLYSNRAACYTKLLEFQLALKDCEECIQLEPTFIKGYTRKAAALEAMKDYTKAMDVYQKALDLDSSCKEAADGYQRCMMAQYNRHDSPEDVKRRAMADPEVQQIMSDPAMRLILEQMQKDPQALSEHLKNPVIAQKIQKLMDVGLIAIR

SEQ ID NO: 38570 - protein, 590 aa, Homo sapiens
MESGSPMGEVEISRTIRTNGRGQRGYDWQCKRPIRVAEVRSSLHSWSLRWVNELKEKGNKALSVGNIDDALQCYSEAIKLDPHNHVLYSNRSAAYAKKGDYQKAYEDGCKTVDLKPDWGKGYSRKAAALEFLNRFEEAKRTYEEGLKHEANNPQLKEGLQNMEARLAERKFMNPFNMPNLYQKLESDPRTRTLLSDPTYRELIEQLRNKPSDLGTKLQDPRIMTTLSVLLGVDLGSMDEEEEIATPPPPPPPKKETKPEPMEEDLPENKKQALKEKELGNDAYKKKDFDTALKHYDKAKELDPTNMTYITNQAAVYFEKGDYNKCRELCEKAIEVGRENREDYRQIAKAYARIGNSYFKEEKYKDAIHFYNKSLAEHRTPDVLKKCQQAEKILKEQERLAYINPDLALEEKNKGNECFQKGDYPQAMKHYTEAIKRNPKDAKLYSNRAACYTKLLEFQLALKDCEECIQLEPTFIKGYTRKAAALEAMKDYTKAMDVYQKALDLDSSCKEAADGYQRCMMAQYNRHDSPEDVKRRAMADPEVQQIMSDPAMRLILEQMQKDPQALSEHLKNPVIAQKIQKLMDVGLIAIR

SEQ ID NO: 38571 - protein, 519 aa, Homo sapiens
MEQVNELKEKGNKALSVGNIDDALQCYSEAIKLDPHNHVLYSNRSAAYAKKGDYQKAYEDGCKTVDLKPDWGKGLKHEANNPQLKEGLQNMEARLAERKFMNPFNMPNLYQKLESDPRTRTLLSDPTYRELIEQLRNKPSDLGTKLQDPRIMTTLSVLLGVDLGSMDEEEEIATPPPPPPPKKETKPEPMEEDLPENKKQALKEKELGNDAYKKKDFDTALKHYDKAKELDPTNMTYITNQAAVYFEKGDYNKCRELCEKAIEVGRENREDYRQIAKAYARIGNSYFKEEKYKDAIHFYNKSLAEHRTPDVLKKCQQAEKILKEQERLAYINPDLALEEKNKGNECFQKGDYPQAMKHYTEAIKRNPKDAKLYSNRAACYTKLLEFQLALKDCEECIQLEPTFIKGYTRKAAALEAMKDYTKAMDVYQKALDLDSSCKEAADGYQRCMMAQYNRHDSPEDVKRRAMADPEVQQIMSDPAMRLILEQMQKDPQALSEHLKNPVIAQKIQKLMDVGLIAIR

SEQ ID NO: 38572 - protein, 180 aa, Homo sapiens
MASTISAYKEKMKELSVLSLICSCFYTQPHPNTVYQYGDMEVKQLDKRASGQSFEVILKSPSDLSPESPMLSSPPKKKDTSLEELQKRLEAAEERRKTQEAQVLKQLAERREHEREVLHKALEENNNFSRQAEEKLNYKMELSKEIREAHLAALRERLREKELHAAEVRRNKEQREEMSG

SEQ ID NO: 38573 - protein, 169 aa, Homo sapiens
MKELSVLSLICSCFYTQPHPNTVYQYGDMEVKQLDKRASGQSFEVILKSPSDLSPESPMLSSPPKKKDTSLEELQKRLEAAEERRKTQEAQVLKQLAERREHEREVLHKALEENNNFSRQAEEKLNYKMELSKEIREAHLAALRERLREKELHAAEVRRNKEQREEMSG

SEQ ID NO: 38574 - protein, 47 aa, Homo sapiens
MLQFLLGFTLGNVVGMYLAQNYDIPNLAKKLEEIKKDLDAKKKPPSA

SEQ ID NO: 38575 - protein, 414 aa, Homo sapiens
MNLQRYWGEIPISSSQTNRSSFDLLPREFRLVEVHDPPLHQPSANKPKPPTMLDIPSEPCSLTIHTIQLIQHNRRLRNLIATAQAQNQQQTEGVKTEESEPLPSCPGSPPLPDDLLPLDCKNPNAPFQIRHSDPESDFYRGKGEPVTELSWHSCRQLLYQAVATILAHAGFDCANESVLETLTDVAHEYCLKFTKLLRFAVDREARLGQTPFPDVMEQVFHEVGIGSVLSLQKFWQHRIKDYHSYMLQISKQLSEEYERIVNPEKATEDAKPVKIKEEPVSDITFPVSEELEADLASGDQSLPMGVLGAQSERFPSNLEVEASPQASSAEVNASPLWNLAHVKMEPQESEEGNVSGHGVLGSDVFEEPMSGMSEAGIPQSPDDSDSSYGSHSTDSLMGSSPVFNQRCKKRMRKI

SEQ ID NO: 38576 - protein, 412 aa, Homo sapiens
MLRYWGEIPISSSQTNRSSFDLLPREFRLVEVHDPPLHQPSANKPKPPTMLDIPSEPCSLTIHTIQLIQHNRRLRNLIATAQAQNQQQTEGVKTEESEPLPSCPGSPPLPDDLLPLDCKNPNAPFQIRHSDPESDFYRGKGEPVTELSWHSCRQLLYQAVATILAHAGFDCANESVLETLTDVAHEYCLKFTKLLRFAVDREARLGQTPFPDVMEQVFHEVGIGSVLSLQKFWQHRIKDYHSYMLQISKQLSEEYERIVNPEKATEDAKPVKIKEEPVSDITFPVSEELEADLASGDQSLPMGVLGAQSERFPSNLEVEASPQASSAEVNASPLWNLAHVKMEPQESEEGNVSGHGVLGSDVFEEPMSGMSEAGIPQSPDDSDSSYGSHSTDSLMGSSPVFNQRCKKRMRKI

SEQ ID NO: 38577 - protein, 279 aa, Homo sapiens
MNLQSGKGEPVTELSWHSCRQLLYQAVATILAHAGFDCANESVLETLTDVAHEYCLKFTKLLRFAVDREARLGQTPFPDVMEQVFHEVGIGSVLSLQKFWQHRIKDYHSYMLQISKQLSEEYERIVNPEKATEDAKPVKIKEEPVSDITFPVSEELEADLASGDQSLPMGVLGAQSERFPSNLEVEASPQASSAEVNASPLWNLAHVKMEPQESEEGNVSGHGVLGSDVFEEPMSGMSEAGIPQSPDDSDSSYGSHSTDSLMGSSPVFNQRCKKRMRKI

SEQ ID NO: 38578 - protein, 426 aa, Homo sapiens
MAHLRGFANQHSRVDPEELFTKLDRIGKGSFGEVYKGIDNHTKEVVAIKIIDLEEAEDEIEDIQQEITVLSQCDSPYITRYFGSYLKSTKLWIIMEYLGGGSALDLLKPGPLEETYIATILREILKGLDYLHSERKIHRDIKAANVLLSEQGDVKLADFGVAGQLTDTQIKRNTFVGTPFWMAPEVIKQSAYDFKADIWSLGITAIELAKGEPPNSDLHPMRVLFLIPKNSPPTLEGQHSKPFKEFVEACLNKDPRFRPTAKELLKHKFITRYTKKTSFLTELIDRYKRWKSEGHGEESSSEDSDIDGEAEDGEQGPIWTFPPTIRPSPHSKLHKGTALHSSQKPAEPVKRQPRSQCLSTLVRPVFGELKEKHKQSGGSVGALEELENAFSLAEESCPGISDKLMVHLVERVQRFSHNRNHLTSTR

SEQ ID NO: 38579 - protein, 349 aa, Homo sapiens
MAHLRGFANQSTKLWIIMEYLGGGSALDLLKPGPLEETYIATILREILKGLDYLHSERKIHRDIKAANVLLSEQGDVKLADFGVAGQLTDTQIKRNTFVGTPFWMAPEVIKQSAYDFKADIWSLGITAIELAKGEPPNSDLHPMRVLFLIPKNSPPTLEGQHSKPFKEFVEACLNKDPRFRPTAKELLKHKFITRYTKKTSFLTELIDRYKRWKSEGHGEESSSEDSDIDGEAEDGEQGPIWTFPPTIRPSPHSKLHKGTALHSSQKPAEPVKRQPRSQCLSTLVRPVFGELKEKHKQSGGSVGALEELENAFSLAEESCPGISDKLMVHLVERVQRFSHNRNHLTSTR

SEQ ID NO: 38580 - protein, 332 aa, Homo sapiens
MEYLGGGSALDLLKPGPLEETYIATILREILKGLDYLHSERKIHRDIKAANVLLSEQGDVKLADFGVAGQLTDTQIKRNTFVGTPFWMAPEVIKQSAYDFKADIWSLGITAIELAKGEPPNSDLHPMRVLFLIPKNSPPTLEGQHSKPFKEFVEACLNKDPRFRPTAKELLKHKFITRYTKKTSFLTELIDRYKRWKSEGHGEESSSEDSDIDGEAEDGEQGPIWTFPPTIRPSPHSKLHKGTALHSSQKPAEPVKRQPRSQCLSTLVRPVFGELKEKHKQSGGSVGALEELENAFSLAEESCPGISDKLMVHLVERVQRFSHNRNHLTSTR

SEQ ID NO: 38581 - protein, 223 aa, Homo sapiens
MEDVKLEFPSLPQCKEDAEEWTYPMRREMQEILPGLFLGPYSSAMKSKLPVLQKHGITHIICIRQNIEANFIKPNFQQLFRYLVLDIADNPVENIIRFFPMTKEFIDGSLQMGGKVLVHGNAGISRSAAFVIAYIMETFGMKYRDAFAYVQERRFCINPNAGFVHQLQEYEAIYLAKLTIQMMSPLQIERSLSVHSGTTGSLKRTHEEEDDFGTMQVATAQNG

SEQ ID NO: 38582 - protein, 443 aa, Homo sapiens
MDSRAQLWGLALNKRRATLPHPGGSTNLKADPEELFTKLEKIGKGSFGEVFKGIDNRTQKVVAIKIIDLEEAEDEIEDIQQEITVLSQCDSPYVTKYYGSYLKDTKLWIIMEYLGGGSALDLLEPGPLDETQIATILREILKGLDYLHSEKKIHRDIKAANVLLSEHGEVKLADFGVAGQLTDTQIKRNTFVGTPFWMAPEVIKQSAYDSKADIWSLGITAIELARGEPPHSELHPMKVLFLIPKNNPPTLEGNYSKPLKEFVEACLNKEPSFRPTAKELLKHKFILRNAKKTSYLTELIDRYKRWKAEQSHDDSSSEDSDAETDGQASGGSDSGDWIFTIREKDPKNLENGALQPSDLDRNKMKDIPKRPFSQCLSTIISPLFAELKEKSQACGGNLGSIEELRGAIYLAEEACPGISDTMVAQLVQRLQRYSLSGGGTSSH

SEQ ID NO: 38583 - protein, 431 aa, Homo sapiens
MAHSPVQSGLPGMQNLKADPEELFTKLEKIGKGSFGEVFKGIDNRTQKVVAIKIIDLEEAEDEIEDIQQEITVLSQCDSPYVTKYYGSYLKDTKLWIIMEYLGGGSALDLLEPGPLDETQIATILREILKGLDYLHSEKKIHRDIKAANVLLSEHGEVKLADFGVAGQLTDTQIKRNTFVGTPFWMAPEVIKQSAYDSKADIWSLGITAIELARGEPPHSELHPMKVLFLIPKNNPPTLEGNYSKPLKEFVEACLNKEPSFRPTAKELLKHKFILRNAKKTSYLTELIDRYKRWKAEQSHDDSSSEDSDAETDGQASGGSDSGDWIFTIREKDPKNLENGALQPSDLDRNKMKDIPKRPFSQCLSTIISPLFAELKEKSQACGGNLGSIEELRGAIYLAEEACPGISDTMVAQLVQRLQRYSLSGGGTSSH

SEQ ID NO: 38584 - protein, 234 aa, Homo sapiens
MNHLPEDMENALTGSQSSHASLRNIHSINPTQLMARIESYEGREKKGISDVRRTFCLFVTFDLLFVTLLWIIELNVNGGIENTLEKEVMQYDYYSSYFDIFLLAVFRFKVLILAYAVCRLRHWWAIALTTAVTSAFLLAKVILSKLFSQGAFGYVLPIISFILAWIETWFLDFKVLPQEAEEENRLLIVQDASERAALIPGGLSDGQFYSPPESEAGSEEAEEKQDSEKPLLEL

SEQ ID NO: 38585 - protein, 227 aa, Homo sapiens
MENALTGSQSSHASLRNIHSINPTQLMARIESYEGREKKGISDVRRTFCLFVTFDLLFVTLLWIIELNVNGGIENTLEKEVMQYDYYSSYFDIFLLAVFRFKVLILAYAVCRLRHWWAIALTTAVTSAFLLAKVILSKLFSQGAFGYVLPIISFILAWIETWFLDFKVLPQEAEEENRLLIVQDASERAALIPGGLSDGQFYSPPESEAGSEEAEEKQDSEKPLLEL

SEQ ID NO: 38586 - protein, 361 aa, Homo sapiens
MYGKGKSNSSAVPSDSQAREKLALYVYEYLLHVGAQKSAQTFLSEIRWEKNITLGEPPGFLHSWWCVFWDLYCAAPERRETCEHSSEAKAFHDYSAAAAPSPVLGNIPPGDGMPVGPVPPGFFQPFMSPRYPGGPRPPLRIPNQALGGVPGSQPLLPSGMDPTRQQGHPNMGGPMQRMTPPRGMVPLGPQNYGGAMRPPLNALGGPGMPGMNMGPGGGRPWPNPTNANSIPYSSASPGNYVGPPGGGGPPGTPIMPSPADSTNSGDNMYTLMNAVPPGPNRPNFPMGPGSDGPMGGLGGMESHHMNGSLGSGDMDSISKNSPNNMSLSNQPGTPRDDGEMGGNFLNPFQSESYSPSMTMSV

SEQ ID NO: 38587 - protein, 298 aa, Homo sapiens
MYGKGKSNSSAVPSDSQAREKLALYVYEYLLHVGAQKSAQTFLSEIRWEKNITLGEPPGFLHSWWCVFWDLYCAAPERRETCEHSSEAKAFHDYPFMSPRYPGGPRPPLRIPNQALGGVPGSQPLLPSGMDPTRQQGHPNMGGPMQRMTPPRGMVPLGPQNYGGAMRPPLNALGGPGMPGMNMGPGGGRPWPNPTNANSIPYSSASPGNYVGPPGGGGPPGTPIMPSPADSTNSGDNMYTLMNAVPPGPNRPNFPMGPGSDGPMGGLGGMESHHMNGSLGSGDMDSISKYSPSMTMSV

SEQ ID NO: 38588 - protein, 341 aa, Homo sapiens
MYGKGKSNSSAVPSDSQAREKLALYVYEYLLHVGAQKSAQTFLSEIRWEKNITLGEPPGFLHSWWCVFWDLYCAAPERRETCEHSSEAKAFHDYSAAAAPSPVLGNIPPGDGMPVGPVPPGFFQALGGVPGSQPLLPSGMDPTRQQGHPNMGGPMQRMTPPRGMVPLGPQNYGGAMRPPLNALGGPGMPGMNMGPGGGRPWPNPTNANSIPYSSASPGNYVGPPGGGGPPGTPIMPSPADSTNSGDNMYTLMNAVPPGPNRPNFPMGPGSDGPMGGLGGMESHHMNGSLGSGDMDSISKNSPNNMSLSNQPGTPRDDGEMGGNFLNPFQSESYSPSMTMSV

SEQ ID NO: 38589 - protein, 331 aa, Homo sapiens
MYGKGKSNSSAVPSDSQAREKLALYVYEYLLHVGAQKSAQTFLSEIRWEKNITLGEPPGFLHSWWCVFWDLYCAAPERRETCEHSSEAKAFHDYPFMSPRYPGGPRPPLRIPNQALGGVPGSQPLLPSGMDPTRQQGHPNMGGPMQRMTPPRGMVPLGPQNYGGAMRPPLNALGGPGMPGMNMGPGGGRPWPNPTNANSIPYSSASPGNYVGPPGGGGPPGTPIMPSPADSTNSGDNMYTLMNAVPPGPNRPNFPMGPGSDGPMGGLGGMESHHMNGSLGSGDMDSISKNSPNNMSLSNQPGTPRDDGEMGGNFLNPFQSESYSPSMTMSV

SEQ ID NO: 38590 - protein, 339 aa, Homo sapiens
MYGKGKSNSSAVPSDSQAREKLALYVYEYLLHVGAQKSAQTFLSEIRWEKNITLGEPPGFLHSWWCVFWDLYCAAPERRETCEHSSEAKAFHDYPFMSPRYPGGPRPPLRIPNQALGGVPGSQPLLPSGMDPTRQQGHPNMGGPMQRMTPPRGMVPLGPQSDPWLSLQNYGGAMRPPLNALGGPGMPGMNMGPGGGRPWPNPTNANSIPYSSASPGNYVGPPGGGGPPGTPIMPSPADSTNSGDNMYTLMNAVPPGPNRPNFPMGPGSDGPMGGLGGMESHHMNGSLGSGDMDSISKNSPNNMSLSNQPGTPRDDGEMGGNFLNPFQSESYSPSMTMSV

SEQ ID NO: 38591 - protein, 385 aa, Homo sapiens
MYAKGGKGSAVPSDSQAREKLALYVYEYLLHIGAQKSAQTFLSEIRWEKNITLGEPPGFLHSWWCVFWDLYCAAPDRREACEHSGEAKAFQDYSAAAAPSPVMGSMAPGDTMAAGSMAAGFFQGPPGSQPSPHNPNAPMMGPHGQPFMSPRFPGGPRPTLRMPSQPPAGLPGSQPLLPGAMEPSPRAQGHPSMGGPMQRVTPPRGMASVGPQSYGGGMRPPPNSLAGPGLPAMNMGPGVRGPWASPSGNSIPYSSSSPGSYTGPPGGGGPPGTPIMPSPGDSTNSSENMYTIMNPIGQGAGRANFPLGPGPEGPMAAMSAMEPHHVNGSLGSGDMDGLPKSSPGAVAGLSNAPGTPRDDGEMAAAGTFLHPFPSESYSPGMTMSV

SEQ ID NO: 38592 - protein, 363 aa, Homo sapiens
MYAKGGKGSAVPSDSQAREKLALYVYEYLLHIGAQKSAQTFLSEIRWEKNITLGEPPGFLHSWWCVFWDLYCAAPDRREACEHSGEAKAFQDYSAAAAPSPVMGSMAPGDTMAAGSMAAGFFQPFMSPRFPGGPRPTLRMPSQPPAGLPGSQPLLPGAMEPSPRAQGHPSMGGPMQRVTPPRGMASVGPQSYGGGMRPPPNSLAGPGLPAMNMGPGVRGPWASPSGNSIPYSSSSPGSYTGPPGGGGPPGTPIMPSPGDSTNSSENMYTIMNPIGQGAGRANFPLGPGPEGPMAAMSAMEPHHVNGSLGSGDMDGLPKSSPGAVAGLSNAPGTPRDDGEMAAAGTFLHPFPSESYSPGMTMSV

SEQ ID NO: 38593 - protein, 672 aa, Homo sapiens
MRSIRSFANDDRHVMVKHSTIYPSPEELEAVQNMVSTVECALKHVSDWLDETNKGTKTEGETEVKKDEAGENYSKDQGGRTLCGVMRIGLVAKGLLIKDDMDLELVLMCKDKPTETLLNTVKDNLPIQIQKLTEEKYQVEQCVNEASIIIRNTKEPTLTLKVILTSPLIRDELEKKDGENVSMKDPPDLLDRQKCLNALASLRHAKWFQARANGLKSCVIVLRILRDLCNRVPTWAPLKGWPLELICEKSIGTCNRPLGAGEALRRVMECLASGILLPGGPGLHDPCERDPTDALSYMTIQQKEDITHSAQHALRLSAFGQIYKVLEMDPLPSSKPFQKYSWSVTDKEGAGSSALKRPFEDGLGDDKDPNKKMKRNLRKILDSKAIDLMNALMRLNQIRPGLQYKLLSQSGPVHAPVFTMSVDVDGTTYEASGPSKKTAKLHVAVKVLQAMGYPTGFDADIECMSSDEKSDNESKNETVSSNSSNNTGNSTTETSSTLEVRTQGPILTASGKNPVMELNEKRRGLKYELISETGGSHDKRFVMEVEVDGQKFRGAGPNKKVAKASAALAALEKLFSGPNAANNKKKKIIPQAKGVVNTAVSAAVQAVRGRGRGTLTRGAFVGATAAPGYIAPGYGTPYGYSTAAPAYGLPKRMVLLPVMKFPTYPVPHYSFF

SEQ ID NO: 38594 - protein, 658 aa, Homo sapiens
MVKHSTIYPSPEELEAVQNMVSTVECALKHVSDWLDETNKGTKTEGETEVKKDEAGENYSKDQGGRTLCGVMRIGLVAKGLLIKDDMDLELVLMCKDKPTETLLNTVKDNLPIQIQKLTEEKYQVEQCVNEASIIIRNTKEPTLTLKVILTSPLIRDELEKKDGENVSMKDPPDLLDRQKCLNALASLRHAKWFQARANGLKSCVIVLRILRDLCNRVPTWAPLKGWPLELICEKSIGTCNRPLGAGEALRRVMECLASGILLPGGPGLHDPCERDPTDALSYMTIQQKEDITHSAQHALRLSAFGQIYKVLEMDPLPSSKPFQKYSWSVTDKEGAGSSALKRPFEDGLGDDKDPNKKMKRNLRKILDSKAIDLMNALMRLNQIRPGLQYKLLSQSGPVHAPVFTMSVDVDGTTYEASGPSKKTAKLHVAVKVLQAMGYPTGFDADIECMSSDEKSDNESKNETVSSNSSNNTGNSTTETSSTLEVRTQGPILTASGKNPVMELNEKRRGLKYELISETGGSHDKRFVMEVEVDGQKFRGAGPNKKVAKASAALAALEKLFSGPNAANNKKKKIIPQAKGVVNTAVSAAVQAVRGRGRGTLTRGAFVGATAAPGYIAPGYGTPYGYSTAAPAYGLPKRMVLLPVMKFPTYPVPHYSFF

SEQ ID NO: 38595 - protein, 431 aa, Homo sapiens
MSFLVSKPERIRRWVSEKFIVEGLRDLELFGEQPPGDTRRKTNDASSESIASFSKQEVMSSFLPEGGCYELLTVIGKGFEDLMTVNLARYKPTGEYVTVRRINLEACSNEMVTFLQGELHVSKLFNHPNIVPYRATFIADNELWVVTSFMAYGSAKDLICTHFMDGMNELAIAYILQGVLKALDYIHHMGYVHRSVKASHILISVDGKVYLSGLRSNLSMISHGQRQRVVHDFPKYSVKVLPWLSPEVLQQNLQGYDAKSDIYSVGITACELANGHVPFKDMPATQMLLEKLNGTVPCLLDTSTIPAEELTMSPSRSVANSGLSDSLTTSTPRPSNGDSPSHPYHRTFSPHFHHFVEQCLQRNPDARPSASTLLNHSFFKQIKRRASEALPELLRPVTPITNFEGSQSQDHSGIFGLVTNLEELEVDDWEF

SEQ ID NO: 38596 - protein, 348 aa, Homo sapiens
MSFLTNDASSESIASFSKQEVMSSFLPEGGCYELLTVIGKGFEDLMTVNLARYKPTGEYVTVRRINLEACSNEMVTFLQGELHVSKLFNHPNIVPYRATFIADNELWVVTSFMAYGSAKDLICTHFMDGMNELAIAYILQGVLKALDYIHHMGYVHRSVKASHILISVDGKVYLSGLRSNLSMISHGQRQRVVHDFPKYSVKVLPWLSPEVLQQNLQGYDAKSDIYSVGITACELANGHVPFKDMPATQMLLEKLNGTVPCLLDTSTIPAEELTMSPSRSVANSGLSDSLTTSTPRPSNGDSPSHPYHRTFSPHFHHFVEQCLQRNPDARYPCWPGPGLRESRGCSGG

SEQ ID NO: 38597 - protein, 394 aa, Homo sapiens
MSFLTNDASSESIASFSKQEVMSSFLPEGGCYELLTVIGKGFEDLMTVNLARYKPTGEYVTVRRINLEACSNEMVTFLQGELHVSKLFNHPNIVPYRATFIADNELWVVTSFMAYGSAKDLICTHFMDGMNELAIAYILQGVLKALDYIHHMGYVHRSVKASHILISVDGKVYLSGLRSNLSMISHGQRQRVVHDFPKYSVKVLPWLSPEVLQQNLQGYDAKSDIYSVGITACELANGHVPFKDMPATQMLLEKLNGTVPCLLDTSTIPAEELTMSPSRSVANSGLSDSLTTSTPRPSNGDSPSHPYHRTFSPHFHHFVEQCLQRNPDARPSASTLLNHSFFKQIKRRASEALPELLRPVTPITNFEGSQSQDHSGIFGLVTNLEELEVDDWEF

SEQ ID NO: 38598 - protein, 299 aa, Homo sapiens
MSFLVSKPERIRRWVSEKFIVEGLRDLELFGGKGFEDLMTVNLARYKPTGEYVTVRRINLEACSNEMVTFLQGELHVSKLFNHPNIVPYRATFIADNELWVVTSFMAYGSAKDLICTHFMDGMNELAIAYILQGVLKALDYIHHMGYVHRSVKASHILISVDGKVYLSGLRSNLSMISHGQRQRVVHDFPKYSVKVLPWLSPEVLQQNLQGYDAKSDIYSVGITACELANGHVPFKDMPATQMLLEKLNGTVPCLLDTSTIPAEELTMSPSRSVANSGLSDSLTTSTPRPSNGPVPAPS

SEQ ID NO: 38599 - protein, 373 aa, Homo sapiens
MSSFLPEGGCYELLTVIGKGFEDLMTVNLARYKPTGEYVTVRRINLEACSNEMVTFLQGELHVSKLFNHPNIVPYRATFIADNELWVVTSFMAYGSAKDLICTHFMDGMNELAIAYILQGVLKALDYIHHMGYVHRSVKASHILISVDGKVYLSGLRSNLSMISHGQRQRVVHDFPKYSVKVLPWLSPEVLQQNLQGYDAKSDIYSVGITACELANGHVPFKDMPATQMLLEKLNGTVPCLLDTSTIPAEELTMSPSRSVANSGLSDSLTTSTPRPSNGDSPSHPYHRTFSPHFHHFVEQCLQRNPDARPSASTLLNHSFFKQIKRRASEALPELLRPVTPITNFEGSQSQDHSGIFGLVTNLEELEVDDWEF

SEQ ID NO: 38600 - protein, 314 aa, Homo sapiens
MSFLVSKPERIRTNDASSESIASFSKQEVMSSFLPEGGCYELLTVIGKGFEDLMTVNLARYKPTGEYVTVRRINLEACSNEMVTFLQGELHVSKLFNHPNIVPYRATFIADNELWVVTSFMAYGSAKDLICTHFMDGMNELAIAYILQGVLKALDYIHHMGYVHRSVKASHILISVDGKVYLSGLRSNLSMISHGQRQRVVHDFPKYSVKVLPWLSPEVLQQNLQGYDAKSDIYSVGITACELANGHVPFKDMPATQMLLEKLNGTVPCLLDTSTIPAEELTMSPSRSVANSGLSDSLTTSTPRPSNGPVPAPS

SEQ ID NO: 38601 - protein, 363 aa, Homo sapiens
MKRSLNENSARSTAGCLPVPLFNQKKRNRQPLTSNPLKDDSGISTPSDNYDFPPLPTDWAWEAVNPELAPVMKTVDTGQIPHSVSRPLRSQDSVFNSIQSNTGRSQGGWSYRDGNKNTSLKTWNKNDFKPQCKRTNLVANDGKNSCPVSSGAQQQKQLRIPEPPNLSRNKETELLRQTHSSKISGCTMRGLDKNSALQTLKPNFQQNQYKKQMLDDIPEDNTLKETSLYQLQFKEKASSLRIISAVIESMKYWREHAQKTVLLFEVLAVLDSAVTPGPYYSKTFLMRDGKNTLPCVFYEIDRELPRLIRGRVHRCVGNYDQKKNIFQCVSVRPASVSEQKTFQAFVKIADVEMQYYINVMNET

SEQ ID NO: 38602 - protein, 320 aa, Homo sapiens
MKRSLNENSARSTADWAWEAVNPELAPVMKTVDTGQIPHSVSRPLRSQDSVFNSIQSNTGRSQGGWSYRDGNKNTSLKTWNKNDFKPQCKRTNLVANDGKNSCPVSSGAQQQKQLRIPEPPNLSRNKETELLRQTHSSKISGCTMRGLDKNSALQTLKPNFQQNQYKKQMLDDIPEDNTLKETSLYQLQFKEKASSLRIISAVIESMKYWREHAQKTVLLFEVLAVLDSAVTPGPYYSKTFLMRDGKNTLPCVFYEIDRELPRLIRGRVHRCVGNYDQKKNIFQCVSVRPASVSEQKTFQAFVKIADVEMQYYINVMNET

SEQ ID NO: 38603 - protein, 269 aa, Homo sapiens
MKRSLNENSARSTAGCLPVPLFNQKKRNRQPLTSNPLKDDSGISTPSDNYDFPPLPTDWAWEAVNPELAPVMKTVDTGQIPHSVSRPLRSQDSVFNSIQSNTGRSQGGWSYRDGNKNTSLKTWNKNDFKPQCKRTNLVANDGKNSCPVSSGAQQQKQLRIPEPPNLSRNKETELLRQTHSSKISGCTMRGLDKNSALQTLKPNFQQNQYKKQMLDDIPEDNTLKETSLYQLQFKEKASSLRIISAVIESMKYWREHAQKTVLLFEVLGS

SEQ ID NO: 38604 - protein, 747 aa, Homo sapiens
MGRGPWDAGPSRRLLPLLLLLGLARGAAGAPGPDGLDVCATCHEHATCQQREGKKICICNYGFVGNGRTQCVDKNECQFGATLVCGNHTSCHNTPGGFYCICLEGYRATNNNKTFIPNDGTFCTDIDECEVSGLCRHGGRCVNTHGSFECYCMDGYLPRNGPEPFHPTTDATSCTEIDCGTPPEVPDGYIIGNYTSSLGSQVRYACREGFFSVPEDTVSSCTGLGTWESPKLHCQEINCGNPPEMRHAILVGNHSSRLGGVARYVCQEGFESPGGKITSVCTEKGTWRESTLTCTEILTKINDVSLFNDTCVRWQINSRRINPKISYVISIKGQRLDPMESVREETVNLTTDSRTPEVCLALYPGTNYTVNISTAPPRRSMPAVIGFQTAEVDLLEDDGSFNISIFNETCLKLNRRSRKVGSEHMYQFTVLGQRWYLANFSHATSFNFTTREQVPVVCLDLYPTTDYTVNVTLLRSPKRHSVQITIATPPAVKQTISNISGFNETCLRWRSIKTADMEEMYLFHIWGQRWYQKEFAQEMTFNISSSSRDPEVCLDLRPGTNYNVSLRALSSELPVVISLTTQITEPPLPEVEFFTVHRGPLPRLRLRKAKEKNGPISSYQVLVLPLALQSTFSCDSEGASSFFSNASDADGYVAAELLAKDVPDDAMEIPIGDRLYYGEYYNAPLKRGSDYCIILRITSEWNKVRRHSCAVWAQVKDSSLMLLQMAGVGLGSLAVVIILTFLSFSAV

SEQ ID NO: 38605 - protein, 757 aa, Homo sapiens
MGRGPWDAGPSRRLLPLLLLLGLARGAAGAPGPDGLDVCATCHEHATCQQREGKKICICNYGFVGNGRTQCVDKNECQFGATLVCGNHTSCHNTPGGFYCICLEGYRATNNNKTFIPNDGTFCTDIDECEVSGLCRHGGRCVNTHGSFECYCMDGYLPRNGPEPFHPTTDATSCTEIDCGTPPEVPDGYIIGNYTSSLGSQVRYACREGFFSVPEDTVSSCTGLGTWESPKLHCQEINCGNPPEMRHAILVGNHSSRLGGVARYVCQEGFESPGGKITSVCTEKGTWRESTLTCTEILTKINDVSLFNDTCVRWQINSRRINPKISYVISIKGQRLDPMESVREETVNLTTDSRTPEVCLALYPGTNYTVNISTAPPRRSMPAVIGFQTAEVDLLEDDGSFNISIFNETCLKLNRRSRKVGSEHMYQFTVLGQRWYLANFSHATSFNFTTREQVPVVCLDLYPTTDYTVNVTLLRSPKRHSVQITIATPPAVKQTISNISGFNETCLRWRSIKTADMEEMYLFHIWGQRWYQKEFAQEMTFNISSSSRDPEVCLDLRPGTNYNVSLRALSSELPVVISLTTQITEPPLPEVEFFTVHRGPLPRLRLRKAKEKNGPISSYQVLVLPLALQSTFSCDSEGASSFFSNASDADGYVAAELLAKDVPDDAMEIPIGDRLYYGEYYNAPLKRGSDYCIILRITSEWNKVRRHSCAVWAQVKEIPCNCNFLRLHIHRANSGDTQIRHSCCCRWRVLDWVPWLL

SEQ ID NO: 38606 - protein, 747 aa, Homo sapiens
MGRGPWDAGPSRRLLPLLLLLGLARGAAGAPGPDGLDVCATCHEHATCQQREGKKICICNYGFVGNGRTQCVDKNECQFGATLVCGNHTSCHNTPGGFYCICLEGYRATNNNKTFIPNDGTFCTDIDECEVSGLCRHGGRCVNTHGSFECYCMDGYLPRNGPEPFHPTTDATSCTEIDCGTPPEVPDGYIIGNYTSSLGSQVRYACREGFFSVPEDTVSSCTGLGTWESPKLHCQEINCGNPPEMRHAILVGNHSSRLGGVARYVCQEGFESPGGKITSVCTEKGTWRESTLTCTEILTKINDVSLFNDTCVRWQINSRRINPKISYVISIKGQRLDPMESVREETVNLTTDSRTPEVCLALYPGTNYTVNISTAPPRRSMPAVIGFQTAEVDLLEDDGSFNISIFNETCLKLNRRSRKVGSEHMYQFTVLGQRWYLANFSHATSFNFTTREQVPVVCLDLYPTTDYTVNVTLLRSPKRHSVQITIATPPAVKQTISNISGFNETCLRWRSIKTADMEEMYLFHIWGQRWYQKEFAQEMTFNISSSSRDPEVCLDLRPGTNYNVSLRALSSELPVVISLTTQITEPPLPEVEFFTVHRGPLPRLRLRKAKEKNGPISSYQVLVLPLALQSTFSCDSEGASSFFSNASDADGYVAAELLAKDVPDDAMEIPIGDRLYYGEYYNAPLKRGSDYCIILRITSEWNKIRHSCCCRWRVLDWVPWLLLQMAGVGLGSLAVVIILTFLSFSAV

SEQ ID NO: 38607 - protein, 183 aa, Homo sapiens
MKLLSLVAVVGCLLVPPAEANKSSEDIRCKCICPPYRNISGHIYNQNVSQKDCNCLHVVEPMPVPGHDVEAYCLLCECRYEERSTTTIKVIIVIYLSVVGALLLYMAFLMLVDPLIRKPDAYTEQLHNEEENEDARSMAAAAASLGGPRANTVLERVEGAQQRWKLQVQEQRKTVFDRHKMLS

SEQ ID NO: 38608 - protein, 2419 aa, Homo sapiens
MEQFPKETVVESSGPKVLETAEEIQERRQEVLTRYQSFKERVAERGQKLEDSYHLQVFKRDADDLGKWIMEKVNILTDKSYEDPTNIQGKYQKHQSLEAEVQTKSRLMSELEKTREERFTMGHSAHEETKAHIEELRHLWDLLLELTLEKGDQLLRALKFQQYVQECADILEWIGDKEAIATSVELGEDWERTEVLHKKFEDFQVELVAKEGRVVEVNQYANECAEENHPDLPLIQSKQNEVNAAWERLRGLALQRQKALSNAANLQRFKRDVTEAIQWIKEKEPVLTSEDYGKDLVASEGLFHSHKGLERNLAVMSDKVKELCAKAEKLTLSHPSDAPQIQEMKEDLVSSWEHIRALATSRYEKLQATYWYHRFSSDFDELSGWMNEKTAAINADELPTDVAGGEVLLDRHQQHKHEIDSYDDRFQSADETGQDLVNANHEASDEVREKMEILDNNWTALLELWDERHRQYEQCLDFHLFYRDSEQVDSWMSRQEAFLENEDLGNSLGSAEALLQKHEDFEEAFTAQEEKIITVDKTATKLIGDDHYDSENIKAIRDGLLARRDALREKAATRRRLLKESLLLQKLYEDSDDLKNWINKKKKLADDEDYKDIQNLKSRVQKQQVFEKELAVNKTQLENIQKTGQEMIEGGHYASDNVTTRLSEVASLWEELLEATKQKGTQLHEANQQLQFENNAEDLQRWLEDVEWQVTSEDYGKGLAEVQNRLRKHGLLESAVAARQDQVDILTDLAAYFEEIGHPDSKDIRARQESLVCRFEALKEPLATRKKKLLDLLHLQLICRDTEDEEAWIQETEPSATSTYLGKDLIASKKLLNRHRVILENIASHEPRIQEITERGNKMVEEGHFAAEDVASRVKSLNQNMESLRARAARRQNDLEANVQFQQYLADLHEAETWIREKEPIVDNTNYGADEEAAGALLKKHEAFLLDLNSFGDSMKALRNQANACQQQQAAPVEGVAGEQRVMALYDFQARSPREVTMKKGDVLTLLSSINKDWWKVEAADHQGIVPAVYVRRLAHDEFPMLPQRRREEPGNITQRQEQIENQYRSLLDRAEERRRRLLQRYNEFLLAYEAGDMLEWIQEKKAENTGVELDDVWELQKKFDEFQKDLNTNEPRLRDINKVADDLLFEGLLTPEGAQIRQELNSRWGSLQRLADEQRQLLGSAHAVEVFHREADDTKEQIEKKCQALSAADPGSDLFSVQALQRRHEGFERDLVPLGDKVTILGETAERLSESHPDATEDLQRQKMELNEAWEDLQGRTKDRKESLNEAQKFYLFLSKARDLQNWISSIGGMVSSQELAEDLTGIEILLERHQEHRADMEAEAPTFQALEDFSAELIDSGHHASPEIEKKLQAVKLERDDLEKAWEKRKKILDQCLELQMFQGNCDQVESWMVARENSLRSDDKSSLDSLEALMKKRDDLDKAITAQEGKITDLEHFAESLIADEHYAKEEIATRLQRVLDRWKALKAQLIDERTKLGDYANLKQFYRDLEELEEWISEMLPTACDESYKDATNIQRKYLKHQTFAHEVDGRSEQVHGVINLGNSLIECSACDGNEEAMKEQLEQLKEHWDHLLERTNDKGKKLNEASRQQRFNTSIRDFEFWLSEAETLLAMKDQARDLASAGNLLKKHQLLEREMLAREDALKDLNTLAEDLLSSGTFNVDQIVKKKDNVNKRFLNVQELAAAHHEKLKEAYALFQFFQDLDDEESWIEEKLIRVSSQDYGRDLQGVQNLLKKHKRLEGELVAHEPAIQNVLDMAEKLKDKAAVGQEEIQLRLAQFVEHWEKLKELAKARGLKLEESLEYLQFMQNAEEEEAWINEKNALAVRGDCGDTLAATQSLLMKHEALENDFAVHETRVQNVCAQGEDILNKVLQEESQNKEISSKIEALNEKTPSLAKAIAAWKLQLEDDYAFQEFNWKADVVEAWIADKETSLKTNGNGADLGDFLTLLAKQDTLDASLQSFQQERLPEITDLKDKLISAQHNQSKAIEERYAALLKRWEQLLEASAVHRQKLLEKQLPLQKAEDLFVEFAHKASALNNWCEKMEENLSEPVHCVSLNEIRQLQKDHEDFLASLARAQADFKCLLELDQQIKALGVPSSPYTWLTVEVLERTWKHLSDIIEEREQELQKEEARQVKNFEMCQEFEQNASTFLQWILETRAYFLDGSLLKETGTLESQLEANKRKQKEIQAMKRQLTKIVDLGDNLEDALILDIKYSTIGLAQQWDQLYQLGLRMQHNLEQQIQAKDIKGVSEETLKEFSTIYKHFDENLTGRLTHKEFRSCLRGLNYYLPMVEEDEHEPKFEKFLDAVDPGRKGYVSLEDYTAFLIDKESENIKSSDEIENAFQALAEGKSYITKEDMKQALTPEQVSFCATHMQQYMDPRGRSHLSGYDYVGFTNSYFGN

SEQ ID NO: 38609 - protein, 2416 aa, Homo sapiens
MEQFPKETVVESSGPKVLETAEEIQERRQEVLTRYQSFKERVAERGQKLEDSYHLQVFKRDADDLGKWIMEKVNILTDKSYEDPTNIQGKYQKHQSLEAEVQTKSRLMSELEKTREERFTMGHSAHEETKAHIEELRHLWDLLLELTLEKGDQLLRALKFQQYVQECADILEWIGDKEAIATSVELGEDWERTEVLHKKFEDFQVELVAKEGRVVEVNQYANECAEENHPDLPLIQSKQNEVNAAWERLRGLALQRQKALSNAANLQRFKRDVTEAIQWIKEKEPVLTSEDYGKDLVASEGLFHSHKGLERNLAVMSDKVKELCAKAEKLTLSHPSDAPQIQEMKEDLVSSWEHIRALATSRYEKLQATYWYHRFSSDFDELSGWMNEKTAAINADELPTDVAGGEVLLDRHQQHKHEIDSYDDRFQSADETGQDLVNANHEASDEVREKMEILDNNWTALLELWDERHRQYEQCLDFHLFYRDSEQVDSWMSRQEAFLENEDLGNSLGSAEALLQKHEDFEEAFTAQEEKIITVDKTATKLIGDDHYDSENIKAIRDGLLARRDALREKAATRRRLLKESLLLQKLYEDSDDLKNWINKKKKLADDEDYKDIQNLKSRVQKQQVFEKELAVNKTQLENIQKTGQEMIEGGHYASDNVTTRLSEVASLWEELLEATKQKGTQLHEANQQLQFENNAEDLQRWLEDVEWQVTSEDYGKGLAEVQNRLRKHGLLESAVAARQDQVDILTDLAAYFEEIGHPDSKDIRARQESLVCRFEALKEPLATRKKKLLDLLHLQLICRDTEDEEAWIQETEPSATSTYLGKDLIASKKLLNRHRVILENIASHEPRIQEITERGNKMVEEGHFAAEDVASRVKSLNQNMESLRARAARRQNDLEANVQFQQYLADLHEAETWIREKEPIVDNTNYGADEEAAGALLKKHEAFLLDLNSFGDSMKALRNQANACQQQQAAPVEGVAGEQRVMALYDFQARSPREVTMKKGDVLTLLSSINKDWWKVEAADHQGIVPAVYVRRLAHDEFPMLPQRRREEPGNITQRQEQIENQYRSLLDRAEERRRRLLQRYNEFLLAYEAGDMLEWIQEKKAENTGVELDDVWELQKKFDEFQKDLNTNEPRLRDINKVADDLLFEGLLTPEGAQIRQELNSRWGSLQRLADEQRQLLGSAHAVEVFHREADDTKEQIEKKCQALSAADPGSDLFSVQALQRRHEGFERDLVPLGDKVTILGETAERLSESHPDATEDLQRQKMELNEAWEDLQGRTKDRKESLNEAQKFYLFLSKARDLQNWISSIGGMVSSQELAEDLTGIEILLERHQEHRADMEAEAPTFQALEDFSAELIDSGHHASPEIEKKLQAVKLERDDLEKAWEKRKKILDQCLELQMFQGNCDQVESWMVARENSLRSDDKSSLDSLEALMKKRDDLDKAITAQEGKITDLEHFAESLIADEHYAKEEIATRLQRVLDRWKALKAQLIDERTKLGDYANLKQFYRDLEELEEWISEMLPTACDESYKDATNIQRKYLKHQTFAHEVDGRSEQVHGVINLGNSLIECSACDGNEEAMKEQLEQLKEHWDHLLERTNDKGKKLNEASRQQRFNTSIRDFEFWLSEAETLLAMKDQARDLASAGNLLKKHQLLEREMLAREDALKDLNTLAEDLLSSGTFNVDQIVKKKDNVNKRFLNVQELAAAHHEKLKEAYALFQFFQDLDDEESWIEEKLIRVSSQDYGRDLQGVQNLLKKHKRLEGELVAHEPAIQNVLDMAEKLKDKAAVGQEEIQLRLAQFVEHWEKLKELAKARGLKLEESLEYLQFMQNAEEEEAWINEKNALAVRGDCGDTLAATQSLLMKHEALENDFAVHETRVQNVCAQGEDILNKEESQNKEISSKIEALNEKTPSLAKAIAAWKLQLEDDYAFQEFNWKADVVEAWIADKETSLKTNGNGADLGDFLTLLAKQDTLDASLQSFQQERLPEITDLKDKLISAQHNQSKAIEERYAALLKRWEQLLEASAVHRQKLLEKQLPLQKAEDLFVEFAHKASALNNWCEKMEENLSEPVHCVSLNEIRQLQKDHEDFLASLARAQADFKCLLELDQQIKALGVPSSPYTWLTVEVLERTWKHLSDIIEEREQELQKEEARQVKNFEMCQEFEQNASTFLQWILETRAYFLDGSLLKETGTLESQLEANKRKQKEIQAMKRQLTKIVDLGDNLEDALILDIKYSTIGLAQQWDQLYQLGLRMQHNLEQQIQAKDIKGVSEETLKEFSTIYKHFDENLTGRLTHKEFRSCLRGLNYYLPMVEEDEHEPKFEKFLDAVDPGRKGYVSLEDYTAFLIDKESENIKSSDEIENAFQALAEGKSYITKEDMKQALTPEQVSFCATHMQQYMDPRGRSHLSGYDYVGFTNSYFGN

SEQ ID NO: 38610 - protein, 1029 aa, Homo sapiens
MADKTPGGSQKASSKTRSSDVHSSGSSDAHMDASGPSDSDMPSRTRPKSPRKHNYRNESARESLCDSPHQNLSRPLLENKLKAFSIGKMSTAKRTLSKKEQEELKKKEDEKAAAEIYEEFLAAFEGSDGNKVKTFVRGGVVNAAKEEHETDEKRGKIYKPSSRFADQKNPPNQSSNERPPSLLVIETKKPPLKKGEKEKKKSNLELFKEELKQIQEERDERHKTKGRLSRFEPPQSDSDGQRRSMDAPSRRNRSSGVLDDYAPGSHDVGDPSTTNLYLGNINPQMNEEMLCQEFGRFGPLASVKIMWPRTDEERARERNCGFVAFMNRRDAERALKNLNGKMIMSFEMKLGWGKAVPIPPHPIYIPPSMMEHTLPPPPSGLPFNAQPRERLKNPNAPMLPPPKNKEDFEKTLSQAIVKVVIPTERNLLALIHRMIEFVVREGPMFEAMIMNREINNPMFRFLFENQTPAHVYYRWKLYSILQGDSPTKWRTEDFRMFKNGSFWRPPPLNPYLHGMSEEQETEAFVEEPSKKGALKEEQRDKLEEILRGLTPRKNDIGDAMVFCLNNAEAAEEIVDCITESLSILKTPLPKKIARLYLVSDVLYNSSAKVANASYYRKFFETKLCQIFSDLNATYRTIQGHLQSENFKQRVMTCFRAWEDWAIYPEPFLIKLQNIFLGLVNIIEEKETEDVPDDLDGAPIEEELDGAPLEDVDGIPIDATPIDDLDGVPIKSLDDDLDGVPLDATEDSKKNEPIFKVAPSKWEAVDESELEAQAVTTSKWELFDQHEESEEEENQNQEEESEDEEDTQSSKSEEHHLYSNPIKEEMTESKFSKYSEMSEEKRAKLREIELKVMKFQDELESGKRPKKPGQSFQEQVEHYRDKLLQREKEKELERERERDKKDKEKLESRSKDKKEKDECTPTRKERKRRHSTSPSPSRSSSGRRVKSPSPKSERSERSERSHKESSRSRSSHKDSPRDVSKKAKRSPSGSRTPKRSRRSRSRSPKKSGKKSRSQSRSPHRSHKKSKKNKH

SEQ ID NO: 38611 - protein, 1028 aa, Homo sapiens
MADKTPGGSQKASSKTRSSDVHSSGSSDAHMDASGPSDSDMPSRTRPKSPRKHNYRNESARESLCDSPHQNLSRPLLENKLKAFSIGKMSTAKRTLSKKEQEELKKKEDEKAAAEIYEEFLAAFEGSDGNKVKTFVRGGVVNAAKEEHETDEKRGKIYKPSSRFADQKNPPNQSSNERPPSLLVIETKKPPLKKGEKEKKKSNLELFKEELKQIQEERDERHKTKGRLSRFEPPQSDSDGQRRSMDAPSRRNRSSVLDDYAPGSHDVGDPSTTNLYLGNINPQMNEEMLCQEFGRFGPLASVKIMWPRTDEERARERNCGFVAFMNRRDAERALKNLNGKMIMSFEMKLGWGKAVPIPPHPIYIPPSMMEHTLPPPPSGLPFNAQPRERLKNPNAPMLPPPKNKEDFEKTLSQAIVKVVIPTERNLLALIHRMIEFVVREGPMFEAMIMNREINNPMFRFLFENQTPAHVYYRWKLYSILQGDSPTKWRTEDFRMFKNGSFWRPPPLNPYLHGMSEEQETEAFVEEPSKKGALKEEQRDKLEEILRGLTPRKNDIGDAMVFCLNNAEAAEEIVDCITESLSILKTPLPKKIARLYLVSDVLYNSSAKVANASYYRKFFETKLCQIFSDLNATYRTIQGHLQSENFKQRVMTCFRAWEDWAIYPEPFLIKLQNIFLGLVNIIEEKETEDVPDDLDGAPIEEELDGAPLEDVDGIPIDATPIDDLDGVPIKSLDDDLDGVPLDATEDSKKNEPIFKVAPSKWEAVDESELEAQAVTTSKWELFDQHEESEEEENQNQEEESEDEEDTQSSKSEEHHLYSNPIKEEMTESKFSKYSEMSEEKRAKLREIELKVMKFQDELESGKRPKKPGQSFQEQVEHYRDKLLQREKEKELERERERDKKDKEKLESRSKDKKEKDECTPTRKERKRRHSTSPSPSRSSSGRRVKSPSPKSERSERSERSHKESSRSRSSHKDSPRDVSKKAKRSPSGSRTPKRSRRSRSRSPKKSGKKSRSQSRSPHRSHKKSKKNKH

SEQ ID NO: 38612 - protein, 620 aa, Homo sapiens
MLLCYRHLKTKRILRRNLLALIHRMIEFVVREGPMFEAMIMNREINNPMFRFLFENQTPAHVYYRWKLYSILQGDSPTKWRTEDFRMFKNGSFWRPPPLNPYLHGMSEEQETEAFVEEPSKKGALKEEQRDKLEEILRGLTPRKNDIGDAMVFCLNNAEAAEEIVDCITESLSILKTPLPKKIARLYLVSDVLYNSSAKVANASYYRKFFETKLCQIFSDLNATYRTIQGHLQSENFKQRVMTCFRAWEDWAIYPEPFLIKLQNIFLGLVNIIEEKETEDVPDDLDGAPIEEELDGAPLEDVDGIPIDATPIDDLDGVPIKSLDDDLDGVPLDATEDSKKNEPIFKVAPSKWEAVDESELEAQAVTTSKWELFDQHEESEEEENQNQEEESEDEEDTQSSKSEEHHLYSNPIKEEMTESKFSKYSEMSEEKRAKLREIELKVMKFQDELESGKRPKKPGQSFQEQVEHYRDKLLQREKEKELERERERDKKDKEKLESRSKDKKEKDECTPTRKERKRRHSTSPSPSRSSSGRRVKSPSPKSERSERSERSHKESSRSRSSHKDSPRDVSKKAKRSPSGSRTPKRSRRSRSRSPKKSGKKSRSQSRSPHRSHKKSKKNKH

SEQ ID NO: 38613 - protein, 2443 aa, Homo sapiens
MAAEEGVASAASAGGSWGTAAMGRVLPMLLVPVPAEAMGQLGSRAQLRTQPEALGSLTAAGSLQVLSLTPGSRGGGRCCLEGPFWHFLWEDSRNSSTPTEKPKLLALGENYELLIYEFNLKDGRCDATILYSCSREALQKLIDDQDISISLLSLRILSFHNNTSLLFINKCVILHIIFPERDAAIRVLNCFTLPLPAQAVDMIIDTQLCRGILFVLSSLGWIYIFDVVDGTYVAHVDLALHKEDMCNEQQQEPAKISSFTSLKVSQDLDVAVIVSSSNSAVALNLNLYFRQHPGHLLCERILEDLPIQGPKGVDEDDPVNSAYNMKLAKFSFQIDRSWKAQLSSLNETIKNSKLEVSCCAPWFQDILHLESPESGNHSTSVQSWAFIPQDIMHGQYNVLQKDHAKTSDPGRSWKIMHISEQEEPIELKCVSVTGFTALFTWEVERMGYTITLWDLETQGMQCFSLGTKCIPVDSSGDQQLCFVLTENGLSLILFGLTQEEFLNRLMIHGSASTVDTLCHLNGWGRCSIPIHALEAGIENRQLDTVNFFLKSKENLFNPSSKSSVSDQFDHLSSHLYLRNVEELIPALDLLCSAIRESYSEPQSKHFSEQLLNLTLSFLNNQIKELFIHTEELDEHLQKGVNILTSYINELRTFMIKFPWKLTDAIDEYDVHENVPKVKESNIWKKLSFEEVIASAILNNKIPEAQTFFRIDSHSAQKLEELIGIGLNLVFDNLKKNNIKEASELLKNMGFDVKGQLLKICFYTTNKNIRDFLVEILKEKNYFSEKEKRTIDFVHQVEKLYLGHFQENMQIQSFPRYWIKEQDFFKHKSVLDSFLKYDCKDEFNKQDHRIVLNWALWWDQLTQESILLPRISPEEYKSYSPEALWRYLTARHDWLNIILWIGEFQTQHSYASLQQNKWPLLTVDVINQNTSCNNYMRNEILDKLARNGVFLASELEDFECFLLRLSRIGGVIQDTLPVQNYKTKEGWDFHSQFILYCLEHSLQHLLYVYLDCYKLSPENCPFLEKKELHEAHPWFEFLVQCRQVASNLTDPKLIFQASLANAQILIPTNQASVSSMLLEGHTLLALATTMYSPGGVSQVVQNEENENCLKKVDPQLLKMALTPYPKLKTALFPQCTPPSVLPSDITIYHLIQSLSPFDPSRLFGWQSANTLAIGDAWSHLPHFSSPDLVNKYAIVERLNFAYYLHNGRPSFAFGTFLVQELIKSKTPKQLIQQVGNEAYVIGLSSFHIPSIGAACVCFLELLGLDSLKLRVDMKVANIILSYKCRNEDAQYSFIRESVAEKLSKLADGEKTTTEELLVLLEEGTWNSIQQQEIKRLSSESSSQWALVVQFCRLHNMKLSISYLRECAKANDWLQFIIHSQLHNYHPAEVKSLIQYFSPVIQDHLRLAFENLPSVPTSKMDSDQVCNKCPQELQGSKQEMTDLFEILLQCSEEPDSWHWLLVEAVKQQAPILSVLASCLQGASAISCLCVWIITSVEDNVATEAMGHIQDSTEDHTWNLEDLSVIWRTLLTRQKSKTLIRGFQLFFKDSPLLLVMEMYELCMFFRNYKEAEAKLLEFQKSLETLNTAATKVHPVIPAMWLEDQVCFLLKLMLQQCKTQYELGKLLQLFVEREHLFSDGPDVKKLCILCQILKDTSIAINHTIITSYSIENLQHECRSILERLQTDGQFALARRVAELAELPVDNLVIKEITQEMQTLKHIEQWSLKQARIDFWKKCHENFKKNSISSKAASSFFSTQAHVACEHPTGWSSMEERHLLLTLAGHWLAQEDVVPLDKLEELEKQIWLCRITQHTLGRNQEETEPRFSRQISTSGELSFDSLASEFSFSKLAALNTSKYLELNSLPSKETCENRLDWKEQESLNFLIGRLLDDGCVHEASRVCRYFHFYNPDVALVLHCRALASGEASMEDLHPEIHALLQSAELLEEEAPDIPLRRVHSTSSLDSQKFVTVPSSNEVVTNLEVLTSKCLHGKNYCRQVLCLYDLAKELGCSYTDVAAQDGEAMLRKILASQQPDRCKRAQAFISTQGLKPDTVAELVAEEVTRELLTSSQGTGHKQMFNPTEESQTFLQLTTLCQDRTLVGMKLLDKISSVPHGELSCTTELLILAHHCFTLTCHMEGIIRVLQAAHMLTDNHLAPSEEYGLVVRLLTGIGRYNEMTYIFDLLHKKHYFEVLMRKKLDPSGTLKTALLDYIKRCRPGDSEKHNMIALCFSMCREIGENHEAAARIQLKLIESQPWEDSLKDGHQLKQLLLKALTLMLDAAESYAKDSCVRQAQHCQRLTKLITLQIHFLNTGQNTMLINLGRHKLMDCILALPRFYQASIVAEAYDFVPDWAEILYQQVILKGDFNYLEEFKQQRLLKSSIFEEISKKYKQHQPTDMVMENLKKLLTYCEDVYLYYKLAYEHKFYEIVNVLLKDPQTGCCLKDMLAG

SEQ ID NO: 38614 - protein, 2079 aa, Homo sapiens
MAAEEGVASAASAGGSWGTAAMGRVLPMLLVPVPAEAMGQLGSRAQLRTQPEALGSLTAAGSLQVLSLTPGSRGGGRCCLEGPFWHFLWEDSRNSSTPTEKPKLLALGENYELLIYEFNLKDGRCDATILYSCSREALQKLIDDQDISISLLSLRILSFHNNTSLLFINKCVILHIIFPERDAAIRVLNCFTLPLPAQAVDMIIDTQLCRGILFVLSSLGWIYIFDVVDGTYVAHVDLALHKEDMCNEQQQEPAKISSFTSLKVSQDLDVAVIVSSSNSAVALNLNLYFRQHPGHLLCERILEDLPIQGPKGVDEDDPVNSAYNMKLAKFSFQIDRSWKAQLSSLNETIKNSKLEVSCCAPWFQDILHLESPESGNHSTSVQSWAFIPQDIMHGQYNVLQKDHAKTSDPGRSWKIMHISEQEEPIELKCVSVTGFTALFTWEVERMGYTITLWDLETQGMQCFSLGTKCIPVDSSGDQQLCFVLTENGLSLILFGLTQEEFLNRLMIHGSASTVDTLCHLNGWGRCSIPIHALEAGIENRQLDTVNFFLKSKENLFNPSSKSSVSDQFDHLSSHLYLRNVEELIPALDLLCSAIRESYSEPQSKHFSEQLLNLTLSFLNNQIKELFIHTEELDEHLQKGVNILTSYINELRTFMIKFPWKLTDAIDEYDVHENVPKVKESNIWKKLSFEEVIASAILNNKIPEAQTFFRIDSHSAQKLEELIGIGLNLVFDNLKKNNIKEASELLKNMGFDVKGQLLKICFYTTNKNIRDFLVEILKEKNYFSEKEKRTIDFVHQVEKLYLGHFQENMQIQSFPRYWIKEQDFFKHKSVLDSFLKYDCKDEFNKQDHRIVLNWALWWDQLTQESILLPRISPEEYKSYSPEALWRYLTARHDWLNIILWIGEFQTQHSYASLQQNKWPLLTVDVINQNTSCNNYMRNEILDKLARNGVFLASELEDFECFLLRLSRIGGVIQDTLPVQNYKTKEGWDFHSQFILYCLEHSLQHLLYVYLDCYKLSPENCPFLEKKELHEAHPWFEFLVQCRQVASNLTDPKLIFQASLANAQILIPTNQASVSSMLLEGHTLLALATTMYSPGGVSQVVQNEENENCLKKVDPQLLKMALTPYPKLKTALFPQCTPPSVLPSDITIYHLIQSLSPFDPSRLFGWQSANTLAIGDAWSHLPHFSSPDLVNKYAIVERLNFAYYLHNGRPSFAFGTFLVQELIKSKTPKQLIQQVGNEAYVIGLSSFHIPSIGAACVCFLELLGLDSLKLRVDMKVANIILSYKCRNEDAQYSFIRESVAEKLSKLADGEKTTTEELLVLLEEGTWNSIQQQEIKRLSSESSSQWALVVQFCRLHNMKLSISYLRECAKANDWLQFIIHSQLHNYHPAEVKSLIQYFSPVIQDHLRLAFENLPSVPTSKMDSDQVCNKCPQELQGSKQEMTDLFEILLQCSEEPDSWHWLLVEAVKQQAPILSVLASCLQGASAISCLCVWIITSVEDNVATEAMGHIQDSTEDHTWNLEDLSVIWRTLLTRQKSKTLIRGFQLFFKDSPLLLVMEMYELCMFFRNYKEAEAKLLEFQKSLETLNTAATKVHPVIPAMWLEDQVCFLLKLMLQQCKTQYELGKLLQLFVEREHLFSDGPDVKKLCILCQILKDTSIAINHTIITSYSIENLQHECRSILERLQTDGQFALARRVAELAELPVDNLVIKEITQEMQTLKHIEQWSLKQARIDFWKKCHENFKKNSISSKAASSFFSTQAHVACEHPTGWSSMEERHLLLTLAGHWLAQEDVVPLDKLEELEKQIWLCRITQHTLGRNQEETEPRFSRQISTSGELSFDSLASEFSFSKLAALNTSKYLELNSLPSKETCENRLDWKEQESLNFLIGRLLDDGCVHEASRVCRYFHFYNPDVALVLHCRALASGEASMEDLHPEIHALLQSAELLEEEAPDIPLRRVHSTSSLDSQKFVTVPSSNEVVTNLEVLTSKCLHGKNYCRQVLCLYDLAKELGCSYTDVAAQDGEAMLRKILASQQPDRCKRAQAFISTQGLKPDTVAELVAEEVTRELLTSSQGTGALPPGDSQPL

SEQ ID NO: 38615 - protein, 2330 aa, Homo sapiens
MAAEEGVASAASAGGSWGTAAMGRVLPMLLVPVPAEAMGQLGSRAQLRTQPEALGSLTAAGSLQVLSLTPGSRGGGRCCLEGPFWHFLWEDSRNSSTPTEKPKLLALGENYELLIYEFNLKDGRCDATILYSCSREALQKLIDDQDISISLLSLRILSFHNNTSLLFINKCVILHIIFPERDAAIRVLNCFTLPLPAQAVDMIIDTQLCRGILFVLSSLGWIYIFDVVDGTYVAHVDLALHKEDMCNEQQQEPAKISSFTSLKVSQDLDVAVIVSSSNSAVALNLNLYFRQHPGHLLCERILEDLPIQGPKGVDEDDPVNSAYNMKLAKFSFQIDRSWKAQLSSLNETIKNSKLEVSCCAPWFQDILHLESPESGNHSTSVQSWAFIPQDIMHGQYNVLQKDHAKTSDPGRSWKIMHISEQEEPIELKCVSVTGFTALFTWEVERMGYTITLWDLETQGMQCFSLGTKCIPVDSSGDQQLCFVLTENGLSLILFGLTQEEFLNRLMIHGSASTVDTLCHLNGWGRCSIPIHALEAGIENRQLDTVNFFLKSKENLFNPSSKSSVSDQFDHLSSHLYLRNVEELIPALDLLCSAIRESYSEPQSKHFSEQLLNLTLSFLNNQIKELFIHTEELDEHLQKGVNILTSYINELRTFMIKFPWKLTDAIDEYDVHENVPKVKESNIWKKLSFEEVIASAILNNKIPEAQTFFRIDSHSAQKLEELIGIGLNLVFDNLKKNNIKEASELLKNMGFDVKGQLLKICFYTTNKNIRDFLVEILKEKNYFSEKEKRTIDFVHQVEKLYLGHFQENMQIQSFPRYWIKEQDFFKHKSVLDSFLKYDCKDEFNKQDHRIVLNWALWWDQLTQESILLPRISPEEYKSYSPEALWRYLTARHDWLNIILWIGEFQTQHSYASLQQNKWPLLTVDVINQNTSCNNYMRNEILDKLARNGVFLASELEDFECFLLRLSRIGGVIQDTLPVQNYKTKEGWDFHSQFILYCLEHSLQHLLYVYLDCYKLSPENCPFLEKKELHEAHPWFEFLVQCRQVASNLTDPKLIFQASLANAQILIPTNQASVSSMLLEGHTLLALATTMYSPGGVSQVVQNEENENCLKKVDPQLLKMALTPYPKLKTALFPQCTPPSVLPSDITIYHLIQSLSPFDPSRLFGWQSANTLAIGDAWSHLPHFSSPDLVNKYAIVERLNFAYYLHNGRPSFAFGTFLVQELIKSKTPKQLIQQVGNEAYVIGLSSFHIPSIGAACVCFLELLGLDSLKLRVDMKVANIILSYKCRNEDAQYSFIRESVAEKLSKLADGEKTTTEELLVLLEEGTWNSIQQQEIKRLSSESSSQWALVVQFCRLHNMKLSISYLRECAKANDWLQFIIHSQLHNYHPAEVKSLIQYFSPVIQDHLRLAFENLPSVPTSKMDSDQVCNKCPQELQGSKQEMTDLFEILLQCSEEPDSWHWLLVEAVKQQAPILSVLASCLQGASAISCLCVWIITSVEDNVATEAMGHIQDSTEDHTWNLEDLSVIWRTLLTRQKSKTLIRGFQLFFKDSPLLLVMEMYELCMFFRNYKEAEAKLLEFQKSLETLNTAATKVHPVIPAMWLEDQVCFLLKLMLQQCKTQYELGKLLQLFVEREHLFSDGPDVKKLCILCQILKDTSIAINHTIITSYSIENLQHECRSILERLQTDGQFALARRVAELAELPVDNLVIKEITQEMQTLKHIEQWSLKQARIDFWKKCHENFKKNSISSKAASSFFSTQAHVACEHPTGWSSMEERHLLLTLAGHWLAQEDVVPLDKLEELEKQIWLCRITQHTLGRNQEETEPRFSRQISTSGELSFDSLASEFSFSKLAALNTSKYLELNSLPSKETCENRLDWKEQESLNFLIGRLLDDGCVHEASRVCRYFHFYNPDVALVLHCRALASGEASMEDLHPEIHALLQSAELLEEEAPDIPLRRVHSRHKQMFNPTEESQTFLQLTTLCQDRTLVGMKLLDKISSVPHGELSCTTELLILAHHCFTLTCHMEGIIRVLQAAHMLTDNHLAPSEEYGLVVRLLTGIGRYNEMTYIFDLLHKKHYFEVLMRKKLDPSGTLKTALLDYIKRCRPGDSEKHNMIALCFSMCREIGENHEAAARIQLKLIESQPWEDSLKDGHQLKQLLLKALTLMLDAAESYAKDSCVRQAQHCQRLTKLITLQIHFLNTGQNTMLINLGRHKLMDCILALPRFYQASIVAEAYDFVPDWAEILYQQVILKGDFNYLEEFKQQRLLKSSIFEEISKKYKQHQPTDMVMENLKKLLTYCEDVYLYYKLAYEHKFYEIVNVLLKDPQTGCCLKDMLAG

SEQ ID NO: 38616 - protein, 577 aa, Homo sapiens
MSQVQVQVQNPSAALSGSQILNKNQSLLSQPLMSIPSTTSSLPSENAGRPIQNSALPSASITSTSAAAESITPTVELNALCMKLGKKPMYKPVDPYSRMQSTYNYNMRGGAYPPRYFYPFPVPPLLYQVELSVGGQQFNGKGKTRQAAKHDAAAKALRILQNEPLPERLEVNGRESEEENLNKSEISQVFEIALKRNLPVNFEVARESGPPHMKNFVTKVSVGEFVGEGEGKSKKISKKNAAIAVLEELKKLPPLPAVERVKPRIKKKTKPIVKPQTSPEYGQGINPISRLAQIQQAKKEKEPEYTLLTERGLPRRREFVMQVKVGNHTAEGTGTNKKVAKRNAAENMLEILGFKVPQAQPTKPALKSEEKTPIKKPGDGRKVTFFEPGSGDENGTSNKEDEFRMPYLSHQQLPAGILPMVPEVAQAVGVSQGHHTKDFTRAAPNPAKATVTAMIARELLYGGTSPTAETILKNNISSGHVPHGPLTRPSEQLDYLSRVQGFQVEYKDFPKNNKNEFVSLINCSSQPPLISHGIGKDVESCHDMAALNILKLLSELDQQSTEMPRTGNGPMSVCGRC

SEQ ID NO: 38617 - protein, 496 aa, Homo sapiens
MKLGKKPMYKPVDPYSRMQSTYNYNMRGGAYPPRYFYPFPVPPLLYQVELSVGGQQFNGKGKTRQAAKHDAAAKALRILQNEPLPERLEVNGRESEEENLNKSEISQVFEIALKRNLPVNFEVARESGPPHMKNFVTKVSVGEFVGEGEGKSKKISKKNAAIAVLEELKKLPPLPAVERVKPRIKKKTKPIVKPQTSPEYGQGINPISRLAQIQQAKKEKEPEYTLLTERGLPRRREFVMQVKVGNHTAEGTGTNKKVAKRNAAENMLEILGFKVPQAQPTKPALKSEEKTPIKKPGDGRKVTFFEPGSGDENGTSNKEDEFRMPYLSHQQLPAGILPMVPEVAQAVGVSQGHHTKDFTRAAPNPAKATVTAMIARELLYGGTSPTAETILKNNISSGHVPHGPLTRPSEQLDYLSRVQGFQVEYKDFPKNNKNEFVSLINCSSQPPLISHGIGKDVESCHDMAALNILKLLSELDQQSTEMPRTGNGPMSVCGRC

SEQ ID NO: 38618 - protein, 502 aa, Homo sapiens
MKLGKKPMYKPVDPYSRMQSTYNYNMRGGAYPPRYFYPFPVPPLLYQVELSVGGQQFNGKGKTRQAAKHDAAAKALRILQNEPLPERLEVNGRESEEENLNKSEISQVFEIALKRNLPVNFESFPLKQVARESGPPHMKNFVTKVSVGEFVGEGEGKSKKISKKNAAIAVLEELKKLPPLPAVERVKPRIKKKTKPIVKPQTSPEYGQGINPISRLAQIQQAKKEKEPEYTLLTERGLPRRREFVMQVKVGNHTAEGTGTNKKVAKRNAAENMLEILGFKVPQAQPTKPALKSEEKTPIKKPGDGRKVTFFEPGSGDENGTSNKEDEFRMPYLSHQQLPAGILPMVPEVAQAVGVSQGHHTKDFTRAAPNPAKATVTAMIARELLYGGTSPTAETILKNNISSGHVPHGPLTRPSEQLDYLSRVQGFQVEYKDFPKNNKNEFVSLINCSSQPPLISHGIGKDVESCHDMAALNILKLLSELDQQSTEMPRTGNGPMSVCGRC

SEQ ID NO: 38619 - protein, 575 aa, Homo sapiens
MHKEAEMLIGPQLDEKRWGWRLGDGSAAPPFLPQALSFLLLLPLASALQPTPLPFQELRLVGGPSRCRGRLEVMHGGSWGSVCDDDWDVVDANVVCRQLGCGLALPVPRPLAFGQGRGPILLDNVECRGQEAALSECGSRGWGVHNCFHYEDVAVLCDEFLPTQPPTRKMLTSRAPPTTLPNGKSEGSVRLVGGANLCQGRVEILHSGLWGTVCDDDWGLPDAAVVCRQLGCGAAMAATTNAFFGYGTGHILLDNVHCEGGEPRLAACQSLGWGVHNCGHHEDAGALCAGLGPPTLTALPSSATREDWAWQTDPSATGVGPQPSRETALLTTAAWAAGKKSGRLRLVGGPGPCRGRVEVLHAGGWGTVCDDDWDFADARVACREAGCGPALGATGLGHFGYGRGPVLLDNVGCAGTEARLSDCFHLGWGQHNCGHHEDAGALCAGPEELGLQVQQDGSETTRVPTPRPRDGHLRLVNGAHRCEGRVELYLGQRWGTVCDDAWDLRAAGVLCRQLGCGQALAAPGEAHFGPGRGPILLDNVKCRGEESALLLCSHIRWDAHNCDHSEDASVLCQPS

SEQ ID NO: 38620 - protein, 274 aa, Homo sapiens
MHKEAEMLIGPQLDEKRWGWRLGDGSAAPPFLPQALSFLLLLPLASALQPTPLPFQELRLVGGPSRCRGRLEVMHGGSWGSVCDDDWDVVDANVVCRQLGCGLALPVPRPLAFGQGRGPILLDNVECRGQEAALSECGSRGWGVHNCFHYEDVAVLCDEFLPTQPPTRKMLTSRAPPTTLPNGKSEGSVRLVGGANLCQGRVEILHSGLWGTVCDDDWGLPDAAVVCRQLGCGAAMAATTNAFFGYGTGHILLDNVHCEGGEPRLAACQSKTVS

SEQ ID NO: 38621 - protein, 445 aa, Homo sapiens
MPSETHAMLATLARVAALRRTCLFSGRGGGRGLWTGRPQSDMNNIKPLEGVKILDLTRVLAGPFATMNLGDLGAEVIKVERPGAGDDTRTWGPPFVGTESTYYLSVNRNKKSIAVNIKDPKGVKIIKELAAVCDVFVENYVPGKLSAMGLGYEDIDEIAPHIIYCSITGYGQTGPISQRAGYDAVASAVSGLMHITGPENGDPVRPGVAMTDLATGLYAYGAIMAGLIQKYKTGKGLFIDCNLLSSQVACLSHIAANYLIGQKEAKRWGTAHGSIVPYQAFKTKDGYIVVGAGNNQQFATVCKILDLPELIDNSKYKTNHLRVHNRKELIKILSERFEEELTSKWLYLFEGSGVPYGPINNMKNVFAEPQVLHNGLVMEMEHPTVGKISVPGPAVRYSKFKMSEARPPPLLGQHTTHILKEVLRYDDRAIGELLSAGVVDQHETH

SEQ ID NO: 38622 - protein, 434 aa, Homo sapiens
MPSETHAMLATLARVAALRRTCLFSGRGGGRGLWTGRPQSDMNNIKPLEGVKILDLTRVLAGPFATMNLGDLGAEVIKVERPGAGDDTRTWGPPFVGTESTYYLSVNRNKKSIAVNIKDPKGVKIIYCSITGYGQTGPISQRAGYDAVASAVSGLMHITGPENGDPVRPGVAMTDLATGLYAYGAIMAGLIQKYKTGKGLFIDCNLLSSQVACLSHIAANYLIGQKEAKRWGTAHGSIVPYQAFKTKDGYIVVGAGNNQQFATVCKILDLPELIDNSKYKTNHLRVHNRKELIKILSERFEEELTSKWLYLFEGSGVPYGPINNMKNVFAEPQNAVSGFQSLLHSLAHGPFLHLQGSARVLHNGLVMEMEHPTVGKISVPGPAVRYSKFKMSEARPPPLLGQHTTHILKEVLRYDDRAIGELLSAGVVDQHETH

SEQ ID NO: 38623 - protein, 471 aa, Homo sapiens
MPSETHAMLATLARVAALRRTCLFSGRGGGRGLWTGRPQSDMNNIKPLEGVKILDLTRVLAGPFATMNLGDLGAEVIKVERPGAGDDTRTWGPPFVGTESTYYLSVNRNKKSIAVNIKDPKGVKIIKELAAVCDVFVENYVPGKLSAMGLGYEDIDEIAPHIIYCSITGYGQTGPISQRAGYDAVASAVSGLMHITGPENGDPVRPGVAMTDLATGLYAYGAIMAGLIQKYKTGKGLFIDCNLLSSQVACLSHIAANYLIGQKEAKRWGTAHGSIVPYQAFKTKDGYIVVGAGNNQQFATVCKILDLPELIDNSKYKTNHLRVHNRKELIKILSERFEEELTSKWLYLFEGSGVPYGPINNMKNVFAEPQNAVSGFQSLLHSLAHGPFLHLQGSARVLHNGLVMEMEHPTVGKISVPGPAVRYSKFKMSEARPPPLLGQHTTHILKEVLRYDDRAIGELLSAGVVDQHETH

SEQ ID NO: 38624 - protein, 397 aa, Homo sapiens
MPSETHAMLATLARVAALRRTCLFSGRGGGRGLWTGRPQSDMNNIKPLEGVKILDLTRVLAGPFATMNLGDLGAEVIKVERPGAGDDTRTWGPPFVGTESTYYLSVNRNKKSIAVNIKDPKGVKIIKELAAVCDVFVENYVPGKLSAMGLGYEDIDEIAPHIIYCSITGYGQTGPISQRAGYDAVASAVSGLMHITGPEVACLSHIAANYLIGQKEAKRWGTAHGSIVPYQAFKTKDGYIVVGAGNNQQFATVCKILDLPELIDNSKYKTNHLRVHNRKELIKILSERFEEELTSKWLYLFEGSGVPYGPINNMKNVFAEPQVLHNGLVMEMEHPTVGKISVPGPAVRYSKFKMSEARPPPLLGQHTTHILKEVLRYDDRAIGELLSAGVVDQHETH

SEQ ID NO: 38625 - protein, 169 aa, Homo sapiens
MAPSEDPRDWRANLKGTIRETGLETSSGGKLAGHQKTVPTAHLTFVIDCTHGKQLSLAATASPPQAPSPNRGLVTPPMKTYIVFCGENWPHLTRVTPMGGGCLAQARATLPLCRGSVASASFPVSPLCPQEVPEAKGKPVKAAPVRSSTWGTVKDSLKALSSCVCGQAD

SEQ ID NO: 38626 - protein, 243 aa, Homo sapiens
MAAIAASEVLVDSAEEGSLAAAAELAAQKREQRLRKFRELHLMRNEARKLNHQEVVEEDKRLKLPANWEAKKARLEWELKEEEKKKECAARGEDYEKVKLLEISAEDAERWERKKKRKNPDLGFSDYAAAQLRQYHRLTKQIKPDMETYERLREKHGEEFFPTSNSLLHGTHVPSTEEIDRMVIDLEKQIEKRDKYSRRRPYNDDADIDYINERNAKFNKKAERFYGKYTAEIKQNLERGTAV

SEQ ID NO: 38627 - protein, 201 aa, Homo sapiens
MAAIAASEVLVDSAEEGSLAAAAELAAQKREQRLRKFRELHLMRECAARGEDYEKVKLLEISAEDAERWERKKKRKNPDLGFSDYAAAQLRQYHRLTKQIKPDMETYERLREKHGEEFFPTSNSLLHGTHVPSTEEIDRMVIDLEKQIEKRDKYSRRRPYNDDADIDYINERNAKFNKKAERFYGKYTAEIKQNLERGTAV

SEQ ID NO: 38628 - protein, 202 aa, Homo sapiens
MMQDVSSSPVSPADDSLSNSEEEPDRQQPPSGKRGGRKRRSSRRSAGGGAGPGGAAGGGVGGGDEPGSPAQGKRGKKSAGCGGGGGAGGGGGSSSGGGSPQSYEELQTQRVMANVRERQRTQSLNEAFAALRKIIPTLPSDKLSKIQTLKLAARYIDFLYQVLQSDELDSKMASCSYVAHERLSYAFSVWRMEGAWSMSASH

SEQ ID NO: 38629 - protein, 220 aa, Homo sapiens
MAEYLASIFGTEKDKVNCSFYFKIGVCRHGDRCSRLHNKPTFSQTIVLLNLYRNPQNTAQTADGSHCHVSDVEVQEHYDSFFEEVFTELQEKYGEIEEMNVCDNLGDHLVGNVYVKFRREEDGERAVAELSNRWFNGQAVHGELSPVTDFRESCCRQYEMGECTRGGFCNFMHLRPISQNLQRQLYGRGPRRRSPPRFHTGHHPRERNHRCSPDHWHGRF

SEQ ID NO: 38630 - protein, 202 aa, Homo sapiens
MAEYLASIFGTEKDKVNCSFYFKIGVCRHGDRCSRLHNKPTFSQEVFTELQEKYGEIEEMNVCDNLGDHLVGNVYVKFRREEDGERAVAELSNRWFNGQAVHGNVPEVASATSCICGPFPRTSRGSSMGGDPGAGHPRGSILATIPERGTIGVPLITGMAASEALAPLPFTPNRDRCSWQDLSSKPPSLSCPILPRLPGSIM

SEQ ID NO: 38631 - protein, 181 aa, Homo sapiens
MAEYLASIFGTEKDKVNCSFYFKIGVCRHGDRCSRLHNKPTFSQEVFTELQEKYGEIEEMNVCDNLGDHLVGNVYVKFRREEDGERAVAELSNRWFNGQAVHGELSPVTDFRESCCRQYEMGECTRGGFCNFMHLRPISQNLQRQLYGRGPRRRSPPRFHTGHHPRERNHRCSPDHWHGRF

SEQ ID NO: 38632 - protein, 234 aa, Homo sapiens
MGGCVGAQHDSSGSLNENSEGTGVALGRNQPLKKEKPKWKSDYPMTDGQLRSKRDEFWDTAPAFEGRKEIWDALKAAAHAFESNDHELAQAIIDGANITLPHGALTECYDELGNRYQLPVYCLAPPINMIEEKSDIETLDIPEPPPNSGYECQLRLRLSTGKDLKLVVRSTDTVFHMKRRLHAAEGVEPGSQRWFFSGRPLTDKMKFEELKIPKDYVVQVIVSQPVQNPTPVEN

SEQ ID NO: 38633 - protein, 352 aa, Homo sapiens
MFRGLSSWLGLQQPVAGGGQPNGDAPPEQPSETVAESAEEELQQAGDQELLHQAKDFGNYLFNFASAATKKITESVAETAQTIKKSVEEGKIDGIIDKTIIGDFQKEQKKFVEEQHTKKSEAAVPPWVDTNDEETIQQQILALSADKRNFLRDPPAGVQFNFDFDQMYPVALVMLQEDELLSKMRFALVPKLVKEEVFWRNYFYRVSLIKQSAQLTALAAQQQAAGKEEKSNGREQDLPLAEAVRPKTPPVVIKSQLKTQEDEEEISTSPGVSEFVSDAFDACNLNQEDLRKEMEQLVLDKKQEETAVLEEDSADWEKELQQELQEYEVVTESEKRDENWDKEIEKMLQEEN

SEQ ID NO: 38634 - protein, 315 aa, Homo sapiens
MAQLGGAANRAPTASLAPTSQSLRCAPQPRPSRADTGSLGRYWGKAAAAASREHPFPGTLMHSAAGSGRRRGALRELLGLQRAAPAGWLSEERAEELGGPSGPGSSRLCLEPREHAWILAAAEGRYEVLRELLEAEPELLLRGDPITGYSVLHWLAKHGRHEELILVHDFALRRGLRLDVSAPGSGGLTPLHLAALQGHDMVIKVLVGALGADATRRDHSGHRACHYLRPDAPWRLRELSGAEEWEMESGSGCTNLNNNSSGTTAWRAASAVGATAVETSRRVAASRTKAKDTAGSRVAQMHSLFRHLFPSFQDR

SEQ ID NO: 38635 - protein, 793 aa, Homo sapiens
MARELSQEALLDFLCQAGGRVTNAALLSHFKSFLRDPDASPSQHQHRRELFKGFVNSVAAVRQDPDGTKYVVLKRRYRDLLGEEGLQRPREPPAAAPSAGGAAPCSPRGARRGEPPQQQPRRRRREKEPEEEPAGAAARAADAACNGLPGSDSRRAPGKGGGSKGSPGQRPPVPAAAAAGAQARASCAAAKTQGRCCWECLQNNLAVLPGELGALPHSATAEEKPARALPAQDDRGASREREEGALAEPAPVPAVAHSPPATVEAATSRASPPALLPGPAPRGDRPELLTPSSLHYSTLQQQQQRTREWVARHPQVPEARDQGPIRAWSVLPDNFLQLPLEPGSTEPNSEPPDPCLSSHSLFPVVPDESWESWAGNPSLTVFRSIRCQLSLQDLDDFVDQESDGSEESSSGPKDSPGASEEGLQVVLGTPDRGKLRNPAGGLSVSRKEGSPSRSPQGLRNRGDGHISQQVPAGANGLAGHPLKPLPWPVPKLRRSLRRSSLAGRAKLSSSDEEYLDEGLLKRSRRPPRSRKPSKAGTAPSPRVDAGLSLKLAEVKAVVAERGWRHSLWVPSGEGSAALAPHRTSEHKSSLVPLDAREHEWIVKLASGSWIQVWTLFWEDPQLALHKDFLTGYTALHWIAKHGDLRALQDLVSGAKKAGIVLDVNVRSSCGYTPLHLAAIHGHQGVIKLLVQRLASRVNVRDSSGKKPWQYLTSNTSGEIWQLLGAPRGKPIFPVYPLVGSSSPTRKAKSKEISRSVTRKTSFAALLKSQHNKWKLANQYEKFHSPREREEYSD

SEQ ID NO: 38636 - protein, 134 aa, Homo sapiens
MNTEMYQTPMEVAVYQLHNFSISFFSSLLGGDVVSVKLDNSASGASVVAIDNKIEQAMDLVKNHLMYAVREEVEILKEQIRELVEKNSQLERENTLLKTLASPEQLEKFQSCLSPEEPAPESPQVPEAPGGSAV

SEQ ID NO: 38637 - protein, 200 aa, Homo sapiens
MAQSKLDCRSPVGLDCCNCCLDLAHRSGLQRGSSGENNNPGSPTVSNFRQLQEKLVFENLNTDKLNSIMRQDSLEPVLRDPCYLINEGICNRNIDQTMLSILLFFHSASGASVVAIDNKIEQAMDLVKNHLMYAVREEVEILKEQIRELVEKNSQLERENTLLKTLASPEQLEKFQSCLSPEEPAPESPQVPEAPGGSAV

SEQ ID NO: 38638 - protein, 122 aa, Homo sapiens
GGWPSAVRAWEKAGSLPAEKEFLASFRAGASGASVVAIDNKIEQAMDLVKNHLMYAVREEVEILKEQIRELVEKNSQLERENTLLKTLASPEQLEKFQSCLSPEEPAPESPQVPEAPGGSAV

SEQ ID NO: 38639 - protein, 167 aa, Homo sapiens
MASAEPLTALSRWYLYAIHGYFCEVMFTAAWEFVVNLNWKFPGVTSVWALFIYGTSILIVERMYLRLRGRCPLLLRCLIYTLWTYLWEFTTGFILRQFNACPWDYSQFDFDFMGLITLEYAVPWFCGALIMEQFIIRNTLRLRFDKDAEPGEPSGALALANGHVKTD

SEQ ID NO: 38640 - protein, 213 aa, Homo sapiens; identical to SEQ ID NO: 262

SEQ ID NO: 38641 - protein, 172 aa, Homo sapiens
MPRRAENWDEAEVGAEEAGVEEYGPEEDGGEESGAEESGPEESGPEELGAEEEMEAGRPRPVLRSVNSREPSQVIFCNRSPRVVLPVWLNFDGEPQPYPTLPPGTGRRIHSYRVYTLKERCLQVVRSLVKPENYRRLDIVRSLYEDLEDHPNVQKDLERLTQERIAHQRMGD

SEQ ID NO: 38642 - protein, 160 aa, Homo sapiens
MEAGRPRPVLRSVNSREPSQVIFCNRSPRVVLPVWLNFDGEPQPYPTLPPGTGRRIHSYRGHLWLFRDAGTHDGLLVNQTELFVPSLNVDGQPIFANITLPVYTLKERCLQVVRSLVKPENYRRLDIVRSLYEDLEDHPNVQKDLERLTQERIAHQRMGD

SEQ ID NO: 38643 - protein, 314 aa, Homo sapiens
MPGFTCCVPGCYNNSHRDKALHFYTFPKDAELRRLWLKNVSRAGVSGCFSTFQPTTGHRLCSVHFQGGRKTYTVRVPTIFPLRGVNERKVARRPAGAAAARRRQQQQQQQQQQQQQQQQQQQQQQQQQQQQQSSPSASTAQTAQLQPNLVSASAAVLLTLQATVDSSQAPGSVQPAPITPTGEDVKPIDLTVQVEFAAAEGAAAAAAASELQAATAGLEAAECPMGPQLVVVGEEGFPDTGSDHSYSLSSGTTEEELLRKLNEQRDILALMEVKMKEMKGSIRHLRLTEAKLREELREKDRLLAMAVIRKKHGM

SEQ ID NO: 38644 - protein, 521 aa, Homo sapiens
MANKGNKKRRQFSLEEKMKVVGAVDSGKRKGDVAKEFGITPSTLSTFLKDRTKFEEKVREASVGPQRKRMRSALYDDIDKAVFAWFQEIHAKNILVTGSVIRKKALNLANMLGYDNFQASVGWLNRFRDRHGIALKAVCREDSDRLMNGLGIDKINEWHAGEIIKLIADYSPDDIFNADETGVFFQLLPQHTLAAKGDHCRGGKKAKQRLTALFCCNASGTEKMRPLIVGRSASPHCLKNIHSLPCDYRANQWAWMTRDLFNEWLMQVDARMKRAERRILLLIDNCSAHNMLPHLERIQVGYLPSNCTAVLQPLNLGIIHTMKVLYQSHLLKQILLKLNSSEDQEEVDIKQAIDMIAAAWWSVKPSTVVKCWQKAGIVPMEFAECDTESAASEPDIAIEKLWHTVAIATCVPNEVNFQDFVTADDDLIISQDTDIIQDMVAGENTSEAGSEDEGEVSLPEQPKVTITEAISSVQKLRQFLSTCVDIPDAIFGQLNGIDEYLMKRVTQTLIDSKITDFLQTK

SEQ ID NO: 38645 - protein, 235 aa, Homo sapiens
MDPARPLGLSILLLFLTEAALGDAAQEPTGNNAEICLLPLDYGPCRALLLRYYYDRYTQSCRQFLYGGCEGNANNFYTWEACDDACWRIEKVPKVCRLQVSVDDQCEGSTEKYFFNLSSMTCEKFFSGGCHRNRIENRFPDEATCMGFCAPKKIPSFCYSPKDEGLCSANVTRYYFNPRYRTCDAFTYTGCGGNDNNFVSREDCKRACAKALKKKKKMPKLRFASRIRKIRKKQF

SEQ ID NO: 38646 - protein, 224 aa, Homo sapiens
MDPARPLGLSILLLFLTEAALGDAAQEPTDYGPCRALLLRYYYDRYTQSCRQFLYGGCEGNANNFYTWEACDDACWRIEKVPKVCRLQVSVDDQCEGSTEKYFFNLSSMTCEKFFSGGCHRNRIENRFPDEATCMGFCAPKKIPSFCYSPKDEGLCSANVTRYYFNPRYRTCDAFTYTGCGGNDNNFVSREDCKRACAKALKKKKKMPKLRFASRIRKIRKKQF

SEQ ID NO: 38647 - protein, 239 aa, Homo sapiens
MPKSCAARQCCNRYSSRRKQLTFHRFPFSRPELLKEWVLNIGRGNFKPKQHTVICSEHFRPECFSAFGNRKNLKHNAVPTVFAFQDPTQQVRENTDPASERGNASSSQKEKVLPEAGAGEDSPGRNMDTALEELQLPPNAEGHVKQVSPRRPQATEAVGRPTGPAGLRRTPNKQPSDHSYALLDLDSLKKKLFLTLKENEKLRKRLQAQRLVMRRMSSRLRACKGHQGLQARLGPEQQS

SEQ ID NO: 38648 - protein, 238 aa, Homo sapiens
MPKSCAARQCCNRYSSRRKQLTFHRFPFSRPELLKEWVLNIGRGNFKPKQHTVICSEHFRPECFSAFGNRKNLKHNAVPTVFAFQDPTQVRENTDPASERGNASSSQKEKVLPEAGAGEDSPGRNMDTALEELQLPPNAEGHVKQVSPRRPQATEAVGRPTGPAGLRRTPNKQPSDHSYALLDLDSLKKKLFLTLKENEKLRKRLQAQRLVMRRMSSRLRACKGHQGLQARLGPEQQS

SEQ ID NO: 38649 - protein, 175 aa, Homo sapiens
MPKSCAARQCCNRYSSRRKQLTFHRFPFSRPELLKEWVLNIGRGNFKPKQHTVICSEHFRPECFSAFGNRKNLKHNAVPTVFAFQDPTQQVRENTDPASERGNASSSQKEKTSPCRSQVLPEAGAGEDSPGRNMDTALEELQLPPNAEGHVKQAMLFNVENGTPASREALWLSEE

SEQ ID NO: 38650 - protein, 180 aa, Homo sapiens
MAGVKYPGQDPVDLDIYQSSHMVDYQPYRKHKYSRVTPQEQAKLDAQLRDKEFYRPIPNPNPKLTDGYPAFKRPHMTAKDLGLPGFFPSQEHEATREDERKFTSTCHFTYPASHDLHLAQGDPNQVLQSADFPCLVDPKHQPAAEMAKGYLLLPGCPCLHCHIVKVPILNRWGPLMPFYQ

SEQ ID NO: 38651 - protein, 253 aa, Homo sapiens
MELEQREGTMAAVGFEEFSAPPGSELALPPLFGGHILESELETEVEFVSGGLGGSGLRERDEEEEAARGRRRRQRELNRRKYQALGRRCREIEQVNERVLNRLHQVQRITRRLQQERRFLMRVLDSYGDDYRASQFTIVLEDEGSQGTDAPTPGNAENEPPEKETLSPPRRTPAPPEPGSPAPGEGPSGRKRRRVPRDGRRAGNALTPELAPVQIKVEEDFGFEADEALDSSWVSRGPDKLLPYPTLASPASD

SEQ ID NO: 38652 - protein, 244 aa, Homo sapiens
MAAVGFEEFSAPPGSELALPPLFGGHILESELETEVEFVSGGLGGSGLRERDEEEEAARGRRRRQRELNRRKYQALGRRCREIEQVNERVLNRLHQVQRITRRLQQERRFLMRVLDSYGDDYRASQFTIVLEDEGSQGTDAPTPGNAENEPPEKETLSPPRRTPAPPEPGSPAPGEGPSGRKRRRVPRDGRRAGNALTPELAPVQIKVEEDFGFEADEALDSSWVSRGPDKLLPYPTLASPASD

SEQ ID NO: 38653 - protein, 602 aa, Homo sapiens
MSERRRSAVALSSRAHAFSVEALIGSNKKRKLRDWEEKGLDLSMEALSPAGPLGDTEDAAAHGLEPHPDSEQSTGSDSEVLTERTSCSFSTHTDLASGAAGPVPAAMSSMEEIQVELQCADLWKRFHDIGTEMIITKAGRRMFPAMRVKITGLDPHQQYYIAMDIVPVDNKRYRYVYHSSKWMVAGNADSPVPPRVYIHPDSLASGDTWMRQVVSFDKLKLTNNELDDQGHIILHSMHKYQPRVHVIRKDFSSDLSPTKPVPVGDGVKTFNFPETVFTTVTAYQNQQITRLKIDRNPFAKGFRDSGRNRTGLEAIMETYAFWRPPVRTLTFEDFTTMQKQQGGSTGTSPTTSSTGTPSPSASSHLLSPSCSPPTFHLAPNTFNVGCRESQLCNLNLSDYPPCARSNMAALQSYPGLSDSGYNRLQSGTTSATQPSETFMPQRTPSLISGIPTPPSLPGNSKMEAYGGQLGSFPTSQFQYVMQAGNAASSSSSPHMFGGSHMQQSSYNAFSLHNPYNLYGYNFPTSPRLAASPEKLSASQSTLLCSSPSNGAFGERQYLPSGMEHSMHMISPSPNNQQATNTCDGRQYGAVPGSSSQMSVHMV

SEQ ID NO: 38654 - protein, 496 aa, Homo sapiens
MSSMEEIQVELQCADLWKRFHDIGTEMIITKAGRRMFPAMRVKITGLDPHQQYYIAMDIVPVDNKRYRYVYHSSKWMVAGNADSPVPPRVYIHPDSLASGDTWMRQVVSFDKLKLTNNELDDQGHIILHSMHKYQPRVHVIRKDFSSDLSPTKPVPVGDGVKTFNFPETVFTTVTAYQNQQITRLKIDRNPFAKGFRDSGRNRTGLEAIMETYAFWRPPVRTLTFEDFTTMQKQQGGSTGTSPTTSSTGTPSPSASSHLLSPSCSPPTFHLAPNTFNVGCRESQLCNLNLSDYPPCARSNMAALQSYPGLSDSGYNRLQSGTTSATQPSETFMPQRTPSLISGIPTPPSLPGNSKMEAYGGQLGSFPTSQFQYVMQAGNAASSSSSPHMFGGSHMQQSSYNAFSLHNPYNLYGYNFPTSPRLAASPEKLSASQSTLLCSSPSNGAFGERQYLPSGMEHSMHMISPSPNNQQATNTCDGRQYGAVPGSSSQMSVHMV

SEQ ID NO: 38655 - protein, 513 aa, Homo sapiens
MASGSVAECLQQETTCPVCLQYFAEPMMLDCGHNICCACLARCWGTAETNVSCPQCRETFPQRHMRPNRHLANVTQLVKQLRTERPSGPGGEMGVCEKHREPLKLYCEEDQMPICVVCDRSREHRGHSVLPLEEAVEGFKEQIQNQLDHLKRVKDLKKRRRAQGEQARAELLSLTQMEREKIVWEFEQLYHSLKEHEYRLLARLEELDLAIYNSINGAITQFSCNISHLSSLIAQLEEKQQQPTRELLQDIGDTLSRAERIRIPEPWITPPDLQEKIHIFAQKCLFLTESLKQFTEKMQSDMEKIQELREAQLYSVDVTLDPDTAYPSLILSDNLRQVRYSYLQQDLPDNPERFNLFPCVLGSPCFIAGRHYWEVEVGDKAKWTIGVCEDSVCRKGGVTSAPQNGFWAVSLWYGKEYWALTSPMTALPLRTPLQRVGIFLDYDAGEVSFYNVTERCHTFTFSHATFCGPVRPYFSLSYSGGKSAAPLIICPMSGIDGFSGHVGNHGHSMETSP

SEQ ID NO: 38656 - protein, 358 aa, Homo sapiens
MASGSVAECLQQETTCPVCLQYFAEPMMLDCGHNICCACLARCWGTAETNVSCPQCRETFPQRHMRPNRHLANVTQLVKQLRTERPSGPGGEMGVCEKHREPLKLYCEEDQMPICVVCDRSREHRGHSVLPLEEAVEGFKEQIQNQLDHLKRVKDLKKRRRAQGEQARAELLSLTQMEREKIVWEFEQLYHSLKEHEYRLLARLEELDLAIYNSINGAITQFSCNISHLSSLIAQLEEKQQQPTRELLQDIGDTLSRAERIRIPEPWITPPDLQEKIHIFAQKCLFLTESLKQFTEKMQSDMEKIQELREAQLYSVDVTLDPDTAYPSLILSDNLRQVRYSYLQQDLPDNPERSPSTT

SEQ ID NO: 38657 - protein, 505 aa, Homo sapiens
MAAENSKQFWKRSAKLPGSIQPVYGAQHPPLDPRLTKNFIKERSKVNTVPLKNKKASSFHEFARNTSDAWDIGDDEEEDFSSPSFQTLNSKVALATAAQVLENHSKLRVKPERSQSTTSDVPANYKVIKSSSDAQLSRNSSDTCLRNPLHKQQSLPLRPIIPLVARISDQNASGAPPMTVREKTRLEKFRQLLSSQNTDLDELRKCSWPGVPREVRPITWRLLSGYLPANTERRKLTLQRKREEYFGFIEQYYDSRNEEHHQDTYRQIHIDIPRTNPLIPLFQQPLVQEIFERILFIWAIRHPASGYVQGINDLVTPFFVVFLSEYVEEDVENFDVTNLSQDMLRSIEADSFWCMSKLLDGIQDNYTFAQPGIQKKVKALEELVSRIDEQVHNHFRRYEVEYLQFAFRWMNNLLMRELPLRCTIRLWDTYQSEPEGFSHFHLYVCAAFLIKWRKEILDEEDFQGLLMLLQNLPTIHWGNEEIGLLLAEAYRLKYMFADAPNHYRR

SEQ ID NO: 38658 - protein, 162 aa, Homo sapiens
MLQTSNYSLVLSLQFLLLSYDLFVNSFSELLQKTPVIQLVLFIIQDIAVLFNIIIIFLMFFNTFVFQAGLVNLLFHKFKGTIILTAVYFALSISLHVWVMNLRWKNSNSFIWTDGLQMLFVFQRLAAVLYCYFYKRTAVRLGDPHFYQDSLWLRKEFMQVRR

SEQ ID NO: 38659 - protein, 105 aa, Homo sapiens
MLQTSNYSLVLSLQFLLLSYDLFVNSFSELLQKTPVIQLVLFIIQDIAVLFNIIIIFLMFFNTFVFQAGLVNLLFHKFKGTIILTAVYFALSISLHVWVMVRVAV

SEQ ID NO: 38660 - protein, 177 aa, Homo sapiens
MLQTSNYSLVLSLQFLLLSYDLFVNSFSELLQKTPVIQLVLFIIQDIAVLFNIIIIFLMFFNTFVFQAGLVNLLFHKFKGTIILTAVYFALSISLHVWVMNLRWKNSNSFIWTDGLQMLFVFQRLGKDQSKVRPLSGPTCVSFSEGLDAGFPDLSQLAWDGCDSHTRNRRDYCPCPC

SEQ ID NO: 38661 - protein, 176 aa, Homo sapiens
DLNKVFPPEVAVFEPSEAEISHTQKATLVCLATGFFPDHVELSWWVNGKEVHSGVSTDPQPLKEQPALNDSRYCLSSRLRVSATFWQNPRNHFRCQVQFYGLSENDEWTQDRAKPVTQIVSAEAWGRADCGFTSVSYQQGVLSATILYEILLGKATLYAVLVSALVLMAMVKRKDF

SEQ ID NO: 38662 - protein, 245 aa, Homo sapiens
MDGTRTSLDIEEYSDTEVQKNQVLTLEEWQDKWVNGKTAFHQEQGHQLLKKHLDTFLKGKSGLRVFFPLCGKAVEMKWFADRGHSVVGVEISELGIQEFFTEQNLSYSEEPITEIPGTKVFKSSSGNISLYCCSIFDLPRTNIGKFDMIWDRGALVAINPGDRKCYADTMFSLLGKKFQYLLCVLSYDPTKHPGPPFYVPHAEIERLFGKICNIRCLEKVDAFEERHKSWGIDCLFEKLYLLTEK

SEQ ID NO: 38663 - protein, 835 aa, Homo sapiens
MGNYKSRPTQTCTDEWKKKVSESYVITIERLEDDLQIKEKELTELRNIFGSDEAFSKVNLNYRTENGLSLLHLCCICGGKKSHIRTLMLKGLRPSRLTRNGFTALHLAVYKDNAELITSLLHSGADIQQVGYGGLTALHIATIAGHLEAADVLLQHGANVNIQDAVFFTPLHIAAYYGHEQVTRLLLKFGADVNVSGEVGDRPLHLASAKGFLNIAKLLMEEGSKADVNAQDNEDHVPLHFCSRFGHHDIVKYLLQSDLEVQPHVVNIYGDTPLHLACYNGKFEVAKEIIQISGTESLTKENIFSETAFHSACTYGKSIDLVKFLLDQNVININHQGRDGHTGLHSACYHGHIRLVQFLLDNGADMNLVACDPSRSSGEKDEQTCLMWAYEKGHDAIVTLLKHYKRPQDELPCNEYSQPGGDGSYVSVPSPLGKIKSMTKEKADILLLRAGLPSHFHLQLSEIEFHEIIGSGSFGKVYKGRCRNKIVAIKRYRANTYCSKSDVDMFCREVSILCQLNHPCVIQFVGACLNDPSQFAIVTQYISGGSLFSLLHEQKRILDLQSKLIIAVDVAKGMEYLHNLTQPIIHRDLNSHNILLYEDGHAVVADFGESRFLQSLDEDNMTKQPGNLRWMAPEVFTQCTRYTIKADVFSYALCLWEILTGEIPFAHLKPAAAAADMAYHHIRPPIGYSIPKPISSLLIRGWNACPEGRPEFSEVVMKLEECLCNIELMSPASSNSSGSLSPSSSSDCLVNRGGPGRSHVAALRSRFELEYALNARSYAALSQSAGQYSSQGLSLEEMKRSLQYTPIDKYGYVSDPMSSMHFHSCRNSSSFEDSS

SEQ ID NO: 38664 - protein, 936 aa, Homo sapiens
MAAARDPPEVSLREATQRKLRRFSELRGKLVARGEFWDIVAITAADEKQELAYNQQLSEKLKRKELPLGVQYHVFVDPAGAKIGNGGSTLCALQCLEKLYGDKWNSFTILLIHSDEWKKKVSESYVITIERLEDDLQIKEKELTELRNIFGSDEAFSKVNLNYRTENGLSLLHLCCICGGKKSHIRTLMLKGLRPSRLTRNGFTALHLAVYKDNAELITSLLHSGADIQQVGYGGLTALHIATIAGHLEAADVLLQHGANVNIQDAVFFTPLHIAAYYGHEQVTRLLLKFGADVNVSGEVGDRPLHLASAKGFLNIAKLLMEEGSKADVNAQDNEDHVPLHFCSRFGHHDIVKYLLQSDLEVQPHVVNIYGDTPLHLACYNGKFEVAKEIIQISGTESLTKENIFSETAFHSACTYGKSIDLVKFLLDQNVININHQGRDGHTGLHSACYHGHIRLVQFLLDNGADMNLVACDPSRSSGEKDEQTCLMWAYEKGHDAIVTLLKHYKRPQDELPCNEYSQPGGDGSYVSVPSPLGKIKSMTKEKADILLLRAGLPSHFHLQLSEIEFHEIIGSGSFGKVYKGRCRNKIVAIKRYRANTYCSKSDVDMFCREVSILCQLNHPCVIQFVGACLNDPSQFAIVTQYISGGSLFSLLHEQKRILDLQSKLIIAVDVAKGMEYLHNLTQPIIHRDLNSHNILLYEDGHAVVADFGESRFLQSLDEDNMTKQPGNLRWMAPEVFTQCTRYTIKADVFSYALCLWEILTGEIPFAHLKPAAAAADMAYHHIRPPIGYSIPKPISSLLIRGWNACPEGRPEFSEVVMKLEECLCNIELMSPASSNSSGSLSPSSSSDCLVNRGGPGRSHVAALRSRFELEYALNARSYAALSQSAGQYSSQGLSLEEMKRSLQYTPIDKYGYVSDPMSSMHFHSCRNSSSFEDSS

SEQ ID NO: 38665 - protein, 697 aa, Homo sapiens
MAAARDPPEVSLREATQRKLRRFSELRGKLVARGEFWDIVAITAADEKQELAYNQQLSEKLKRKELPLGVQYHVFVDPAGAKIGNGGSTLCALQCLEKLYGDKWNSFTILLIHSDEWKKKVSESYVITIERLEDDLQIKEKELTELRNIFGSDEAFSKVNLNYRTENGLSLLHLCCICGGKKSHIRTLMLKGLRPSRLTRNGFTALHLAVYKDNAELITSLLHSGADIQQVGYGGLTALHIATIAGHLEAADVLLQHGANVNIQDAVFFTPLHIAAYYGHEQVTRLLLKFGADVNVSGEVGDRPLHLASAKGFLNIAKLLMEEGSKADVNAQDNEDHVPLHFCSRFGHHDIVKYLLQSDLEVQPHVVNIYGDTPLHLACYNGKFEVAKEIIQISGTESLTKENIFSETAFHSACTYGKSIDLVKFLLDQNVININHQGRDGHTGLHSACYHGHIRLVQFLLDNGADMNLVACDPSRSSGEKDEQTCLMWAYEKGHDAIVTLLKHYKRPQDELPCNEYSQPGGDGSYVSVPSPLGKIKSMTKEKADILLLRAGLPSHFHLQLSEIEFHEIIGSGSFGKVYKGRCRNKIVAIKRYRANTYCSKSDVDMFCREVSILCQLNHPCVIQFVGACLNDPSQFAIVTQYISGGSLFSLLHEQKRILDLQSKLIIAVDVAKGMEYLHNLTQPIIHRDLNRYFFPK

SEQ ID NO: 38666 - protein, 843 aa, Homo sapiens
MAAARDPPEVSLREATQRKLRRFSELRGKLVARGEFWDIVAITAADEKQELAYNQQLSEKLKRKELPLGVQYHVFVDPAGAKIGNGGSTLCALQCLEKLYGDKWNSFTILLIHSDEWKKKVSESYVITIERLEDDLQIKEKELTELRNIFGSDEAFSKVNLNYRTENGLSLLHLCCICGGKKSHIRTLMLKGLRPSRLTRNGFTALHLAVYKDNAELITSLLHSGADIQQVGYGGLTALHIATIAGHLEAADVLLQHGANVNIQDAVFFTPLHIAAYYGHEQVTRLLLKFGADVNVSGEVGDRPLHLASAKGFLNIAKLLMEEGSKADVNAQDNEDHVPLHFCSRFGHHDIVKYLLQSDLEVQPHVVNIYGDTPLHLACYNGKFEVAKEIIQISGTESLTKENIFSETAFHSACTYGKSIDLVKFLLDQNVININHQGRDGHTGLHSACYHGHIRLVQFLLDNGADMNLVACDPSRSSGEKDEQTCLMWAYEKGHDAIVTLLKHYKRPQDELPCNEYSQPGGDGSYVSVPSPLGKIKSMTKEKADILLLRAGLPSHFHLQLSEIEFHEIIGSGSFGKVYKGRCRNKIVAIKRYRANTYCSKSDVDMFCREVSILCQLNHPCVIQFVGACLNDPSQFAIVTQYISGGSLFSLLHEQKRILDLQSKLIIAVDVAKGMEYLHNLTQPIIHRDLNSHNILLYEDGHAVVADFGESRFLQSLDEDNMTKQPGNLRWMAPEVFTQCTRYTIKADVFSYALCLWEILTGEIPFAHLKPAAAAADMAYHHIRPPIGYSIPKPISSLLIRGWNACPEAKSRPSHYPVSSVYTETLKKKNEDRFGMWIEYLRR

SEQ ID NO: 38667 - protein, 481 aa, Homo sapiens
MATSATSPHAPGFPAEGRCGYYVEKKKRFCRMVVAAGKRFCGEHAGAAEEEDARKRILCPLDPKHTVYEDQLAKHLKKCNSREKPKPDFYIQDINAGLRDETEIPEQLVPISSLSEEQLEKLIKKLRKASEGLNSTLKDHIMSHPALHDALNDPKNGDSATKHLKQQASILGNIENLKLLGPRRCFVEFGAGKGKLSHWVDIALKDAEKVHFILVEKVTTRFKVDGKHRKKNSVFERLQIDIQHLCLNKIPVLREEKLPVVGIGKHLCGMATDLALRCLVETYAASFEERNEEPLAKRIKNDKTEKEIYTLAKEGNEKNVPEKWNPVAGIVIALCCHHRCDWRHYVGKEYFRALGLGAVEFHYFQRMSSWATCGMRKTSLETSNSTTKRQDNQNDDSEEHDDGGYRITDDGADCLPGLLSVEEKKKIGHLCKLLIDQGRIQYLQQKGFSPALQYYTDPLVSLENVLLTALPNHSSSPETTA

SEQ ID NO: 38668 - protein, 175 aa, Homo sapiens
MATSATSPHAPGFPAEGRCGYYVEKKKRFCRMVVAAGKRFCGEHAGAAEEEDARKRILCPLDPKHTVYEDQLAKHLKKCNSREKPKPDFYIQDINAGLRDETEIPEQLVPISSLSEEQLEKLIKKLRKASEGLNSTLKDHIMSHPALHDALNDPKNGDSATKHLKQQVCLGYSNY

SEQ ID NO: 38669 - protein, 262 aa, Homo sapiens
MAWKSSVIMQMGRFLLLVILFLPREMTSSVLTVNGKTENYILDTTPGSQASLICAVQNHTREEELLWYREEGRVDLKSGNKINSSSVCVSSISENDNGISFTCRLGRDQSVSVSVVLNVTFPPLLSGNDFQTVEEGSNVKLVCNVKANPQAQMMWYKNSSLLDLEKSRHQIQQTSESFQLSITKVEKPDNGTYSCIAKSSLKTESLDFHLIVKDKTVGVPIEPIIAACVVIFLTLCFGLIARRKKIMKLCMKDKDPHSETAL

SEQ ID NO: 38670 - protein, 218 aa, Homo sapiens
MAWKSSVIMQMGRFLLLVILFLPREMTSSVLTVNGKTENYILDTTPGSQASLICAVQNHTREEELLWYREEGRVDLKSGNKINSSSVCVSSISENDNGISFTCRLGRDQSVSVSVVLNVTFPPLLSGNDFQTVEEGSNVKLVCNVKANPQAQMMWYKNSSLLDLEKSRHQIQQTSESFQLSITKVEKPDNGTYSCIAKSSLKTESLDFHLIVKALHEG

SEQ ID NO: 38671 - protein, 1162 aa, Homo sapiens
MEEVRCPEHGTFCFLKTGVRDGPNKGKSFYVCRADTCSFVRATDIPVSHCLLHEDFVVELQGLLLPQDKKEYRLFFRCIRSKAEGKRWCGSIPWQDPDSKEHSVSNKSQHASETFHHSSNWLRNPFKVLDKNQEPALWKQLIKGEGEEKKADKKQREKGDQLFDQKKEQKPEMMEKDLSSGLVPKKKQSVVQEKKQEEGAEIQCEAETGGTHKRDFSEIKSQQCQGNELTRPSASSQEKSSGKSQDVQRESEPLREKVTQLLPQNVHSHNSISKPQKGGPLNKEYTNWEAKETKAKDGPSIQATQKSLPQGHFQERPETHSVPAPGGPAAQAAPAAPGLSLGEGREAATSSDDEEEDDVVFVSSKPGSPLLFDSTLDLETKENLQFPDRSVQRKVSPASGVSKKVEPSDPVARRVYLTTQLKQKKSTLASVNIQALPDKGQKLIKQIQELEEVLSGLTLSPEQGTNEKSNSQVPQQSHFTKTTTGPPHLVPPQPLPRRGTQPVGSLELKSACQVTAGGSSQCYRGHTNQDHVHAVWKITSEAIGQLHRSLESCPGETVVAEDPAGLKVPLLLHQKQALAWLLWRESQKPQGGILADDMGLGKTLTMIALILTQKNQEKKEEKEKSTALTWLSKDDSCDFTSHGTLIICPASLIHHWKNEVEKRVNSNKLRVYLYHGPNRDSRARVLSTYDIVITTYSLVAKEIPTNKQEAEIPGANLNVEGTSTPLLRIAWARIILDEAHNVKNPRVQTSIAVCKLQACARWAVTGTPIQNNLLDMYSLLKFLRCSPFDEFNLWRSQVDNGSKKGGERLSILTKSLLLRRTKDQLDSTGRPLVILPQRKFQLHHLKLSEDEETVYNVFFARSRSALQSYLKRHESRGNQSGRSPNNPFSRVALEFGSEEPRHSEAADSPRSSTVHILSQLLRLRQCCCHLSLLKSALDPMELKGEGLVLSLEEQLSALTLSELRDSEPSSTVSLNGTFFKMELFEGMRESTKISSLLAELEAIQRNSASQKSVIVSQWTNMLKVVALHLKKHGLTYATIDGSVNPKQRMDLVEAFNHSRGPQVMLISLLAGGVGLNLTGGNHLFLLDMHWNPSLEDQACDRIYRVGQQKDVVIHRFVCEGTVEEKILQLQEKKKDLAKQVLSGSGESVTKLTLADLRVLFGI

SEQ ID NO: 38672 - protein, 676 aa, Homo sapiens
MEEVRCPEHGTFCFLKTGVRDGPNKGKSFYVCRADTCSFVRATDIPVSHCLLHEDFVVELQGLLLPQDKKEYRLFFRCIRSKAEGKRWCGSIPWQDPDSKEHSVSNKSQHASETFHHSSNWLRNPFKVLDKNQEPALWKQLIKGEGEEKKADKKQREKGDQLFDQKKEQKPEMMEKDLSSGLVPKKKQSVVQEKKQEEGAEIQCEAETGGTHKRDFSEIKSQQCQGNELTRPSASSQEKSSGKSQDVQRESEPLREKVTQLLPQNVHSHNSISKPQKGGPLNKEYTNWEAKETKAKDGPSIQATQKSLPQGHFQERPETHSVPAPGGPAAQAAPAAPGLSLGEGREAATSSDDEEEDDVVFVSSKPGSPLLFDSTLDLETKENLQFPDRSVQRKVSPASGVSKKVEPSDPVARRVYLTTQLKQKKSTLASVNIQALPDKGQKLIKQIQELEEVLSGLTLSPEQGTNEKSNSQVPQQSHFTKTTTGPPHLVPPQPLPRRGTQPVGSLELKSACQVTAGGSSQCYRGHTNQDHVHAVWKITSEAIGQLHRSLESCPGETVVAEDPAGLKVPLLLHQKQALAWLLWRESQKPQGGILADDMGLGKTLTMIALILTQKNQEKKEEKEKSTALTWLSKDGRQKCLNSLPFPTSFEPPKRGTSSAKKGHLWSYLITLLENQY

SEQ ID NO: 38673 - protein, 90 aa, Homo sapiens
MDPLRAQQLAAELEVEMMADMYNRMTSACHRKCVPPHYKEAELSKGESVCLDRCVSKYLDIHERMGKKLTELSMQDEELMKRVQQSSGPA

SEQ ID NO: 38674 - protein, 278 aa, Homo sapiens
MAEARSQPSAGPQLNALPDHSPLLQPGLAALRRRAREAGVPLAPLPLTDSFLLRFLRARDFDLDLAWRLLKNYYKWRAECPEISADLHPRSIIGLLKAGYHGVLRSRDPTGSKVLIYRIAHWDPKVFTAYDVFRVSLITSELIVQEVETQRNGIKAIFDLEGWQFSHAFQITPSVAKKIAAVLTDSFPLKVRGIHLINEPVIFHAVFSMIKPFLTEKIKERIHMHGNNYKQSLLQHFPDILPLEYGGEEFSMEDICQEWTNFIMKSEDYLSSISESIQ

SEQ ID NO: 38675 - protein, 1865 aa, Homo sapiens
MSQKSWIESTLTKRECVYIIPSSKDPHRCLPGCQICQQLVRCFCGRLVKQHACFTASLAMKYSDVKLGDHFNQAIEEWSVEKHTEQSPTDAYGVINFQGGSHSYRAKYVRLSYDTKPEVILQLLLKEWQMELPKLVISVHGGMQKFELHPRIKQLLGKGLIKAAVTTGAWILTGGVNTGVAKHVGDALKEHASRSSRKICTIGIAPWGVIENRNDLVGRDVVAPYQTLLNPLSKLNVLNNLHSHFILVDDGTVGKYGAEVRLRRELEKTINQQRIHARIGQGVPVVALIFEGGPNVILTVLEYLQESPPVPVVVCEGTGRAADLLAYIHKQTEEGGNLPDAAEPDIISTIKKTFNFGQNEALHLFQTLMECMKRKELITVFHIGSDEHQDIDVAILTALLKGTNASAFDQLILTLAWDRVDIAKNHVFVYGQQWLVGSLEQAMLDALVMDRVAFVKLLIENGVSMHKFLTIPRLEELYNTKQGPTNPMLFHLVRDVKQGNLPPGYKITLIDIGLVIEYLMGGTYRCTYTRKRFRLIYNSLGGNNRRSGRNTSSSTPQLRKSHESFGNRADKKEKMRHNHFIKTAQPYRPKIDTVMEEGKKKRTKDEIVDIDDPETKRFPYPLNELLIWACLMKRQVMARFLWQHGEESMAKALVACKIYRSMAYEAKQSDLVDDTSEELKQYSNDFGQLAVELLEQSFRQDETMAMKLLTYELKNWSNSTCLKLAVSSRLRPFVAHTCTQMLLSDMWMGRLNMRKNSWYKVILSILVPPAILLLEYKTKAEMSHIPQSQDAHQMTMDDSENNFQNITEEIPMEVFKEVRILDSNEGKNEMEIQMKSKKLPITRKFYAFYHAPIVKFWFNTLAYLGFLMLYTFVVLVQMEQLPSVQEWIVIAYIFTYAIEKVREIFMSEAGKVNQKIKVWFSDYFNISDTIAIISFFIGFGLRFGAKWNFANAYDNHVFVAGRLIYCLNIIFWYVRLLDFLAVNQQAGPYVMMIGKMVANMFYIVVIMALVLLSFGVPRKAILYPHEAPSWTLAKDIVFHPYWMIFGEVYAYEIDVCANDSVIPQICGPGTWLTPFLQAVYLFVQYIIMVNLLIAFFNNVYLQVKAISNIVWKYQRYHFIMAYHEKPVLPPPLIILSHIVSLFCCICKRRKKDKTSDGPKLFLTEEDQKKLHDFEEQCVEMYFNEKDDKFHSGSEERIRVTFERVEQMCIQIKEVGDRVNYIKRSLQSLDSQIGHLQDLSALTVDTLKTLTAQKASEASKVHNEITRELSISKHLAQNLIDDGPVRPSVWKKHGVVNTLSSSLPQGDLESNNPFHCNILMKDDKDPQCNIFGQDLPAVPQRKEFNFPEAGSSSGALFPSAVSPPELRQRLHGVELLKIFNKNQKLGSSSTSIPHLSSPPTKFFVSTPSQPSCKSHLETGTKDQETVCSKATEGDNTEFGAFVGHRDSMDLQRFKETSNKIKILSNNNTSENTLKRVSSLAGFTDCHRTSIPVHSKQAEKISRRPSTEDTHEVDSKAALIPDWLQDRPSNREMPSEEGTLNGLTSPFKPAMDTNYYYSAVERNNLMRLSQSIPFTPVPPRGEPVTVYRLEESSPNILNNSMSSWSQLGLCAKIEFLSKEEMGGGLRRAVKVQCTWSEHDILKSGHLYIIKSFLPEVVNTWSSIYKEDTVLHLCLREIQQQRAAQKLTFAFNQMKPKSIPYSPRFLEVFLLYCHSAGQWFAVEECMTGEFRKYNNNNGDEIIPTNTLEEIMLAFSHWTYEYTRGELLVLDLQGVGENLTDPSVIKAEEKRSCDMVFGPANLGEDAIKNFRAKHHCNSCCRKLKLPDLKRNDYTPDKIIFPQDEPSDLNLQPGNSTKESESTNSVRLML

SEQ ID NO: 38676 - protein, 321 aa, Homo sapiens
MAPAFLLLLLLWPQGCVSGPSADSVYTKVRLLEGETLSVQCSYKGYKNRVEGKVWCKIRKKKCEPGFARVWVKGPRYLLQDDAQAKVVNITMVALKLQDSGRYWCMRNTSGILYPLMGFQLDVSPAPQTERNIPFTHLDNILKSGTVTTGQAPTSGPDAPFTTGVMVFTPGLITLPRLLASTRPASKTGYSFTATSTTSQGPRRTMGSQTVTASPSNARDSSAGPESISTKSGDLSTRSPTTGLCLTSRSLLNRLPSMPSIRHQDVYSTVLGVVLTLLVLMLIMVYGFWKKRHMASYSMCSDPSTRDPPGRPEPYVEVYLI

SEQ ID NO: 38677 - protein, 262 aa, Homo sapiens
MASFGWKRKIGEKVSKVTSQQFEAEAADEKDVVDNDEGNWLHAIKRRKEILLEGCAEKSKQLKDEGASLAENKRYREAIQKWDEALQLTPNDATLYEMKSQVLMSLHEMFPAVHAAEMAVQQNPHSWESWQTLGRAQLGLGEIILAIRSFQVALHIYPMNPEIWKEDLSWARTLQEQQKVAQRIKKSEAPAEVTHFSPKSIPDYDFESDEIVAVCAAIAEKEKTVSANKTMVIVSASGAIETVTEKEDGATPPDGSVFIKAR

SEQ ID NO: 38678 - protein, 65 aa, Homo sapiens
MGNPRLPRLLCALKFSGFLSNIRGPLAGEDGMGDTQLARVRDSALKTPWRPAPCPPPAHSLDDWK

SEQ ID NO: 38679 - protein, 37 aa, Homo sapiens
MGNPRLPRLLCALKGARLCSQDPLEARPLPPTSSFVR

SEQ ID NO: 38680 - protein, 447 aa, Homo sapiens
MQESQETHISNHLDEVVAAVSITHRKKFQNKLLQTALFQPPREKLHLCEEKAKSYSNSHEYKQAVHELVRCVALTRICYGDSHWKLAEAHVNLAQGYLQLKGLSLQAKQHAEKARQILANSIVPPYSENTDVFKFSIELFHTMGRALLSLQKFKEAAENLTKAERLSKELLQCGRIIKEEWIEIEARIRLSFAQVYQGQKKSKEALSHYQAALEYVEISKGETSRECVPILRELAGVEQALGLHDVSINHFLQAHLIILSRSPSQVEAADSAHIVAHAAVASGRHEHHDVAEQYFQESMAHLKDSEGMGRTKFLSIQDEFCHFLQMTGQKERATSILRESLEAKVEAFGDFSPEVAETYRLLGGADLAQGNHSGARKKLKKCLQIQTLLYGPQDKRTLATQQAMGMLSTAPKVASKPRQASKAKVAFCTSIPQDTLLGKARPGTTAD

SEQ ID NO: 38681 - protein, 391 aa, Homo sapiens
MQESQETHISNHLDEVVAAVSITHRKKFQNKLLQTALFQPPREKLHLCEEKAKSYSNSHEYKQAVHELVRCVALTRICYGDSHWKLAEAHVNLAQGYLQLKGLSLQAKQHAEKARQILANSIVPPYSENTDVFKFSIELFHTMGRALLSLQKFKEAAENLTKAERLSKELLQCGRIIKEEWIEIEARIRLSFAQVYQGQKKSKEALSHYQAALEYVEISKGETSRECVPILRELAGVEQALGLHDVSINHFLQAHLIILSRSPSQVEAADSAHIVAHAAVASGRHEHHDVAEQYFQESMAHLKDSEGMGRTKFLSIQDEFCHFLQMTGQKERATSILRESLEAKVEAFGDFSPEVAETYRLLGGADLAQGNHSGARKKLKKVKLEPVLTRD

SEQ ID NO: 38682 - protein, 393 aa, Homo sapiens
MQESQETHISNHLDEVVAAVSITHRKKFQNKLLQTALFQPPREKLHLCEEKAKSYSNSHEYKQAVHELVRCVALTRICYGDSHWKLAEAHVNLAQGYLQLKGLSLQAKQHAEKARQILANSIVPPYSENTDVFKFSIELFHTMGRALLSLQKFKEAAENLTKAERLSKELLQCGRIIKEEWIEIEARIRLSFAQVYQGQKKSKEALSHYQAALEYVEISKGETSRECVPILRELAGVEQALGLHDVSINHFLQAHLIILSRSPSQVEAADSAHIVAHAAVASGRHEHHDVAEQYFQESMAHLKDSEGMGRTKFLSIQDEFCHFLQMTGQKERATSILRESLEAKVEAFGDFSPEVAETYRLLGGADLAQGNHSGARKKLKKGDLSFLLSATLP

SEQ ID NO: 38683 - protein, 804 aa, Homo sapiens
MAAHRPGPLKQQNKAHKGGRHRGRGSAQRDGKGRLALKTLSKKVRKELSRVDQRHRASQLRKQKKEAVLAEKRQLGGKDGPPHQVLVVPLHSRISLPEAMQLLQDRDTGTVHLNELGNTQNFMLLCPRLKHRWFFTSARPGDLHVVLDMAKVADTILFLLDPLEGWDSTGDYCLSCLFAQGLPTYTLAVQGISGLPLKKQIDTRKKLSKAVEKRFPHDKLLLLDTQQEAGMLLRQLANQKQQHLAFRDRRAYLFAHAVDFVPSEENNLVGTLKISGYVRGQTLNVNRLLHIVGYGDFQMKQIDAPGDPFPLNPRGIKPQKDPDMAMEICATDAVDDMEEGLKVLMKADPGRQESLQAEVIPDPMEGEQTWPTEEELSEAKDFLKESSKVVKKVPKGTSSYQAEWILDGGSQSGGEGDEYEYDDMEHEDFMEEESQDESSEEEEEYETMTIGESVHDDLYDKKVDEEAEAKMLEKYKQERLEEMFPDEVDTPRDVAARIRFQKYRGLKSFRTSPWDPKENLPQDYARIFQFQNFTNTRKSIFKEVEEKEVEGAEVGWYVTLHVSEVPVSVVECFRQGTPLIAFSLLPHEQKMSVLNMVVRRDPGNTEPVKAKEELIFHCGFRRFRASPLFSQHTAADKHKLQRFLTADMALVATVYAPITFPPASVLLFKQKSNGMHSLIATGHLMSVDPDRMVIKRVVLSGHPFKIFTKMAVVRYMFFNREDVLWFKPVELRTKWGRRGHIKEPLGTHGHMKCSFDGKLKSQDTVLMNLYKRVFPKWTYDPYVPEPVPWLKSEISSTVPQGGME

SEQ ID NO: 38684 - protein, 1048 aa, Homo sapiens
MEGRSAAAETFVWVNNASAHSQSVAKAKYEFLFGRSEGKAPDTSDHGGSTLLPPNVTNEFPEYGTMEEGGEGLRASLEFDGEALPCHPQEQQGVQPLTGCHSGLDSVTEGPKDVREAPSQSHLKEQSLQPIDSLISALKATEARIISGTLQATKVLDQDAVSSFSVQQVEKELDTASRKTQRVNKTLPAGQKNLPEIPLSAEVTTEESFYLSIQKDLTALLTGDTQAEISQIMNNGRKGAVCVQEPSCPLASLGSSAVTCHSAGSVGFLKEQRSALGREHPGGCDRSSSMGRPGRVKHVEFQGVEILWTGGDKRETQHPIDFETSLQRTASPDSKESSKVPRHLISSAGLCNSSSLTENVWDESWKAPSERPGTSSGTFSPVRLDESGEDEVFLQENKQHLEKTPKPERDRERISEQEEHVKGEDEDILGPGYTEDSTDVYSSQFETILDNTSLYYSAESLETLYSEPDSYFSFEMPLTPMIQQRIKEGGQFLERTSGGGHQDILSVSADGGIVMGYSSGVTNGLNDASDSIYTKGTPEIAFWGSNAGVKTTRLEAHSEMGSTEILEKETPENLSNGTSSNVEAAKRLAKRLYQLDRFKRSDVAKHLGKNNEFSKLVAEEYLKFFDFTGMTLDQSLRYFFKAFSLVGETQERERVLIHFSNRYFYCNPDTIASQDGVHCLTCAIMLLNTDLHGHVNIGKKMTCQEFIANLQGVNEGVDFSKDLLKALYNSIKNEKLEWAVDDEEKKKSPSESTEEKANGTHPKTISRIGSTTNPFLDIPHDPNAAVYKSGFLARKIHADMDGKKTPRGKRGWKTFYAVLKGTVLYLQKDEYKPEKALSEEDLKNAVSVHHALASKATDYEKKPNVFKLKTADWRVLLFQTQSPEEMQGWINKINCVAAVFSAPPFPAAIGSQKKFSRPLLPATTTKLSQEEQLKSHESKLKQITTELAEHRSYPPDKKVKAKDVDEYKLKDHYLEFEKTRYEMYVSILKEGGKELLSNDESEAAGLKKSHSSPSLNPDTSPITAKVKRNVSERKDHRPETPSIKQKVT

SEQ ID NO: 38685 - protein, 1047 aa, Homo sapiens
MEGRSAAAETFVWVNNASAHSQSVAKAKYEFLFGRSEGKAPDTSDHGGSTLLPPNVTNEFPEYGTMEEGGEGLRASLEFDGEALPCHPQEQQGVQPLTGCHSGLDSVTEGPKDVREAPSQSHLKEQSLQPIDSLISALKATEARIISGTLQATKVLDQDAVSSFSVQQVEKELDTASRKTQRVNKTLPAGQKNLPEIPLSAEVTTEESFYLSIQKDLTALLTGDTQAEISQIMNNGRKGAVCVQEPSCPLASLGSSAVTCHSAGSVGFLKEQRSALGREHPGGCDRSSSMGRPGRVKHVEFQGVEILWTGGDKRETQHPIDFETSLQRTASPDSKESSKVPRHLISSAGLCNSSSLTENVWDESWKAPSERPGTSSGTFSPVRLDESGEDEVFLQENKQHLEKTPKPERDRERISEQEEHVKGEDEDILGPGYTEDSTDVYSSQFETILDNTSLYYSAESLETLYSEPDSYFSFEMPLTPMIQQRIKEGGQFLERTSGGGHQDILSVSADGGIVMGYSSGVTNGLNDASDSIYTKGTPEIAFWGSNAGVKTTRLEAHSEMGSTEILEKETPENLSNGTSSNVEAAKRLAKRLYQLDRFKRSDVAKHLGKNNEFSKLVAEEYLKFFDFTGMTLDQSLRYFFKAFSLVGETQERERVLIHFSNRYFYCNPDTIASQDGVHCLTCAIMLLNTDLHGHNIGKKMTCQEFIANLQGVNEGVDFSKDLLKALYNSIKNEKLEWAVDDEEKKKSPSESTEEKANGTHPKTISRIGSTTNPFLDIPHDPNAAVYKSGFLARKIHADMDGKKTPRGKRGWKTFYAVLKGTVLYLQKDEYKPEKALSEEDLKNAVSVHHALASKATDYEKKPNVFKLKTADWRVLLFQTQSPEEMQGWINKINCVAAVFSAPPFPAAIGSQKKFSRPLLPATTTKLSQEEQLKSHESKLKQITTELAEHRSYPPDKKVKAKDVDEYKLKDHYLEFEKTRYEMYVSILKEGGKELLSNDESEAAGLKKSHSSPSLNPDTSPITAKVKRNVSERKDHRPETPSIKQKVT

SEQ ID NO: 38686 - protein, 513 aa, Homo sapiens
MGSSWCLYGCCNAGVKTTRLEAHSEMGSTEILEKETPENLSNGTSSNVEAAKRLAKRLYQLDRFKRSDVAKHLGKNNEFSKLVAEEYLKFFDFTGMTLDQSLRYFFKAFSLVGETQERERVLIHFSNRYFYCNPDTIASQDGVHCLTCAIMLLNTDLHGHNIGKKMTCQEFIANLQGVNEGVDFSKDLLKALYNSIKNEKLEWAVDDEEKKKSPSESTEEKANGTHPKTISRIGSTTNPFLDIPHDPNAAVYKSGFLARKIHADMDGKKTPRGKRGWKTFYAVLKGTVLYLQKDEYKPEKALSEEDLKNAVSVHHALASKATDYEKKPNVFKLKTADWRVLLFQTQSPEEMQGWINKINCVAAVFSAPPFPAAIGSQKKFSRPLLPATTTKLSQEEQLKSHESKLKQITTELAEHRSYPPDKKVKAKDVDEYKLKDHYLEFEKTRYEMYVSILKEGGKELLSNDESEAAGLKKSHSSPSLNPDTSPITAKVKRNVSERKDHRPETPSIKQKVT

SEQ ID NO: 38687 - protein, 166 aa, Homo sapiens
MFSLPLNCSPDHIRRGSCWGRPQDLKIAAPAWNSKCHPGAGAAMARQHARTLWYDRPRYVFMEFCVEDSTDVHVLIEDHRIVFSCKNADGVELYNEIEFYAKVNSKPVWLSVDFDNWRDWEGDEEMELAHVEHYAELLKKVSTKRPPPAMDDLDDDSDSADDATSN

SEQ ID NO: 38688 - protein, 161 aa, Homo sapiens
MFSLPLNCSPDHIRRGSCWGRPQDLKIAAPAWNSKCHPGAGAAMARCKNADGVELYNEIEFYAKVNSKDSQDKRSSRSITCFVRKWKEKVAWPRLTKEDIKPVWLSVDFDNWRDWEGDEEMELAHVEHYAELLKKVSTKRPPPAMDDLDDDSDSADDATSN

SEQ ID NO: 38689 - protein, 123 aa, Homo sapiens
MARQHARTLWYDRPRYVFMEFCVEDSTDVHVLIEDHRIVFSCKNADGVELYNEIEFYAKVNSKPVWLSVDFDNWRDWEGDEEMELAHVEHYAELLKKVSTKRPPPAMDDLDDDSDSADDATSN

SEQ ID NO: 38690 - protein, 586 aa, Homo sapiens
MKYILVTGGVISGIGKGIIASSIGTILKSCGLRVTAIKIDPYINIDAGTFSPYEHGEVFVLNDGGEVDLDLGNYERFLDINLYKDNNITTGKIYQHVINKERRGDYLGKTVQVVPHITDAVQEWVMNQAKVPVDGNKEEPQICVIELGGTIGDIEGMPFVEAFRQFQFKAKRENFCNIHVSLVPQLSATGEQKTKPTQNSVRALRGLGLSPDLIVCRSSTPIEMAVKEKISMFCHVNPEQVICIHDVSSTYRVPVLLEEQSIVKYFKERLHLPIGDSASNLLFKWRNMADRYERLQKICSIALVGKYTKLRDCYASVFKALEHSALAINHKLNLMYIDSIDLEKITETEDPVKFHEAWQKLCKADGILVPGGFGIRGTLGKLQAISWARTKKIPFLGVCLGMQLAVIEFARNCLNLKDADSTEFRPNAPVPLVIDMPEHNPGNLGGTMRLGIRRTVFKTENSILRKLYGDVPFIEERHRHRFEVNPNLIKQFEQNDLSFVGQDVDGDRMEIIELANHPYFVGVQFHPEFSSRPMKPSPPYLGLLLAATGNLNAYLQQGCKLSSSDRYSDASDDSFSEPRIAELEIS

SEQ ID NO: 38691 - protein, 282 aa, Homo sapiens
MPLLTQQIQDEDDQYSLVASLDNVRNLSTILKAIHFREHATCFATKNGIKVTVENAKCVQANAFIQAGIFQEFKVQEESVTFRINLTVLLDCLSIFGSSPMPGTLTALRMCYQGYGYPLMLFLEEGGVVTVCKINTQEPEETLDFDFCSTNVINKIILQSEGLREAFSELDMTSEVLQITMSPDKPYFRLSTFGNAGSSHLDYPKDSDLMEAFHCNQTQVNRYKISLLKPSTKALVLSCKVSIRTDNRGFLSLQYMIRNEDGQICFVEYYCCPDEEVPESES

SEQ ID NO: 38692 - protein, 246 aa, Homo sapiens
MPLLTQQIQDEDDQYSLVASLDNVRNLSTILKAIHFREHATCFATKNGIKVTVENAKCVQANAFIQGTLTALRMCYQGYGYPLMLFLEEGGVVTVCKINTQEPEETLDFDFCSTNVINKIILQSEGLREAFSELDMTSEVLQITMSPDKPYFRLSTFGNAGSSHLDYPKDSDLMEAFHCNQTQVNRYKISLLKPSTKALVLSCKVSIRTDNRGFLSLQYMIRNEDGQICFVEYYCCPDEEVPESES

SEQ ID NO: 38693 - protein, 68 aa, Homo sapiens
MPLLTQQIQDEDDQYSLVASLDNVRNLSTILKAIHFREHATCFATKNGIKVTVENAKCVQANAFIQGL

SEQ ID NO: 38694 - protein, 476 aa, Homo sapiens
MDEAGSSASGGGFRPGVDSLDEPPNSRIFLVISKYTPESVLRERFSPFGDIQDIWVVRDKHTKESKGIAFVKFARSSQACRAMEEMHGQCLGPNDTKPIKVFIAQSRSSGSHRDVEDEELTRIFVMIPKSYTEEDLREKFKVYGDIEYCSIIKNKVTGESKGLGYVRYLKPSQAAQAIENCDRSFRAILAEPKNKASESSEQDYYSNMRQEALGHEPRVNMFPFVGEQQSEFSSFDKNDSRGQEAISKRLSVVSRVPFTEEQLFSIFDIVPGLEYCEVQRDPYSNYGHGVVQYFNVASAIYAKYKLHGFQYPPGNRIGVSFIDDGSNATDLLRKMATQMVAAQLASMVWNNPSQQQFMQFGGSSGSQLPQIQTDVVLPSCKKKAPAETPVKERLFIVFNPHPLPLDVLEDIFCRFGNLIEVYLVSGKNVGYAKYADRISANDAIATLHGKILNGVRLKVMLADSPREESNKRQRTY

SEQ ID NO: 38695 - protein, 328 aa, Homo sapiens
MDEAGSSASGGGFRPGVDSLDEPPNSRIFLVISKYTPESVLRERFSPFGDIQDIWVVRDKHTKESKGIAFVKFARSSQACRAMEEMHGQCLGPNDTKPIKVFIAQSRSSGSHRDVEDEELTRIFVMIPKSYTEEDLREKFKVYGDIEYCSIIKNKVTGESKGLGYVRYLKPSQAAQAIENCDRSFRAILAEPKNKASESSEQDYYSNMRQEALGHEPRVNMFPFEQQSEFSSFDKNDSRGQEAISKRLSVVSRVPFTEEQLFSIFDIVPGLEYCEVQRDPYSNYGHGVVQYFNVASAIYAKYKLHGFQYPPGNRIGVSFIDDGSNATE

SEQ ID NO: 38696 - protein, 474 aa, Homo sapiens
MDEAGSSASGGGFRPGVDSLDEPPNSRIFLVISKYTPESVLRERFSPFGDIQDIWVVRDKHTKESKGIAFVKFARSSQACRAMEEMHGQCLGPNDTKPIKVFIAQSRSSGSHRDVEDEELTRIFVMIPKSYTEEDLREKFKVYGDIEYCSIIKNKVTGESKGLGYVRYLKPSQAAQAIENCDRSFRAILAEPKNKASESSEQDYYSNMRQEALGHEPRVNMFPFEQQSEFSSFDKNDSRGQEAISKRLSVVSRVPFTEEQLFSIFDIVPGLEYCEVQRDPYSNYGHGVVQYFNVASAIYAKYKLHGFQYPPGNRIGVSFIDDGSNATDLLRKMATQMVAAQLASMVWNNPSQQQFMQFGGSSGSQLPQIQTDVVLPSCKKKAPAETPVKERLFIVFNPHPLPLDVLEDIFCRFGNLIEVYLVSGKNVGYAKYADRISANDAIATLHGKILNGVRLKVMLADSPREESNKRQRTY

SEQ ID NO: 38697 - protein, 1088 aa, Homo sapiens
MALHFQSLAELEVLCTHLYIGTDLTQRIEAEKALLELIDSPECLSKCQLLLEQGTTSYAQLLAATCLSKLVSRVSPLPVEQRMDIRNYILNYVASQPKLAPFVIQALIQVIAKITKLGWFEVQKDQFVFREIIADVKKFLQGTVEHCIIGVIILSELTQEMNLVDYSRPSAKHRKIATSFRDTSLKDVLVLACSLLKEVFAKPLNLQDQCQQNLVMQVLKLVLNCLNFDFIGSSADESADDLCTVQIPTTWRTIFLEPETLDLFFNLYHSLPPLLSQLALSCLVQFASTRRSLFNSPERAKYLGNLIKGVKRILENPQGLSDPGNYHEFCRFLARLKTNYQLGELVMVKEYPEVIRLIANFTITSLQHWEFAPNSVHYLLTLWQRMVASVPFVKSTEPHLLDTYAPEITKAFITSRLDSVAIVVRDHLDDPLDDTATVFQQLEQLCTVSRCEYEKTCALLVQLFDQNAQNYQKLLHPYSGVTVDITIQEGRLAWLVYLVGTVVGGRLTYTSTDEHDAMDGELSCRVFQLISLMDTGLPRCCNEKIELAILWFLDQFRKTYVGDQLQRTSKVYARMSEVLGITDDNHVLETFMTKIVTNLKYWGRYEPVISRTLQFLNDLSVGYILLKKLVKIDAVKFMLKNHTSEHFPFLGISDNHSLSDFRCRTTFYTALTRLLMVDLGEDEDEFENFMLPLTVAFETVLQIFNNNFKQEDVKRMLIGLARDLRGIAFALNTKTSYTMLFDWMYPTYLPLLQNAVERWYGEPTCTTPILKLMAELMQNRSQRLNFDVSSPNGILLFREASKMVCTYGNQILSLGSLSKDQIYPMKLKGISICYSALKSALCGNYVSFGVFKLYGDNHFDNVLQAFVKMLLSVSHSDLLQYRKLSQSYYPLLECLTQDHMSFIINLEPPVLMYVLTSISEGLTTLDTVVSSSCCTSLDYIVTYLFKHIAKEGKKPLRCREATQAGQRLLHFMQQNPDVLQQMMSVLMNTIVFEDCRNQWSVSRPLLGLILLNEKYFSELRASLINSQPLPKQEVLAQCFRNLMEGVEQNLSVKNRDRFTQNLSVFRRDVAEALRSDGNTEPCSLDMMS

SEQ ID NO: 38698 - protein, 576 aa, Homo sapiens
MALHFQSLAELEVLCTHLYIGTDLTQRIEAEKALLELIDSPECLSKCQLLLEQGTTSYAQLLAATCLSKLVSRVSPLPVEQRMDIRNYILNYVASQPKLAPFVIQALIQVIAKITKLGWFEVQKDQFVFREIIADVKKFLQGTVEHCIIGVIILSELTQEMNLVDYSRPSAKHRKIATSFRDTSLKDVLVLACSLLKEVFAKPLNLQDQCQQNLVMQVLKLVLNCLNFDFIGSSADESADDLCTVQIPTTWRTIFLEPETLDLFFNLYHSLPPLLSQLALSCLVQFASTRRSLFNSPERAKYLGNLIKGVKRILENPQGLSDPGNYHEFCRFLARLKTNYQLGELVMVKEYPEVIRLIANFTITSLQHWEFAPNSVHYLLTLWQRMVASVPFVKSTEPHLLDTYAPEITKAFITSRLDSVAIVVRDHLDDPLDDTATVFQQLEQLCTVSRCEYEKTCALLVQLFDQNAQNYQKLLHPYSGVTVDITIQEGRLAWLVYLVGTVVGGRLTYTSTDEHDAMDGELSCRVFQLISLMDTGLPRCCNEKIELAILWFLDQFRKTYVGDQLQRTSKKTDIFL

SEQ ID NO: 38699 - protein, 418 aa, Homo sapiens
MAMASPAIGQRPYPLLLDPEPPRYLQSLSGPELPPPPPDRSSRLCVPAPLSTAPGAREGRSARRAARGNLEPPPRASRPARPLRPGLQQRLRRRPGAPRPRDVRSIFEQPQDPRVPAERGEGHCFAELVLPGGPGWCDLCGREVLRQALRCTNCKFTCHPECRSLIQLDCSQQEGLSRDRPSPESTLTVTFSQNVCKPVEETQRPPTLQEIKQKIDSYNTREKNCLGMKLSEDGTYTGFIKVHLKLRRPVTVPAGIRPQSIYDAIKEVNLAATTDKRTSFYLPLDAIKQLHISSTTTVSEVIQGLLKKFMVVDNPQKFALFKRIHKDGQVLFQKLSIADRPLYLRLLAGPDTEVLSFVLKENETGEVEWDAFSIPELQNFLTILEKEEQDKIQQVQKKYDKFRQKLEEALRESQGKPG

SEQ ID NO: 38700 - protein, 265 aa, Homo sapiens
MTVDSSMSSGYCSLDEELEDCFFTAKTTFFRNAQSKHLSKNVCKPVEETQRPPTLQEIKQKIDSYNTREKNCLGMKLSEDGTYTGFIKVHLKLRRPVTVPAGIRPQSIYDAIKEVNLAATTDKRTSFYLPLDAIKQLHISSTTTVSEVIQGLLKKFMVVDNPQKFALFKRIHKDGQVLFQKLSIADRPLYLRLLAGPDTEVLSFVLKENETGEVEWDAFSIPELQNFLTILEKEEQDKIQQVQKKYDKFRQKLEEALRESQGKPG

SEQ ID NO: 38701 - protein, 336 aa, Homo sapiens
MAMASPAIGQRPYPLLLDPEPPRYLQSLSGPELPPPPPDRSSRLCVPAPLSTAPGAREGRSARRAARGNLEPPPRASRPARPLRPGLQQRLRRRPGAPRPRDVRSIFEQPQDPRVPAERGEGHCFAELVLPGGPGWCDLCGREVLRQALRCTNCKFTCHPECRSLIQLDCSQQEGLSRDRPSPESTLTVTFSQNVCKPVEETQRPPTLQEIKQKIDSYNTREKNCLGMKLSEDGTYTGFIKVHLKLRRPVTVPAGIRPQSIYDAIKEVNLAATTDKRTSFYLPLDAIKQLHISSTTTVSEVIQGLLKKFMVVDNPQKFALFKRIHKDGQVGCLLHP

SEQ ID NO: 38702 - protein, 204 aa, Homo sapiens [sequence omitted]

SEQ ID NO: 38703 - protein, 125 aa, Homo sapiens [sequence omitted]

SEQ ID NO: 38704 - protein, 717 aa, Homo sapiens
MGDLPPYPERPAQQPPGRRTSQASQRRHSRDQAQALAADPEERQQIPPDAQRNAPGWSQRGSLSQQENLLMPQVFQAEEARLGGMEYPSVNTGFPSEFQPQPYSDESRMQVAELTTSLMLQRLQQGQSSLFQQLDPTFQEPPVNPLGQFNLYQTDQFSEGAQHGPYIRDDPALQFLPSELGFPHYSAQVPEPEPLELAVQNAKAYLLQTSINCDLSLYEHLVNLLTKILNQRPEDPLSVLESLNRTTQWEWFHPKLDTLRDDPEMQPTYKMAEKQKALFTRSGGGTEGEQEMEEEVGETPVPNIMETAFYFEQAGVGLSSDESFRIFLAMKQLVEQQPIHTCRFWGKILGIKRSYLVAEVEFREGEEEAEEEEVEEMTEGGEVMEAHGEEEGEEDEEKAVDIVPKSVWKPPPVIPKEESRSGANKYLYFVCNEPGLPWTRLPHVTPAQIVNARKIKKFFTGYLDTPVVSYPPFPGNEANYLRAQIARISAATQVSPLGFYQFSEEEGDEEEEGGAGRDSYEENPDFEGIPVLELVDSMANWVHHTQHILPQGRCTWVNPLQKTEEEEDLGEEEEKADEGPEEVEQEVGPPLLTPLSEDAEIMHLAPWTTRLSCSLCPQYSVAVVRSNLWPGAYAYASGKKFENIYIGWGHKYSPESFNPALPAPIQQEYPSGPEIMEMSDPTVEEEQALKAAQEQALGATEEEEEGEEEEEGEETDD

SEQ ID NO: 38705 - protein, 267 aa, Homo sapiens
MAEPVQEELSVLAAIFCRPHEWEVLSRSETDGTVFRIHTKAEGFMDVDIPLELVFHLPVNYPSCLPGISINSEQLTRAQCVTVKENLLEQAESLLSEPMVHELVLWIQQNLRHILSQPETGSGSEKCTFSTSTTMDDGLWITLLHLDHMRAKTKYVKIVEKWASDLRLTGRLMFMGKIILILLQGDRNNLKEYLILQKTSKVDVDSSGKKCKEKMISVLFETKVQTEHKRFLAFEVKEYSALDELQKEFETAGLKKLFSEFVLALVK

SEQ ID NO: 38706 - protein, 195 aa, Homo sapiens
MAEPVQEELSVLAAIFCRPHEWEVLSRSETDGTVFRIHTKAEGFMDVDIPLELVFHLPVNYPSCLPGISINSEQLTRAQCVTVKENLLEQAESLLSEPMVHELVLWIQQNLRHILSQPETGSGSEKCTFSTSTTMDDGLWITLLHLDHMRAKTKYVKIVEKWASDLRLTGRLMFMGKIILILLQGDRNNLKVPKS

SEQ ID NO: 38707 - protein, 185 aa, Homo sapiens
MFLSCGSLHQRGPETDGTVFRIHTKAEGFMDVDIPLELVFHLPVNYPSCLPGISINSEQLTRAQCVTVKENLLEQAESLLSEPMVHELVLWIQQNLRHILSQPETGSGSEKCTFSTSTTMDDGLWITLLHLDHMRAKTKYVKIVEKWASDLRLTGRLMFMGVLDSSENLQSRCGLKWKEMQREND

SEQ ID NO: 38708 - protein, 200 aa, Homo sapiens
MAEPVQEELSVLAAIFCRPHEWEVLSRSETDGTVFRIHTKAEGFMDVDIPLELVFHLPVNYPSCLPGISINSEQLTRAQCVTVKENLLEQAESLLSEPMVHELVLWIQQNLRHILSQPETGSGSEKCTFSTSTTMDDGLWITLLHLDHMRAKTKYVKIVEKWASDLRLTGRLMFMGVLDSSENLQSRCGLKWKEMQREND

SEQ ID NO: 38709 - protein, 229 aa, Homo sapiens
MDCRVHMRPIGLTWVLQLTLAWILLEACGGSRPLQARSQQHHGLAADLGKGKLHLAGPCCPSEMDTTETSGPGNHPERCGVPSPECESFLEHLQRALRSRFRLRLLGVRQAQPLCEELCQAWFANCEDDITCGPTWLPLSEKRGCEPSCLTYGQTFADGTDLCRSALGHALPVAAPGARHCFNISISAVPRPRPGRRGREAPSRRSRSPRTSILDAAGSGSGSGSGSGP

SEQ ID NO: 38710 - protein, 261 aa, Homo sapiens
MDEALETQLKTSRGRFSATESLPTLELLSQVDMDCRVHMRPIGLTWVLQLTLAWILLEACGGSRPLQARSQQHHGLAADLGKGKLHLAGPCCPSEMDTTETSGPGNHPERCGVPSPECESFLEHLQRALRSRFRLRLLGVRQAQPLCEELCQAWFANCEDDITCGPTWLPLSEKRGCEPSCLTYGQTFADGTDLCRSALGHALPVAAPGARHCFNISISAVPRPRPGRRGREAPSRRSRSPRTSILDAAGSGSGSGSGSGP

SEQ ID NO: 38711 - protein, 239 aa, Homo sapiens
MARQLLSQVDMDCRVHMRPIGLTWVLQLTLAWILLEACGGSRPLQARSQQHHGLAADLGKGKLHLAGPCCPSEMDTTETSGPGNHPERCGVPSPECESFLEHLQRALRSRFRLRLLGVRQAQPLCEELCQAWFANCEDDITCGPTWLPLSEKRGCEPSCLTYGQTFADGTDLCRSALGHALPVAAPGARHCFNISISAVPRPRPGRRGREAPSRRSRSPRTSILDAAGSGSGSGSGSGP

SEQ ID NO: 38712 - protein, 113 aa, Homo sapiens
MDGRVQLMKALLAGPLRPAARRWRNPIPFPETFDGDTDRLPEFIVQTSSYMFVDENTFSNDALKVTFLITRLTGPALQWVIPYIRKESPLLNDYRGFLAEMKRVFGWEEDEDF

SEQ ID NO: 38713 - protein, 113 aa, Homo sapiens
MEGRVQLMKALLARPLRPAARRWRNPIPFPETFDGDTDRLPEFIVQTSSYMFVDENTFSNDALKVTFLITRLTGPALQWVIPYIKKESPLLSDYRGFLAEMKRVFGWEEDEDF

SEQ ID NO: 38714 - protein, 696 aa, Homo sapiens
MVQRYQSPVRVYKYPFELVMAAYEKRFPTCPQIPVFLGSEVLRESRSPDGAVHVVERSCRLRVDAPRLLRKIAGVEHVVFVQTNILNWKERTLLIEAHNETFANRVVVNEHCSYTVHPENEDWTCFEQSASLDIRSFFGFENALEKIAMKQYTANVKRGKEVIEHYLNELISQGTSHIPRWTPAPVREEDARNQAGPRDPSSLEAHGPRSTLGPALEAVSMDGDKLDADYIERCLGHLTPMQESCLIQLRHWLQETHKGKIPKDEHILRFLRAHDFHLDKAREMLRQSLSWRKQHQVDLLLQTWQPPALLEEFYAGGWHYQDIDGRPLYILRLGQMDTKGLMKAVGEEALLRHVLSVNEEGQKRCEGSTRQLGRPISSWTCLLDLEGLNMRHLWRPGVKALLRMIEVVEDNYPETLGRLLIVRAPRVFPVLWTLISPFINENTRRKFLIYSGSNYQGPGGLVDYLDREVIPDFLGGESVCNVPEGGLVPKSLYMTEEEQEHTDQLWQWSETYHSASVLRGAPHEVAVEILEGESVITWDFDILRGDVVFSLYHTKQAPRLGAREPGTRASGQLIDKGWVLGRDYSRVEAPLVCREGESIQGSHVTRWPGVYLLQWQMHSPPSSVACSLPGVDDVLTALHSPGPKCKLLYYCEVLASEDFRGSMSSLESCTSGFSQLSAATSSSSSGQSHSSSLVSR

SEQ ID NO: 38715 - protein, 350 aa, Homo sapiens
MNPRGLFQDFNPSKFLIYTCLLLFSVLLPLRLDGIIQWSYWAVFAPIWLWKLLVVAGASVGAGVWARNPRYRTEGEACVEFKAMLIAVGIHLLLLMFEVLVCDRVERGTHFWLLVFMPLFFVSPVSVAACVWGFRHDRSLELEILCSVNILQFIFIALKLDRIIHWPWLVVFVPLWILMSFLCLVVLYYIVWSLLFLRSLDVVAEQRRTHVTMAISWITIVVPLLTFEVLLVHRLDGHNTFSYVSIFVPLWLSLLTLMATTFRRKGGNHWWFGIRRDFCQFLLEIFPFLREYGNISYDLHHEDSEDAEETSVPEAPKIAPIFGKKARVVITQSPGKYVPPPPKLNIDMPD

SEQ ID NO: 38716 - protein, 160 aa, Homo sapiens
MMNNTDFLMLNNPWNKLCLVSMDFCFPLDFVSNLFWIFASKFIIVTGQIKADFKRTSWEAKAEGSLEPGRLKLQLASIVPLYSSLVTAGPASKIIILKRTSLPTVSPSNERAYLLPVSFTDLAHVFYLSYFSINAKSNSFSLDIIIALGIPHNTQAHFNH

SEQ ID NO: 38717 - protein, 346 aa, Homo sapiens
MCRATLGLPLPPIVIQPARRSLPPIVTPASRRLGPRGGRHLGSVSTAMAATQELLLQLQKDNRDGRQRKQELEKLMRGLEAESESLNQRLQDLSERERSLLRRRSQAAQPLQGEAREAARERAERVRRRLEEAERHKEDLEQHSRQLQEQWEELSSQLFYGGEPQSQKSTEQQLAAQLVTLQNELELAETKCALQEEKLQQDALQTAEAWAIFQEQTVVLQVRPHSDAKVPPASPPPDLGRCDGQLRGVQYSTESLMEEMARADRETRLFGGPRALAIRRCVLGALQVLLTLPLLFLGLSLLWTVLLDPGAVSAWLWSLTSETTLRRLRYTLSPLLELRANGLLPT

SEQ ID NO: 38718 - protein, 347 aa, Homo sapiens
MCRATLGLPLPPIVIQPARRSLPPIVTPASRRLGPRGGRHLGSVSTAMAATQELLLQLQKDNRDGRQRKQELEKLMRGLEAESESLNQRLQDLSERERSLLRRRSQAAQPLQGEAREAARERAERVRRRLEEAERHKEYLEQHSRQLQEQWEELSSQLFYYGGELQSQKSTEQQLAAQLVTLQNELELAETKCALQEEKLQQDALQTAEAWAIFQEQTVVLQVRPHSDAKVPPASPPPDLGRCDGQLRGVQYSTESLMEEMARADRETRLFGGPRALAIRRCVLGALQVLLTLPLLFLGLSLLWTVLLDPGAVSAWLWSLTSETTLRRLRYTLSPLLELRANGLLPT

SEQ ID NO: 38719 - protein, 337 aa, Homo sapiens
MSSSPVKRQRMESALDQLKQFTTVVADTGDFHAIDEYKPQDATTNPSLILAAAQMPAYQELVEEAIAYGRKLGGSQEDQIKNAIDKLFVLFGAEILKKIPGRVSTEVDARLSFDKDAMVARARRLIELYKEAGISKDRILIKLSSTWEGIQAGKELEEQHGIHCNMTLLFSFAQAVACAEAGVTLISPFVGRILDWHVANTDKKSYEPLEDPGVKSVTKIYNYYKKFSYKTIVMGASFRNTGEIKALAGCDFLTISPKLLGELLQDNAKLVPVLSAKAAQASDLEKIHLDEKSFRWLHNEDQMAVEKLSDGIRKFAADAVKLERMLTERMFNAENGK

SEQ ID NO: 38720 - protein, 491 aa, Homo sapiens
MIATGGVITGLAALKRQDSARSQQHVNLSPSPATQEKKPIRRRPRADVVVVRGKIRLYSPSGFFLILGVLISIIGIAMAVLGYWPQKEHFIDAETTLSTNETQVIRNEGGVVVRFFEQHLHSDKMKMLGPFTMGIGIFIFICANAILHENRDKETKIIHMRDIYSTVIDIHTLRIKEQRQMNGMYTGLMGETEVKQNGSSCASRLAANTIASFSGFRSSFRMDSSVEEDELMLNEGKSSGHLMPPLLSDSSVSVFGLYPPPSKTTDDKTSGSKKCETKSIVSSSISAFTLPVIKLNNCVIDEPSIDNITEDADNLKSRSRNLSMDSLVVPLPNTSESFQPVSTVLPRNNSIGESLSSQYKSSMALGPGAGQLLSPGAARRQFGSNTSLHLLSSHSKSLDLDRGPSTLTVQAEQRKHPSWPRLDRNNSKGYMKLENKEDPMDRLLVPQVAIKKDFTNKEKLLMISRSHNNLSFEHDEFLSNNLKRGTSETRF

SEQ ID NO: 38721 - protein, 307 aa, Homo sapiens
MTAGSPEECGEVRRSPEGRVSRLGRRLGRRRRPRSPPEPLRVRARLRLRSPSGAFAALGALVVLVGMGIAVAGYWPHRAGAPGSRAANASSPQMSELRREGRGGGRAHGPHERLRLLGPVIMGVGLFVFICANTLLYENRDLETRRLRQGVLRAQALRPPDGPGWDCALLPSPGPRSPRAVGCAEPEIWDPSPRRGTSPVPSVRSLRSEPANPRLGLPALLNSYPLKGPGLPPPWGPRTQTGHVIITVQPSGSCIEHSKSLDLGLGELLLGAPAARDCAHRSWPRLDRLSLGGYAKLGGGGDLGARV

SEQ ID NO: 38722 - protein, 929 aa, Homo sapiens
MCESYSRSLLRVSVAQICQALGWDSVQLSACHLLTDVLQRYLQQLGRGCHRYSELYGRTDPILDDVGEAFQLMGVSLHELEDYIHNIEPVTFPHQIPSFPVSKNNVLQFPQPGSKDAEERKEYIPDYLPPIVSSQEEEEEEQVPTDGGTSAEAMQVPLEEDDELEEEEIINDENFLGKRPLDSPEAEELPAMKRPRLLSTKGDTLDVVLLEAREPLSSINTQKIPPMLSPVHVQDSTDLAPPSPEPPMLAPVAKSQMPTAKPLETKSFTPKTKTKTSSPGQKTKSPKTAQSPAMVGSPIRSPKTVSKEKKSPGRSKSPKSPKSPKVTTHIPQTPVRPETPNRTPSATLSEKISKETIQVKQIQTPPDAGKLNSENQPKKAVVADKTIEASIDAVIARACAEREPDPFEFSSGSESEGDIFTSPKRISGPECTTPKASTSANNFTKSGSTPLPLSGGTSSSDNSWTMDASIDEVVRKAKLGTPSNMPPNFPYISSPSVSPPTPEPLHKVYEEKTKLPSSVEVKKKLKKELKTKMKKKEKQRDREREKDKNKDKSKEKDKVKEKEKDKETGRETKYPWKEFLKEEEADPYKFKIKEFEDVDPKVKLKDGLVRKEKEKHKDKKKDREKGKKDKDKREKEKVKDKGREDKMKAPAPPLVLPPKELALPLFSPATASRVPAMLPSLLPVLPEKLFEEKEKVKEKEKKKDKKEKKKKKEKEKEKKEKEREKEKREREKREKEKEKHKHEKIKVEPVALAPSPVIPRLTLRVGAGQDKIVISKVVPAPEAKPAPSQNRPKTPPPAPAPAPGPMLVSPAPVPLPLLAQAAAGPALLPSPGPAASGASAKAPVRSVVTETVSTYVIRDEWGNQIWICPGCNKPDDGSPMIGCDDCDDWYHWPCVGIMTAPPEEMQWFCPKCANKKKDKKHKKRKHRAH

SEQ ID NO: 38723 - protein, 477 aa, Homo sapiens
MAAPILRSFSWGRWSGTLNLSVLLPLGLRKAHSGAQGLLAAQKARGLFKDFFPETGTKIELPELFDRGTASFPQTIYCGFDPTADSLHVGHLLALLGLFHLQRAGHNVIALVGGATARLGDPSGRTKEREALETERVRANARALRLGLEALAANHQQLFTDGRSWGSFTVLDNSAWYQKQHLVDFLAAVGGHFRMGTLLSRQSVQLRLKSPEGMSLAEFFYQVLQAYDFYYLFQRYGCRVQLGGSDQLGNIMSGYEFINKLTGEDVFGITVPLITSTTGAKLGKSAGNAVWLNRDKTSPFELYQFFVRQPDDSVERYLKLFTFLPLPEIDHIMQLHVKEPERRGPQKRLAAEVTKLVHGREGLDSAKRCTQALYHSSIDALEVMSDQELKELFKEAPFSEFFLDPGTSVLDTCRKANAIPDGPRGYRMITEGGVSINHQQVTNPESVLIVGQHILKNGLSLLKIGKRNFYIIKWLQL

SEQ ID NO: 38724 - protein, 177 aa, Homo sapiens
MAHPVQSEFPSAQEPGSAAFLDLPEMEILLTKAENKDDKTLNLSKTLSGPLDLEQNSQGLPFKAISEGHLEAPLPRSPSRASSRRASSIATTSYAQDQEAPRDYLILAVVACFCPVWPLNLIPLIISIMSRSSMQQGNVDGARRLGRLARLLSITLIIMGIVIIMVAVTVNFTVQKK

SEQ ID NO: 38725 - protein, 271 aa, Homo sapiens
MTAWILLPVSLSAFSITGIWTVYAMAVMNHHVCPVENWSYNESCPPDPAEQGGPKTCCTLDDVPLISKCGSYPPESCLFSLIGNMGAFMVALICLLRYGQLLEQSRHSWVNTTALITGCTNAAGLLVVGNFQVDHARSLHYVGAGVAFPAGLLFVCLHCALSYQGATAPLDLAVAYLRSVLAVIAFITLVLSGVFFVHESSQLQHGAALCEWVCVIDILIFYGTFSYEFGAVSSDTLVAALQPTPGRACKSSGSSSTSTHLNCAPESIAMI

SEQ ID NO: 38726 - protein, 218 aa, Homo sapiens
MYALWRTGPTTSPALLTLLSKGVPRPAAPWTMSPSSVALICLLRYGQLLEQSRHSWVNTTALITGCTNAAGLLVVGNFQVDHARSLHYVGAGVAFPAGLLFVCLHCALSYQGATAPLDLAVAYLRSVLAVIAFITLVLSGVFFVHESSQLQHGAALCEWVCVIDILIFYGTFSYEFGAVSSDTLVAALQPTPGRACKSSGSSSTSTHLNCAPESIAMI

SEQ ID NO: 38727 - protein, 77 aa, Homo sapiens
MSVAFVPDWLRGKAEVNQETIQRLLEENDQLIRCIVEYQNKGRGNECVQYQHVLHRNLIYLATIADASPTSTSKAME

SEQ ID NO: 38728 - protein, 456 aa, Homo sapiens
MEALGDLEGPRAPGGDDPAGSAGETPGWLSREQVFVLISAASVNLGSMMCYSILGPFFPKEAEKKGASNTIIGMIFGCFALFELLASLVFGNYLVHIGAKFMFVAGMFVSGGVTILFGVLDRVPDGPVFIAMCFLVRVMDAVSFAAAMTASSSILAKAFPNNVATVLGSLETFSGLGLILGPPVGGFLYQSFGYEVPFIVLGCVVLLMVPLNMYILPNYESDPGEHSFWKLIALPKVGLIAFVINSLSSCFGFLDPTLSLFVLEKFNLPAGYVGLVFLGMALSYAISSPLFGLLSDKRPPLRKWLLVFGNLITAGCYMLLGPVPILHIKSQLWLLVLILVVSGLSAGMSIIPTFPEILSCAHENGFEEGLSTLGLVSGLFSAMWSIGAFMGPTLGGFLYEKIGFEWAAAIQGLWALISGLAMGLFYLLEYSRRKRSKSQNILSTEEERTTLLPNET

SEQ ID NO: 38729 - protein, 708 aa, Homo sapiens
MADREGGCAAGRGRELEPELEPGPGPGSALEPGEEFEIVDRSQLPGPGDLRSATRPRAAEGWSAPILTLARRATGNLSASCGSALRAAAGLGGGDSGDGTARAASKCQMMEERANLMHMMKLSIKVLLQSALSLGRSLDADHAPLQQFFVVMEHCLKHGLKVKKSFIGQNKSFFGPLELVEKLCPEASDIATSVRNLPELKTAVGRGRAWLYLALMQKKLADYLKVLIDNKHLLSEFYEPEALMMEEEGMVIVGLLVGLNVLDANLCLKGEDLDSQVGVIDFSLYLKDVQDLDGGKEHERITDVLDQKNYVEELNRHLSCTVGDLQTKIDGLEKTNSKLQEELSAATDRICSLQEEQQQLREQNELIRERSEKSVEITKQDTKVELETYKQTRQGLDEMYSDVWKQLKEEKKVRLELEKELELQIGMKTEMEIAMKLLEKDTHEKQDTLVALRQQLEEVKAINLQMFHKAQNAESSLQQKNEAITSFEGKTNQVMSSMKQMEERLQHSERARQGAEERSHKLQQELGGRIGALQLQLSQLHEQCSSLEKELKSEKEQRQALQRELQHEKDTSSLLRMELQQVEGLKKELRELQDEKAELQKICEEQEQALQEMGLHLSQSKLKMEDIKEVNQALKGHAWLKDDEATHCRQCEKEFSISRRKHHCRNCGHIFCNTCSSNELALPSYPKPVRVCDSCHTLLLQRCSSTAS

SEQ ID NO: 38730 - protein, 600 aa, Homo sapiens
MMEERANLMHMMKLSIKVLLQSALSLGRSLDADHAPLQQFFVVMEHCLKHGLKVKKSFIGQNKSFFGPLELVEKLCPEASDIATSVRNLPELKTAVGRGRAWLYLALMQKKLADYLKVLIDNKHLLSEFYEPEALMMEEEGMVIVGLLVGLNVLDANLCLKGEDLDSQVGVIDFSLYLKDVQDLDGGKEHERITDVLDQKNYVEELNRHLSCTVGDLQTKIDGLEKTNSKLQEELSAATDRICSLQEEQQQLREQNELIRERSEKSVEITKQDTKVELETYKQTRQGLDEMYSDVWKQLKEEKKVRLELEKELELQIGMKTEMEIAMKLLEKDTHEKQDTLVALRQQLEEVKAINLQMFHKAQNAESSLQQKNEAITSFEGKTNQVMSSMKQMEERLQHSERARQGAEERSHKLQQELGGRIGALQLQLSQLHEQCSSLEKELKSEKEQRQALQRELQHEKDTSSLLRMELQQVEGLKKELRELQDEKAELQKICEEQEQALQEMGLHLSQSKLKMEDIKEVNQALKGHAWLKDDEATHCRQCEKEFSISRRKHHCRNCGHIFCNTCSSNELALPSYPKPVRVCDSCHTLLLQRCSSTAS

SEQ ID NO: 38731 - protein, 412 aa, Homo sapiens
MADREGGCAAGRGRELEPELEPGPGPGSALEPGEEFEIVDRSQLPGPGDLRSATRPRAAEGWSAPILTLARRATGNLSASCGSALRAAAGLGGGDSGDGTARAASKCQMMEERANLMHMMKLSIKVLLQSALSLGRSLDADHAPLQQFFVVMEHCLKHGLKVKKSFIGQNKSFFGPLELVEKLCPEASDIATSVRNLPELKTAVGRGRAWLYLALMQKKLADYLKVLIDNKHLLSEFYEPEALMMEEEGMVIVGLLVGLNVLDANLCLKGEDLDSQVGVIDFSLYLKDVQDLDGGKEHERITDVLDQKNYVEELNRHLSCTVGDLQTKIDGLEKTNSKLQEEEERMKGQDKGGLSRGRELAASCPAVSLLDTSCLLLAGGGCSALLRLSTAFSCNRPNLLTSRRTAAVKRTK

SEQ ID NO: 38732 - protein, 318 aa, Homo sapiens
MNGDHMVLGSSVTDKKAIILVTILLLLRLVAIAGNGFITAALGVEWVLRRMLLPCDKLLVSLGASRFCLQSVVMGKTIYVFLHPMAFPYNPVLQFLAFQWDFLNAATLWSSTWLSVFYCVKIATFTHPVFFWLKHKLSGWLPWMLFSSVGLSSFTTILFFIGNHRMYQNYLRNHLQPWNVTGDSIRSYCEKFYLFPLKMITWTMPTAVFFICMILLITSLGRHRKKALLTTSGFREPSVQAHIKALLALLSFAMLFISYFLSLVFSAAGIFPPLDFKFWVWESVIYLCAAVHPIILLFSNCRLRAVLKSRRSSRCGTP

SEQ ID NO: 38733 - protein, 424 aa, Homo sapiens
MQGARAPRDQGRSPGRMSALGRSSVILLTYVLAATELTCLFMQFSIVPYLSRKLGLDSIAFGYLQTTFGVLQLLGGPVFGRFADQRGARAALTLSFLAALALYLLLAAASSPALPGVYLLFASRLPGALMHTLPAAQMVITDLSAPEERPAALGRLGLCFGVGVILGSLLGGTLVSAYGIQCPAILAALATLLGAVLSFTCIPASTKGAKTDAQAPLPGGPRASVFDLKAIASLLRLPDVPRIFLVKVASNCPTGLFMVMFSIISMDFFQLEAAQAGYLMSFFGLLQMVTQGLVIGQLSSHFSEEVLLRASVLVFIVVGLAMAWMSSVFHFCLLVPGLVFSLCTLNVVTDSMLIKAVSTSDTGTMLGLCASVQPLLRTLGPTVGGLLYRSFGVPVFGHVQVAINTLVLLVLWRKPMPQRKDKVR

SEQ ID NO: 38734 - protein, 463 aa, Homo sapiens
MYGNYSHFMKFPAGYGGSPGHTGSTSMSPSAALSTGKPMDSHPSYTDTPVSAPRTLSAVGTPLNALGSPYRVITSAMGPPSGALAAPPGINLVAPPSSQLNVVNSVSSSEDIKPLPGLPGIGNMNYPSTSPGSLVKHICAICGDRSSGKHYGVYSCEGCKGFFKRTIRKDLIYTCRDNKDCLIDKRQRNRCQYCRYQKCLVMGMKREAVQEERQRSRERAESEAECATSGHEDMPVERILEAELAVEPKTESYGDMNMENSTNDPVTNICHAADKQLFTLVEWAKRIPHFSDLTLEDQVILLRAGWNELLIASFSHRSVSVQDGILLATGLHVHRSSAHSAGVGSIFDRVLTELVSKMKDMQMDKSELGCLRAIVLFNPDAKGLSNPSEVETLREKVYATLEAYTKQKYPEQPGRFAKLLLRLPALRSIGLKCLEHLFFFKLIGDTPIDTFLMEMLETPLQIT

SEQ ID NO: 38735 - protein, 802 aa, Homo sapiens
MAAEALAAEAVASRLERQEEDIRWLWSEVERLRDEQLNAPYSCQAEGPCLTREVAQLRAENCDLRHRLCSLRLCLAEERSRQATLESAELEAAQEAGAQPPPSQSQDKDMKKKKMKESEADSEVKHQPIFIKERLKLFEILKKDHQLLLAIYGKKGDTSNIITVRVADGQTVQGEVWKTTPYQVAAEISQELAESTVIAKVNGELWDLDRPLEGDSSLELLTFDNEEAQAVYWHSSAHILGEAMELYYGGHLCYGPPIENGFYYDMFIEDRAVSSTELSALENICKAIIKEKQPFERLEVSKEILLEMFKYNKFKCRILNEKVNTATTTVYRCGPLIDLCKGPHVRHTGKIKTIKIFKNSSTYWEGNPEMETLQRIYGISFPDNKMMRDWEKFQEEAKNRDHRKIGKEQELFFFHDLSPGSCFFLPRGAFIYNTLTDFIREEYHKRDFTEVLSPNMYNSKLWEASGHWQHYSENMFTFEIEKDTFALKPMNCPGHCLMFAHRPRSWREMPIRFADFGVLHRNELSGTLSGLTRVRRFQQDDAHIFCTVEQIEEEIKGCLQFLQSVYSTFGFSFQLNLSTRPENFLGEIEMWNEAEKQLQNSLMDFGEPWKMNPGDGAFYGPKIDIKIKDAIGRYHQCATIQLDFQLPIRFNLTYVSKDGDDKKRPVIIHRAILGSVERMIAILSENYGGKWPFWLSPRQVMVIPVGPTCEKYALQVSSEFFEEGFMADVDLDHSCTLNKKIRNAQLAQYNFILVVGEKEKIDNAVNVRTRDNKIHGEILVTSAIDKLKNLRKTRTLNAEEAF

SEQ ID NO: 38736 - protein, 707 aa, Homo sapiens
MAAEALAAEAVASRLERQEEDIRWLWSEVERLRDEQLNAPYSCQAEGPCLTREVAQLRAENCDLRHRLCSLRLCLAEERSRQATLESAELEAAQEAGAQPPPSQSQDKDMKKKKMKESEADSEVKHQPIFIKERLKLFEILKKDHQLLLAIYGKKGDTSNIITVRVADGQTVQGEVWKTTPYQVAAEISQELAESTVIAKVNGELWDLDRPLEGDSSLELLTFDNEKVNTATTTVYRCGPLIDLCKGPHVRHTGKIKTIKIFKNSSTYWEGNPEMETLQRIYGISFPDNKMMRDWEKFQEEAKNRDHRKIGKEQELFFFHDLSPGSCFFLPRGAFIYNTLTDFIREEYHKRDFTEVLSPNMYNSKLWEASGHWQHYSENMFTFEIEKDTFALKPMNCPGHCLMFAHRPRSWREMPIRFADFGVLHRNELSGTLSGLTRVRRFQQDDAHIFCTVEQIEEEIKGCLQFLQSVYSTFGFSFQLNLSTRPENFLGEIEMWNEAEKQLQNSLMDFGEPWKMNPGDGAFYGPKIDIKIKDAIGRYHQCATIQLDFQLPIRFNLTYVSKDGDDKKRPVIIHRAILGSVERMIAILSENYGGKWPFWLSPRQVMVIPVGPTCEKYALQVSSEFFEEGFMADVDLDHSCTLNKKIRNAQLAQYNFILVVGEKEKIDNAVNVRTRDNKIHGEILVTSAIDKLKNLRKTRTLNAEEAF

SEQ ID NO: 38737 - protein, 299 aa, Homo sapiens
MLESHLIIYFLLAVIQFLLGIFTNGIIVVVNGIDLIKHRKMAPLDLLLSCLAVSRIFLQLFIFYVNVIVIFFIEFIMCSANCAILLFINELELWLATWLGVFYCAKVASVRHPLFIWLKMRISKLVPWMILGSLLYVSMICVFHSKYAGFMVPYFLRKFFSQNATIQKEDTLAIQIFSFVAEFSVPLLIFLFAVLLLIFSLGRHTRQMRNTVAGSRVPGRGAPISALLSILSFLILYFSHCMIKVFLSSLKFHIRRFIFLFFILVIGIYPSGHSLILILGNPKLKQNAKKFLLHSKCCQ

SEQ ID NO: 38738 - protein, 316 aa, Homo sapiens
MMGLTEGVFLILSGTQFTLGILVNCFIELVNGSSWFKTKRMSLSDFIITTLALLRIILLCIILTDSFLIEFSPNTHDSGIIMQIIDVSWTFTNHLSIWLATCLGVLYCLKIASFSHPTFLWLKWRVSRVMVWMLLGALLLSCGSTASLINEFKLYSVFRGIEATRNVTEHFRKKRSEYYLIHVLGTLWYLPPLIVSLASYSLLIFSLGRHTRQMLQNGTSSRDPTTEAHKRAIRIILSFFFLFLLYFLAFLIASFGNFLPKTKMAKMIGEVMTMFYPAGHSFILILGNSKLKQTFVVMLRCESGHLKPGSKGPIFS

SEQ ID NO: 38739 - protein, 723 aa, Homo sapiens
MFEEKASSPSGKMGGEEKPIGAGEEKQKEGGKKKNKEGSGDGGRAELNPWPEYIYTRLEMYNILKAEHDSILAEKAEKDSKPIKVTLPDGKQVDAESWKTTPYQIACGISQGLADNTVIAKVNNVVWDLDRPLEEDCTLELLKFEDEEAQAVYWHSSAHIMGEAMERVYGGCLCYGPPIENGFYYDMYLEEGGVSSNDFSSLEALCKKIIKEKQAFERLEVKKETLLAMFKYNKFKCRILNEKVNTPTTTVYRCGPLIDLCRGPHVRHTGKIKALKIHKNSSTYWEGKADMETLQRIYGISFPDPKMLKEWEKFQEEAKNRDHRKIGRDQELYFFHELSPGSCFFLPKGAYIYNALIEFIRSEYRKRGFQEVVTPNIFNSRLWMTSGHWQHYSENMFSFEVEKELFALKPMNCPGHCLMFDHRPRSWRELPLRLADFGVLHRNELSGALTGLTRVRRFQQDDAHIFCAMEQIEDEIKGCLDFLRTVYSVFGFSFKLNLSTRPEKFLGDIEVWDQAEKQLENSLNEFGEKWELNSGDGAFYGPKIDIQIKDAIGRYHQCATIQLDFQLPIRFNLTYVSHDGDDKKRPVIVHRAILGSVERMIAILTENYGGKWPFWLSPRQVMVVPVGPTCDEYAQKVRQQFHDAKFMADIDLDPGCTLNKKIRNAQLAQYNFILVVGEKEKISGTVNIRTRDNKVHGERTISETIERLQQLKEFRSKQAEEEF

SEQ ID NO: 38740 - protein, 756 aa, Homo sapiens
MFEEKASSPSGKMGGEEKPIGAGEEKQKEGGKKKNKEGSGDGGRAELNPWPEYIYTRLEMYNILKAEHDSILAEKAEKDSKPIKVTLPDGKQVDAESWKTTPYQIACGISHTASCKNLSSLASLLASVAIPSSGMPWPPLFFLQGLADNTVIAKVNNVVWDLDRPLEEDCTLELLKFEDEEAQAVYWHSSAHIMGEAMERVYGGCLCYGPPIENGFYYDMYLEEGGVSSNDFSSLEALCKKIIKEKQAFERLEVKKETLLAMFKYNKFKCRILNEKVNTPTTTVYRCGPLIDLCRGPHVRHTGKIKALKIHKNSSTYWEGKADMETLQRIYGISFPDPKMLKEWEKFQEEAKNRDHRKIGRDQELYFFHELSPGSCFFLPKGAYIYNALIEFIRSEYRKRGFQEVVTPNIFNSRLWMTSGHWQHYSENMFSFEVEKELFALKPMNCPGHCLMFDHRPRSWRELPLRLADFGVLHRNELSGALTGLTRVRRFQQDDAHIFCAMEQIEDEIKGCLDFLRTVYSVFGFSFKLNLSTRPEKFLGDIEVWDQAEKQLENSLNEFGEKWELNSGDGAFYGPKIDIQIKDAIGRYHQCATIQLDFQLPIRFNLTYVSHDGDDKKRPVIVHRAILGSVERMIAILTENYGGKWPFWLSPRQVMVVPVGPTCDEYAQKVRQQFHDAKFMADIDLDPGCTLNKKIRNAQLAQYNFILVVGEKEKISGTVNIRTRDNKVHGERTISETIERLQQLKEFRSKQAEEEF

SEQ ID NO: 38741 - protein, 471 aa, Homo sapiens
MPNSEPASLLELFNSIATQGELVRSLKAGNASKDEIDSAVKMLVSLKMSYKAAAGEDYKADCPPGNPAPTSNHGPDATEAEEDFVDPWTVQTSSAKGIDYDKLIVRFGSSKIDKELINRIERATGQRPHHFLRRGIFFSHRDMNQVLDAYENKKPFYLYTGRGPSSEAMHVGHLIPFIFTKWLQDVFNVPLVIQMTDDEKYLWKDLTLDQAYSYAVENAKDIIACGFDINKTFIFSDLDYMGMSSGFYKNVVKIQKHVTFNQVKGIFGFTDSDCIGKISFPAIQAAPSFSNSFPQIFRDRTDIQCLIPCAIDQDPYFRMTRDVAPRIGYPKPALLHSTFFPALQGAQTKMSASDPNSSIFLTDTAKQIKTKVNKHAFSGGRDTIEEHRQFGGNCDVDVSFMYLTFFLEDDDKLEQIRKDYTSGAMLTGELKKALIEVLQPLIAEHQARRKEVTDEIVKEFMTPRKLSFDFQ

SEQ ID NO: 38742 - protein, 430 aa, Homo sapiens
MLVSLKMSYKAAAGEDYKADCPPGNPAPTSNHGPDATEAEEDFVDPWTVQTSSAKGIDYDKLIVRFGSSKIDKELINRIERATGQRPHHFLRRGIFFSHRDMNQVLDAYENKKPFYLYTGRGPSSEAMHVGHLIPFIFTKWLQDVFNVPLVIQMTDDEKYLWKDLTLDQAYSYAVENAKDIIACGFDINKTFIFSDLDYMGMSSGFYKNVVKIQKHVTFNQVKGIFGFTDSDCIGKISFPAIQAAPSFSNSFPQIFRDRTDIQCLIPCAIDQDPYFRMTRDVAPRIGYPKPALLHSTFFPALQGAQTKMSASDPNSSIFLTDTAKQIKTKVNKHAFSGGRDTIEEHRQFGGNCDVDVSFMYLTFFLEDDDKLEQIRKDYTSGAMLTGELKKALIEVLQPLIAEHQARRKEVTDEIVKEFMTPRKLSFDFQ

SEQ ID NO: 38743 - protein, 199 aa, Homo sapiens
MANRGPAYGLSREVQQKIEKQYDADLEQILIQWITTQCRKDVGRPQPGRENFQNWLKDGTVLCELINALYPEGQAPVKKIQASTMAFKQMEQISQFLQAAERYGINTTDIFQTVDLWEGKNMACVQRTLMNLGGLAVARDDGLFSGDPNWFPKKSKENPRNFSDNQLQEGKNVIGLQMGTNRGASQAGMTGYGMPRQIL

SEQ ID NO: 38744 - protein, 220 aa, Homo sapiens
MSAFSLALALVSSPQPPPPIGMANRGPAYGLSREVQQKIEKQYDADLEQILIQWITTQCRKDVGRPQPGRENFQNWLKDGTVLCELINALYPEGQAPVKKIQASTMAFKQMEQISQFLQAAERYGINTTDIFQTVDLWEGKNMACVQRTLMNLGGLAVARDDGLFSGDPNWFPKKSKENPRNFSDNQLQEGKNVIGLQMGTNRGASQAGMTGYGMPRQIL

SEQ ID NO: 38745 - protein, 299 aa, Homo sapiens
MLRLFYFSAIIASVILNFVGIIMNLFITVVNCKTWVKSHRISSSDRILFSLGITRFLMLGLFLVNTIYFVSSNTERSVYLSAFFVLCFMFLDSSSVWFVTLLNILYCVKITNFQHSVFLLLKRNISPKIPRLLLACVLISAFTTCLYITLSQASPFPELVTTRNNTSFNISEGILSLVVSLVLSSSLQFIINVTSASLLIHSLRRHIQKMQKNATGFWNPQTEAHVGAMKLMVYFLILYIPYSVATLVQYLPFYAGMDMGTKSICLIFATLYSPGHSVLIIITHPKLKTTAKKILCFKK

SEQ ID NO: 38746 - protein, 199 aa, Homo sapiens
MANRGPSYGLSREVQEKIEQKYDADLENKLVDWIILQCAEDIEHPPPGRAHFQKWLMDGTVLCKLINSLYPPGQEPIPKISESKMAFKQMEQISQFLKAAETYGVRTTDIFQTVDLWEGKDMAAVQRTLMALGSVAVTKDDGCYRGEPSWFHRKAQQNRRGFSEEQLRQGQNVIGLQMGSNKGASQAGMTGYGMPRQIM

SEQ ID NO: 38747 - protein, 299 aa, Homo sapiens
MLSAGLGLLMLVAVVEFLIGLIGNGSLVVWSFREWIRKFNWSSYNLIILGLAGCRFLLQWLIILDLSLFPLFQSSRWLRYLSIFWVLVSQASLWFATFLSVFYCKKITTFDRPAYLWLKQRAYNLSLWCLLGYFIINLLLTVQIGLTFYHPPQGNSSIRYPFESWQYLYAFQLNSGSYLPLVVFLVSSGMLIVSLYTHHKKMKVHSAGRRDVRAKAHITALKSLGCFLLLHLVYIMASPFSITSKTYPPDLTSVFIWETLMAAYPSLHSLILIMGIPRVKQTCQKILWKTVCARRCWGP

SEQ ID NO: 38748 - protein, 311 aa, Homo sapiens
MSQRDTLVHLFAGGCGGTVGAILTCPLEVVKTRLQSSSVTLYISEVQLNTMAGASVNRVVSPGPLHCLKVILEKEGPRSLFRGLGPNLVGVAPSRAIYFAAYSNCKEKLNDVFDPDSTQVHMISAAMAGFTAITATNPIWLIKTRLQLDARNRGERRMGAFECVRKVYQTDGLKGFYRGMSASYAGISETVIHFVIYESIKQKLLEYKTASTMENDEESVKEASDFVGMMLAAATSKTCATTIAYPHEVVRTRLREEGTKYRSFFQTLSLLVQEEGYGSLYRGLTTHLVRQIPNTAIMMATYELVVYLLNG

SEQ ID NO: 38749 - protein, 132 aa, Homo sapiens
MSQRDTLVHLFAGGCGGTVGAILTCPLEVVKTRLQSSSVTLYISEVQLNTMAGASVNRVVSPGPLHCLKVILEKEGPRSLFRGLGPNLVGVAPSRAIYFAAYSNCKEKLNDVFDPDSTQVHMISAAMAGHFL

SEQ ID NO: 38750 - protein, 310 aa, Homo sapiens
MSQRDTLVHLFAGGCGGTVGAILTCPLEVVKTRLQSSSVTLYISEVQLNTMAGASVNRVVSPGPLHCLKVILEKEGPRSLFRGLGPNLVGVAPSRAIYFAAYSNCKEKLNDVFDPDSTQVHMISAAMAGFTAITATNPIWLIKTRLQLDARNRGERRMGAFECVRKVYQTDGLKGFYRGMSASYAGISETVIHFVIYESIKQKLLEYKTASTMENDEESVKEASDFVGMMLAAATSKTCATTIAYPHVVRTRLREEGTKYRSFFQTLSLLVQEEGYGSLYRGLTTHLVRQIPNTAIMMATYELVVYLLNG

SEQ ID NO: 38751 - protein, 154 aa, Homo sapiens
MGAFECVRKVYQTDGLKGFYRGMSASYAGISETVIHFVIYESIKQKLLEYKTASTMENDEESVKEASDFVGMMLAAATSKTCATTIAYPHEVVRTRLREEGTKYRSFFQTLSLLVQEEGYGSLYRGLTTHLVRQIPNTAIMMATYELVVYLLNG

SEQ ID NO: 38752 - protein, 1150 aa, Homo sapiens
MHPPETTTKMASVRFMVTPTKIDDIPGLSDTSPDLSSRSSSRVRFSSRESVPETSRSEPMSEMSGATTSLATVALDPPSDRTSHPQDVIEDLSQNSITGEHSQLLDDGHKKARNAYLNNSNYEEGDEYFDKNLALFEEEMDTRPKVSSLLNRMANYTNLTQGAKEHEEAENITEGKKKPTKTPQMGTFMGVYLPCLQNIFGVILFLRLTWVVGTAGVLQAFAIVLICCCCTMLTAISMSAIATNGVVPAGGSYFMISRALGPEFGGAVGLCFYLGTTFAAAMYILGAIEIFLVYIVPRAAIFHSDDALKESAAMLNNMRVYGTAFLVLMVLVVFIGVRYVNKFASLFLACVIVSILAIYAGAIKSSFAPPHFPVCMLGNRTLSSRHIDVCSKTKEINNMTVPSKLWGFFCNSSQFFNATCDEYFVHNNVTSIQGIPGLASGIITENLWSNYLPKGEIIEKPSAKSSDVLGSLNHEYVLVDITTSFTLLVGIFFPSVTGIMAGSNRSGDLKDAQKSIPIGTILAILTTSFVYLSNVVLFGACIEGVVLRDKFGDAVKGNLVVGTLSWPSPWVIVIGSFFSTCGAGLQSLTGAPRLLQAIAKDNIIPFLRVFGHSKANGEPTWALLLTAAIAELGILIASLDLVAPILSMFFLMCYLFVNLACALQTLLRTPNWRPRFRYYHWALSFMGMSICLALMFISSWYYAIVAMVIAGMIYKYIEYQGAEKEWGDGIRGLSLSAARFALLRLEEGPPHTKNWRPQLLVLLKLDEDLHVKHPRLLTFASQLKAGKGLTIVGSVIVGNFLENYGEALAAEQTIKHLMEAEKVKGFCQLVVAAKLREGISHLIQSCGLGGMKHNTVVMGWPNGWRQSEDARAWKTFIGTVRVTTAAHLALLVAKNISFFPSNVEQFSEGNIDVWWIVHDGGMLMLLPFLLKQHKVWRKCSIRIFTVAQLEDNSIQMKKDLATFLYHLRIEAEVEVVEMHDSDISAYTYERTLMMEQRSQMLRHMRLSKTERDREAQLVKDRNSMLRLTSIGSDEDEETETYQEKVHMTWTKDKYMASRGQKAKSMEGFQDLLNMRPDQSNVRRMHTAVKLNEVIVNKSHEAKLVLLNMPGPPRNPEGDENYMEFLEVLTEGLERVLLVRGGGSEVITIYS

SEQ ID NO: 38753 - protein, 1099 aa, Homo sapiens
MPHFTVTKVEDPEEGAAASISQEPSLADIKARIQDSDEPDLSQNSITGEHSQLLDDGHKKARNAYLNNSNYEEGDEYFDKNLALFEEEMDTRPKVSSLLNRMANYTNLTQGAKEHEEAENITEGKKKPTKTPQMGTFMGVYLPCLQNIFGVILFLRLTWVVGTAGVLQAFAIVLICCCCTMLTAISMSAIATNGVVPAGGSYFMISRALGPEFGGAVGLCFYLGTTFAAAMYILGAIEIFLVYIVPRAAIFHSDDALKESAAMLNNMRVYGTAFLVLMVLVVFIGVRYVNKFASLFLACVIVSILAIYAGAIKSSFAPPHFPVCMLGNRTLSSRHIDVCSKTKEINNMTVPSKLWGFFCNSSQFFNATCDEYFVHNNVTSIQGIPGLASGIITENLWSNYLPKGEIIEKPSAKSSDVLGSLNHEYVLVDITTSFTLLVGIFFPSVTGIMAGSNRSGDLKDAQKSIPIGTILAILTTSFVYLSNVVLFGACIEGVVLRDKFGDAVKGNLVVGTLSWPSPWVIVIGSFFSTCGAGLQSLTGAPRLLQAIAKDNIIPFLRVFGHSKANGEPTWALLLTAAIAELGILIASLDLVAPILSMFFLMCYLFVNLACALQTLLRTPNWRPRFRYYHWALSFMGMSICLALMFISSWYYAIVAMVIAGMIYKYIEYQGAEKEWGDGIRGLSLSAARFALLRLEEGPPHTKNWRPQLLVLLKLDEDLHVKHPRLLTFASQLKAGKGLTIVGSVIVGNFLENYGEALAAEQTIKHLMEAEKVKGFCQLVVAAKLREGISHLIQSCGLGGMKHNTVVMGWPNGWRQSEDARAWKTFIGTVRVTTAAHLALLVAKNISFFPSNVEQFSEGNIDVWWIVHDGGMLMLLPFLLKQHKVWRKCSIRIFTVAQLEDNSIQMKKDLATFLYHLRIEAEVEVVEMHDSDISAYTYERTLMMEQRSQMLRHMRLSKTERDREAQLVKDRNSMLRLTSIGSDEDEETETYQEKVHMTWTKDKYMASRGQKAKSMEGFQDLLNMRPDQSNVRRMHTAVKLNEVIVNKSHEAKLVLLNMPGPPRNPEGDENYMEFLEVLTEGLERVLLVRGGGSEVITIYS

SEQ ID NO: 38754 - protein, 1135 aa, Homo sapiens
MHPPETTTKMASVRFMVTPTKIDDIPGLSDTSPDLSSRSSSRVRFSSRESVPETSRSEPMSEMSGATTSLATVALDPPSDRTSHPQDVIEDDGHKKARNAYLNNSNYEEGDEYFDKNLALFEEEMDTRPKVSSLLNRMANYTNLTQGAKEHEEAENITEGKKKPTKTPQMGTFMGVYLPCLQNIFGVILFLRLTWVVGTAGVLQAFAIVLICCCCTMLTAISMSAIATNGVVPAGGSYFMISRALGPEFGGAVGLCFYLGTTFAAAMYILGAIEIFLVYIVPRAAIFHSDDALKESAAMLNNMRVYGTAFLVLMVLVVFIGVRYVNKFASLFLACVIVSILAIYAGAIKSSFAPPHFPVCMLGNRTLSSRHIDVCSKTKEINNMTVPSKLWGFFCNSSQFFNATCDEYFVHNNVTSIQGIPGLASGIITENLWSNYLPKGEIIEKPSAKSSDVLGSLNHEYVLVDITTSFTLLVGIFFPSVTGIMAGSNRSGDLKDAQKSIPIGTILAILTTSFVYLSNVVLFGACIEGVVLRDKFGDAVKGNLVVGTLSWPSPWVIVIGSFFSTCGAGLQSLTGAPRLLQAIAKDNIIPFLRVFGHSKANGEPTWALLLTAAIAELGILIASLDLVAPILSMFFLMCYLFVNLACALQTLLRTPNWRPRFRYYHWALSFMGMSICLALMFISSWYYAIVAMVIAGMIYKYIEYQGAEKEWGDGIRGLSLSAARFALLRLEEGPPHTKNWRPQLLVLLKLDEDLHVKHPRLLTFASQLKAGKGLTIVGSVIVGNFLENYGEALAAEQTIKHLMEAEKVKGFCQLVVAAKLREGISHLIQSCGLGGMKHNTVVMGWPNGWRQSEDARAWKTFIGTVRVTTAAHLALLVAKNISFFPSNVEQFSEGNIDVWWIVHDGGMLMLLPFLLKQHKVWRKCSIRIFTVAQLEDNSIQMKKDLATFLYHLRIEAEVEVVEMHDSDISAYTYERTLMMEQRSQMLRHMRLSKTERDREAQLVKDRNSMLRLTSIGSDEDEETETYQEKVHMTWTKDKYMASRGQKAKSMEGFQDLLNMRPDQSNVRRMHTAVKLNEVIVNKSHEAKLVLLNMPGPPRNPEGDENYMEFLEVLTEGLERVLLVRGGGSEVITIYS

SEQ ID NO: 38755 - protein, 1141 aa, Homo sapiens
MASVRFMVTPTKIDDIPGLSDTSPDLSSRSSSRVRFSSRESVPETSRSEPMSEMSGATTSLATVALDPPSDRTSHPQDVIEDLSQNSITGEHSQLLDDGHKKARNAYLNNSNYEEGDEYFDKNLALFEEEMDTRPKVSSLLNRMANYTNLTQGAKEHEEAENITEGKKKPTKTPQMGTFMGVYLPCLQNIFGVILFLRLTWVVGTAGVLQAFAIVLICCCCTMLTAISMSAIATNGVVPAGGSYFMISRALGPEFGGAVGLCFYLGTTFAAAMYILGAIEIFLVYIVPRAAIFHSDDALKESAAMLNNMRVYGTAFLVLMVLVVFIGVRYVNKFASLFLACVIVSILAIYAGAIKSSFAPPHFPVCMLGNRTLSSRHIDVCSKTKEINNMTVPSKLWGFFCNSSQFFNATCDEYFVHNNVTSIQGIPGLASGIITENLWSNYLPKGEIIEKPSAKSSDVLGSLNHEYVLVDITTSFTLLVGIFFPSVTGIMAGSNRSGDLKDAQKSIPIGTILAILTTSFVYLSNVVLFGACIEGVVLRDKFGDAVKGNLVVGTLSWPSPWVIVIGSFFSTCGAGLQSLTGAPRLLQAIAKDNIIPFLRVFGHSKANGEPTWALLLTAAIAELGILIASLDLVAPILSMFFLMCYLFVNLACALQTLLRTPNWRPRFRYYHWALSFMGMSICLALMFISSWYYAIVAMVIAGMIYKYIEYQGAEKEWGDGIRGLSLSAARFALLRLEEGPPHTKNWRPQLLVLLKLDEDLHVKHPRLLTFASQLKAGKGLTIVGSVIVGNFLENYGEALAAEQTIKHLMEAEKVKGFCQLVVAAKLREGISHLIQSCGLGGMKHNTVVMGWPNGWRQSEDARAWKTFIGTVRVTTAAHLALLVAKNISFFPSNVEQFSEGNIDVWWIVHDGGMLMLLPFLLKQHKVWRKCSIRIFTVAQLEDNSIQMKKDLATFLYHLRIEAEVEVVEMHDSDISAYTYERTLMMEQRSQMLRHMRLSKTERDREAQLVKDRNSMLRLTSIGSDEDEETETYQEKVHMTWTKDKYMASRGQKAKSMEGFQDLLNMRPDQSNVRRMHTAVKLNEVIVNKSHEAKLVLLNMPGPPRNPEGDENYMEFLEVLTEGLERVLLVRGGGSEVITIYS

SEQ ID NO: 38756 - protein, 1091 aa, Homo sapiens
MSEMSGATTSLATVALDPPSDRTSHPQDVIEDLSQNSITGEHSQLLDDGHKKARNAYLNNSNYEEGDEYFDKNLALFEEEMDTRPKVSSLLNRMANYTNLTQGAKEHEEAENITEGKKKPTKTPQMGTFMGVYLPCLQNIFGVILFLRLTWVVGTAGVLQAFAIVLICCCCTMLTAISMSAIATNGVVPAGGSYFMISRALGPEFGGAVGLCFYLGTTFAAAMYILGAIEIFLVYIVPRAAIFHSDDALKESAAMLNNMRVYGTAFLVLMVLVVFIGVRYVNKFASLFLACVIVSILAIYAGAIKSSFAPPHFPVCMLGNRTLSSRHIDVCSKTKEINNMTVPSKLWGFFCNSSQFFNATCDEYFVHNNVTSIQGIPGLASGIITENLWSNYLPKGEIIEKPSAKSSDVLGSLNHEYVLVDITTSFTLLVGIFFPSVTGIMAGSNRSGDLKDAQKSIPIGTILAILTTSFVYLSNVVLFGACIEGVVLRDKFGDAVKGNLVVGTLSWPSPWVIVIGSFFSTCGAGLQSLTGAPRLLQAIAKDNIIPFLRVFGHSKANGEPTWALLLTAAIAELGILIASLDLVAPILSMFFLMCYLFVNLACALQTLLRTPNWRPRFRYYHWALSFMGMSICLALMFISSWYYAIVAMVIAGMIYKYIEYQGAEKEWGDGIRGLSLSAARFALLRLEEGPPHTKNWRPQLLVLLKLDEDLHVKHPRLLTFASQLKAGKGLTIVGSVIVGNFLENYGEALAAEQTIKHLMEAEKVKGFCQLVVAAKLREGISHLIQSCGLGGMKHNTVVMGWPNGWRQSEDARAWKTFIGTVRVTTAAHLALLVAKNISFFPSNVEQFSEGNIDVWWIVHDGGMLMLLPFLLKQHKVWRKCSIRIFTVAQLEDNSIQMKKDLATFLYHLRIEAEVEVVEMHDSDISAYTYERTLMMEQRSQMLRHMRLSKTERDREAQLVKDRNSMLRLTSIGSDEDEETETYQEKVHMTWTKDKYMASRGQKAKSMEGFQDLLNMRPDQSNVRRMHTAVKLNEVIVNKSHEAKLVLLNMPGPPRNPEGDENYMEFLEVLTEGLERVLLVRGGGSEVITIYS

SEQ ID NO: 38757 - protein, 1084 aa, Homo sapiens
MPHFTVTKVEDPEEGAAASISQEPSLADIKARIQDSDEPDDGHKKARNAYLNNSNYEEGDEYFDKNLALFEEEMDTRPKVSSLLNRMANYTNLTQGAKEHEEAENITEGKKKPTKTPQMGTFMGVYLPCLQNIFGVILFLRLTWVVGTAGVLQAFAIVLICCCCTMLTAISMSAIATNGVVPAGGSYFMISRALGPEFGGAVGLCFYLGTTFAAAMYILGAIEIFLVYIVPRAAIFHSDDALKESAAMLNNMRVYGTAFLVLMVLVVFIGVRYVNKFASLFLACVIVSILAIYAGAIKSSFAPPHFPVCMLGNRTLSSRHIDVCSKTKEINNMTVPSKLWGFFCNSSQFFNATCDEYFVHNNVTSIQGIPGLASGIITENLWSNYLPKGEIIEKPSAKSSDVLGSLNHEYVLVDITTSFTLLVGIFFPSVTGIMAGSNRSGDLKDAQKSIPIGTILAILTTSFVYLSNVVLFGACIEGVVLRDKFGDAVKGNLVVGTLSWPSPWVIVIGSFFSTCGAGLQSLTGAPRLLQAIAKDNIIPFLRVFGHSKANGEPTWALLLTAAIAELGILIASLDLVAPILSMFFLMCYLFVNLACALQTLLRTPNWRPRFRYYHWALSFMGMSICLALMFISSWYYAIVAMVIAGMIYKYIEYQGAEKEWGDGIRGLSLSAARFALLRLEEGPPHTKNWRPQLLVLLKLDEDLHVKHPRLLTFASQLKAGKGLTIVGSVIVGNFLENYGEALAAEQTIKHLMEAEKVKGFCQLVVAAKLREGISHLIQSCGLGGMKHNTVVMGWPNGWRQSEDARAWKTFIGTVRVTTAAHLALLVAKNISFFPSNVEQFSEGNIDVWWIVHDGGMLMLLPFLLKQHKVWRKCSIRIFTVAQLEDNSIQMKKDLATFLYHLRIEAEVEVVEMHDSDISAYTYERTLMMEQRSQMLRHMRLSKTERDREAQLVKDRNSMLRLTSIGSDEDEETETYQEKVHMTWTKDKYMASRGQKAKSMEGFQDLLNMRPDQSNVRRMHTAVKLNEVIVNKSHEAKLVLLNMPGPPRNPEGDENYMEFLEVLTEGLERVLLVRGGGSEVITIYS

SEQ ID NO: 38758 - protein, 846 aa, Homo sapiens
MAEPPSPVHCVAAAAPTATVSEKEPFGKLQLSSRDPPGSLSAKKVRTEEKKAPRRVNGEGGSGGNSRQLQPPAAPSPQSYGSPASWSFAPLSAAPSPSSSRSSFSFSAGTAVPSSASASLSQPVPRKLLVPPTLLHAQPHHLLLPAAAAAASANAKSRRPKEKREKERRRHGLGGAREAGGASREENGEVKPLPRDKIKDKIKERDKEKEREKKKHKVMNEIKKENGEVKILLKSGKEKPKTNIEDLQIKKVKKKKKKKHKENEKRKRPKMYSKSIQTICSGLLTDVEDQAAKGILNDNIKDYVGKNLDTKNYDSKIPENSEFPFVSLKEPRVQNNLKRLDTLEFKQLIHIEHQPNGGASVIHAYSNELSHLSPMEMERFAEEFVGLVFSENENSAAFYVMGIVHGAATYLPDFLDYFSFNFPNSPVKMEILGKKDIETTTMSNFHAQVKRTYSHGTYRAGPMRQISLVGAVDEEVGDYFPEFLDMLEESPFLKCTLPWGTLSSLKLQSRKDSDDGPIMWVRPGEQMIPVADMPKSPFKRKRTTNEIKNLQYLPRTSEPREMLFEDRTRAHADHIGQGFERQTTAAVGVLKAVHCGEWPDQPRITKDVICFHAEDFLEVVQRMQLDLHEPPLSQCVQWVDDAKLNQLRREGIRYARIQLYDNDIYFIPRNVVHQFKTVSAVCSLAWHIRLKLYHSEEDTSQNTATHETGTSSDSTSSVLGPHTDNMICAVSKASLDSVFSDKLHSKYELQQIKHEPIASVRIKEEPVNVNIPEKTTALNNMDGKNVKAKLDHVQFAEFKIDMDSKFENSNKDLKEELCPGNLSLVDTRQHSSAHSNQDKKDDDILC

SEQ ID NO: 38759 - protein, 576 aa, Homo sapiens
MYSKSIQTICSGLLTDVEDQAAKGILNDNIKDYVGKNLDTKNYDSKIPENSEFPFVSLKEPRVQNNLKRLDTLEFKQLIHIEHQPNGGASVIHAYSNELSHLSPMEMERFAEEFVGLVFSENENSAAFYVMGIVHGAATYLPDFLDYFSFNFPNSPVKMEILGKKDIETTTMSNFHAQVKRTYSHGTYRAGPMRQISLVGAVDEEVGDYFPEFLDMLEESPFLKCTLPWGTLSSLKLQSRKDSDDGPIMWVRPGEQMIPVADMPKSPFKRKRTTNEIKNLQYLPRTSEPREMLFEDRTRAHADHIGQGFERQTTAAVGVLKAVHCGEWPDQPRITKDVICFHAEDFLEVVQRMQLDLHEPPLSQCVQWVDDAKLNQLRREGIRYARIQLYDNDIYFIPRNVVHQFKTVSAVCSLAWHIRLKLYHSEEDTSQNTATHETGTSSDSTSSVLGPHTDNMICAVSKASLDSVFSDKLHSKYELQQIKHEPIASVRIKEEPVNVNIPEKTTALNNMDGKNVKAKLDHVQFAEFKIDMDSKFENSNKDLKEELCPGNLSLVDTRQHSSAHSNQDKKDDDILC

SEQ ID NO: 38760 - protein, 343 aa, Homo sapiens
MDLTYIPEDLSSCPKFVNKILSSHQPLFSCPGDNVFGYDWSHDYPLFGNLVIMVSISHFKQLHSPTNFLILSMATTDFLLGFVIMPYSIMRSVESCWYFGDGFCKFHTSFDMMLRLTSIFHLCSIAIDRFYAVCYPLHYTTKMTNSTIKQLLAFCWSVPALFSFGLVLSEADVSGMQSYKILVACFNFCALTFNKFWGTILFTTCFFTPGSIMVGIYGKIFIVSKQHARVISHVPENTKGAVKKHLSKKKDRKAAKTLGIVMGVFLACWLPCFLAVLIDPYLDYSTPILILDLLVWLRYFNSTCNPLIHGFFNPWFQKAFKYIVSGKIFSSHSETANLFPEAH

SEQ ID NO: 38761 - protein, 92 aa, Homo sapiens
MSELEKAMVALIDVFHQYSGREGDKHKLKKSELKELINNELSHFLEEIKEQEVVDKVMETLDNDGDGECDFQEFMAFVAMVTTACHEFFEHE

SEQ ID NO: 38762 - protein, 79 aa, Homo sapiens
MSTKKSPEELKRIFEKYAAKEGDPDQLSKDELKLLIQAEFPSLLKGPNTLDDLFQELDKNGDGEVSFEEFQVLVKKISQ

SEQ ID NO: 38763 - protein, 589 aa, Homo sapiens
MYRWLVRILGTIFRFCDRSVPPARALLKRRRSDSTLFSTVDTDEIPAKRPRLDCFIHQVKNSLYNAASLFGFPFQLTTKPMVTSACNGTRNVAPSGEVFSNSSSCELTGSGSWNNMLKLGNKSPNGISDYPKIRVTVTRDQPRRVLPSFGFTLNSEGCNRRPGGRRHSKGNPESSLMWKPQEQAVTEMISEESGKGLRRPHCTVEEGVQKEEREKYRKLLERLKESGHGNSVCPVTSNYHSSQRSQMDTLKTKGWGEEQNHGVKTTQFVPKQYRLVETRGPLCSLRSEKRCSKGKITDTETMVGIRFENESRRGYQLEPDLSEEVSARLRLGSGSNGLLRRKVSIIETKEKNCSGKERDRRTDDLLELTEDMEKEISNALGHGPQDEILSSAFKLRITRGDIQTLKNYHWLNDEVINFYMNLLVERNKKQGYPALHVFSTFFYPKLKSGGYQAVKRWTKGVNLFEQEIILVPIHRKVHWSLVVIDLRKKCLKYLDSMGQKGHRICEILLQYLQDESKTKRNSDLNLLEWTHHSMKPHEIPQQLNGSDCGMFTCKYADYISRDKPITFTQHQMPLFRKKMVWEILHQQLL

SEQ ID NO: 38764 - protein, 579 aa, Homo sapiens
MDSHPCLYCGPQDSEGTNWQTSPSTLFSTVDTDEIPAKRPRLDCFIHQVKNSLYNAASLFGFPFQLTTKPMVTSACNGTRNVAPSGEVFSNSSSCELTGSGSWNNMLKLGNKSPNGISDYPKIRVTVTRDQPRRVLPSFGFTLNSEGCNRRPGGRRHSKGNPESSLMWKPQEQAVTEMISEESGKGLRRPHCTVEEGVQKEEREKYRKLLERLKESGHGNSVCPVTSNYHSSQRSQMDTLKTKGWGEEQNHGVKTTQFVPKQYRLVETRGPLCSLRSEKRCSKGKITDTETMVGIRFENESRRGYQLEPDLSEEVSARLRLGSGSNGLLRRKVSIIETKEKNCSGKERDRRTDDLLELTEDMEKEISNALGHGPQDEILSSAFKLRITRGDIQTLKNYHWLNDEVINFYMNLLVERNKKQGYPALHVFSTFFYPKLKSGGYQAVKRWTKGVNLFEQEIILVPIHRKVHWSLVVIDLRKKCLKYLDSMGQKGHRICEILLQYLQDESKTKRNSDLNLLEWTHHSMKPHEIPQQLNGSDCGMFTCKYADYISRDKPITFTQHQMPLFRKKMVWEILHQQLL

SEQ ID NO: 38765 - protein, 1214 aa, Homo sapiens
MERFRLEKKLPGPDEEAVVDLGKTSSTVNTKFEKEELESHRAVYIGVHVPFSKESRRRHRHRGHKHHHRRRKDKESDKEDGRESPSYDTPSQRVQFILGTEDDDEEHIPHDLFTEMDELCYRDGEEYEWKETARWLKFEEDVEDGGDRWSKPYVATLSLHSLFELRSCILNGTVMLDMRASTLDEIADMVLDNMIASGQLDESIRENVREALLKRHHHQNEKRFTSRIPLVRSFADIGKKHSDPHLLERNGEGLSASRHSLRTGLSASNLSLRGESPLSLLLGHLLPSSRAGTPAGSRCTTPVPTPQNSPPSSPSISRLTSRSSQESQRQAPELLVSPASDDIPTVVIHPPEEDLEAALKGEEQKNEENVDLTPGILASPQSAPGNLDNSKSGEIKGNGSGGSRENSTVDFSKVDMNFMRKIPTGAEASNVLVGEVDFLERPIIAFVRLAPAVLLTGLTEVPVPTRFLFLLLGPAGKAPQYHEIGRSIATLMTDEIFHDVAYKAKDRNDLLSGIDEFLDQVTVLPPGEWDPSIRIEPPKSVPSQEKRKIPVFHNGSTPTLGETPKEAAHHAGPELQRTGRLFGGLILDIKRKAPFFLSDFKDALSLQCLASILFLYCACMSPVITFGGLLGEATEGRISAIESLFGASLTGIAYSLFAGQPLTILGSTGPVLVFEKILYKFCRDYQLSYLSLRTSIGLWTSFLCIVLVATDASSLVCYITRFTEEAFAALICIIFIYEALEKLFDLGETYAFNMHNNLDKLTSYSCVCTEPPNPSNETLAQWKKDNITAHNISWRNLTVSECKKLRGVFLGSACGHHGPYIPDVLFWCVILFFTTFFLSSFLKQFKTKRYFPTKVRSTISDFAVFLTIVIMVTIDYLVGVPSPKLHVPEKFEPTHPERGWIISPLGDNPWWTLLIAAIPALLCTILIFMDQQITAVIINRKEHKLKKGAGYHLDLLMVGVMLGVCSVMGLPWFVAATVLSISHVNSLKVESECSAPGEQPKFLGIREQRVTGLMIFILMGLSVFMTSVLKFIPMPVLYGVFLYMGVSSLKGIQLFDRIKLFGMPAKHQPDLIYLRYVPLWKVHIFTVIQLTCLVLLWVIKVSAAAVVFPMMVLALVFVRKLMDLCFTKRELSWLDDLMPESKKKKEDDKKKKEKEEAERMLQDDDDTVHLPFEGGSLLQIPVKALKYSPDKPVSVKISFEDEPRKKYVDAETSL

SEQ ID NO: 38766 - protein, 1090 aa, Homo sapiens
MERFRLEKKLPGPDEEAVVDLGKTSSTVNTKFEKEELESHRAVYIGVHVPFSKESRRRHRHRGHKHHHRRRKDKESDKEDGRESPSYDTPSQRVQFILGTEDDDEEHIPHDLFTEMDELCYRDGEEYEWKETARWLKFEEDVEDGGDRWSKPYVATLSLHSLFELRSCILNGTVMLDMRASTLDEIADMVLDNMIASGQLDESIRENVREALLKRHHHQNEKRFTSRIPLVRSFADIGKKHSDPHLLERNGILASPQSAPGNLDNSKSGEIKGNGSGGSRENSTVDFSKVDMNFMRKIPTGAEASNVLVGEVDFLERPIIAFVRLAPAVLLTGLTEVPVPTRFLFLLLGPAGKAPQYHEIGRSIATLMTDEIFHDVAYKAKDRNDLLSGIDEFLDQVTVLPPGEWDPSIRIEPPKSVPSQEKRKIPVFHNGSTPTLGETPKEAAHHAGPELQRTGRLFGGLILDIKRKAPFFLSDFKDALSLQCLASILFLYCACMSPVITFGGLLGEATEGRISAIESLFGASLTGIAYSLFAGQPLTILGSTGPVLVFEKILYKFCRDYQLSYLSLRTSIGLWTSFLCIVLVATDASSLVCYITRFTEEAFAALICIIFIYEALEKLFDLGETYAFNMHNNLDKLTSYSCVCTEPPNPSNETLAQWKKDNITAHNISWRNLTVSECKKLRGVFLGSACGHHGPYIPDVLFWCVILFFTTFFLSSFLKQFKTKRYFPTKVRSTISDFAVFLTIVIMVTIDYLVGVPSPKLHVPEKFEPTHPERGWIISPLGDNPWWTLLIAAIPALLCTILIFMDQQITAVIINRKEHKLKKGAGYHLDLLMVGVMLGVCSVMGLPWFVAATVLSISHVNSLKVESECSAPGEQPKFLGIREQRVTGLMIFILMGLSVFMTSVLKFIPMPVLYGVFLYMGVSSLKGIQLFDRIKLFGMPAKHQPDLIYLRYVPLWKVHIFTVIQLTCLVLLWVIKVSAAAVVFPMMVLALVFVRKLMDLCFTKRELSWLDDLMPESKKKKEDDKKKKEKEEAERMLQDDDDTVHLPFEGGSLLQIPVKALKYSPDKPVSVKISFEDEPRKKYVDAETSL

SEQ ID NO: 38767 - protein, 1018 aa, Homo sapiens
MAVTQFIHFREEIMGNMFFIIIFSTKDKLCYRDGEEYEWKETARWLKFEEDVEDGGDRWSKPYVATLSLHSLFELRSCILNGTVMLDMRASTLDEIADMVLDNMIASGQLDESIRENVREALLKRHHHQNEKRFTSRIPLVRSFADIGKKHSDPHLLERNGILASPQSAPGNLDNSKSGEIKGNGSGGSRENSTVDFSKVDMNFMRKIPTGAEASNVLVGEVDFLERPIIAFVRLAPAVLLTGLTEVPVPTRFLFLLLGPAGKAPQYHEIGRSIATLMTDEIFHDVAYKAKDRNDLLSGIDEFLDQVTVLPPGEWDPSIRIEPPKSVPSQEKRKIPVFHNGSTPTLGETPKEAAHHAGPELQRTGRLFGGLILDIKRKAPFFLSDFKDALSLQCLASILFLYCACMSPVITFGGLLGEATEGRISAIESLFGASLTGIAYSLFAGQPLTILGSTGPVLVFEKILYKFCRDYQLSYLSLRTSIGLWTSFLCIVLVATDASSLVCYITRFTEEAFAALICIIFIYEALEKLFDLGETYAFNMHNNLDKLTSYSCVCTEPPNPSNETLAQWKKDNITAHNISWRNLTVSECKKLRGVFLGSACGHHGPYIPDVLFWCVILFFTTFFLSSFLKQFKTKRYFPTKVRSTISDFAVFLTIVIMVTIDYLVGVPSPKLHVPEKFEPTHPERGWIISPLGDNPWWTLLIAAIPALLCTILIFMDQQITAVIINRKEHKLKKGAGYHLDLLMVGVMLGVCSVMGLPWFVAATVLSISHVNSLKVESECSAPGEQPKFLGIREQRVTGLMIFILMGLSVFMTSVLKFIPMPVLYGVFLYMGVSSLKGIQLFDRIKLFGMPAKHQPDLIYLRYVPLWKVHIFTVIQLTCLVLLWVIKVSAAAVVFPMMVLALVFVRKLMDLCFTKRELSWLDDLMPESKKKKEDDKKKKEKEEAERMLQDDDDTVHLPFEGGSLLQIPVKALKYSGDPSIGNISDEMAKTAQWKALSMNTENAKVTRSNMSPDKPVSVK

SEQ ID NO: 38768 - protein, 1000 aa, Homo sapiens
MAVTQFIHFREEIMGNMFFIIIFSTKDKLCYRDGEEYEWKETARWLKFEEDVEDGGDRWSKPYVATLSLHSLFELRSCILNGTVMLDMRASTLDEIADMVLDNMIASGQLDESIRENVREALLKRHHHQNEKRFTSRIPLVRSFADIGKKHSDPHLLERNGILASPQSAPGNLDNSKSGEIKGNGSGGSRENSTVDFSKVDMNFMRKIPTGAEASNVLVGEVDFLERPIIAFVRLAPAVLLTGLTEVPVPTRFLFLLLGPAGKAPQYHEIGRSIATLMTDEIFHDVAYKAKDRNDLLSGIDEFLDQVTVLPPGEWDPSIRIEPPKSVPSQEKRKIPVFHNGSTPTLGETPKEAAHHAGPELQRTGRLFGGLILDIKRKAPFFLSDFKDALSLQCLASILFLYCACMSPVITFGGLLGEATEGRISAIESLFGASLTGIAYSLFAGQPLTILGSTGPVLVFEKILYKFCRDYQLSYLSLRTSIGLWTSFLCIVLVATDASSLVCYITRFTEEAFAALICIIFIYEALEKLFDLGETYAFNMHNNLDKLTSYSCVCTEPPNPSNETLAQWKKDNITAHNISWRNLTVSECKKLRGVFLGSACGHHGPYIPDVLFWCVILFFTTFFLSSFLKQFKTKRYFPTKVRSTISDFAVFLTIVIMVTIDYLVGVPSPKLHVPEKFEPTHPERGWIISPLGDNPWWTLLIAAIPALLCTILIFMDQQITAVIINRKEHKLKKGAGYHLDLLMVGVMLGVCSVMGLPWFVAATVLSISHVNSLKVESECSAPGEQPKFLGIREQRVTGLMIFILMGLSVFMTSVLKFIPMPVLYGVFLYMGVSSLKGIQLFDRIKLFGMPAKHQPDLIYLRYVPLWKVHIFTVIQLTCLVLLWVIKVSAAAVVFPMMVLALVFVRKLMDLCFTKRELSWLDDLMPESKKKKEDDKKKKEKEEAERMLQDDDDTVHLPFEGGSLLQIPVKALKYSPDKPVSVKISFEDEPRKKYVDAETSL

SEQ ID NO: 38769 - protein, 800 aa, Homo sapiens
MEVVEAEKIVLLTSARFLFLLLGPAGKAPQYHEIGRSIATLMTDEIFHDVAYKAKDRNDLLSGIDEFLDQVTVLPPGEWDPSIRIEPPKSVPSQEKRKIPVFHNGSTPTLGETPKEAAHHAGPELQRTGRLFGGLILDIKRKAPFFLSDFKDALSLQCLASILFLYCACMSPVITFGGLLGEATEGRISAIESLFGASLTGIAYSLFAGQPLTILGSTGPVLVFEKILYKFCRDYQLSYLSLRTSIGLWTSFLCIVLVATDASSLVCYITRFTEEAFAALICIIFIYEALEKLFDLGETYAFNMHNNLDKLTSYSCVCTEPPNPSNETLAQWKKDNITAHNISWRNLTVSECKKLRGVFLGSACGHHGPYIPDVLFWCVILFFTTFFLSSFLKQFKTKRYFPTKVRSTISDFAVFLTIVIMVTIDYLVGVPSPKLHVPEKFEPTHPERGWIISPLGDNPWWTLLIAAIPALLCTILIFMDQQITAVIINRKEHKLKKGAGYHLDLLMVGVMLGVCSVMGLPWFVAATVLSISHVNSLKVESECSAPGEQPKFLGIREQRVTGLMIFILMGLSVFMTSVLKFIPMPVLYGVFLYMGVSSLKGIQLFDRIKLFGMPAKHQPDLIYLRYVPLWKVHIFTVIQLTCLVLLWVIKVSAAAVVFPMMVLALVFVRKLMDLCFTKRELSWLDDLMPESKKKKEDDKKKKEKEEAERMLQDDDDTVHLPFEGGSLLQIPVKALKYSVDPSIVNISDEMAKTAQWKALSMNTENAKVTRSNMSPDKPVSVKISFEDEPRKKYVDAETSL

SEQ ID NO: 38770 - protein, 1131 aa, Homo sapiens
MEADGAGEQMRPLLTRGPDEEAVVDLGKTSSTVNTKFEKEELESHRAVYIGVHVPFSKESRRRHRHRGHKHHHRRRKDKESDKEDGRESPSYDTPSQRVQFILGTEDDDEEHIPHDLFTEMDELCYRDGEEYEWKETARWLKFEEDVEDGGDRWSKPYVATLSLHSLFELRSCILNGTVMLDMRASTLDEIADMVLDNMIASGQLDESIRENVREALLKRHHHQNEKRFTSRIPLVRSFADIGKKHSDPHLLERNGILASPQSAPGNLDNSKSGEIKGNGSGGSRENSTVDFSKVDMNFMRKIPTGAEASNVLVGEVDFLERPIIAFVRLAPAVLLTGLTEVPVPTRFLFLLLGPAGKAPQYHEIGRSIATLMTDEIFHDVAYKAKDRNDLLSGIDEFLDQVTVLPPGEWDPSIRIEPPKSVPSQEKRKIPVFHNGSTPTLGETPKEAAHHAGPELQRTGRLFGGLILDIKRKAPFFLSDFKDALSLQCLASILFLYCACMSPVITFGGLLGEATEGRISAIESLFGASLTGIAYSLFAGQPLTILGSTGPVLVFEKILYKFCRDYQLSYLSLRTSIGLWTSFLCIVLVATDASSLVCYITRFTEEAFAALICIIFIYEALEKLFDLGETYAFNMHNNLDKLTSYSCVCTEPPNPSNETLAQWKKDNITAHNISWRNLTVSECKKLRGVFLGSACGHHGPYIPDVLFWCVILFFTTFFLSSFLKQFKTKRYFPTKVRSTISDFAVFLTIVIMVTIDYLVGVPSPKLHVPEKFEPTHPERGWIISPLGDNPWWTLLIAAIPALLCTILIFMDQQITAVIINRKEHKLKKGAGYHLDLLMVGVMLGVCSVMGLPWFVAATVLSISHVNSLKVESECSAPGEQPKFLGIREQRVTGLMIFILMGLSVFMTSVLKFIPMPVLYGVFLYMGVSSLKGIQLFDRIKLFGMPAKHQPDLIYLRYVPLWKVHIFTVIQLTCLVLLWVIKVSAAAVVFPMMVLALVFVRKLMDLCFTKRELSWLDDLMPESKKKKEDDKKKKEKEEAERMLQDDDDTVHLPFEGGSLLQIPVKALKYSVDPSIVNISDEMAKTAQWKALSMNTENAKVTRSNMSPDKPVSVKISFEDEPRKKYVDAETSL

SEQ ID NO: 38771 - protein, 1259 aa, Homo sapiens
MEADGAGEQMRPLLTRVTSRGPDEEAVVDLGKTSSTVNTKFEKEELESHRAVYIGVHVPFSKESRRRHRHRGHKHHHRRRKDKESDKEDGRESPSYDTPSQRVQFILGTEDDDEEHIPHDLFTEMDELCYRDGEEYEWKETARWLKFEEDVEDGGDRWSKPYVATLSLHSLFELRSCILNGTVMLDMRASTLDEIADMVLDNMIASGQLDESIRENVREALLKRHHHQNEKRFTSRIPLVRSFADIGKKHSDPHLLERNGEGLSASRHSLRTGLSASNLSLRGESPLSLLLGHLLPSSRAGTPAGSRCTTPVPTPQNSPPSSPSISRLTSRSSQESQRQAPELLVSPASDDIPTVVIHPPEEDLEAALKGEEQKNEENVDLTPGILASPQSAPGNLDNSKSGEIKGNGSGGSRENSTVDFSKVDMNFMRKIPTGAEASNVLVGEVDFLERPIIAFVRLAPAVLLTGLTEVPVPTRFLFLLLGPAGKAPQYHEIGRSIATLMTDEIFHDVAYKAKDRNDLLSGIDEFLDQVTVLPPGEWDPSIRIEPPKSVPSQEKRKIPVFHNGSTPTLGETPKEAAHHAGPELQRTGRLFGGLILDIKRKAPFFLSDFKDALSLQCLASILFLYCACMSPVITFGGLLGEATEGRISAIESLFGASLTGIAYSLFAGQPLTILGSTGPVLVFEKILYKFCRDYQLSYLSLRTSIGLWTSFLCIVLVATDASSLVCYITRFTEEAFAALICIIFIYEALEKLFDLGETYAFNMHNNLDKLTSYSCVCTEPPNPSNETLAQWKKDNITAHNISWRNLTVSECKKLRGVFLGSACGHHGPYIPDVLFWCVILFFTTFFLSSFLKQFKTKRYFPTKVRSTISDFAVFLTIVIMVTIDYLVGVPSPKLHVPEKFEPTHPERGWIISPLGDNPWWTLLIAAIPALLCTILIFMDQQITAVIINRKEHKLKKGAGYHLDLLMVGVMLGVCSVMGLPWFVAATVLSISHVNSLKVESECSAPGEQPKFLGIREQRVTGLMIFILMGLSVFMTSVLKFIPMPVLYGVFLYMGVSSLKGIQLFDRIKLFGMPAKHQPDLIYLRYVPLWKVHIFTVIQLTCLVLLWVIKVSAAAVVFPMMVLALVFVRKLMDLCFTKRELSWLDDLMPESKKKKEDDKKKKEKEEAERMLQDDDDTVHLPFEGGSLLQIPVKALKYSVDPSIVNISDEMAKTAQWKALSMNTENAKVTRSNMSPDKPVSVKISFEDEPRKKYVDAETSL

SEQ ID NO: 38772 - protein, 1246 aa, Homo sapiens
MEADGAGEQMRPLLTRVTSRGPDEEAVVDLGKTSSTVNTKFEKEELESHRAVYIGVHVPFSKESRRRHRHRGHKHHHRRRKDKESDKEDGRESPSYDTPSQRVQFILGTEDDDEEHIPHDLFTEMDELCYRDGEEYEWKETARWLKFEEDVEDGGDRWSKPYVATLSLHSLFELRSCILNGTVMLDMRASTLDEIADMVLDNMIASGQLDESIRENVREALLKRHHHQNEKRFTSRIPLVRSFADIGEGLSASRHSLRTGLSASNLSLRGESPLSLLLGHLLPSSRAGTPAGSRCTTPVPTPQNSPPSSPSISRLTSRSSQESQRQAPELLVSPASDDIPTVVIHPPEEDLEAALKGEEQKNEENVDLTPGILASPQSAPGNLDNSKSGEIKGNGSGGSRENSTVDFSKVDMNFMRKIPTGAEASNVLVGEVDFLERPIIAFVRLAPAVLLTGLTEVPVPTRFLFLLLGPAGKAPQYHEIGRSIATLMTDEIFHDVAYKAKDRNDLLSGIDEFLDQVTVLPPGEWDPSIRIEPPKSVPSQEKRKIPVFHNGSTPTLGETPKEAAHHAGPELQRTGRLFGGLILDIKRKAPFFLSDFKDALSLQCLASILFLYCACMSPVITFGGLLGEATEGRISAIESLFGASLTGIAYSLFAGQPLTILGSTGPVLVFEKILYKFCRDYQLSYLSLRTSIGLWTSFLCIVLVATDASSLVCYITRFTEEAFAALICIIFIYEALEKLFDLGETYAFNMHNNLDKLTSYSCVCTEPPNPSNETLAQWKKDNITAHNISWRNLTVSECKKLRGVFLGSACGHHGPYIPDVLFWCVILFFTTFFLSSFLKQFKTKRYFPTKVRSTISDFAVFLTIVIMVTIDYLVGVPSPKLHVPEKFEPTHPERGWIISPLGDNPWWTLLIAAIPALLCTILIFMDQQITAVIINRKEHKLKKGAGYHLDLLMVGVMLGVCSVMGLPWFVAATVLSISHVNSLKVESECSAPGEQPKFLGIREQRVTGLMIFILMGLSVFMTSVLKFIPMPVLYGVFLYMGVSSLKGIQLFDRIKLFGMPAKHQPDLIYLRYVPLWKVHIFTVIQLTCLVLLWVIKVSAAAVVFPMMVLALVFVRKLMDLCFTKRELSWLDDLMPESKKKKEDDKKKKEKEEAERMLQDDDDTVHLPFEGGSLLQIPVKALKYSVDPSIVNISDEMAKTAQWKALSMNTENAKVTRSNMSPDKPVSVKISFEDEPRKKYVDAETSL

SEQ ID NO: 38773 - protein, 1095 aa, Homo sapiens
MEADGAGEQMRPLLTRGPDEEAVVDLGKTSSTVNTKFEKEELESHRAVYIGVHVPFSKESRRRHRHRGHKHHHRRRKDKESDKEDGRESPSYDTPSQRVQFILGTEDDDEEHIPHDLFTEMDELCYRDGEEYEWKETARWLKFEEDVEDGGDRWSKPYVATLSLHSLFELRSCILNGTVMLDMRASTLDEIADMVLDNMIASGQLDESIRENVREALLKRHHHQNEKRFTSRIPLVRSFADIGKKHSDPHLLERNGILASPQSAPGNLDNSKSGEIKGNGSGGSRENSTVDFSKVDMNFMRKIPTGAEASNVLVGEVDFLERPIIAFVRLAPAVLLTGLTEVPVPTRFLFLLLGPAGKAPQYHEIGRSIATLMTDEIFHDVAYKAKDRNDLLSGIDEFLDQVTVLPPGEWDPSIRIEPPKSVPSQEKRKIPVFHNGSTPTLGETPKEAAHHAGPELQRTGRLFGGLILDIKRKAPFFLSDFKDALSLQCLASILFLYCACMSPVITFGGLLGEATEGRISAIESLFGASLTGIAYSLFAGQPLTILGSTGPVLVFEKILYKFCRDYQLSYLSLRTSIGLWTSFLCIVLVATDASSLVCYITRFTEEAFAALICIIFIYEALEKLFDLGETYAFNMHNNLDKLTSYSCVCTEPPNPSNETLAQWKKDNITAHNISWRNLTVSECKKLRGVFLGSACGHHGPYIPDVLFWCVILFFTTFFLSSFLKQFKTKRYFPTKVRSTISDFAVFLTIVIMVTIDYLVGVPSPKLHVPEKFEPTHPERGWIISPLGDNPWWTLLIAAIPALLCTILIFMDQQITAVIINRKEHKLKKGAGYHLDLLMVGVMLGVCSVMGLPWFVAATVLSISHVNSLKVESECSAPGEQPKFLGIREQRVTGLMIFILMGLSVFMTSVLKFIPMPVLYGVFLYMGVSSLKGIQLFDRIKLFGMPAKHQPDLIYLRYVPLWKVHIFTVIQLTCLVLLWVIKVSAAAVVFPMMVLALVFVRKLMDLCFTKRELSWLDDLMPESKKKKEDDKKKKEKEEAERMLQDDDDTVHLPFEGGSLLQIPVKALKYSPDKPVSVKISFEDEPRKKYVDAETSL

SEQ ID NO: 38774 - protein, 574 aa, Homo sapiens
MEADGAGEQMRPLLTRGPDEEAVVDLGKTSSTVNTKFEKEELESHRAVYIGVHVPFSKESRRRHRHRGHKHHHRRRKDKESDKEDGRESPSYDTPSQRVQFILGTEDDDEEHIPHDLFTEMDELCYRDGEEYEWKETARWLKFEEDVEDGGDRWSKPYVATLSLHSLFELRSCILNGTVMLDMRASTLDEIADMVLDNMIASGQLDESIRENVREALLKRHHHQNEKRFTSRIPLVRSFADIGEGLSASRHSLRTGLSASNLSLRGESPLSLLLGHLLPSSRAGTPAGSRCTTPVPTPQNSPPSSPSISRLTSRSSQESQRQAPELLVSPASDDIPTVVIHPPEEDLEAALKGEEQKNEENVDLTPGILASPQSAPGNLDNSKSGEIKGNGSGGSRENSTVDFSKVDMNFMRKIPTGAEASNVLVGEVDFLERPIIAFVRLAPAVLLTGLTEVPVPTRFLFLLLGPAGKAPQYHEIGRSIATLMTDEIFHDVAYKAKDRNDLLSGIDEFLDQVTVLPPGEWDPSIRIEPPKSVPSQEKRKIPVFHNGSTPTLGETPKEAAHHAGPELQRTGRVQ

SEQ ID NO: 38775 - protein, 463 aa, Homo sapiens
MEADGAGEQMRPLLTRGPDEEAVVDLGKTSSTVNTKFEKEELESHRAVYIGVHVPFSKESRRRHRHRGHKHHHRRRKDKESDKEDGRESPSYDTPSQRVQFILGTEDDDEEHIPHDLFTEMDELCYRDGEEYEWKETARWLKFEEDVEDGGDRWSKPYVATLSLHSLFELRSCILNGTVMLDMRASTLDEIADMVLDNMIASGQLDESIRENVREALLKRHHHQNEKRFTSRIPLVRSFADIGKKHSDPHLLERNGILASPQSAPGNLDNSKSGEIKGNGSGGSRENSTVDFSKVDMNFMRKIPTGAEASNVLVGEVDFLERPIIAFVRLAPAVLLTGLTEVPVPTRFLFLLLGPAGKAPQYHEIGRSIATLMTDEIFHDVAYKAKDRNDLLSGIDEFLDQVTVLPPGEWDPSIRIEPPKSVPSQEKRKIPVFHNGSTPTLGETPKEAAHHAGPELQRTGRVQ

SEQ ID NO: 38776 - protein, 1206 aa, Homo sapiens
MEADGAGEQMRPLLTRGPDEEAVVDLGKTSSTVNTKFEKEELESHRAVYIGVHVPFSKESRRRHRHRGHKHHHRRRKDKESDKEDGRESPSYDTPSQRVQFILGTEDDDEEHIPHDLFTEMDELCYRDGEEYEWKETARWLKFEEDVEDGGDRWSKPYVATLSLHSLFELRSCILNGTVMLDMRASTLDEIADMVLDNMIASGQLDESIRENVREALLKRHHHQNEKRFTSRIPLVRSFADIGEGLSASRHSLRTGLSASNLSLRGESPLSLLLGHLLPSSRAGTPAGSRCTTPVPTPQNSPPSSPSISRLTSRSSQESQRQAPELLVSPASDDIPTVVIHPPEEDLEAALKGEEQKNEENVDLTPGILASPQSAPGNLDNSKSGEIKGNGSGGSRENSTVDFSKVDMNFMRKIPTGAEASNVLVGEVDFLERPIIAFVRLAPAVLLTGLTEVPVPTRFLFLLLGPAGKAPQYHEIGRSIATLMTDEIFHDVAYKAKDRNDLLSGIDEFLDQVTVLPPGEWDPSIRIEPPKSVPSQEKRKIPVFHNGSTPTLGETPKEAAHHAGPELQRTGRLFGGLILDIKRKAPFFLSDFKDALSLQCLASILFLYCACMSPVITFGGLLGEATEGRISAIESLFGASLTGIAYSLFAGQPLTILGSTGPVLVFEKILYKFCRDYQLSYLSLRTSIGLWTSFLCIVLVATDASSLVCYITRFTEEAFAALICIIFIYEALEKLFDLGETYAFNMHNNLDKLTSYSCVCTEPPNPSNETLAQWKKDNITAHNISWRNLTVSECKKLRGVFLGSACGHHGPYIPDVLFWCVILFFTTFFLSSFLKQFKTKRYFPTKVRSTISDFAVFLTIVIMVTIDYLVGVPSPKLHVPEKFEPTHPERGWIISPLGDNPWWTLLIAAIPALLCTILIFMDQQITAVIINRKEHKLKKGAGYHLDLLMVGVMLGVCSVMGLPWFVAATVLSISHVNSLKVESECSAPGEQPKFLGIREQRVTGLMIFILMGLSVFMTSVLKFIPMPVLYGVFLYMGVSSLKGIQLFDRIKLFGMPAKHQPDLIYLRYVPLWKVHIFTVIQLTCLVLLWVIKVSAAAVVFPMMVLALVFVRKLMDLCFTKRELSWLDDLMPESKKKKEDDKKKKEKEEAERMLQDDDDTVHLPFEGGSLLQIPVKALKYSPDKPVSVKISFEDEPRKKYVDAETSL

SEQ ID NO: 38777 - protein, 1135 aa, Homo sapiens
MEADGAGEQMRPLLTRVTSRGPDEEAVVDLGKTSSTVNTKFEKEELESHRAVYIGVHVPFSKESRRRHRHRGHKHHHRRRKDKESDKEDGRESPSYDTPSQRVQFILGTEDDDEEHIPHDLFTEMDELCYRDGEEYEWKETARWLKFEEDVEDGGDRWSKPYVATLSLHSLFELRSCILNGTVMLDMRASTLDEIADMVLDNMIASGQLDESIRENVREALLKRHHHQNEKRFTSRIPLVRSFADIGKKHSDPHLLERNGILASPQSAPGNLDNSKSGEIKGNGSGGSRENSTVDFSKVDMNFMRKIPTGAEASNVLVGEVDFLERPIIAFVRLAPAVLLTGLTEVPVPTRFLFLLLGPAGKAPQYHEIGRSIATLMTDEIFHDVAYKAKDRNDLLSGIDEFLDQVTVLPPGEWDPSIRIEPPKSVPSQEKRKIPVFHNGSTPTLGETPKEAAHHAGPELQRTGRLFGGLILDIKRKAPFFLSDFKDALSLQCLASILFLYCACMSPVITFGGLLGEATEGRISAIESLFGASLTGIAYSLFAGQPLTILGSTGPVLVFEKILYKFCRDYQLSYLSLRTSIGLWTSFLCIVLVATDASSLVCYITRFTEEAFAALICIIFIYEALEKLFDLGETYAFNMHNNLDKLTSYSCVCTEPPNPSNETLAQWKKDNITAHNISWRNLTVSECKKLRGVFLGSACGHHGPYIPDVLFWCVILFFTTFFLSSFLKQFKTKRYFPTKVRSTISDFAVFLTIVIMVTIDYLVGVPSPKLHVPEKFEPTHPERGWIISPLGDNPWWTLLIAAIPALLCTILIFMDQQITAVIINRKEHKLKKGAGYHLDLLMVGVMLGVCSVMGLPWFVAATVLSISHVNSLKVESECSAPGEQPKFLGIREQRVTGLMIFILMGLSVFMTSVLKFIPMPVLYGVFLYMGVSSLKGIQLFDRIKLFGMPAKHQPDLIYLRYVPLWKVHIFTVIQLTCLVLLWVIKVSAAAVVFPMMVLALVFVRKLMDLCFTKRELSWLDDLMPESKKKKEDDKKKKEKEEAERMLQDDDDTVHLPFEGGSLLQIPVKALKYSVDPSIVNISDEMAKTAQWKALSMNTENAKVTRSNMSPDKPVSVKISFEDEPRKKYVDAETSL

SEQ ID NO: 38778 - protein, 467 aa, Homo sapiens
MEADGAGEQMRPLLTRVTSRGPDEEAVVDLGKTSSTVNTKFEKEELESHRAVYIGVHVPFSKESRRRHRHRGHKHHHRRRKDKESDKEDGRESPSYDTPSQRVQFILGTEDDDEEHIPHDLFTEMDELCYRDGEEYEWKETARWLKFEEDVEDGGDRWSKPYVATLSLHSLFELRSCILNGTVMLDMRASTLDEIADMVLDNMIASGQLDESIRENVREALLKRHHHQNEKRFTSRIPLVRSFADIGKKHSDPHLLERNGILASPQSAPGNLDNSKSGEIKGNGSGGSRENSTVDFSKVDMNFMRKIPTGAEASNVLVGEVDFLERPIIAFVRLAPAVLLTGLTEVPVPTRFLFLLLGPAGKAPQYHEIGRSIATLMTDEIFHDVAYKAKDRNDLLSGIDEFLDQVTVLPPGEWDPSIRIEPPKSVPSQEKRKIPVFHNGSTPTLGETPKEAAHHAGPELQRTGRVQ

SEQ ID NO: 38779 - protein, 1050 aa, Homo sapiens
MDKRKLGRRPSSSEIITEGKRKKSSSDLSEIRKMLNAKPEDVHVQSPLSKFRSSERWTLPLQWERSLRNKVISLDHKNKKHIRGCPVTSKSSPERQLKVMLTNVLWTDLGRKFRKTLPRNDANLCDANKVQSDSLPSTSVDSLETCQKLEPLRQSLNLSERIPRVILTNVLGTELGRKYIRTPPVTEGSLSDTDNLQSEQLSSSSDGSLESYQNLNPHKSCYLSERGSQRSKTVDDNSAKQTAHNKEKRRKDDGISLLISDTQPEDLNSGSRGCDHLEQESRNKDVKYSDSKVELTLISRKTKRRLRNNLPDSQYCTSLDKSTEQTKKQEDDSTISTEFEKPSENYHQDPKLPEEITTKPTKSDFTKLSSLNSQELTLSNATKSASAGSTTETVENSNSIDIVGISSLVEKDENELNTIEKPILRGHNEGNQSLISAEPIVVSSDEEGPVEHKSSEILKLQSKQDRETTNENESTSESALLELPLITCESVQMSSELCPYNPVMENISSIMPSNEMDLQLDFIFTSVYIGKIKGASKGCVTITKKYIKIPFQVSLNEISLLVDTTHLKRFGLWKSKDDNHSKRSHAILFFWVSSDYLQEIQTQLEHSVLSQQSKSSEFIFLELHNPVSQREELKLKDIMTEISIISGELELSYPLSWVQAFPLFQNLSSKESSFIHYYCVSTCSFPAGVAVAEEMKLKSVSQPSNTDAAKPTYTFLQKQSSGCYSLSITSNPDEEWREVRHTGLVQKLIVYPPPPTKGGLGVTNEDLECLEEGEFLNDVIIDFYLKYLILEKASDELVERSHIFSSFFYKCLTRKENNLTEDNPNLSMAQRRHKRVRTWTRHINIFNKDYIFVPVNESSHWYLAVICFPWLEEAVYEDFPQTVSQQSQAQQSQNDNKTIDNDLRTTSTLSLSAEDSQSTESNMSVPKKMCKRPCILILDSLKAASVQNTVQNLREYLEVEWEVKLKTHRQFSKTNMVDLCPKVPKQDNSSDCGVYLLQYVESFFKDPIVNFELPIHLEKWFPRHVIKTKREDIRELILKLHLQQQKGSSS

SEQ ID NO: 38780 - protein, 1017 aa, Homo sapiens
MLNAKPEDVHVQSPLSKFRSSERWTLPLQWERSLRNKVISLDHKNKKHIRGCPVTSKSSPERQLKVMLTNVLWTDLGRKFRKTLPRNDANLCDANKVQSDSLPSTSVDSLETCQKLEPLRQSLNLSERIPRVILTNVLGTELGRKYIRTPPVTEGSLSDTDNLQSEQLSSSSDGSLESYQNLNPHKSCYLSERGSQRSKTVDDNSAKQTAHNKEKRRKDDGISLLISDTQPEDLNSGSRGCDHLEQESRNKDVKYSDSKVELTLISRKTKRRLRNNLPDSQYCTSLDKSTEQTKKQEDDSTISTEFEKPSENYHQDPKLPEEITTKPTKSDFTKLSSLNSQELTLSNATKSASAGSTTETVENSNSIDIVGISSLVEKDENELNTIEKPILRGHNEGNQSLISAEPIVVSSDEEGPVEHKSSEILKLQSKQDRETTNENESTSESALLELPLITCESVQMSSELCPYNPVMENISSIMPSNEMDLQLDFIFTSVYIGKIKGASKGCVTITKKYIKIPFQVSLNEISLLVDTTHLKRFGLWKSKDDNHSKRSHAILFFWVSSDYLQEIQTQLEHSVLSQQSKSSEFIFLELHNPVSQREELKLKDIMTEISIISGELELSYPLSWVQAFPLFQNLSSKESSFIHYYCVSTCSFPAGVAVAEEMKLKSVSQPSNTDAAKPTYTFLQKQSSGCYSLSITSNPDEEWREVRHTGLVQKLIVYPPPPTKGGLGVTNEDLECLEEGEFLNDVIIDFYLKYLILEKASDELVERSHIFSSFFYKCLTRKENNLTEDNPNLSMAQRRHKRVRTWTRHINIFNKDYIFVPVNESSHWYLAVICFPWLEEAVYEDFPQTVSQQSQAQQSQNDNKTIDNDLRTTSTLSLSAEDSQSTESNMSVPKKMCKRPCILILDSLKAASVQNTVQNLREYLEVEWEVKLKTHRQFSKTNMVDLCPKVPKQDNSSDCGVYLLQYVESFFKDPIVNFELPIHLEKWFPRHVIKTKREDIRELILKLHLQQQKGSSS

SEQ ID NO: 38781 - protein, 238 aa, Homo sapiens
MKKFLYIKSVFHTLRMAQRRHKRVRTWTRHINIFNKDYIFVPVNESSHWYLAVICFPWLEEAVYEDFPQTVSQQSQAQQSQNDNKTIDNDLRTTSTLSLSAEDSQSTESNMSVPKKMCKRPCILILDSLKAASVQNTVQNLREYLEVEWEVKLKTHRQFSKTNMVDLCPKVPKQDNSSDCGVYLLQYVESFFKDPIVNFELPIHLEKWFPRHVIKTKREDIRELILKLHLQQQKGSSS

SEQ ID NO: 38782 - protein, 886 aa, Homo sapiens
MLNAKPEDVHVQSPLSKFRSSERWTLPLQWERSLRNKVISLDHKNKKHIRGCPVTSKSSPERGSQRSKTVDDNSAKQTAHNKEKRRKDDGISLLISDTQPEDLNSGSRGCDHLEQESRNKDVKYSDSKVELTLISRKTKRRLRNNLPDSQYCTSLDKSTEQTKKQEDDSTISTEFEKPSENYHQDPKLPEEITTKPTKSDFTKLSSLNSQELTLSNATKSASAGSTTETVENSNSIDIVGISSLVEKDENELNTIEKPILRGHNEGNQSLISAEPIVVSSDEEGPVEHKSSEILKLQSKQDRETTNENESTSESALLELPLITCESVQMSSELCPYNPVMENISSIMPSNEMDLQLDFIFTSVYIGKIKGASKGCVTITKKYIKIPFQVSLNEISLLVDTTHLKRFGLWKSKDDNHSKRSHAILFFWVSSDYLQEIQTQLEHSVLSQQSKSSEFIFLELHNPVSQREELKLKDIMTEISIISGELELSYPLSWVQAFPLFQNLSSKESSFIHYYCVSTCSFPAGVAVAEEMKLKSVSQPSNTDAAKPTYTFLQKQSSGCYSLSITSNPDEEWREVRHTGLVQKLIVYPPPPTKGGLGVTNEDLECLEEGEFLNDVIIDFYLKYLILEKASDELVERSHIFSSFFYKCLTRKENNLTEDNPNLSMAQRRHKRVRTWTRHINIFNKDYIFVPVNESSHWYLAVICFPWLEEAVYEDFPQTVSQQSQAQQSQNDNKTIDNDLRTTSTLSLSAEDSQSTESNMSVPKKMCKRPCILILDSLKAASVQNTVQNLREYLEVEWEVKLKTHRQFSKTNMVDLCPKVPKQDNSSDCGVYLLQYVESFFKDPIVNFELPIHLEKWFPRHVIKTKREDIRELILKLHLQQQKGSSS

SEQ ID NO: 38783 - protein, 984 aa, Homo sapiens
MDKRKLGRRPSSSEIITEGKRKKSSSDLSEIRKMLNAKPEDVHVQSPLSKFRSSERWTLPLQWERSLRNKVISLDHKNKKHIRGCPVTSKSSPERIPRVILTNVLGTELGRKYIRTPPVTEGSLSDTDNLQSEQLSSSSDGSLESYQNLNPHKSCYLSERGSQRSKTVDDNSAKQTAHNKEKRRKDDGISLLISDTQPEDLNSGSRGCDHLEQESRNKDVKYSDSKVELTLISRKTKRRLRNNLPDSQYCTSLDKSTEQTKKQEDDSTISTEFEKPSENYHQDPKLPEEITTKPTKSDFTKLSSLNSQELTLSNATKSASAGSTTETVENSNSIDIVGISSLVEKDENELNTIEKPILRGHNEGNQSLISAEPIVVSSDEEGPVEHKSSEILKLQSKQDRETTNENESTSESALLELPLITCESVQMSSELCPYNPVMENISSIMPSNEMDLQLDFIFTSVYIGKIKGASKGCVTITKKYIKIPFQVSLNEISLLVDTTHLKRFGLWKSKDDNHSKRSHAILFFWVSSDYLQEIQTQLEHSVLSQQSKSSEFIFLELHNPVSQREELKLKDIMTEISIISGELELSYPLSWVQAFPLFQNLSSKESSFIHYYCVSTCSFPAGVAVAEEMKLKSVSQPSNTDAAKPTYTFLQKQSSGCYSLSITSNPDEEWREVRHTGLVQKLIVYPPPPTKGGLGVTNEDLECLEEGEFLNDVIIDFYLKYLILEKASDELVERSHIFSSFFYKCLTRKENNLTEDNPNLSMAQRRHKRVRTWTRHINIFNKDYIFVPVNESSHWYLAVICFPWLEEAVYEDFPQTVSQQSQAQQSQNDNKTIDNDLRTTSTLSLSAEDSQSTESNMSVPKKMCKRPCILILDSLKAASVQNTVQNLREYLEVEWEVKLKTHRQFSKTNMVDLCPKVPKQDNSSDCGVYLLQYVESFFKDPIVNFELPIHLEKWFPRHVIKTKREDIRELILKLHLQQQKGSSS

SEQ ID NO: 38784 - protein, 999 aa, Homo sapiens
MGVAGRNRPGAAWAVLLLLLLLPPLLLLAGAVPPGRGRAAGPQEDVDECAQGLDDCHADALCQNTPTSYKCSCKPGYQGEGRQCEDIDECGNELNGGCVHDCLNIPGNYRCTCFDGFMLAHDGHNCLDVDECLENNGGCQHTCVNVMGSYECCCKEGFFLSDNQHTCIHRSEEGLSCMNKDHGCSHICKEAPRGSVACECRPGFELAKNQRDCILTCNHGNGGCQHSCDDTADGPECSCHPQYKMHTDGRSCLEREDTVLEVTESNTTSVVDGDKRVKRRLLMETCAVNNGGCDRTCKDTSTGVHCSCPVGFTLQLDGKTCKDIDECQTRNGGCDHFCKNIVGSFDCGCKKGFKLLTDEKSCQDVDECSLDRTCDHSCINHPGTFACACNRGYTLYGFTHCGDTNECSINNGGCQQVCVNTVGSYECQCHPGYKLHWNKKDCVEVKGLLPTSVSPRVSLHCGKSGGGDGCFLRCHSGIHLSSDVTTIRTSVTFKLNEGKCSLKNAELFPEGLRPALPEKHSSVKESFRYVNLTCSSGKQVPGAPGRPSTPKEMFITVEFELETNQKEVTASCDLSCIVKRTEKRLRKAIRTLRKAVHREQFHLQLSGMNLDVAKKPPRTSERQAESCGVGQGHAENQCVSCRAGTYYDGARERCILCPNGTFQNEEGQMTCEPCPRPGNSGALKTPEAWNMSECGGLCQPGEYSADGFAPCQLCALGTFQPEAGRTSCFPCGGGLATKHQGATSFQDCETRVQCSPGHFYNTTTHRCIRCPVGTYQPEFGKNNCVSCPGNTTTDFDGSTNITQCKNRRCGGELGDFTGYIESPNYPGNYPANTECTWTINPPPKRRILIVVPEIFLPIEDDCGDYLVMRKTSSSNSVTTYETCQTYERPIAFTSRSKKLWIQFKSNEGNSARGFQVPYVTYDEDYQELIEDIVRDGRLYASENHQEILKDKKLIKALFDVLAHPQNYFKYTAQESREMFPRSFIRLLRSKVSRFLRPYK

SEQ ID NO: 38785 - protein, 971 aa, Homo sapiens
MGVAGRNRPGAAWAVLLLLLLLPPLLLLAGAVPPGRGRAAGPQEDVDECAQGLDDCHADALCQNTPTSYKCSCKPGYQGEGRQCEDIDECGNELNGGCVHDCLNIPGNYRCTCFDGFMLAHDGHNCLDVDECLENNGGCQHTCVNVMGSYECCCKEGFFLSDNQHTCIHRSEEGLSCMNKDHGCSHICKEAPRGSVACECRPGFELAKNQRDCILTCNHGNGGCQHSCDDTADGPECSCHPQYKMHTDGRSCLEREDTVLEVTESNTTSVVDGDKRVKRRLLMETCAVNNGGCDRTCKDTSTGVHCSCPVGFTLQLDGKTCKDIDECQTRNGGCDHFCKNIVGSFDCGCKKGFKLLTDEKSCQDVDECSLDRTCDHSCINHPGTFACACNRGYTLYGFTHCGDTNECSINNGGCQQVCVNTVGSYECQCHPGYKLHWNKKDCVEVKGLLPTSVSPRVSLHCGKSGGGDGCFLRCHSGIHLSSGLQGAYSVTCGSSSPLRNKQQKSNDSAFGDVTTIRTSVTFKLNEGKCSLKNAELFPEGLRPALPEKHSSVKESFRYVNLTCSSGKQVPGAPGRPSTPKEMFITVEFELETNQKEVTASCDLSCIVKRTEKRLRKAIRTLRKAVHREQFHLQLSGMNLDVAKKPPRTSERQAESCGVGQGHAENQCGLCQPGEYSADGFAPCQLCALGTFQPEAGRTSCFPCGGGLATKHQGATSFQDCETRVQCSPGHFYNTTTHRCIRCPVGTYQPEFGKNNCVSCPGNTTTDFDGSTNITQCKNRRCGGELGDFTGYIESPNYPGNYPANTECTWTINPPPKRRILIVVPEIFLPIEDDCGDYLVMRKTSSSNSVTTYETCQTYERPIAFTSRSKKLWIQFKSNEGNSARGFQVPYVTYDEDYQELIEDIVRDGRLYASENHQEILKDKKLIKALFDVLAHPQNYFKYTAQESREMFPRSFIRLLRSKVSRFLRPYK

SEQ ID NO: 38786 - protein, 807 aa, Homo sapiens
MGVAGRNRPGAAWAVLLLLLLLPPLLLLAGAVPPGRGRAAGPQEDVDECAQGLDDCHADALCQNTPTSYKCSCKPGYQGEGRQCEDIDECGNELNGGCVHDCLNIPGNYRCTCFDGFMLAHDGHNCLDVDECLENNGGCQHTCVNVMGSYECCCKEGFFLSDNQHTCIHRSEEGLSCMNKDHGCSHICKEAPRGSVACECRPGFELAKNQRDCILTCNHGNGGCQHSCDDTADGPECSCHPQYKMHTDGRSCLEREDTVLEVTESNTTSVVDGDKRVKRRLLMETCAVNNGGCDRTCKDTSTGVHCSCPVGFTLQLDGKTCKDIDECQTRNGGCDHFCKNIVGSFDCGCKKGFKLLTDEKSCQDVDECSLDRTCDHSCINHPGTFACACNRGYTLYGFTHCGDTNECSINNGGCQQVCVNTVGSYECQCHPGYKLHWNKKDCVASCDLSCIVKRTEKRLRKAIRTLRKAVHREQFHLQLSGMNLDVAKKPPRTSERQAESCGVGQGHAENQCVSCRAGTYYDGARERCILCPNGTFQNEEGQMTCEPCPRPGNSGALKTPEAWNMSECGGLCQPGEYSADGFAPCQLCALGTFQPEAGRTSCFPCGGGLATKHQGATSFQDCETRVQCSPGHFYNTTTHRCIRCPVGTYQPEFGKNNCVSCPGNTTTDFDGSTNITQCKTSSNSVTTYETCQTYERPIAFTSRSKKLWIQFKSNEGNSARGFQVPYVTYDEDYQELIEDIVRDGRLYASENHQEILKDKKLIKALFDVLAHPQNYFKYTAQESREMFPRSFIRLLRSKVSRFLRPYK

SEQ ID NO: 38787 - protein, 193 aa, Homo sapiens
MQSLMQAPLLIALGLLLAAPAQAHLKKPSQLSSFSWDNCDEGKDPAVIRSLTLEPDPIIVPGNVTLSVMGSTSVPLSSPLKVDLVLEKEVAGLWIKIPCTDYIGSCTFEHFCDVLDMLIPTGEPCPEPLRTYGLPCHCPFKEGTYSLPKSEFVVPDLELPSWLTTGNYRIESVLSSSGKRLGCIKIAASLKGI

SEQ ID NO: 38788 - protein, 212 aa, Homo sapiens
MDPVVLSYMDSLLRQSDVSLLDPPSWLNDHIIGFAFEYFANSQFHDCSDHVSFISPEVTQFIKCTSNPAEIAMFLEPLDLPNKRVVFLAINDNSNQAAGGTHWSLLVYLQDKNSFFHYDSHSRSNSVHAKQVAEKLEAFLGRKGDKLAFVEEKAPAQQNSYDCGMYVICNTEALCQNFFRQQTESLLQLLTPAYITKKRGEWKDLITTLAKK

SEQ ID NO: 38789 - protein, 613 aa, Homo sapiens
MAAQAAAAAQAAAAQAAQAEAADSWYLALLGFAEHFRTSSPPKIRLCVHCLQAVFPFKPPQRIEARTHLQLGSVLYHHTKNSEQARSHLEKAWLISQQIPQFEDVKFEAASLLSELYCQENSVDAAKPLLRKAIQISQQTPYWHCRLLFQLAQLHTLEKDLVSACDLLGVGAEYARVVGSEYTRALFLLSKGMLLLMERKLQEVHPLLTLCGQIVENWQGNPIQKESLRVFFLVLQVTHYLDAGQVKSVKPCLKQLQQCIQTISTLHDDEILPSNPADLFHWLPKEHMCVLVYLVTVMHSMQAGYLEKAQKYTDKALMQLEKLKMLDCSPILSSFQVILLEHIIMCRLVTGHKATALQEISQVCQLCQQSPRLFSNHAAQLHTLLGLYCVSVNCMDNAEAQFTTALRLTNHQELWAFIVTNLASVYIREGNRHQEVLYSLLERINPDHSFPVSSHCLRAAAFYVRGLFSFFQGRYNEAKRFLRETLKMSNAEDLNRLTACSLVLLGHIFYVLGNHRESNNMVVPAMQLASKIPDMSVQLWSSALLRDLNKACGNAMDAHEAAQMHQNFSQQLLQDHIEACSLPEHNLITWTDGPPPVQFQAQNGPNTSLASLL

SEQ ID NO: 38790 - protein, 218 aa, Homo sapiens
MDNAEAQFTTALRLTNHQELWAFIVTNLASVYIREGNRHQELYSLLERINPDHSFPVSSHCLRAAAFYVRGLFSFFQGRYNEAKRFLRETLKMSNAEDLNRLTACSLVLLGHIFYVLGNHRESNNMVVPAMQLASKIPDMSVQLWSSALLRDLNKACGNAMDAHEAAQMHQNFSQQLLQDHIEACSLPEHNLITWTDGPPPVQFQAQNGPNTSLASLL

SEQ ID NO: 38791 - protein, 189 aa, Homo sapiens
MQNGADWLFPPQLYSLLERINPDHSFPVSSHCLRAAAFYVRGLFSFFQGRYNEAKRFLRETLKMSNAEDLNRLTACSLVLLGHIFYVLGNHRESNNMVVPAMQLASKIPDMSVQLWSSALLRDLNKACGNAMDAHEAAQMHQNFSQQLLQDHIEACSLPEHNLITWTDGPPPVQFQAQNGPNTSLASLL

SEQ ID NO: 38792 - protein, 259 aa, Homo sapiens
MATATGVAEERLLAALAYLQCAVGCAVFARNRQTNSVYGRHALPSHRLRVPARAAWVVQELPSLALPLYQYASESAPRLRSAPNCILLAMFLVHYGHRCLIYPFLMRGGKPMPLLACTMAIMFCTCNGYLQSRYLSHCAVYADDWVTDPRFLIGFGLWLTGMLINIHSDHILRNLRKPGDTGYKIPRGGLFEYVTAANYFGEIMEWCGYALASWSVQGAAFAFFTFCFLSGRAKEHHEWYLRKFEEYPKFRKIIIPFLF

SEQ ID NO: 38793 - protein, 454 aa, Homo sapiens
MASSEVARHLLFQSHMATKTTCMSSQGSDDEQIKRENIRSLTMSGHVGFESLPDQLVNRSIQQGFCFNILCVGETGIGKSTLIDTLFNTNFEDYESSHFCPNVKLKAQTYELQESNVQLKLTIVNTVGFGDQINKEESYQPIVDYIDAQFEAYLQEELKIKRSLFTYHDSRIHVCLYFISPTGHSLKTLDLLTMKNLDSKVNIIPVIAKADTVSKTELQKFKIKLMSELVSNGVQIYQFPTDDDTIAKVNAAMNGQLPFAVVGSMDEVKVGNKMVKARQYPWGVVQVENENHCDFVKLREMLICTNMEDLREQTHTRHYELYRRCKLEEMGFTDVGPENKPVSVQETYEAKRHEFHGERQRKEEEMKQMFVQRVKEKEAILKEAERELQAKFEHLKRLHQEERMKLEEKRRLLEEEIIAFSKKKATSEIFHSQSFLATGSNLRKDKDRKNSNFL

SEQ ID NO: 38794 - protein, 503 aa, Homo sapiens
MASSEVARHLLFQSHMATKTTCMSSQGSDDEQIKRENIRSLTMSGHVGFESLPDQLVNRSIQQGFCFNILCVGETGIGKSTLIDTLFNTNFEDYESSHFCPNVKLKAQTYELQESNVQLKLTIVNTVGFGDQINKEESYQPIVDYIDAQFEAYLQEELKIKRSLFTYHDSRIHVCLYFISPTGHSLKTLDLLTMKNLDSKVNIIPVIAKADTVSKTELQKFKIKLMSELVSNGVQIYQFPTDDDTIAKVNAAMNGQLPFAVVGSMDEVKVGNKMVKARQYPWGVVQVENENHCDFVKLREMLICTNMEDLREQTHTRHYELYRRCKLEEMGFTDVGPENKPVSVQETYEAKRHEFHGERQRKEEEMKQMFVQRVKEKEAILKEAERELQAKFEHLKRLHQEERMKLEEKRRLLEEEIIAFSKKKATSEIFHSQSFLATGSNLRKDKDRKKEPGCRFELLCIDVRACETNGGRKDAEKAPIFCKTEVPEHRRSSSQANFIKKKN

SEQ ID NO: 38795 - protein, 431 aa, Homo sapiens
MASSEVARHLKRENIRSLTMSGHVGFESLPDQLVNRSIQQGFCFNILCVGETGIGKSTLIDTLFNTNFEDYESSHFCPNVKLKAQTYELQESNVQLKLTIVNTVGFGDQINKEESYQPIVDYIDAQFEAYLQEELKIKRSLFTYHDSRIHVCLYFISPTGHSLKTLDLLTMKNLDSKVNIIPVIAKADTVSKTELQKFKIKLMSELVSNGVQIYQFPTDDDTIAKVNAAMNGQLPFAVVGSMDEVKVGNKMVKARQYPWGVVQVENENHCDFVKLREMLICTNMEDLREQTHTRHYELYRRCKLEEMGFTDVGPENKPVSVQETYEAKRHEFHGERQRKEEEMKQMFVQRVKEKEAILKEAERELQAKFEHLKRLHQEERMKLEEKRRLLEEEIIAFSKKKATSEIFHSQSFLATGSNLRKDKDRKNSNFL

SEQ ID NO: 38796 - protein, 693 aa, Homo sapiens
MAQGSHQIDFQVLHDLRQKFPEVPEVVVSRCMLQNNNNLDACCAVLSQESTRYLYGEGDLNFSDDSGISGLRNHMTSLNLDLQSQNIYHHGREGSRMNGSRTLTHSISDGQLQGGQSNSELFQQEPQTAPAQVPQGFNVFGMSSSSGASNSAPHLGFHLGSKGTSSLSQQTPRFNPIMVTLAPNIQTGRNTPTSLHIHGVPPPVLNSPQGNSIYIRPYITTPGGTTRQTQQHSGWVSQFNPMNPQQVYQPSQPGPWTTCPASNPLSHTSSQQPNQQGHQTSHVYMPISSPTTSQPPTIHSSGSSQSSAHSQYNIQNISTGPRKNQIEIKLEPPQRNNSSKLRSSGPRTSSTSSSVNSQTLNRNQPTVYIAASPPNTDELMSRSQPKVYISANAATGDEQVMRNQPTLFISTNSGASAASRNMSGQVSMGPAFIHHHPPKSRAIGNNSATSPRVVVTQPNTKYTFKITVSPNKPPAVSPGVVSPTFELTNLLNHPDHYVETENIQHLTDPTLAHVDRISETRKLSMGSDDAAYTQALLVHQKARMERLQRELEIQKKKLDKLKSEVNEMENNLTRRRLKRSNSISQIPSLEEMQQLRSCNRQLQIDIDCLTKEIDLFQARGPHFNPSAIHNFYDNIGFVGPVPPKPKDQRSIIKTPKTQDTEDDEGAQWNCTACTFLNHPALIRCEQCEMPRHF

SEQ ID NO: 38797 - protein, 536 aa, Homo sapiens
MAQGSHQIDFQVLHDLRQKFPEVPEVVVSRCMLQNNNNLDACCAVLSQESTRYLYGEGDLNFSDDSGISGLRNHMTSLNLDLQSQNIYHHGREGSRMNGSRTLTHSISDGQLQGGQSNSELFQQEPQTAPAQVPQGFNVFGMSSSSGASNSAPHLGFHLGSKGTSSLSQQTPRFNPIMVTLAPNIQTGRNTPTSLHIHGVPPPVLNSPQGNSIYIRPYITTPGGTTRQTQQHSGWVSQFNPMNPQQVYQPSQPGPWTTCPASNPLSHTSSQQPNQQGHQTSHVYMPISSPTTSQPPTIHSSGSSQSSAHSQYNIQNISTGPRKNQIEIKLEPPQRNNSSKLRSSGPRTSSTSSSVNSQTLNRNQPTVYIAASPPNTDELMSRSQPKVYISANAATGDEQVMRNQPTLFISTNSGASAASRNMSGQVSMGPAFIHHHPPKSRAIGNNSATSPRVVVTQPNTKYTFKITVSPNKPPAVSPGVVSPTFELTNLLNHPDHYVETENIQHLTDPTLAHVDRISETRKLSMGSDDAAYTQDI

SEQ ID NO: 38798 - protein, 474 aa, Homo sapiens
MKTKCICELCSCGRHHCPHLPTKIYDKTEKPCLLSEYTENYPFYHSYLPRESFKPRREYQKGPIPMEGLTTSRRDFGPHKVAPVKVHQYDQFVPSEENMDLLTTYKKDYNPYPVCRVDPIKPRDSKYPCSDKMECLPTYKADYLPWNQPRREPLRLEHKYQPASVRFDNRTTHQDDYPIKGLVKTISCKPLAMPKLCNIPLEDVTNYKMSYVAHPVEKRFVHEAEKFRPCEIPFESLTTQKQSYRGLMGEPAKSLKPLARPPGLDMPFCNTTEFRDKYQAWPMPRMFSKAPITYVPPEDRMDLLTTVQAHYTCPKGAPAQSCRPALQIKKCGRFEGSSTTKDDYKQWSSMRTEPVKPVPQLDLPTEPLDCLTTTRAHYVPHLPINTKSCKPHWSGPRGNVPVESQTTYTISFTPKEMGRCLASYPEPPGYTFEEVDALGHRIYKPVSQAGSQQSSHLSVDDSENPNQRELEVLA

SEQ ID NO: 38799 - protein, 439 aa, Homo sapiens
MADPDVLTEVPAALKRLAKYVIRGFYGIEHALALDILIRNSCVKEEDMLELLKFDRKQLRSVLNNLKGDKFIKCRMRVETAADGKTTRHNYYFINYRTLVNVVKYKLDHMRRRIETDERDSTNRASFKCPVCSSTFTDLEANQLFDPMTGTFRCTFCHTEVEEDESAMPKKDARTLLARFNEQIEPIYALLRETEDVNLAYEILEPEPTEIPALKQSKDHAATTAGAASLAGGHHREAWATKGPSYEDLYTQNVVINMDDQEDLHRASLEGKSAKERPIWLRESTVQGAYGSEDMKEGGIDMDAFQEREEGHAGPDDNEEVMRALLIHEKKTSSAMAGSVGAAAPVTAANGSDSESETSESDDDSPPRPAAVAVHKREEDEEEDDEFEEVADDPIVMVAGRPFSYSEVSQRPELVAQMTPEEKEAYIAMGQRMFEDLFE

SEQ ID NO: 38800 - protein, 294 aa, Homo sapiens
MSPRGTGCSAGLLMTVGWLLLAGLQSARGTNVTAAVQDAGLAHEGEGEEETENNDSETAENYAPPETEDVSNRNVVKEVEFGMCTVTCGIGVREVILTNGCPGGESKCVVRVEECRGPTDCGWGKPISESLESVRLACIHTSPLNRFKYMWKLLRQDQQSIILVNDSAILEVRKESHPLAFECDTLDNNEIVATIKFTVYTSSELQMRRSSLPATDAALIFVLTIGVIICVFIIFLLIFIIINWAAVKAFWGAKASTPEVQSEQSSVRYKDSTSLDQLPTEMPGEDDALSEWNE

SEQ ID NO: 38801 - protein, 432 aa, Homo sapiens
MAERTMAMPTQIPADGDTQKENNIRCLTTIGHFGFECLPNQLVSRSIRQGFTFNILCVGETGIGKSTLIDTLFNTNLKDNKSSHFYSNVGLQIQTYELQESNVQLKLTVVETVGYGDQIDKEASYQPIVDYIDAQFEAYLQEELKIKRSLFEYHDSRVHVCLYFISPTGHSLKSLDLLTMKNLDSKVNIIPLIAKADTISKNDLQTFKNKIMSELISNGIQIYQLPTDEETAAQANSSVSGLLPFAVVGSTDEVKVGKRMVRGRHYPWGVLQVENENHCDFVKLRDMLLCTNMENLKEKTHTQHYECYRYQKLQKMGFTDVGPNNQPVSFQEIFEAKRQEFYDQCQREEEELKQRFMQRVKEKEATFKEAEKELQDKFEHLKMIQQEEIRKLEEEKKQLEGEIIDFYKMKAASEALQTQLSTDTKKDKHRKK

SEQ ID NO: 38802 - protein, 477 aa, Homo sapiens
MLRWLRDFVLPTAACQDAEQPTRYETLFQALDRNGDGVVDIGELQEGLRNLGIPLGQDAEEKIFTTGDVNKDGKLDFEEFMKYLKDHEKKMKLAFKSLDKNNDGKIEASEIVQSLQTLGLTISEQQAELILQSIDVDGTMTVDWNEWRDYFLFNPVTDIEEIIRFWKHSTGIDIGDSLTIPDEFTEDEKKSGQWWRQLLAGGIAGAVSRTSTAPLDRLKIMMQVHGSKSDKMNIFGGFRQMVKEGGIRSLWRGNGTNVIKIAPETAVKFWAYEQYKKLLTEEGQKIGTFERFISGSMAGATAQTFIYPMEVMKTRLAVGKTGQYSGIYDCAKKILKHEGLGAFYKGYVPNLLGIIPYAGIDLAVYELLKSYWLDNFAKDSVNPGVMVLLGCGALSSTCGQLASYPLALVRTRMQAQAMLEGSPQLNMVGLFRRIISKEGIPGLYRGITPNFMKVLPAVGISYVVYENMKQTLGVTQK

SEQ ID NO: 38803 - protein, 458 aa, Homo sapiens
MDSLYGDLFWYLDYNKDGTLDIFELQEGLEDVGAIQSLEEAKKIFTTGDVNKDGKLDFEEFMKYLKDHEKKMKLAFKSLDKNNDGKIEASEIVQSLQTLGLTISEQQAELILQSIDVDGTMTVDWNEWRDYFLFNPVTDIEEIIRFWKHSTGIDIGDSLTIPDEFTEDEKKSGQWWRQLLAGGIAGAVSRTSTAPLDRLKIMMQVHGSKSDKMNIFGGFRQMVKEGGIRSLWRGNGTNVIKIAPETAVKFWAYEQYKKLLTEEGQKIGTFERFISGSMAGATAQTFIYPMEVMKTRLAVGKTGQYSGIYDCAKKILKHEGLGAFYKGYVPNLLGIIPYAGIDLAVYELLKSYWLDNFAKDSVNPGVMVLLGCGALSSTCGQLASYPLALVRTRMQAQAMLEGSPQLNMVGLFRRIISKEGIPGLYRGITPNFMKVLPAVGISYVVYENMKQTLGVTQK

SEQ ID NO: 38804 - protein, 687 aa, Homo sapiens
MSNRNNNKLPSNLPQLQNLIKRDPPAYIEEFLQQYNHYKSNVEIFKLQPNKPSKELAELVMFMAQISHCYPEYLSNFPQEVKDLLSCNHTVLDPDLRMTFCKALILLRNKNLINPSSLLELFFELFRCHDKLLRKTLYTHIVTDIKNINAKHKNNKVNVVLQNFMYTMLRDSNATAAKMSLDVMIELYRRNIWNDAKTVNVITTACFSKVTKILVAALTFFLGKDEDEKQDSDSESEDDGPTARDLLVQYATGKKSSKNKKKLEKAMKVLKKQKKKKKPEVFNFSAIHLIHDPQDFAEKLLKQLECCKERFEVKMMLMNLISRLVGIHELFLFNFYPFLQRFLQPHQREVTKILLFAAQASHHLVPPEIIQSLLMTVANNFVTDKNSGEVMTVGINAIKEITARCPLAMTEELLQDLAQYKTHKDKNVMMSARTLIHLFRTLNPQMLQKKFRGKPTEASIEARVQEYGELDAKDYIPGAEVLEVEKEENAENDEDGWESTSLSEEEDADGEWIDVQHSSDEEQQEISKKLNSMPMEERKAKAAAISTSRVLTQEDFQKIRMAQMRKELDAAPGKSQKRKYIEIDSDEEPRGELLSLRDIERLHKKPKSDKETRLATAMAGKTDRKEFVRKKTKTNPFSSSTNKEKKKQKNFMMMRYSQNVRSKNKRSFREKQLALRDALLKKRKRMK

SEQ ID NO: 38805 - protein, 590 aa, Homo sapiens
MTFCKALILLRNKNLINPSSLLELFFELFRCHDKLLRKTLYTHIVTDIKNINAKHKNNKVNVVLQNFMYTMLRDSNATAAKMSLDVMIELYRRNIWNDAKTVNVITTACFSKVTKILVAALTFFLGKDEDEKQDSDSESEDDGPTARDLLVQYATGKKSSKNKKKLEKAMKVLKKQKKKKKPEVFNFSAIHLIHDPQDFAEKLLKQLECCKERFEVKMMLMNLISRLVGIHELFLFNFYPFLQRFLQPHQREVTKILLFAAQASHHLVPPEIIQSLLMTVANNFVTDKNSGEVMTVGINAIKEITARCPLAMTEELLQDLAQYKTHKDKNVMMSARTLIHLFRTLNPQMLQKKFRGKPTEASIEARVQEYGELDAKDYIPGAEVLEVEKEENAENDEDGWESTSLSEEEDADGEWIDVQHSSDEEQQEISKKLNSMPMEERKAKAAAISTSRVLTQEDFQKIRMAQMRKELDAAPGKSQKRKYIEIDSDEEPRGELLSLRDIERLHKKPKSDKETRLATAMAGKTDRKEFVRKKTKTNPFSSSTNKEKKKQKNFMMMRYSQNVRSKNKRSFREKQLALRDALLKKRKRMK

SEQ ID NO: 38806 - protein, 165 aa, Homo sapiens
  MOD_RES (96)..(96): Selenocysteine
MVAMAAGPSGCLVPAFGLRLLLATVLQAVSAFGAEFSSEACRELGFSSNLLCSSCDLLGQFNLLQLDPDCRGCCQEEAQFETKKLYAGAILEVCGXKLGRFPQVQAFVRSDKPKLFRGLQIKYVRGSDPVLKLLDDNGNIAEELSILKWNTDSVEEFLSEKLERI

SEQ ID NO: 38807 - protein, 124 aa, Homo sapiens
  MOD_RES (96)..(96): Selenocysteine
MVAMAAGPSGCLVPAFGLRLLLATVLQAVSAFGAEFSSEACRELGFSSNLLCSSCDLLGQFNLLQLDPDCRGCCQEEAQFETKKLYAGAILEVCGXKLGRFPQVQVCPWFRPCIKAFGRQWEHC

SEQ ID NO: 38808 - protein, 620 aa, Homo sapiens
MSKSKCSVGLMSSVVAPAKEPNAVGPKEVELILVKEQNGVQLTSSTLTNPRQSPVEAQDRETWGKKIDFLLSVIGFAVDLANVWRFPYLCYKNGGGAFLVPYLLFMVIAGMPLFYMELALGQFNREGAAGVWKICPILKGVGFTVILISLYVGFFYNVIIAWALHYLFSSFTTELPWIHCNNSWNSPNCSDAHPGDSSGDSSGLNDTFGTTPAAEYFERGVLHLHQSHGIDDLGPPRWQLTACLVLVIVLLYFSLWKGVKTSGKVVWITATMPYVVLTALLLRGVTLPGAIDGIRAYLSVDFYRLCEASVWIDAATQVCFSLGVGFGVLIAFSSYNKFTNNCYRDAIVTTSINSLTSFSSGFVVFSFLGYMAQKHSVPIGDVAKDGPGLIFIIYPEAIATLPLSSAWAVVFFIMLLTLGIDSAMGGMESVITGLIDEFQLLHRHRELFTLFIVLATFLLSLFCVTNGGIYVFTLLDHFAAGTSILFGVLIEAIGVAWFYGVGQFSDDIQQMTGQRPSLYWRLCWKLVSPCFLLFVVVVSIVTFRPPHYGAYIFPDWANALGWVIATSSMAMVPIYAAYKFCSLPGSFREKLAYAIAPEKDRELVDRGEVRQFTLRHWLKV

SEQ ID NO: 38809 - protein, 630 aa, Homo sapiens
METTPLNSQKQLSACEDGEDCQENGVLQKVVPTPGDKVESGQISNGYSAVPSPGAGDDTRHSIPATTTTLVAELHQGERETWGKKVDFLLSVIGYAVDLGNVWRFPYICYQNGGGAFLLPYTIMAIFGGIPLFYMELALGQYHRNGCISIWRKICPIFKGIGYAICIIAFYIASYYNTIMAWALYYLISSFTDQLPWTSCKNSWNTGNCTNYFSEDNITWTLHSTSPAEEFYTRHVLQIHRSKGLQDLGGISWQLALCIMLIFTVIYFSIWKGVKTSGKVVWVTATFPYIILSVLLVRGATLPGAWRGVLFYLKPNWQKLLETGVWIDAAAQIFFSLGPGFGVLLAFASYNKFNNNCYQDALVTSVVNCMTSFVSGFVIFTVLGYMAEMRNEDVSEVAKDAGPSLLFITYAEAIANMPASTFFAIIFFLMLITLGLDSTFAGLEGVITAVLDEFPHVWAKRRERFVLAVVITCFFGSLVTLTFGGAYVVKLLEEYATGPAVLTVALIEAVAVSWFYGITQFCRDVKEMLGFSPGWFWRICWVAISPLFLLFIICSFLMSPPQLRLFQYNYPYWSIILGYCIGTSSFICIPTYIAYRLIITPGTFKERIIKSITPETPTEIPCGDIRLNAV

SEQ ID NO: 38810 - protein, 672 aa, Homo sapiens
MSQSRRVNPDDRELGGDLQIQAPRDQLGSLADGHQCHLLTSRMETTPLNSQKQLSACEDGEDCQENGVLQKVVPTPGDKVESGQISNGYSAVPSPGAGDDTRHSIPATTTTLVAELHQGERETWGKKVDFLLSVIGYAVDLGNVWRFPYICYQNGGGAFLLPYTIMAIFGGIPLFYMELALGQYHRNGCISIWRKICPIFKGIGYAICIIAFYIASYYNTIMAWALYYLISSFTDQLPWTSCKNSWNTGNCTNYFSEDNITWTLHSTSPAEEFYTRHVLQIHRSKGLQDLGGISWQLALCIMLIFTVIYFSIWKGVKTSGKVVWVTATFPYIILSVLLVRGATLPGAWRGVLFYLKPNWQKLLETGVWIDAAAQIFFSLGPGFGVLLAFASYNKFNNNCYQDALVTSVVNCMTSFVSGFVIFTVLGYMAEMRNEDVSEVAKDAGPSLLFITYAEAIANMPASTFFAIIFFLMLITLGLDSTFAGLEGVITAVLDEFPHVWAKRRERFVLAVVITCFFGSLVTLTFGGAYVVKLLEEYATGPAVLTVALIEAVAVSWFYGITQFCRDVKEMLGFSPGWFWRICWVAISPLFLLFIICSFLMSPPQLRLFQYNYPYWSIILGYCIGTSSFICIPTYIAYRLIITPGTFKERIIKSITPETPTEIPCGDIRLNAV

SEQ ID NO: 38811 - protein, 135 aa, Homo sapiens
MKVVGNYRVNTANSSTDTSGEHLTCLRSQLFVAYRNGRVDEAVSLGFLDCWIGGDLTNFKGCYLTNQLPIQIFTAIFDMNTDVIILSQFMYYRLKNQKKKMIFQPQLFKDSITREKVRLSLWGVLCPVYIPYSFR

SEQ ID NO: 38812 - protein, 118 aa, Homo sapiens
MKVVGNYRVNTANSSTDTSGEHLTCLRSQLFVAYRNGRVDEAVSLGFLDCWIGGDLTNFKGCYLTNQLPIQIFTAIFDMNTDVIILSQFMYYRLKNQKKKISEEDLRKELHFCCLHWP

SEQ ID NO: 38813 - protein, 72 aa, Homo sapiens
MKVVGNYRVNTANSSTDTSGEHLTCLRSQLFVAYRNGRVDEAVSLGFLDCWIGGDLTNFKGCYLTNQLPIQF

SEQ ID NO: 38814 - protein, 133 aa, Homo sapiens
MKVVGNYRVNTANSSTDTSGEHLTCLRSQLFVAYRNGRVDEAVSLGFLDCWIGGDLTNFKGCYLTNQLPIQDIPTSVIQRLHHQRESQIVTLGSPLPCIYPIFFQISEISMPGYYSCLCHTTINTSKRRFILT

SEQ ID NO: 38815 - protein, 688 aa, Homo sapiens
MSNVTLRKMSPTGNEMKSTTQGTTRKQQDFHEVNKRRTFLQDNSWIKKRPEEEKDENYGRVVLNRHNSHDALDRKVNERDVPKATISRYSSDDTLDRISDRNDAAKTYKANTLDNQLTNRSMSMFRSLEVTKLQPGGSLNANTSNTIASTSATTPVKKKRQSWFPPPPPGYNASSSTGTRRREPGVHPPIPPKPSSPVSSPNQLRQDNRQIHPPKPGVYTETNRSAERNIRSQDLDNIVKVATSLQRSDKGEELDNLIKMNKSLNRNQGLDSLFRANPKVEEREKRAKSLESLIYMSTRTDKDGKGIQSLGSPIKVNQRTDKNEKGRQNLESVAKVNARMNKTSRRSEDLDNATEVNPKGHENTTGKKDLDGLIKVDPETNKNITRGQSLDNLIKVTPEVKRSNQGSKDLNNFIKVYPGTEKSTEGGQSLDSLIKVTPERNRTNQGNQDLENLIKVIPSANKSSEQGLDEHINVSPKAVKNTDGKQDLDKLIKVNPEIFTNNQRNQDLANLIKVNPAVIRNNQSQDLDNLIKVKPSALRNTNRDQNLENLIEVNSHVSENKNGSSNTGAKQAGPQDTVVYTRTYVENSKSPKDGYQENISGKYIQTVYSTSDRSVIERDMCTYCRKPLGVETKMILDELQICCHSTCFKCEICKQPLENLQAGDSIWIYRQTIHCEPCYSKIMAKWIP

SEQ ID NO: 38816 - protein, 668 aa, Homo sapiens
MSNVTLRKMSPTGNEMKSTTQGTTRKQQDFHEVNKRRTFLQDNSWIKKRPEEEKDENYGRVVLNRHNSHDALDRKVNERDVPKATISRYSSDDTLDRISDRNDAAKTYKANTLDNQLTNRSMSMFRSLEVTKLQPGGSLNANTSNTIASTSATTPVKKKRQSWFPPPPPGYNASSSTGTRRREPGVHPPIPPKPSSPVSSPNQLRQDNRQIHPPKPGVYTETNRSAERNISEELDNLIKMNKSLNRNQGLDSLFRANPKVEEREKRAKSLESLIYMSTRTDKDGKGIQSLGSPIKVNQRTDKNEKGRQNLESVAKVNARMNKTSRRSEDLDNATEVNPKGHENTTGKKDLDGLIKVDPETNKNITRGQSLDNLIKVTPEVKRSNQGSKDLNNFIKVYPGTEKSTEGGQSLDSLIKVTPERNRTNQGNQDLENLIKVIPSANKSSEQGLDEHINVSPKAVKNTDGKQDLDKLIKVNPEIFTNNQRNQDLANLIKVNPAVIRNNQSQDLDNLIKVKPSALRNTNRDQNLENLIEVNSHVSENKNGSSNTGAKQAGPQDTVVYTRTYVENSKSPKDGYQENISGKYIQTVYSTSDRSVIERDMCTYCRKPLGVETKMILDELQICCHSTCFKCEICKQPLENLQAGDSIWIYRQTIHCEPCYSKIMAKWIP

SEQ ID NO: 38817 - protein, 646 aa, Homo sapiens
MSNVTLRKMSPTGNEMKSTTQGTTRKQQDFHEVNKRRTFLQDNSWIKKRPEEEKDENYGRVVLNRHNSHDALDRKVNERDVPKATISRYSSDDTLDRISDRNDAAKTYKANTLDNQLTNRSMSMFRSLEVTKLQPGGSLNANTSNTIASTSATTPVKKKREPGVHPPIPPKPSSPVSSPNQLRQDNRQIHPPKPGVYTETNRSAERNIRSQDLDNIVKVATSLQRSDKGEELDNLIKMNKSLNRNQGLDSLFRANPKVEEREKRAKSLESLIYMSTRTDKDGKGIQSLGSPIKVNQRTDKNEKGRQNLESVAKVNARMNKTSRRSEDLDNATEVNPKGHENTTGGQSLDNLIKVTPEVKRSNQGSKDLNNFIKVYPGTEKSTEGGQSLDSLIKVTPERNRTNQGNQDLENLIKVIPSANKSSEQGLDEHINVSPKAVKNTDGKQDLDKLIKVNPEIFTNNQRNQDLANLIKVNPAVIRNNQSQDLDNLIKVKPSALRNTNRDQNLENLIEVNSHVSENKNGSSNTGAKQAGPQDTVVYTRTYVENSKSPKDGYQENISGKYIQTVYSTSDRSVIERDMCTYCRKPLGVETKMILDELQICCHSTCFKCEICKQPLENLQAGDSIWIYRQTIHCEPCYSKIMAKWIP

SEQ ID NO: 38818 - protein, 730 aa, Homo sapiens
MPKNSKVVKRELDDDVTESVKDLLSNEDAADDAFKTSELIVDGQEEKDTDVEEGSEVEDERPAWNSKLQYILAQVGFSVGLGNVWRFPYLCQKNGGGAYLLPYLILLMVIGIPLFFLELSVGQRIRRGSIGVWNYISPKLGGIGFASCVVCYFVALYYNVIIGWSLFYFSQSFQQPLPWDQCPLVKNASHTFVEPECEQSSATTYYWYREALNISSSISESGGLNWKMTICLLAAWVMVCLAMIKGIQSSGKIIYFSSLFPYVVLICFLIRAFLLNGSIDGIRHMFTPKLEIMLEPKVWREAATQVFFALGLGFGGVIAFSSYNKRDNNCHFDAVLVSFINFFTSVLATLVVFAVLGFKANVINEKCITQNSETIMKFLKMGNISQDIIPHHINLSTVTAEDYHLVYDIIQKVKEEEFPALHLNSCKIEEELNKAVQGTGLAFIAFTEAMTHFPASPFWSVMFFLMLVNLGLGSMFGTIEGIVTPIVDTFKVRKEILTVICCLLAFCIGLIFVQRSGNYFVTMFDDYSATLPLLIVVILENIAVCFVYGIDKFMEDLKDMLGFAPSRYYYYMWKYISPLMLLSLLIASVVNMGLSPPGYNAWIEDKASEEFLSYPTWGLVVCVSLVVFAILPVPVVFIVRRFNLIDDSSGNLASVTYKRGRVLKEPVNLEGDDTSLIHGKIPSEMPSPNFGKNIYRKQSGSPTLDTAPNGRYGIGYLMADIMPDMPESDL

SEQ ID NO: 38819 - protein, 289 aa, Homo sapiens
MPKNSKVVKRELDDDVTESVKDLLSNEDAADDAFKTSELIVDGQEEKDTDVEEGSEVEDERPAWNSKLQYILAQVGFSVGLGNVWRFPYLCQKNGGGAYLLPYLILLMVIGIPLFFLELSVGQRIRRGSIGVWNYISPKLGGIGFASCVVCYFVALYYNVIIGWSLFYFSQSFQQPLPWDQCPLVKNASHTFVEPECEQSSATTYYWYREALNISSSISESGGLNWKMTICLLAAWVMVCLAMIKGIQSSGKVSMLEPFLILLITISGFIPLSNSVTDFCGQITHNTSF

SEQ ID NO: 38820 - protein, 623 aa, Homo sapiens
MVIGIPLFFLELSVGQRIRRGSIGVWNYISPKLGGIGFASCVVCYFVALYYNVIIGWSLFYFSQSFQQPLPWDQCPLVKNASHTFVEPECEQSSATTYYWYREALNISSSISESGGLNWKMTICLLAAWVMVCLAMIKGIQSSGKIIYFSSLFPYVVLICFLIRAFLLNGSIDGIRHMFTPKLEIMLEPKVWREAATQVFFALGLGFGGVIAFSSYNKRDNNCHFDAVLVSFINFFTSVLATLVVFAVLGFKANVINEKCITQNSETIMKFLKMGNISQDIIPHHINLSTVTAEDYHLVYDIIQKVKEEEFPALHLNSCKIEEELNKAVQGTGLAFIAFTEAMTHFPASPFWSVMFFLMLVNLGLGSMFGTIEGIVTPIVDTFKVRKEILTVICCLLAFCIGLIFVQRSGNYFVTMFDDYSATLPLLIVVILENIAVCFVYGIDKFMEDLKDMLGFAPSRYYYYMWKYISPLMLLSLLIASVVNMGLSPPGYNAWIEDKASEEFLSYPTWGLVVCVSLVVFAILPVPVVFIVRRFNLIDDSSGNLASVTYKRGRVLKEPVNLEGDDTSLIHGKIPSEMPSPNFGKNIYRKQSGSPTLDTAPNGRYGIGYLMADIMPDMPESDL

SEQ ID NO: 38821 - protein, 291 aa, Homo sapiens
MDPSLLRERELFKKRALSTPVVEKRSASSESSSSSSKKKKTKVEHGGSSGSKQNSDHSNGSFNLKALSGSSGYKFGVLAKIVNYMKTRHQRGDTHPLTLDEILDETQHLDIGLKQKQWLMTEALVNNPKIEVIDGKYAFKPKYNVRDKKALLRLLDQHDQRGLGGILLEDIEEALPNSQKAVKALGDQILFVNRPDKKKILFFNDKSCQFSVDEEFQKLWRSVTVDSMDEEKIEEYLKRQGISSMQESGPKKVAPIQRRKKPASQKKRRFKTHNEHLAGVLKDYSDITSSK

SEQ ID NO: 38822 - protein, 684 aa, Homo sapiens
MSASGVLSFTQQGWEQVLAKVKRAVVYLDAACAESLHWGCGSTRLLEAVGGPDCHLREFEPDAIGGGAKQPKAVFVLSCLLKGRTVEILRDIICRSHFQYCVVVTTVSHAVHLTANHVPAAAAAEMEGQQPVFEQLEEKLCEWMGNMNYTAEVFHVPLLLAPVAPHFALTPAFASLFPLLPQDVHLLNSARPDKRKLGSLGDVDSTTLTPELLLQIRCLVSGLSSLCEHLGVREECFAVGSLSQVIAADLANYAPAKNRKKTAAGRASVVFVDRTLDLTGAVGHHGDNLVEKIISALPQLPGHTNDVMVNMIALTALHTEEENYNVVAPGCLSQSSDTTAKALWEALLNTKHKEAVMEVRRHLVEAASRENLPIKMSMGRVTPGQLMSYIQLFKNNLKALMNHCGLLQLGLATAQTLKHPQTAKWDNFLAFERLLLQSIGESAMSVVLNQLLPMIKPVTQRTNEDYSPEELLILLIYIYSVTGELTVDKDLCEAEEKVKKALAQVFCEESGLSPLLQKITDWDSSINLTFHKSKIAVDELFTSLRDIAGARSLLKQFKSVYVPGNHTHQASYKPLLKQVVEEIFHPERPDSVDIEHMSSGLTDLLKTGFSMFMKVSRPHPSDYPLLILFVVGGVTVSEVKMVKDLVASLKPGTQVIVLSTRLLKPLNIPELLFATDRLHPDLGF

SEQ ID NO: 38823 - protein, 639 aa, Homo sapiens
MSASGVLSFTQQGWEQVLAKVKRAVVYLDAACAESLHWGCGSTRLLEAVGGPDCHLREFEPDAIGGGAKQPKAVFVLSCLLKGRTVEILRDIICRSHFQYCVVVTTVSHAVHLTANHVPAAAAAEMEGQQPVFEQLEEKLCEWMGNMNYTAEVFHVPLLLAPVAPHFALTPAFASLFPLLPQDVHLLNSARPDKRKLGSLGDVDSTTLTPELLLQIRCLVSGLSSLCEHLGVREECFAVGSLSQVIAADLANYAPAKNRKKTAAGRASVVFVDRTLDLTGAVGHHGDNLVEKIISALPQLPGHTNDVMVNMIALTALHTEEENYNVVAPGCLSQSSDTTAKALWEALLNTKHKEAVMEVRRHLVEAASRENLPIKMSMGRVTPGQLMSYIQLFKNNLKALMNHCGLLQLGLATAQTLKHPQTAKWDNFLAFERLLLQSIGESAMSVVLNQLLPMIKPVTQRTNEDYSPEELLILLIYIYSVTGELTVDKDLCEAEEKVKKALAQVFCEESGLSPLLQKITDWDSSINLTFHKSKIAVDELFTSLRDIAGARSLLKQFKSVYVPGNHTHQVSRPHPSDYPLLILFVVGGVTVSEVKMVKDLVASLKPGTQVIVLSTRLLKPLNIPELLFATDRLHPDLGF

SEQ ID NO: 38824 - protein, 736 aa, Homo sapiens
MKTEAQPSTSLLANTSWTGTVISDSVPGSQTWEDKGSLTRSATSWTSEAQVSAARVAEAQARTSQPKQISVLEALTASALNQKPTHEKVQMTEKKESEVLLARPFWSSKTEYILAQVGFSMKPSCLWRFAYLWLNSGGCSFAAIYIFMLFLVGVPLLFLEMAAGQSMRQGGMGVWKIIAPWIGGVGYSSFMVCFILGLYFNVVNSWIIFYMSQSFQFPVPWEKCPLTMNSSGFDPECERTTPSIYFWYQQALKASDRIEDGGSPVYSLVLPFFLCWCLVGAFMINGLKSTGKVIYVLVLLPCFIIVGFFIRTLLLEGAKFGLQQLVVAKISDVYNMSVWSLAGGQVLSNTGIGLGSVASLASYMPQSNNCLSDAFLVSVINLLTLLVFTSFNFCVLGFWATVITHRCCERNAEILLKLINLGKLPPDAKPPVNLLYNPTSIYNAWLSGLPQHIKSMVLREVTECNIETQFLKASEGPKFAFLSFVEAMSFLPPSVFWSFIFFLMLLAMGLSSAIGIMQGIITPLQDTFSFFRKHTKLLIVGVFLLMFVCGLFFTRPSGSYFIRLLSDYWIVFPIIVVVVFETMAVSWAYGARRFLADLTILLGHPISPIFGWLWPHLCPVVLLIIFVTMMVHLCMKPITYMSWDSSTSKEVLRPYPPWALLLMITLFAIVILPIPAYFVYCRIHRIPFRPKSGDGPMTASTSLPLSHQLTPSKEVQKEEILQVDETKYPSTCNVTS

SEQ ID NO: 38825 - protein, 659 aa, Homo sapiens
MKTEAQPSTSLLANTSWTGTVISDSVPGSQTWEDKGSLTRSATSWTSEAQVSAARVAEAQARTSQPKQISVLEALTASALNQKPTHEKVQMTEKKESEVLLARPFWSSKTEYILAQVGFSMKPSCLWRFAYLWLNSGGCSFAAIYIFMLFLVGVPLLFLEMAAGQSMRQGGMGVWKIIAPWIGGVGYSSFMVCFILGLYFNVVNSWIIFYMSQSFQFPVPWEKCPLTMNSSGFDPECERTTPSIYFWYQQALKASDRIEDGGSPVYSLVLPFFLCWCLVGAFMINGLKSTGKVIYVLVLLPCFIIVGFFIRTLLLEGAKFGLQQLVVAKISDVYNMSVWSLAGGQVLSNTGIGLGSVASLASYMPQSNNCLSDAFLVSVINLLTLLVFTSFNFCVLGFWATVITHRCCERNAEILLKLINLGKLPPDAKPPVNLLYNPTSIYNAWLSGLPQHIKSMVLREVTECNIETQFLKASEGPKFAFLSFVEAMSFLPPSVFWSFIFFLMLLAMGLSSAIGIMQGIITPLQDTFSFFRKHTKLLIVGVFLLMFVCGLFFTRPSGSYFIRLLSDYWIVFPIIVVVVFETMAVSWAYGARRFLADLTILLGHPISPIFGWLWPHLCPVVLLIIFVTMMVHLCMKPITYMSWDSSTVSLPQDPEPLWE

SEQ ID NO: 38826 - protein, 524 aa, Homo sapiens
MYALFLLASLLGAALAGPVLGLKECTRGSAVWCQNVKTASDCGAVKHCLQTVWNKPTVKSLPCDICKDVVTAAGDMLKDNATEEEILVYLEKTCDWLPKPNMSASCKEIVDSYLPVILDIIKGEMSRPGEVCSALNLCESLQKHLAELNHQKQLESNKIPELDMTEVVAPFMANIPLLLYPQDGPRSKPQPKDNGDVCQDCIQMVTDIQTAVRTNSTFVQALVEHVKEECDRLGPGMADICKNYISQYSEIAIQMMMHMQPKEICALVGFCDEVKEMPMQTLVPAKVASKNVIPALELVEPIKKHEVPAKSDVYCEVCEFLVKEVTKLIDNNKTEKEILDAFDKMCSKLPKSLSEECQEVVDTYGSSILSILLEEVSPELVCSMLHLCSGTRLPALTVHVTQPKDGGFCEVCKKLVGYLDRNLEKNSTKQEILAALEKGCSFLPDPYQKQCDQFVAEYEPVLIEILVEVMDPSFVCLKIGACPSAHKPLLGTEKCIWGPSYWCQNTETAAQCNAVEHCKRHVWN

SEQ ID NO: 38827 - protein, 526 aa, Homo sapiens
MYALFLLASLLGAALAGPVLGLKECTRGSAVWCQNVKTASDCGAVKHCLQTVWNKPTVKSLPCDICKDVVTAAGDMLKDNATEEEILVYLEKTCDWLPKPNMSASCKEIVDSYLPVILDIIKGEMSRPGEVCSALNLCESLQKHLAELNHQKQLESNKIPELDMTEVVAPFMANIPLLLYPQDGPRSKPQPKDNGDVCQDCIQMVTDIQTAVRTNSTFVQALVEHVKEECDRLGPGMADICKNYISQYSEIAIQMMMHMDQQPKEICALVGFCDEVKEMPMQTLVPAKVASKNVIPALELVEPIKKHEVPAKSDVYCEVCEFLVKEVTKLIDNNKTEKEILDAFDKMCSKLPKSLSEECQEVVDTYGSSILSILLEEVSPELVCSMLHLCSGTRLPALTVHVTQPKDGGFCEVCKKLVGYLDRNLEKNSTKQEILAALEKGCSFLPDPYQKQCDQFVAEYEPVLIEILVEVMDPSFVCLKIGACPSAHKPLLGTEKCIWGPSYWCQNTETAAQCNAVEHCKRHVWN

SEQ ID NO: 38828 - protein, 527 aa, Homo sapiens
MYALFLLASLLGAALAGPVLGLKECTRGSAVWCQNVKTASDCGAVKHCLQTVWNKPTVKSLPCDICKDVVTAAGDMLKDNATEEEILVYLEKTCDWLPKPNMSASCKEIVDSYLPVILDIIKGEMSRPGEVCSALNLCESLQKHLAELNHQKQLESNKIPELDMTEVVAPFMANIPLLLYPQDGPRSKPQPKDNGDVCQDCIQMVTDIQTAVRTNSTFVQALVEHVKEECDRLGPGMADICKNYISQYSEIAIQMMMHMQDQQPKEICALVGFCDEVKEMPMQTLVPAKVASKNVIPALELVEPIKKHEVPAKSDVYCEVCEFLVKEVTKLIDNNKTEKEILDAFDKMCSKLPKSLSEECQEVVDTYGSSILSILLEEVSPELVCSMLHLCSGTRLPALTVHVTQPKDGGFCEVCKKLVGYLDRNLEKNSTKQEILAALEKGCSFLPDPYQKQCDQFVAEYEPVLIEILVEVMDPSFVCLKIGACPSAHKPLLGTEKCIWGPSYWCQNTETAAQCNAVEHCKRHVWN

SEQ ID NO: 38829 - protein, 706 aa, Homo sapiens
MSGGDTRAAIARPRMAAAHGPVAPSSPEQVTLLPVQRSFFLPPFSGATPSTSLAESVLKVWHGAYNSGLLPQLMAQHSLAMAQNGAVPSEATKRDQNLKRGNWGNQIEFVLTSVGYAVGLGNVWRFPYLCYRNGGGAFMFPYFIMLIFCGIPLFFMELSFGQFASQGCLGVWRISPMFKGVGYGMMVVSTYIGIYYNVVICIAFYYFFSSMTHVLPWAYCNNPWNTHDCAGVLDASNLTNGSRPAALPSNLSHLLNHSLQRTSPSEEYWRLYVLKLSDDIGNFGEVRLPLLGCLGVSWLVVFLCLIRGVKSSGKVVYFTATFPYVVLTILFVRGVTLEGAFDGIMYYLTPQWDKILEAKVWGDAASQIFYSLGCAWGGLITMASYNKFHNNCYRDSVIISITNCATSVYAGFVIFSILGFMANHLGVDVSRVADHGPGLAFVAYPEALTLLPISPLWSLLFFFMLILLGLGTQFCLLETLVTAIVDEVGNEWILQKKTYVTLGVAVAGFLLGIPLTSQAGIYWLLLMDNYAASFSLVVISCIMCVAIMYIYGHRNYFQDIQMMLGFPPPLFFQICWRFVSPAIIFFILVFTVIQYQPITYNHYQYPGWAVAIGFLMALSSVLCIPLYAMFRLCRTDGDTLLQRLKNATKPSRDWGPALLEHRTGRYAPTIAPSPEDGFEVQPLHPDKAQIPIVGSNGSSRLQDSRI

SEQ ID NO: 38830 - protein, 633 aa, Homo sapiens
MVGKGAKGMLNGAVPSEATKRDQNLKRGNWGNQIEFVLTSVGYAVGLGNVWRFPYLCYRNGGGAFMFPYFIMLIFCGIPLFFMELSFGQFASQGCLGVWRISPMFKGVGYGMMVVSTYIGIYYNVVICIAFYYFFSSMTHVLPWAYCNNPWNTHDCAGVLDASNLTNGSRPAALPSNLSHLLNHSLQRTSPSEEYWRLYVLKLSDDIGNFGEVRLPLLGCLGVSWLVVFLCLIRGVKSSGKVVYFTATFPYVVLTILFVRGVTLEGAFDGIMYYLTPQWDKILEAKVWGDAASQIFYSLGCAWGGLITMASYNKFHNNCYRDSVIISITNCATSVYAGFVIFSILGFMANHLGVDVSRVADHGPGLAFVAYPEALTLLPISPLWSLLFFFMLILLGLGTQFCLLETLVTAIVDEVGNEWILQKKTYVTLGVAVAGFLLGIPLTSQAGIYWLLLMDNYAASFSLVVISCIMCVAIMYIYGHRNYFQDIQMMLGFPPPLFFQICWRFVSPAIIFFILVFTVIQYQPITYNHYQYPGWAVAIGFLMALSSVLCIPLYAMFRLCRTDGDTLLQRLKNATKPSRDWGPALLEHRTGRYAPTIAPSPEDGFEVQPLHPDKAQIPIVGSNGSSRLQDSRI

SEQ ID NO: 38831 - protein, 652 aa, Homo sapiens
MSGGDTRAAIARPRMAAAHGPVAPSSPEQNGAVPSEATKRDQNLKRGNWGNQIEFVLTSVGYAVGLGNVWRFPYLCYRNGGGAFMFPYFIMLIFCGIPLFFMELSFGQFASQGCLGVWRISPMFKGVGYGMMVVSTYIGIYYNVVICIAFYYFFSSMTHVLPWAYCNNPWNTHDCAGVLDASNLTNGSRPAALPSNLSHLLNHSLQRTSPSEEYWRLYVLKLSDDIGNFGEVRLPLLGCLGVSWLVVFLCLIRGVKSSGKVVYFTATFPYVVLTILFVRGVTLEGAFDGIMYYLTPQWDKILEAKVWGDAASQIFYSLGCAWGGLITMASYNKFHNNCYRDSVIISITNCATSVYAGFVIFSILGFMANHLGVDVSRVADHGPGLAFVAYPEALTLLPISPLWSLLFFFMLILLGLGTQFCLLETLVTAIVDEVGNEWILQKKTYVTLGVAVAGFLLGIPLTSQAGIYWLLLMDNYAASFSLVVISCIMCVAIMYIYGHRNYFQDIQMMLGFPPPLFFQICWRFVSPAIIFFILVFTVIQYQPITYNHYQYPGWAVAIGFLMALSSVLCIPLYAMFRLCRTDGDTLLQRLKNATKPSRDWGPALLEHRTGRYAPTIAPSPEDGFEVQPLHPDKAQIPIVGSNGSSRLQDSRI

SEQ ID NO: 38832 - protein, 424 aa, Homo sapiens
MSVGCPEPEPPRSLTCCGPGTAPGPGAGVPLLTEDMQALTLRTLAASDVTKHYELVRELGKGTYGKVDLVVYKGTGTKMALKFVNKSKTKLKNFLREVSITNSLSSSPFIIKVFDVVFETEDCYVFAQEYAPAGDLFDIIPPQVGLPEDTVKRCVQQLGLALDFMHGRQLVHRDIKPENVLLFDRECRRVKLADFGMTRRVGCRVKRVSGTIPYTAPEVCQAGRADGLAVDTGVDVWAFGVLIFCVLTGNFPWEAASGADAFFEEFVRWQRGRLPGLPSQWRRFTEPALRMFQRLLALEPERRGPAKEVFRFLKHELTSELRRRPSHRARKPPGDRPPAAGPLRLEAPGPLKRTVLTESGSGSRPAPPAVGSVPLPVPVPVPVPVPVPVPEPGLAPQGPPGRTDGRADKSKGQVVLATAIEICV

SEQ ID NO: 38833 - protein, 628 aa, Homo sapiens
MAHAPEPDPAACDLGDERPKWDNKAQYLLSCTGFAVGLGNIWRFPYLCQTYGGGAFLIPYVIALVFEGIPIFHVELAIGQRLRKGSVGVWTAISPYLSGVGLGCVTLSFLISLYYNTIVAWVLWYLLNSFQHPLPWSSCPPDLNRTGFVEECQGSSAVSYFWYRQTLNITADINDSGSIQWWLLICLAASWAVVYMCVIRGIETTGKVIYFTALFPYLVLTIFLIRGLTLPGATKGLIYLFTPNMHILQNPRVWLDAATQIFFSLSLAFGGHIAFASYNSPRNDCQKDAVVIALVNRMTSLYASIAVFSVLGFKATNDYEHCLDRNILSLINDFDFPEQSISRDDYPAVLMHLNATWPKRVAQLPLKACLLEDFLDKSASGPGLAFVVFTETDLHMPGAPVWAMLFFGMLFTLGLSTMFGTVEAVITPLLDVGVLPRWVPKEALTGLVCLVCFLSATCFTLQSGNYWLEIFDNFAASPNLLMLAFLEVVGVVYVYGMKRFCDDIAWMTGRRPSPYWRLTWRVVSPLLLTIFVAYIILLFWKPLRYKAWNPKYELFPSRQEKLYPGWARAACVLLSLLPVLWVPVAALAQLLTRRRRTWRDRDARPDTDMRPDTDTRPDTDMRPDTDMR

SEQ ID NO: 38834 - protein, 273 aa, Homo sapiens
MKKTQTWILTCIYLQLLLFNPLVKTEGICRNRVTNNVKDVTKLVANLPKDYMITLKYVPGMDVLPSHCWISEMVVQLSDSLTDLLDKFSNISEGLSNYSIIDKLVNIVDDLVECVKENSSKDLKKSFKSPEPRLFTPEEFFRIFNRSIDAFKDFVVASETSDCVVSSTLSPEKDSRVSVTKPFMLPPVAASSLRNDSSSSNRKAKNPPGDSSLHWAAMALPALFSLIIGFAFGALYWKKRQPSLTRAVENIQINEEDNEISMLQEKEREFQEV

SEQ ID NO: 38835 - protein, 245 aa, Homo sapiens
MKKTQTWILTCIYLQLLLFNPLVKTEGICRNRVTNNVKDVTKLVANLPKDYMITLKYVPGMDVLPSHCWISEMVVQLSDSLTDLLDKFSNISEGLSNYSIIDKLVNIVDDLVECVKENSSKDLKKSFKSPEPRLFTPEEFFRIFNRSIDAFKDFVVASETSDCVVSSTLSPEKGKAKNPPGDSSLHWAAMALPALFSLIIGFAFGALYWKKRQPSLTRAVENIQINEEDNEISMLQEKEREFQEV

SEQ ID NO: 38836 - protein, 238 aa, Homo sapiens
MPSCLAAQVANLPKDYMITLKYVPGMDVLPSHCWISEMVVQLSDSLTDLLDKFSNISEGLSNYSIIDKLVNIVDDLVECVKENSSKDLKKSFKSPEPRLFTPEEFFRIFNRSIDAFKDFVVASETSDCVVSSTLSPEKDSRVSVTKPFMLPPVAASSLRNDSSSSNRKAKNPPGDSSLHWAAMALPALFSLIIGFAFGALYWKKRQPSLTRAVENIQINEEDNEISMLQEKEREFQEV

SEQ ID NO: 38837 - protein, 359 aa, Homo sapiens
MERRASETPEDGDPEEDTATALQRLVELTTSRVTPVRSLRDQYHLIRKLGSGSYGRVLLAQPHQGGPAVALKLLRRDLVLRSTFLREFCVGRCVSAHPGLLQTLAGPLQTPRYFAFAQEYAPCGDLSGMLQERGLPELLVKRVVAQLAGALDFLHSRGLVHADVKPDNVLVFDPVCSRVALGDLGLTRPEGSPTPAPPVPLPTAPPELCLLLPPDTLPLRPAVDSWGLGVLLFCAATACFPWDVALAPNPEFEAFAGWVTTKPQPPQPPPPWDQFAPPALALLQGLLDLDPETRSPPLAVLDFLGDDWGLQGNREGPGVLGSAVSYEDREEGGSSLEEWTDEGDDSKSGGRTGTDGGAP

SEQ ID NO: 38838 - protein, 634 aa, Homo sapiens
MVRLVLPNPGLDARIPSLAELETIEQEEASSRPKWDNKAQYMLTCLGFCVGLGNVWRFPYLCQSHGGGAFMIPFLILLVLEGIPLLYLEFAIGQRLRRGSLGVWSSIHPALKGLGLASMLTSFMVGLYYNTIISWIMWYLFNSFQEPLPWSDCPLNENQTGYVDECARSSPVDYFWYRETLNISTSISDSGSIQWWMLLCLACAWSVLYMCTIRGIETTGKAVYITSTLPYVVLTIFLIRGLTLKGATNGIVFLFTPNVTELAQPDTWLDAGAQVFFSFSLAFGGLISFSSYNSVHNNCEKDSVIVSIINGFTSVYVAIVVYSVIGFRATQRYDDCFSTNILTLINGFDLPEGNVTQENFVDMQQRCNASDPAAYAQLVFQTCDINAFLSEAVEGTGLAFIVFTEAITKMPLSPLWSVLFFIMLFCLGLSSMFGNMEGVVVPLQDLRVIPPKWPKEVLTGLICLGTFLIGFIFTLNSGQYWLSLLDSYAGSIPLLIIAFCEMFSVVYVYGVDRFNKDIEFMIGHKPNIFWQVTWRVVSPLLMLIIFLFFFVVEVSQELTYSIWDPGYEEFPKSQKISYPNWVYVVVVIVAGVPSLTIPGYAIYKLIRNHCQKPGDHQGLVSTLSTASMNGDLKY

SEQ ID NO: 38839 - protein, 592 aa, Homo sapiens
MEKARPLWANSLQFVFACISYAVGLGNVWRFPYLCQMYGGGSFLVPYIIMLIVEGMPLLYLELAVGQRMRQGSIGAWRTISPYLSGVGVASVVVSFFLSMYYNVINAWAFWYLFHSFQDPLPWSVCPLNGNHTGYDEECEKASSTQYFWYRKTLNISPSLQENGGVQWEPALCLLLAWLVVYLCILRGTESTGKVVYFTASLPYCVLIIYLIRGLTLHGATNGLMYMFTPKIEQLANPKAWINAATQIFFSLGLGFGSLIAFASYNEPSNNCQKHAIIVSLINSFTSIFASIVTFSIYGFKATFNYENCLKKVSLLLTNTFDLEDGFLTASNLEQVKGYLASAYPSKYSEMFPQIKNCSLESELDTAVQGTGLAFIVYTEAIKNMEVSQLWSVLYFFMLLMLGIGSMLGNTAAILTPLTDSKIISSHLPKEAISGLVCLVNCAIGMVFTMEAGNYWFDIFNDYAATLSLLLIVLVETIAVCYVYGLRRFESDLKAMTGRAVSWYWKVMWAGVSPLLIVSLFVFYLSDYILTGTLKYQAWDASQGQLVTKDYPAYALAVIGLLVASSTMCIPLAALGTFVQRRLKRGDADPVA

SEQ ID NO: 38840 - protein, 555 aa, Homo sapiens
MEKARPLWANSLQFVFACISYAVGLGNVWRFPYLCQMYGGGSFLVPYIIMLIVEGMPLLYLELAVGQRMRQGSIGAWRTISPYLSGVGVASVVVSFFLSMYYNVINAWAFWYLFHSFQDPLPWSVCPLNGNHTGYDEECEKASSTQYFWYRKTLNISPSLQENGGVQWEPALCLLLAWLVVYLCILRGTESTGKIEQLANPKAWINAATQIFFSLGLGFGSLIAFASYNEPSNNCQKHAIIVSLINSFTSIFASIVTFSIYGFKATFNYENCLKKVSLLLTNTFDLEDGFLTASNLEQVKGYLASAYPSKYSEMFPQIKNCSLESELDTAVQGTGLAFIVYTEAIKNMEVSQLWSVLYFFMLLMLGIGSMLGNTAAILTPLTDSKIISSHLPKEAISGLVCLVNCAIGMVFTMEAGNYWFDIFNDYAATLSLLLIVLVETIAVCYVYGLRRFESDLKAMTGRAVSWYWKVMWAGVSPLLIVSLFVFYLSDYILTGTLKYQAWDASQGQLVTKDYPAYALAVIGLLVASSTMCIPLAALGTFVQRRLKRGDADPVA

SEQ ID NO: 38841 - protein, 470 aa, Homo sapiens
MDRGEKIQLKRVFGYWWGTSFLLINIIGAGIFVSPKGVLAYSCMNVGVSLCVWAGCAILAMTSTLCSAEISISFPCSGAQYYFLKRYFGSTVAFLNLWTSLFLGSGVVAGQALLLAEYSIQPFFPSCSVPKLPKKCLALAMLWIVGILTSRGVKEVTWLQIASSVLKVSILSFISLTGVVFLIRGKKENVERFQNAFDAELPDISHLIQAIFQGYFAYSGGACFTLIAGELKKPRTTIPKCIFTALPLVTVVYLLVNISYLTVLTPREILSSDAVAITWADRAFPSLAWIMPFAISTSLFSNLLISIFKSSRPIYLASQEGQLPLLFNTLNSHSSPFTAVLLLVTLGSLAIILTSLIDLINYIFFTGSLWSILLMIGILRRRYQEPNLSIPYKVFLSFPLATIVIDVGLVVIPLVKSPNVHYVYVLLLVLSGLLFYIPLIHFKIRLAWFEKMTCYLQLLFNICLPDVSEE

SEQ ID NO: 38842 - protein, 433 aa, Homo sapiens
MDRGEKIQLKRVFGYWWGTSFLLINIIGAGIFVSPKGVLAYSCMNVGVSLCVWAGCAILAMTSTLCSAEISISFPCSGAQYYFLKRYFGSTVAFLNLWTSLFLGSGVVAGQALLLAEYSIQPFFPSCSVPKLPKKCLALAMLWIVGILTSRGVKEVTWLQIASSVLKVSILSFISLTGVVFLIRGKKENVERFQNAFDAELPDISHLIQAIFQGYFAYSGELKKPRTTIPKCIFTALPLVTVVYLLVNISYLTVLTPREILSSDAVAITWADRAFPSLAWIMPFAISTSLFSNLLISIFKSSRPIYLASQEGQLPLLFNTLNSHSSPFTAVLLLVTLGSLAIILTSLIDLINYIFFTGSLWSILLMIGILRRRYQEPNLSIPYKSLILVVQAGEAGVQWHDLGLLQPLLPGFKRFSCLSLPSSWDYRCFCHFH

SEQ ID NO: 38843 - protein, 490 aa, Homo sapiens
MATEFIKSCCGGCFYGETEKHNFSVERDFKAAVPNSQNATISVPPLTSVSVKPQLGCTEDYLLSKLPSDGKEVPFVVPKFKLSYIQPRTQETPSHLEELEGSARASFGDRKVELSSSSQHGPSYDVYNPFYMYQHISPDLSRRFPPRSEVKRLYGSVCDLRTNKLPGSPGLSKSMFDLTNSSQRFIQRHDSLSSVPSSSSSRKNSQGSNRSLDTITLSGDERDFGRLNVKLFYNSSVEQIWITVLQCRDLSWPSSYGDTPTVSIKGILTLPKPVHFKSSAKEGSNAIEFMETFVFAIKLQNLQTVRLVFKIQTQTPRKKTIGECSMSLRTLSTQEMDYSLDITPPSKISVCHAELELGTCFQAVNSRIQLQILEARYLPSSSTPLTLSFFVKVGMFSSGELIYKKKTRLLKASNGRVKWGETMIFPLIQSEKEIVFLIKLYSRSSVRRKHFVGQIWISEDSNNIEAVNQWKETVINPEKVVIRWHKLNPS

SEQ ID NO: 38844 - protein, 426 aa, Homo sapiens
MATEFIKSCCGGCFYGETEKHNFSVERDFKAAVPNSQNATISVPPLTSVSVKPQLGCTEDYLLSKLPSDGKEVPFVVPKFKLSYIQPRTQETPSHLEELEGSARASFGDRKVELSSSSQHGPSYDVYNPFYMYQHISPDLSRRFPPRSEVKRLYGSVCDLRTNKLPGSPGLSKSMFDLTNSSQRFIQRHDSLSSVPSSSSSRKNSQGSNRSLDTITLSGDERDFGRLNVKLFYNSSVEQIWITVLQCRDLSWPSSYGDTPTVSIKGILTLPKPVHFKSSAKEGSNVCHAELELGTCFQAVNSRIQLQILEARYLPSSSTPLTLSFFVKVGMFSSGELIYKKKTRLLKASNGRVKWGETMIFPLIQSEKEIVFLIKLYSRSSVRRKHFVGQIWISEDSNNIEAVNQWKETVINPEKVVIRWHKLNPS

SEQ ID NO: 38845 - protein, 771 aa, Homo sapiens
MSGFFTSLDPRRVQWGAAWYAMHSRILRTKPVESMLEGTGTTTAHGTKLAQVLTTVDLISLGVGSCVGTGMYVVSGLVAKEMAGPGVIVSFIIAAVASILSGVCYAEFGVRVPKTTGSAYTYSYVTVGEFVAFFIGWNLILEYLIGTAAGASALSSMFDSLANHTISRWMADSVGTLNGLGKGEESYPDLLALLIAVIVTIIVALGVKNSIGFNNVLNVLNLAVWVFIMIAGLFFINGKYWAEGQFLPHGWSGVLQGAATCFYAFIGFDIIATTGEEAKNPNTSIPYAITASLVICLTAYVSVSVILTLMVPYYTIDTESPLMEMFVAHGFYAAKFVVAIGSVAGLTVSLLGSLFPMPRVIYAMAGDGLLFRFLAHVSSYTETPVVACIVSGFLAALLALLVSLRDLIEMMSIGTLLAYTLVSVCVLLLRYQPESDIDGFVKFLSEEHTKKKEGILADCEKEACSPVSEGDEFSGPATNTCGAKNLPSLGDNEMLIGKSDKSTYNVNHPNYGTVDMTTGIEADESENIYLIKLKKLIGPHYYTMRIRLGLPGKMDRPTAATGHTVTICVLLLFILMFIFCSFIIFGSDYISEQSWWAILLVVLMVLLISTLVFVILQQPENPKKLPYMAPCLPFVPAFAMLVNIYLMLKLSTITWIRFAVWCFVGLLIYFGYGIWNSTLEISAREEALHQSTYQRYDVDDPFSVEEGFSYATEGESQEDWGGPTEDKGFYYQQMSDAKANGRTSSKAKSKSKHKQNSEALIANDELDYSPE

SEQ ID NO: 38846 - protein, 88 aa, Homo sapiens
MGCCGCGGCGGCGGCGGGCGGGCGRCTTCRCYRVGCCSSCCPCCRGCCGGCCSTPVICCCRRTCSSCGYSCGKGCCQQKCCCQKQCCC

SEQ ID NO: 38847 - protein, 100 aa, Homo sapiens
MGCCGCGSCGGCGGGCGGCGGGCGGGCGGGCGGVCGSCTTCRCYRVGCCSSCCPCCRGCCGGCCSTPVICCCRRTCRSCGCGCRKGCCQQKCCCQKQCCC

SEQ ID NO: 38848 - protein, 1147 aa, Homo sapiens
MDAVNAFNQELFSLMDMKPPISRAKMILITKAAIKAIKLYKHVVQIVEKFIKKCKPEYKVPGLYVIDSIVRQSRHQFGTDKDVFGPRFSKNITATFQYLYLCPSEDKSKIVRVLNLWQKNGVFKIEIIQPLLDMAAGTSNAAPVAENVTNNEGSPPPPVKVSSEPPTQATPNSVPAVPQLPSSDAFAAVAQLFQTTQGQQLQQILQTFQQPPKPQSPALDNAVMAQVQAITAQLKTTPTQPSEQKAAFPPPEQKTAFDKKLLDRFDYDDEPEAVEESKKEDTTAVTTTAPAAAVPPAPTATVPAAAAPAAASPPPPQAPFGFPGDGMQQPAYTQHQNMDQFQPRMMGIQQDPMHHQVPLPPNGQMPGFGLLPTPPFPPMAQPVIPPTPPVQQPFQASFQAQNEPLTQKPHQQEMEVEQPCIQEVKRHMSDNRKSRSRSASRSPKRRRSRSGSRSRRSRHRRSRSRSRDRRRHSPRSRSQERRDREKERERRQKGLPQVKPETASVCSTTLWVGQLDKRTTQQDVASLLEEFGPIESINMIPPRGCAYIVMVHRQDAYRALQKLSRGNYKVNQKSIKIAWALNKGIKADYKQYWDVELGVTYIPWDKVKPEELESFCEGGMLDSDTLNPDWKGIPKKPENEVAQNGGAETSHTEPVSPIPKPLPVPVPPIPVPAPITVPPPQVPPHQPGPPVVGALQPPAFTPPLGIPPPGFGPGVPPPPPPPPFLRPGFNPMHLPPGFLPPGPPPPITPPVSIPPPHTPPISIPNSTIAGINEDTTKDLSIGNPIPTVVSGARGNAESGDSVKMYGSAVPPAAPTNLPTPPVTQPVSLLGTQGVAPGPVIGLQAPSTGLLGARPGLIPLQRPPGMPPPHLQRFPLMPPRPMPPHMMHRGPPPGPGGFAMPPPHGMKGPFPPHGPFVRPGGMPGLGGPGPGPGGPEDRDGRQQPPQQPQQQPQPQAPQQPQQQQQQQPPPSQQPPPTQQQPQQFRNDNRQQFNSGRDQERFGRRSFGNRVENDRERYGNRNDDRDNSNRDRREWGRRSPDRDRHRDLEERNRRSSGHRDRERDSRDRESRREKEEARGKEKPEVTDRAGGNKTVEPPISQVGNVDTASELEKGVSEAAVLKPSEELPAEATSSVEPEKDSGSAAEAPR

SEQ ID NO: 38849 - protein, 1125 aa, Homo sapiens
MDAVNAFNQELFSLMDMKPPISRAKMILITKAAIKAIKLYKHVVQIVEKFIKKCKPEYKVPGLYVIDSIVRQSRHQFGTDKDVFGPRFSKNITATFQYLYLCPSEDKSKIVRVLNLWQKNGVFKIEIIQPLLDMAAGTSNAAPVAENVTNNEGSPPPPVKVSSEPPTQATPNSVPAVPQLPSSDAFAAVAQLFQTTQGQQLQQILQTFQQPPKPQSPALDNAVMAQVQAITAQLKTTPTQPSEQKAAFPPPEQKTAFDKKLLDRFDYDDEPEAVEESKKEDTTAVTTTAPAAAVPPAPTATVPAAAAPAAASPPPPQAPFGFPGDGMQQPAYTQHQNMDQFQPRMMGIQQDPMHHQVPLPPNGQMPGFGLLPTPPFPPMAQPVIPPTPPVQQPFQASFQAQNEPLTQKPHQQEMEVEQPCIQEVKRHMSDNRKSRSRSASRSPKRRRSRSGSRSRRSRHRRSRSRSRDRRRHSPRSRSQERRDREKERERRQKGLPQVKPETASVCSTTLWVGQLDKRTTQQDVASLLEEFGPIESINMIPPRGCAYIVMVHRQDAYRALQKLSRGNYKVNQKSIKIAWALNKGIKADYKQYWDVELGVTYIPWDKVKPEELESFCEGGMLDSDTLNPDWKGIPKKPENEVAQNGGAETSHTEPVSPIPKPLPVPVPPIPVPAPITVPPPQVPPHQPGPPVVGALQPPAFTPPLGIPPPGFGPGVPPPPPPPPFLRPGFNPMHLPPGFLPPGPPPPITPPVSIPPPHTPPISIPNLVSGARGNAESGDSVKMYGSAVPPAAPTNLPTPPVTQPVSLLGTQGVAPGPVIGLQAPSTGLLGARPGLIPLQRPPGMPPPHLQRFPLMPPRPMPPHMMHRGPPPGPGGFAMPPPHGMKGPFPPHGPFVRPGGMPGLGGPGPGPGGPEDRDGRQQPPQQPQQQPQPQAPQQPQQQQQQQPPPSQQPPPTQQQPQQFRNDNRQQFNSGRDQERFGRRSFGNRVENDRERYGNRNDDRDNSNRDRREWGRRSPDRDRHRDLEERNRRSSGHRDRERDSRDRESRREKEEARGKEKPEVTDRAGGNKTVEPPISQVGNVDTASELEKGVSEAAVLKPSEELPAEATSSVEPEKDSGSAAEAPR

SEQ ID NO: 38850 - protein, 1132 aa, Homo sapiens
MDAVNAFNQELFSLMDMKPPISRAKMILITKAAIKAIKCKPEYKVPGLYVIDSIVRQSRHQFGTDKDVFGPRFSKNITATFQYLYLCPSEDKSKIVRVLNLWQKNGVFKIEIIQPLLDMAAGTSNAAPVAENVTNNEGSPPPPVKVSSEPPTQATPNSVPAVPQLPSSDAFAAVAQLFQTTQGQQLQQILQTFQQPPKPQSPALDNAVMAQVQAITAQLKTTPTQPSEQKAAFPPPEQKTAFDKKLLDRFDYDDEPEAVEESKKEDTTAVTTTAPAAAVPPAPTATVPAAAAPAAASPPPPQAPFGFPGDGMQQPAYTQHQNMDQFQPRMMGIQQDPMHHQVPLPPNGQMPGFGLLPTPPFPPMAQPVIPPTPPVQQPFQASFQAQNEPLTQKPHQQEMEVEQPCIQEVKRHMSDNRKSRSRSASRSPKRRRSRSGSRSRRSRHRRSRSRSRDRRRHSPRSRSQERRDREKERERRQKGLPQVKPETASVCSTTLWVGQLDKRTTQQDVASLLEEFGPIESINMIPPRGCAYIVMVHRQDAYRALQKLSRGNYKVNQKSIKIAWALNKGIKADYKQYWDVELGVTYIPWDKVKPEELESFCEGGMLDSDTLNPDWKGIPKKPENEVAQNGGAETSHTEPVSPIPKPLPVPVPPIPVPAPITVPPPQVPPHQPGPPVVGALQPPAFTPPLGIPPPGFGPGVPPPPPPPPFLRPGFNPMHLPPGFLPPGPPPPITPPVSIPPPHTPPISIPNSTIAGINEDTTKDLSIGNPIPTVVSGARGNAESGDSVKMYGSAVPPAAPTNLPTPPVTQPVSLLGTQGVAPGPVIGLQAPSTGLLGARPGLIPLQRPPGMPPPHLQRFPLMPPRPMPPHMMHRGPPPGPGGFAMPPPHGMKGPFPPHGPFVRPGGMPGLGGPGPGPGGPEDRDGRQQPPQQPQQQPQPQAPQQPQQQQQQQPPPSQQPPPTQQQPQQFRNDNRQQFNSGRDQERFGRRSFGNRVENDRERYGNRNDDRDNSNRDRREWGRRSPDRDRHRDLEERNRRSSGHRDRERDSRDRESRREKEEARGKEKPEVTDRAGGNKTVEPPISQVGNVDTASELEKGVSEAAVLKPSEELPAEATSSVEPEKDSGSAAEAPR

SEQ ID NO: 38851 - protein, 96 aa, Homo sapiens
MGCCGCGSCGGCGGGCGGCGGGCGGGCGGGCGSCTTCRCYRVGCCSSCCPCCRGCCGGCCSTPVICCCRRTCGSCGCGCGKGCCQQKGCCQKQCCC

SEQ ID NO: 38852 - protein, 85 aa, Homo sapiens
MGCCGCGGCGGCGGGCGGGCGSCTTCRCYRVGCCSSCCPCCRGCCGGCCSTPVICCCRRTCCSCGCGCGKGCCQQKGCCQKQCCC

SEQ ID NO: 38853 - protein, 47 aa, Homo sapiens
MGCCGCGGCGGRCSGGCGGGCGGGCGGGCGGGCGGCGGGCGSYTTCR

SEQ ID NO: 38854 - protein, 445 aa, Homo sapiens
MEAAVAPGRDAPAPAASQPSGCGKHNSPERKVYMDYNATTPLEPEVIQAMTKAMWEAWGNPSSPYSAGRKAKDIINAARESLAKMIGGKPQDIIFTSGGTESNNLVIHSVVKHFHANQTSKGHTGGHHSPVKGAKPHFITSSVEHDSIRLPLEHLVEEQVAAVTFVPVSKVSGQAEVDDILAAVRPTTRLVTIMLANNETGIVMPVPEISQRIKALNQERVAAGLPPILVHTDAAQALGKQRVDVEDLGVDFLTIVGHKFYGPRIGALYIRGLGEFTPLYPMLFGGGQERNFRPGTENTPMIAGLGKAAELVTQNCEAYEAHMRDVRDYLEERLEAEFGQKRIHLNSQFPGTQRLPNTCNFSIRGPRLQGHVVLAQCRVLMASVGAACHSDHGDQPSPVLLSYGVPFDVARNALRLSVGRSTTRAEVDLVVQDLKQAVAQLEDQA

SEQ ID NO: 38855 - protein, 317 aa, Homo sapiens
MEAAVAPGRDAPAPAASQPSGCGKHNSPERKVYMDYNATTPLEPEVIQAMTKAMWEAWGNPSSPYSAGRKAKDIINAARESLAKMIGGKPQDIIFTSGGTESNNLVIHSVVKHFHANQTSKGHTGGHHSPVKGAKPHFITSSVEHDSIRLPLEHLVEEQVAAVTFVPVSKVSGQAEVDDILAAVRPTTRLVTIMLANNETGIVMPVPEISQRIKALNQERVAAGLPPILVHTDAAQALGKQRVDVEDLGVDFLTIVGHKFYGPRIGALYIRGLGEFTPLYPMLFGGGQERNFRPGTENTPMIAGLGKVSPGELEEMS

SEQ ID NO: 38856 - protein, 424 aa, Homo sapiens
MQRLQVVLGHLRGPADSGWMPQAAPCLSGAPQASAADVVVVHGRRTAICRAGRGGFKDTTPDELLSAVMTAVLKDVNLRPEQLGDICVGNVLQPGAGAIMARIAQFLSDIPETVPLSTVNRQCSSGLQAVASIAGGIRNGSYDIGMACGVESMSLADRGNPGNITSRLMEKEKARDCLIPMGITSENVAERFGISREKQDTFALASQQKAARAQSKGCFQAEIVPVTTTVHDDKGTKRSITVTQDEGIRPSTTMEGLAKLKPAFKKDGSTTAGNSSQVSDGAAAILLARRSKAEELGLPILGVLRSYAVVGVPPDIMGIGPAYAIPVALQKAGLTVSDVDIFEINEAFASQAAYCVEKLRLPPEKVNPLGGAVALGHPLGCTGARQVITLLNELKRRGKRAYGVVSMCIGTGMGAAAVFEYPGN

SEQ ID NO: 38857 - protein, 331 aa, Homo sapiens
MQRLQVVLGHLRGPADSGWMPQAAPCLSGAPQASAADVVVVHGRRTAICRAGRGGFKDTTPDELLSAVMTAVLKDVNLRPEQLGDICVGNVLQPGAGAIMARIAQFLSDIPETVPLSTVNRQCSSGLQAVASIAGGIRNGSYDIGMACGITSENVAERFGISREKQDTFALASQQKAARAQSKGCFQAEIVPVTTTVHDDKGTKRSITVTQDEGIRPSTTMEGLAKLKPAFKKDGSTTAGLTVSDVDIFEINEAFASQAAYCVEKLRLPPEKVNPLGGAVALGHPLGCTGARQVITLLNELKRRGKRAYGVVSMCIGTGMGAAAVFEYPGN

SEQ ID NO: 38858 - protein, 724 aa, Homo sapiens
MVLTLLLSAYKLCRFFAMSGPRPGAERLAVPGPDGGGGTGPWWAAGGRGPREVSPGAGTEVQDALERALPELQQALSALKQAGGARAVGAGLAEVFQLVEEAWLLPAVGREVAQGLCDAIRLDGGLDLLLRLLQAPELETRVQAARLLEQILVAENRDRVARIGLGVILNLAKEREPVELARSVAGILEHMFKHSEETCQRLVAAGGLDAVLYWCRRTDPALLRHCALALGNCALHGGQAVQRRMVEKRAAEWLFPLAFSKEDELLRLHACLAVAVLATNKEVEREVERSGTLALVEPLVASLDPGRFARCLVDASDTSQGRGPDDLQRLVPLLDSNRLEAQCIGAFYLCAEAAIKSLQGKTKVFSDIGAIQSLKRLVSYSTNGTKSALAKRALRLLGEEVPRPILPSVPSWKEAEVQTWLQQIGFSKYCESFREQQVDGDLLLRLTEEELQTDLGMKSGITRKRFFRELTELKTFANYSTCDRSNLADWLGSLDPRFRQYTYGLVSCGLDRSLLHRVSEQQLLEDCGIHLGVHRARILTAAREMLHSPLPCTGGKPSGDTPDVFISYRRNSGSQLASLLKVHLQLHGFSVFIDVEKLEAGKFEDKLIQSVMGARNFVLVLSPGALDKCMQDHDCKDWVHKEIVTALSCGKNIVPIIDGFEWPEPQVLPEDMQAVLTFNGIKWSHEYQEATIEKIIRFLQGRSSRDSSAGSDTSLEGAAPMGPT

SEQ ID NO: 38859 - protein, 690 aa, Homo sapiens
MGAVARAHGGLRVARARESVAGGRHRGAGRPGARAAGAAAGLVRAEAGGRRAGRGRRPGRGLPTGGGGLAAAAVGREVAQGLCDAIRLDGGLDLLLRLLQAPELETRVQAARLLEQILVAENRDRVARIGLGVILNLAKEREPVELARSVAGILEHMFKHSEETCQRLVAAGGLDAVLYWCRRTDPALLRHCALALGNCALHGGQAVQRRMVEKRAAEWLFPLAFSKEDELLRLHACLAVAVLATNKEVEREVERSGTLALVEPLVASLDPGRFARCLVDASDTSQGRGPDDLQRLVPLLDSNRLEAQCIGAFYLCAEAAIKSLQGKTKVFSDIGAIQSLKRLVSYSTNGTKSALAKRALRLLGEEVPRPILPSVPSWKEAEVQTWLQQIGFSKYCESFREQQVDGDLLLRLTEEELQTDLGMKSGITRKRFFRELTELKTFANYSTCDRSNLADWLGSLDPRFRQYTYGLVSCGLDRSLLHRVSEQQLLEDCGIHLGVHRARILTAAREMLHSPLPCTGGKPSGDTPDVFISYRRNSGSQLASLLKVHLQLHGFSVFIDVEKLEAGKFEDKLIQSVMGARNFVLVLSPGALDKCMQDHDCKDWVHKEIVTALSCGKNIVPIIDGFEWPEPQVLPEDMQAVLTFNGIKWSHEYQEATIEKIIRFLQGRSSRDSSAGSDTSLEGAAPMGPT

SEQ ID NO: 38860 - protein, 693 aa, Homo sapiens
MAALGVQSINWQTAFNRQAHHTDKFSSQELILRRGQNFQVLMIMNKGLGSNERLEFIVSTGPYPSESAMTKAVFPLSNGSSGGWSAVLQASNGNTLTISISSPASAPIGRYTMALQIFSQGGISSVKLGTFILLFNPWLNVDSVFMGNHAEREEYVQEDAGIIFVGSTNRIGMIGWNFGQFEEDILSICLSILDRSLNFRRDAATDVASRNDPKYVGRVLSAMINSNDDNGVLAGNWSGTYTGGRDPRSWNGSVEILKNWKKSGFSPVRYGQCWVFAGTLNTALRSLGIPSRVITNFNSAHDTDRNLSVDVYYDPMGNPLDKGSDSVWNFHVWNEGWFVRSDLGPSYGGWQVLDATPQERSQGVFQCGPASVIGVREGDVQLNFDMPFIFAEVNADRITWLYDNTTGKQWKNSVNSHTIGRYISTKAVGSNARMDVTDKYKYPEGSDQERQVFQKALGKLKPNTPFAATSSMGLETEEQEPSIIGKLKVAGMLAVGKEVNLVLLLKNLSRDTKTVTVNMTAWTIIYNGTLVHEVWKDSATMSLDPEEEAEHPIKISYAQYEKYLKSDNMIRITAVCKVPDESEVVVERDIILDNPTLTLEVLNEARVRKPVNVQMLFSNPLDEPVRDCVLMVEGSGLLLGNLKIDVPTLGPKEGSRVRFDILPSRSGTKQLLADFSCNKFPAIKAMLSIDVAE

SEQ ID NO: 38861 - protein, 700 aa, Homo sapiens
MGQTVNEDSMDVKKENQEKTPQSSTSSVQRDDFHWEEYLKETGSISAPSECFRQSQIPPVNDFKVGMKLEARDPRNATSVCIATVIGITGARLRLRLDGSDNRNDFWRLVDSPDIQPVGTCEKEGDLLQPPLGYQMNTSSWPMFLLKTLNGSEMASATLFKKEPPKPPLNNFKVGMKLEAIDKKNPYLICPATIGDVKGDEVHITFDGWSGAFDYWCKYDSRDIFPAGWCRLTGDVLQPPGTSVPIVKNIAKTESSPSEASQHSMQSPQKTTLILPTQQVRRSSRIKPPGPTAVPKRSSSVKNITPRKKGPNSGKKEKPLPVICSTSAASLKSLTRDRGMLYKDVASGPCKIVMSTVCVYVNKHGNFGPHLDPKRIQQLPDHFGPGPVNVVLRRIVQACVDCALETKTVFGYLKPDNRGGEVITASFDGETHSIQLPPVNSASFALRFLENFCHSLQCDNLLSSQPFSSSRGHTHSSAEHDKNQSAKEDVTERQSTKRSPQQTVPYVVPLSPKLPKTKEYASEGEPLFAGGSAIPKEENLSEDSKSSSLNSGNYLNPACRNPMYIHTSVSQDFSRSVPGTTSSPLVGDISPKSSPHEVKFQMQRKSEAPSYIAVPDPSVLKQGFSKDPSTWSVDEVIQFMKHTDPQISGPLADLFRQHEIDGKALFLLKSDVMMKYMGLKLGPALKLCYYIEKLKEGKYS

SEQ ID NO: 38862 - protein, 138 aa, Homo sapiens
MYIHTSVSQDFSRSVPGTTSSPLVGDISPKSSPHEVKFQMQRKSEAPSYIAVPDPSVLKQGFSKDPSTWSVDEVIQFMKHTDPQISGPLADLFRQHEIDGKALFLLKSDVMMKYMGLKLGPALKLCYYIEKLKEGKYS

SEQ ID NO: 38863 - protein, 265 aa, Homo sapiens
MERGDQPKRTRNENIFNCLYKNPEATFKLICFPWMGGGSTHFAKWGQDTHDLLEVHSLRLPGRESRVEEPLENDISQLVDEVVCALQPVIQDKPFAFFGHSMGSYIAFRTALGLKENNQPEPLHLFLSSATPVHSKAWHRIPKDDELSEEQISHYLMEFGGTPKHFAEAKEFVKQCSPIIRADLNIVRSCTSNVPSKAVLSCDLTCFVGSEDIAKDMEAWKDVTSGNAKIYQLPGGHFYLLDPANEKLIKNYIIKCLEVSSISNF

SEQ ID NO: 38864 - protein, 318 aa, Homo sapiens
MERGDQPKRTRNENIFNCLYKNPEATFKLICFPWMGGGSTHFAKWGQDTHDLLEETASHHVAKAGLKLRRSSDPPASAYPCAGVSHRRREPPCLAKILGLFWILIFFMHSLRLPGRESRVEEPLENDISQLVDEVVCALQPVIQDKPFAFFGHSMGSYIAFRTALGLKENNQPEPLHLFLSSATPVHSKAWHRIPKDDELSEEQISHYLMEFGGTPKHFAEAKEFVKQCSPIIRADLNIVRSCTSNVPSKAVLSCDLTCFVGSEDIAKDMEAWKDVTSGNAKIYQLPGGHFYLLDPANEKLIKNYIIKCLEVSSISNF

SEQ ID NO: 38865 - protein, 310 aa, Homo sapiens
MRRAALWLWLCALALSLQPALPQIVATNLPPEDQDGSGDDSDNFSGSGAGALQDITLSQQTPSTWKDTQLLTAIPTSPEPTGLEATAASTSTLPAGEGPKEGEAVVLPEVEPGLTAREQEATPRPRETTQLPTTHLASTTTATTAQEPATSHPHRDMQPGHHETSTPAGPSQADLHTPHTEDGGPSATERAAEDGASSQLPAAEGSGEQDFTFETSGENTAVVAVEPDRRNQSPVDQGATGASQGLLDRKEVLGGVIAGGLVGLIFAVCLVGFMLYRMKKKDEGSYSLEEPKQANGGAYQKPTKQEEFYA

SEQ ID NO: 38866 - protein, 329 aa, Homo sapiens
MMSNSSSEIDVIKTRIPTYDEDDNTILYAYETKPEFVNKEPNIVSDASCNTEEQLKTVDDVLIHCQVIYDALQNLDKKIDVIRRKVSKIQRFHARSLWTNHKRYGYKKHSYRLVKKLKLQKMKKNEVYETFSYPESYSPTLPVSRRENNSPSNLPRPSFCMEEYQRAELEEDPILSRTPSPVHPSDFSEHNCQPYYASDGATYGSSSGLCLGNPRADSIHNTYSTDHASAAPPSVTRSPVENDGYIEEGSITKHPSTWSVEAVVLFLKQTDPLALCPLVDLFRSHEIDGKALLLLTSDVLLKHLGVKLGTAVKLCYYIDRLKQGKCFEN

SEQ ID NO: 38867 - protein, 208 aa, Homo sapiens
MKKNEVYETFSYPESYSPTLPVSRRENNSPSNLPRPSFCMEEYQRAELEEDPILSRTPSPVHPSDFSEHNCQPYYASDGATYGSSSGLCLGNPRADSIHNTYSTDHASAAPPSVTRSPVENDGYIEEGSITKHPSTWSVEAVVLFLKQTDPLALCPLVDLFRSHEIDGKALLLLTSDVLLKHLGVKLGTAVKLCYYIDRLKQGKCFEN

SEQ ID NO: 38868 - protein, 302 aa, Homo sapiens
MMSNSSSEIDVQEPNIVSDASCNTEEQLKTVDDVLIHCQVIYDALQNLDKKIDVIRRKVSKIQRFHARSLWTNHKRYGYKKHSYRLVKKLKLQKMKKNEVYETFSYPESYSPTLPVSRRENNSPSNLPRPSFCMEEYQRAELEEDPILSRTPSPVHPSDFSEHNCQPYYASDGATYGSSSGLCLGNPRADSIHNTYSTDHASAAPPSVTRSPVENDGYIEEGSITKHPSTWSVEAVVLFLKQTDPLALCPLVDLFRSHEIDGKALLLLTSDVLLKHLGVKLGTAVKLCYYIDRLKQGKCFEN

SEQ ID NO: 38869 - protein, 1101 aa, Homo sapiens
MDRAPTEQNVKLSAEVEPFIPQKKSPDTFMIPMALPNDNGSVSGVEPTPIPSYLITCYPFVQENQSNRQFPLYNNDIRWQQPNPNPTGPYFAYPIISAQPPVSTEYTYYQLMPAPCAQVMGFYHPFPTPYSNTFQAANTVNAITTECTERPSQLGQVFPLSSHRSRNSNRGSVVPKQQLLQQHIKSKRPLVKNVATQKETNAAGPDSRSKIVLLVDASQQTDFPSDIANKSLSETTATMLWKSKGRRRRASHPTAESSSEQGASEADIDSDSGYCSPKHSNNQPAAGALRNPDSGTMNHVESSMCAGGVNWSNVTCQATQKKPWMEKNQTFSRGGRQTEQRNNSQVGFRCRGHSTSSERRQNLQKRPDNKHLSSSQSHRSDPNSESLYFEDEDGFQELNENGNAKDENIQQKLSSKVLDDLPENSPINIVQTPIPITTSVPKRAKSQKKKALAAALATAQEYSEISMEQKKLQEALSKAAGKKNKTPVQLDLGDMLAALEKQQQAMKARQITNTRPLSYTVVTAASFHTKDSTNRKPLTKSQPCLTSFNSVDIASSKAKKGKEKEIAKLKRPTALKKVILKEREEKKGRLTVDHNLLGSEEPTEMHLDFIDDLPQEIVSQEDTGLSMPSDTSLSPASQNSPYCMTPVSQGSPASSGIGSPMASSTITKIHSKRFREYCNQVLCKEIDECVTLLLQELVSFQERIYQKDPVRAKARRRLVMGLREVTKHMKLNKIKCVIISPNCEKIQSKGGLDEALYNVIAMAREQEIPFVFALGRKALGRCVNKLVPVSVVGIFNYFGAESLFNKLVELTEEARKAYKDMVAAMEQEQAEEALKNVKKVPHHMGHSRNPSAASAISFCSVISEPISEVNEKEYETNWRNMVETSDGLEASENEKEVSCKHSTSEKPSKLPFDTPPIGKQPSLVATGSTTSATSAGKSTASDKEEVKPDDLEWASQQSTETGSLDGSCRDLLNSSITSTTSTLVPGMLEEEEDEDEEEEEDYTHEPISVEVQLNSRIESWVSETQRTMETLQLGKTLNGSEEDNVEQSGEEEAEAPEVLEPGMDSEAWTADQQASPGQQKSSNCSSLNKEHSDSNYTTQTT

SEQ ID NO: 38870 - protein, 1056 aa, Homo sapiens
MDRAPTEQNVKLSAEVEPFIPQKKSPDTFMIPMALPNDNGSVSGVEPTPIPSYLITCYPFVQENQSNRQFPLYNNDIRWQQPNPNPTGPYFAYPIISAQPPVSTEYTYYQLMPAPCAQVMGFYHPFPTPYSNTFQAANTVNAITTECTERPSQLGQVFPLSSHRSRNSNRGSVVPKQQLLQQHIKSKRPLVKNVATQKETNAAGPDSRSKIVLLVDASQQTDFPSDIANKSLSETTATMLWKSKGRRRRASHPTAESSSEQGASEADIDSDSGYCSPKHSNNQPAAGALRNPDSGTMNHVESSMCAGGVNWSNVTCQATQKKPWMEKNQTFSRGGRQTEQRNNSQDEDGFQELNENGNAKDENIQQKLSSKVLDDLPENSPINIVQTPIPITTSVPKRAKSQKKKALAAALATAQEYSEISMEQKKLQEALSKAAGKKNKTPVQLDLGDMLAALEKQQQAMKARQITNTRPLSYTVVTAASFHTKDSTNRKPLTKSQPCLTSFNSVDIASSKAKKGKEKEIAKLKRPTALKKVILKEREEKKGRLTVDHNLLGSEEPTEMHLDFIDDLPQEIVSQEDTGLSMPSDTSLSPASQNSPYCMTPVSQGSPASSGIGSPMASSTITKIHSKRFREYCNQVLCKEIDECVTLLLQELVSFQERIYQKDPVRAKARRRLVMGLREVTKHMKLNKIKCVIISPNCEKIQSKGGLDEALYNVIAMAREQEIPFVFALGRKALGRCVNKLVPVSVVGIFNYFGAESLFNKLVELTEEARKAYKDMVAAMEQEQAEEALKNVKKVPHHMGHSRNPSAASAISFCSVISEPISEVNEKEYETNWRNMVETSDGLEASENEKEVSCKHSTSEKPSKLPFDTPPIGKQPSLVATGSTTSATSAGKSTASDKEEVKPDDLEWASQQSTETGSLDGSCRDLLNSSITSTTSTLVPGMLEEEEDEDEEEEEDYTHEPISVEVQLNSRIESWVSETQRTMETLQLGKTLNGSEEDNVEQSGEEEAEAPEVLEPGMDSEAWTADQQASPGQQKSSNCSSLNKEHSDSNYTTQTT

SEQ ID NO: 38871 - protein, 853 aa, Homo sapiens
MCCEKWSRVAEMFLFIEEREDCKILCLCSRAFVEDRKLYNLGLKGYYIRDSGNNSGDQATEEEEGGYSCGTAESHDSKGIGLDESELDSEAELMRSMGLPLQFGRITAHKDFEVSMNTRNKVKIKKKKHQKKYLDEIVQESWRKEYEEDDILASDDPSSIEQYENTRTYELQSKKDTETENPPVENTLSPKLEITEKWEKYWNEYGGGLLWQSWQEKHPGQALSSEPWNFPDTKEEWEQHYSQLYWYYLEQFQYWEAQGWTFDASQSCDTDTYTSKTEADDKNDEKCMKVDLVSFPSSPIMVDNDSSGTSDKDHSEILDGISNIKLNSEEVTQSQLDSCTSHDGHQQLSEVSSKRECPASGQSEPRNGGTNEESNSSGNTNTDPPAEDSQKSSGANTSKDRPHASGTDGDESEEDPPEHKPSKLKRSHELDIDENPASDFDDSGSLLGFKYGSGQKYGGIPNFSHRQVRYLEKNVKLKSKYLDMRRQIKMKNKHIFFTKESEKPFFKKSKILSKVEKFLTWVNKPMDEEASQESSSHDNVHDASTSSDSEEQDMSVKKGDDLLETNNPEPEKCQSVSSAGELETENYERDSLLATVPDEQDCVTQEVPDSRQAETEAEVKKKKNKKKNKKVNGLPPEIAAVPELAKYWAQRYRLFSRFDDGIKLDREGWFSVTPEKIAEHIAGRVSQSFKCDVVVDAFCGVGGNTIQFALTGMRVIAIDIDPVKIALARNNAEVYGIADKIEFICGDFLLLASFLKADVVFLSPPWGGPDYATAETFDIRTMMSPDGFEIFRLSKKITNNIVYFLPRNADIDQVASLAGPGGQVEIEQNFLNNKLKTITAYFGDLIRRPASET

SEQ ID NO: 38872 - protein, 292 aa, Homo sapiens
MSSLYPSLEDLKVDQAIQAQVRASPKMPALPVQATAISPPPVLYPNLAELENYMGLSLSSQEVQESLLQIPEGDSTAVSGPGPGQMVAPVTGYSLGVRRAEIKPGVREIHLCKDERGKTGLRLRKVDQGLFVQLVQANTPASLVGLRFGDQLLQIDGRDCAGWSSHKAHQVVKKASGDKIVVVVRDRPFQRTVTMHKDSMGHVGFVIKKGKIVSLVKGSSAARNGLLTNHYVCEVDGQNVIGLKDKKIMEILATAGNVVTLTIIPSVIYEHMVKKLPPVLLHHTMDHSIPDA

SEQ ID NO: 38873 - protein, 207 aa, Homo sapiens
MVAPVTGYSLGVRRAEIKPGVREIHLCKDERGKTGLRLRKVDQGLFVQLVQANTPASLVGLRFGDQLLQIDGRDCAGWSSHKAHQVVKKASGDKIVVVVRDRPFQRTVTMHKDSMGHVGFVIKKGKIVSLVKGSSAARNGLLTNHYVCEVDGQNVIGLKDKKIMEILATAGNVVTLTIIPSVIYEHMVKKLPPVLLHHTMDHSIPDA

SEQ ID NO: 38874 - protein, 198 aa, Homo sapiens
MAPARLFALLLFFVGGVAESIRETEVIDPQDLLEGRYFSGALPDDEDVVGPGQESDDFELSGSGDLDDLEDSMIGPEVVHPLVPLDNHIPERAGSGSQVPTEPKKLEENEVIPKRISPVEESEDVSNKVSMSSTVQGSNIFERTEVLAALIVGGIVGILFAVFLILLLMYRMKKKDEGSYDLGKKPIYKKAPTNEFYA

SEQ ID NO: 38875 - protein, 153 aa, Homo sapiens
MAPARLFALLLFFVGGVAESIRETEVIDPQDLLEGRYFSGALPDDEDVVGPGQESDDFELSGSGDLDDLEDSMIGPEVVHPLVPLDNHIPERAGSGSQVPTEPKKLEENEVIPKRISPVEESEDVSNKVSMSSTVQGSNIFERTEVLAGCPEH

SEQ ID NO: 38876 - protein, 2009 aa, Homo sapiens
MEQTVLVPPGPDSFNFFTRESLAAIERRIAEEKAKNPKPDKKDDDENGPKPNSDLEAGKNLPFIYGDIPPEMVSEPLEDLDPYYINKKTFIVLNKGKAIFRFSATSALYILTPFNPLRKIAIKILVHSLFSMLIMCTILTNCVFMTMSNPPDWTKNVEYTFTGIYTFESLIKIIARGFCLEDFTFLRDPWNWLDFTVITFAYVTEFVDLGNVSALRTFRVLRALKTISVIPGLKTIVGALIQSVKKLSDVMILTVFCLSVFALIGLQLFMGNLRNKCIQWPPTNASLEEHSIEKNITVNYNGTLINETVFEFDWKSYIQDSRYHYFLEGFLDALLCGNSSDAGQCPEGYMCVKAGRNPNYGYTSFDTFSWAFLSLFRLMTQDFWENLYQLTLRAAGKTYMIFFVLVIFLGSFYLINLILAVVAMAYEEQNQATLEEAEQKEAEFQQMIEQLKKQQEAAQQAATATASEHSREPSAAGRLSDSSSEASKLSSKSAKERRNRRKKRKQKEQSGGEEKDEDEFQKSESEDSIRRKGFRFSIEGNRLTYEKRYSSPHQSLLSIRGSLFSPRRNSRTSLFSFRGRAKDVGSENDFADDEHSTFEDNESRRDSLFVPRRHGERRNSNLSQTSRSSRMLAVFPANGKMHSTVDCNGVVSLVGGPSVPTSPVGQLLPEVIIDKPATDDNGTTTETEMRKRRSSSFHVSMDFLEDPSQRQRAMSIASILTNTVEELEESRQKCPPCWYKFSNIFLIWDCSPYWLKVKHVVNLVVMDPFVDLAITICIVLNTLFMAMEHYPMTDHFNNVLTVGNLVFTGIFTAEMFLKIIAMDPYYYFQEGWNIFDGFIVTLSLVELGLANVEGLSVLRSFRLLRVFKLAKSWPTLNMLIKIIGNSVGALGNLTLVLAIIVFIFAVVGMQLFGKSYKDCVCKIASDCQLPRWHMNDFFHSFLIVFRVLCGEWIETMWDCMEVAGQAMCLTVFMMVMVIGNLVVLNLFLALLLSSFSADNLAATDDDNEMNNLQIAVDRMHKGVAYVKRKIYEFIQQSFIRKQKILDEIKPLDDLNNKKDSCMSNHTAEIGKDLDYLKDVNGTTSGIGTGSSVEKYIIDESDYMSFINNPSLTVTVPIAVGESDFENLNTEDFSSESDLEESKEKLNESSSSSEGSTVDIGAPVEEQPVVEPEETLEPEACFTEGCVQRFKCCQINVEEGRGKQWWNLRRTCFRIVEHNWFETFIVFMILLSSGALAFEDIYIDQRKTIKTMLEYADKVFTYIFILEMLLKWVAYGYQTYFTNAWCWLDFLIVDVSLVSLTANALGYSELGAIKSLRTLRALRPLRALSRFEGMRVVVNALLGAIPSIMNVLLVCLIFWLIFSIMGVNLFAGKFYHCINTTTGDRFDIEDVNNHTDCLKLIERNETARWKNVKVNFDNVGFGYLSLLQVATFKGWMDIMYAAVDSRNVELQPKYEESLYMYLYFVIFIIFGSFFTLNLFIGVIIDNFNQQKKKFGGQDIFMTEEQKKYYNAMKKLGSKKPQKPIPRPGNKFQGMVFDFVTRQVFDISIMILICLNMVTMMVETDDQSEYVTTILSRINLVFIVLFTGECVLKLISLRHYYFTIGWNIFDFVVVILSIVGMFLAELIEKYFVSPTLFRVIRLARIGRILRLIKGAKGIRTLLFALMMSLPALFNIGLLLFLVMFIYAIFGMSNFAYVKREVGIDDMFNFETFGNSMICLFQITTSAGWDGLLAPILNSKPPDCDPNKVNPGSSVKGDCGNPSVGIFFFVSYIIISFLVVVNMYIAVILENFSVATEESAEPLSEDDFEMFYEVWEKFDPDATQFMEFEKLSQFAAALEPPLNLPQPNKLQLIAMDLPMVSGDRIHCLDILFAFTKRVLGESGEMDALRIQMEERFMASNPSKVSYQPITTTLKRKQEEVSAVIIQRAYRRHLLKRTVKQASFTYNKNKIKGGANLLIKEDMIIDRINENSITEKTDLTMSTAACPPSYDRVTKPIVEKHEQEGKDEKAKGK

SEQ ID NO: 38877 - protein, 1998 aa, Homo sapiens
MEQTVLVPPGPDSFNFFTRESLAAIERRIAEEKAKNPKPDKKDDDENGPKPNSDLEAGKNLPFIYGDIPPEMVSEPLEDLDPYYINKKTFIVLNKGKAIFRFSATSALYILTPFNPLRKIAIKILVHSLFSMLIMCTILTNCVFMTMSNPPDWTKNVEYTFTGIYTFESLIKIIARGFCLEDFTFLRDPWNWLDFTVITFAYVTEFVDLGNVSALRTFRVLRALKTISVIPGLKTIVGALIQSVKKLSDVMILTVFCLSVFALIGLQLFMGNLRNKCIQWPPTNASLEEHSIEKNITVNYNGTLINETVFEFDWKSYIQDSRYHYFLEGFLDALLCGNSSDAGQCPEGYMCVKAGRNPNYGYTSFDTFSWAFLSLFRLMTQDFWENLYQLTLRAAGKTYMIFFVLVIFLGSFYLINLILAVVAMAYEEQNQATLEEAEQKEAEFQQMIEQLKKQQEAAQQAATATASEHSREPSAAGRLSDSSSEASKLSSKSAKERRNRRKKRKQKEQSGGEEKDEDEFQKSESEDSIRRKGFRFSIEGNRLTYEKRYSSPHQSLLSIRGSLFSPRRNSRTSLFSFRGRAKDVGSENDFADDEHSTFEDNESRRDSLFVPRRHGERRNSNLSQTSRSSRMLAVFPANGKMHSTVDCNGVVSLVGGPSVPTSPVGQLLPEGTTTETEMRKRRSSSFHVSMDFLEDPSQRQRAMSIASILTNTVEELEESRQKCPPCWYKFSNIFLIWDCSPYWLKVKHVVNLVVMDPFVDLAITICIVLNTLFMAMEHYPMTDHFNNVLTVGNLVFTGIFTAEMFLKIIAMDPYYYFQEGWNIFDGFIVTLSLVELGLANVEGLSVLRSFRLLRVFKLAKSWPTLNMLIKIIGNSVGALGNLTLVLAIIVFIFAVVGMQLFGKSYKDCVCKIASDCQLPRWHMNDFFHSFLIVFRVLCGEWIETMWDCMEVAGQAMCLTVFMMVMVIGNLVVLNLFLALLLSSFSADNLAATDDDNEMNNLQIAVDRMHKGVAYVKRKIYEFIQQSFIRKQKILDEIKPLDDLNNKKDSCMSNHTAEIGKDLDYLKDVNGTTSGIGTGSSVEKYIIDESDYMSFINNPSLTVTVPIAVGESDFENLNTEDFSSESDLEESKEKLNESSSSSEGSTVDIGAPVEEQPVVEPEETLEPEACFTEGCVQRFKCCQINVEEGRGKQWWNLRRTCFRIVEHNWFETFIVFMILLSSGALAFEDIYIDQRKTIKTMLEYADKVFTYIFILEMLLKWVAYGYQTYFTNAWCWLDFLIVDVSLVSLTANALGYSELGAIKSLRTLRALRPLRALSRFEGMRVVVNALLGAIPSIMNVLLVCLIFWLIFSIMGVNLFAGKFYHCINTTTGDRFDIEDVNNHTDCLKLIERNETARWKNVKVNFDNVGFGYLSLLQVATFKGWMDIMYAAVDSRNVELQPKYEESLYMYLYFVIFIIFGSFFTLNLFIGVIIDNFNQQKKKFGGQDIFMTEEQKKYYNAMKKLGSKKPQKPIPRPGNKFQGMVFDFVTRQVFDISIMILICLNMVTMMVETDDQSEYVTTILSRINLVFIVLFTGECVLKLISLRHYYFTIGWNIFDFVVVILSIVGMFLAELIEKYFVSPTLFRVIRLARIGRILRLIKGAKGIRTLLFALMMSLPALFNIGLLLFLVMFIYAIFGMSNFAYVKREVGIDDMFNFETFGNSMICLFQITTSAGWDGLLAPILNSKPPDCDPNKVNPGSSVKGDCGNPSVGIFFFVSYIIISFLVVVNMYIAVILENFSVATEESAEPLSEDDFEMFYEVWEKFDPDATQFMEFEKLSQFAAALEPPLNLPQPNKLQLIAMDLPMVSGDRIHCLDILFAFTKRVLGESGEMDALRIQMEERFMASNPSKVSYQPITTTLKRKQEEVSAVIIQRAYRRHLLKRTVKQASFTYNKNKIKGGANLLIKEDMIIDRINENSITEKTDLTMSTAACPPSYDRVTKPIVEKHEQEGKDEKAKGK

SEQ ID NO: 38878 - protein, 1981 aa, Homo sapiens
MEQTVLVPPGPDSFNFFTRESLAAIERRIAEEKAKNPKPDKKDDDENGPKPNSDLEAGKNLPFIYGDIPPEMVSEPLEDLDPYYINKKTFIVLNKGKAIFRFSATSALYILTPFNPLRKIAIKILVHSLFSMLIMCTILTNCVFMTMSNPPDWTKNVEYTFTGIYTFESLIKIIARGFCLEDFTFLRDPWNWLDFTVITFAYVTEFVDLGNVSALRTFRVLRALKTISVIPGLKTIVGALIQSVKKLSDVMILTVFCLSVFALIGLQLFMGNLRNKCIQWPPTNASLEEHSIEKNITVNYNGTLINETVFEFDWKSYIQDSRYHYFLEGFLDALLCGNSSDAGQCPEGYMCVKAGRNPNYGYTSFDTFSWAFLSLFRLMTQDFWENLYQLTLRAAGKTYMIFFVLVIFLGSFYLINLILAVVAMAYEEQNQATLEEAEQKEAEFQQMIEQLKKQQEAAQQAATATASEHSREPSAAGRLSDSSSEASKLSSKSAKERRNRRKKRKQKEQSGGEEKDEDEFQKSESEDSIRRKGFRFSIEGNRLTYEKRYSSPHQSLLSIRGSLFSPRRNSRTSLFSFRGRAKDVGSENDFADDEHSTFEDNESRRDSLFVPRRHGERRNSNLSQTSRSSRMLAVFPANGKMHSTVDCNGVVSLGTTTETEMRKRRSSSFHVSMDFLEDPSQRQRAMSIASILTNTVEELEESRQKCPPCWYKFSNIFLIWDCSPYWLKVKHVVNLVVMDPFVDLAITICIVLNTLFMAMEHYPMTDHFNNVLTVGNLVFTGIFTAEMFLKIIAMDPYYYFQEGWNIFDGFIVTLSLVELGLANVEGLSVLRSFRLLRVFKLAKSWPTLNMLIKIIGNSVGALGNLTLVLAIIVFIFAVVGMQLFGKSYKDCVCKIASDCQLPRWHMNDFFHSFLIVFRVLCGEWIETMWDCMEVAGQAMCLTVFMMVMVIGNLVVLNLFLALLLSSFSADNLAATDDDNEMNNLQIAVDRMHKGVAYVKRKIYEFIQQSFIRKQKILDEIKPLDDLNNKKDSCMSNHTAEIGKDLDYLKDVNGTTSGIGTGSSVEKYIIDESDYMSFINNPSLTVTVPIAVGESDFENLNTEDFSSESDLEESKEKLNESSSSSEGSTVDIGAPVEEQPVVEPEETLEPEACFTEGCVQRFKCCQINVEEGRGKQWWNLRRTCFRIVEHNWFETFIVFMILLSSGALAFEDIYIDQRKTIKTMLEYADKVFTYIFILEMLLKWVAYGYQTYFTNAWCWLDFLIVDVSLVSLTANALGYSELGAIKSLRTLRALRPLRALSRFEGMRVVVNALLGAIPSIMNVLLVCLIFWLIFSIMGVNLFAGKFYHCINTTTGDRFDIEDVNNHTDCLKLIERNETARWKNVKVNFDNVGFGYLSLLQVATFKGWMDIMYAAVDSRNVELQPKYEESLYMYLYFVIFIIFGSFFTLNLFIGVIIDNFNQQKKKFGGQDIFMTEEQKKYYNAMKKLGSKKPQKPIPRPGNKFQGMVFDFVTRQVFDISIMILICLNMVTMMVETDDQSEYVTTILSRINLVFIVLFTGECVLKLISLRHYYFTIGWNIFDFVVVILSIVGMFLAELIEKYFVSPTLFRVIRLARIGRILRLIKGAKGIRTLLFALMMSLPALFNIGLLLFLVMFIYAIFGMSNFAYVKREVGIDDMFNFETFGNSMICLFQITTSAGWDGLLAPILNSKPPDCDPNKVNPGSSVKGDCGNPSVGIFFFVSYIIISFLVVVNMYIAVILENFSVATEESAEPLSEDDFEMFYEVWEKFDPDATQFMEFEKLSQFAAALEPPLNLPQPNKLQLIAMDLPMVSGDRIHCLDILFAFTKRVLGESGEMDALRIQMEERFMASNPSKVSYQPITTTLKRKQEEVSAVIIQRAYRRHLLKRTVKQASFTYNKNKIKGGANLLIKEDMIIDRINENSITEKTDLTMSTAACPPSYDRVTKPIVEKHEQEGKDEKAKGK

SEQ ID NO: 38879 - protein, 298 aa, Homo sapiens
MSLYPSLEDLKVDKVIQAQTAFSANPANPAILSEASAPIPHDGNLYPRLYPELSQYMGLSLNEEEIRANVAVVSGAPLQGQLVARPSSINYMVAPVTGNDVGIRRAEIKQGIREVILCKDQDGKIGLRLKSIDNGIFVQLVQANSPASLVGLRFGDQVLQINGENCAGWSSDKAHKVLKQAFGEKITMTIRDRPFERTITMHKDSTGHVGFIFKNGKITSIVKDSSAARNGLLTEHNICEINGQNVIGLKDSQIADILSTSGTVVTITIMPAFIFEHIIKRMAPSIMKSLMDHTIPEV

SEQ ID NO: 38880 - protein, 297 aa, Homo sapiens
MSLYPSLEDLKVDKVIQAQTAFSANPANPAILSEASAPIPHDGNLYPRLYPELSQYMGLSLNEEEIRANVAVVSGAPLQGLVARPSSINYMVAPVTGNDVGIRRAEIKQGIREVILCKDQDGKIGLRLKSIDNGIFVQLVQANSPASLVGLRFGDQVLQINGENCAGWSSDKAHKVLKQAFGEKITMTIRDRPFERTITMHKDSTGHVGFIFKNGKITSIVKDSSAARNGLLTEHNICEINGQNVIGLKDSQIADILSTSGTVVTITIMPAFIFEHIIKRMAPSIMKSLMDHTIPEV

SEQ ID NO: 38881 - protein, 292 aa, Homo sapiens
MSLYPSLEDLKAQTAFSANPANPAILSEASAPIPHDGNLYPRLYPELSQYMGLSLNEEEIRANVAVVSGAPLQGQLVARPSSINYMVAPVTGNDVGIRRAEIKQGIREVILCKDQDGKIGLRLKSIDNGIFVQLVQANSPASLVGLRFGDQVLQINGENCAGWSSDKAHKVLKQAFGEKITMTIRDRPFERTITMHKDSTGHVGFIFKNGKITSIVKDSSAARNGLLTEHNICEINGQNVIGLKDSQIADILSTSGTVVTITIMPAFIFEHIIKRMAPSIMKSLMDHTIPEV

SEQ ID NO: 38882 - protein, 777 aa, Homo sapiens
MNANKDERLKARSQDFHLFPALMMLSMTMLFLPVTGTLKQNIPRLKLTYKDLLLSNSCIPFLGSSEGLDFQTLLLDEERGRLLLGAKDHIFLLSLVDLNKNFKKIYWPAAKERVELCKLAGKDANTECANFIRVLQPYNKTHIYVCGTGAFHPICGYIDLGVYKEDIIFKLDTHNLESGRLKCPFDPQQPFASVMTDEYLYSGTASDFLGKDTAFTRSLGPTHDHHYIRTDISEHYWLNGAKFIGTFFIPDTYNPDDDKIYFFFRESSQEGSTSDKTILSRVGRVCKNDVGGQRSLINKWTTFLKARLICSIPGSDGADTYFDELQDIYLLPTRDERNPVVYGVFTTTSSIFKGSAVCVYSMADIRAVFNGPYAHKESADHRWVQYDGRIPYPRPGTCPSKTYDPLIKSTRDFPDDVISFIKRHSVMYKSVYPVAGGPTFKRINVDYRLTQIVVDHVIAEDGQYDVMFLGTDIGTVLKVVSISKEKWNMEEVVLEELQIFKHSSIILNMELSLKQQQLYIGSRDGLVQLSLHRCDTYGKACADCCLARDPYCAWDGNACSRYAPTSKRRARRQDVKYGDPITQCWDIEDSISHETADEKVIFGIEFNSTFLECIPKSQQATIKWYIQRSGDEHREELKPDERIIKTEYGLLIRSLQKKDSGMYYCKAQEHTFIHTIVKLTLNVIENEQMENTQRAEHEEGKVKDLLAESRLRYKDYIQILSSPNFSLDQYCEQMWHREKRRQRNKGGPKWKHMQEMKKKRNRRHHRDLDELPRAVAT

SEQ ID NO: 38883 - protein, 775 aa, Homo sapiens
MASAGHIITLLLWGYLLELWTGGHTADTTHPRLRLSHKELLNLNRTSIFHSPFGFLDLHTMLLDEYQERLFVGGRDLVYSLSLERISDGYKEIHWPSTALKMEECIMKGKDAGECANYVRVLHHYNRTHLLTCGTGAFDPVCAFIRVGYHLEDPLFHLESPRSERGRGRCPFDPSSSFISTLIGSELFAGLYSDYWSRDAAIFRSMGRLAHIRTEHDDERLLKEPKFVGSYMIPDNEDRDDNKVYFFFTEKALEAENNAHAIYTRVGRLCVNDVGGQRILVNKWSTFLKARLVCSVPGMNGIDTYFDELEDVFLLPTRDHKNPVIFGLFNTTSNIFRGHAICVYHMSSIRAAFNGPYAHKEGPEYHWSVYEGKVPYPRPGSCASKVNGGRYGTTKDYPDDAIRFARSHPLMYQAIKPAHKKPILVKTDGKYNLKQIAVDRVEAEDGQYDVLFIGTDNGIVLKVITIYNQEMESMEEVILEELQIFKDPVPIISMEISSKRQQLYIGSASAVAQVRFHHCDMYGSACADCCLARDPYCAWDGISCSRYYPTGTHAKRRFRRQDVRHGNAAQQCFGQQFVGDALDKTEEHLAYGIENNSTLLECTPRSLQAKVIWFVQKGRETRKEEVKTDDRVVKMDLGLLFLRLHKSDAGTYFCQTVEHSFVHTVRKITLEVVEEEKVEDMFNKDDEEDRHHRMPCPAQSSISQGAKPWYKEFLQLIGYSNFQRVEEYCEKVWCTDRKRKKLKMSPSKWKYANPQEKKLRSKPEHYRLPRHTLDS

SEQ ID NO: 38884 - protein, 715 aa, Homo sapiens
MLLDEYQERLFVGGRDLVYSLSLERISDGYKEIHWPSTALKMEECIMKGKDAGECANYVRVLHHYNRTHLLTCGTGAFDPVCAFIRVGYHLEDPLFHLESPRSERGRGRCPFDPSSSFISTLIGSELFAGLYSDYWSRDAAIFRSMGRLAHIRTEHDDERLLKEPKFVGSYMIPDNEDRDDNKVYFFFTEKALEAENNAHAIYTRVGRLCVNDVGGQRILVNKWSTFLKARLVCSVPGMNGIDTYFDELEDVFLLPTRDHKNPVIFGLFNTTSNIFRGHAICVYHMSSIRAAFNGPYAHKEGPEYHWSVYEGKVPYPRPGSCASKVNGGRYGTTKDYPDDAIRFARSHPLMYQAIKPAHKKPILVKTDGKYNLKQIAVDRVEAEDGQYDVLFIGTDNGIVLKVITIYNQEMESMEEVILEELQIFKDPVPIISMEISSKRQQLYIGSASAVAQVRFHHCDMYGSACADCCLARDPYCAWDGISCSRYYPTGTHAKRRFRRQDVRHGNAAQQCFGQQFVGDALDKTEEHLAYGIENNSTLLECTPRSLQAKVIWFVQKGRETRKEEVKTDDRVVKMDLGLLFLRLHKSDAGTYFCQTVEHSFVHTVRKITLEVVEEEKVEDMFNKDDEEDRHHRMPCPAQSSISQGAKPWYKEFLQLIGYSNFQRVEEYCEKVWCTDRKRKKLKMSPSKWKYANPQEKKLRSKPEHYRLPRHTLDS

SEQ ID NO: 38885 - protein, 782 aa, Homo sapiens
MAPSAWAICWLLGGLLLHGGSSGPSPGPSVPRLRLSYRDLLSANRSAIFLGPQGSLNLQAMYLDEYRDRLFLGGLDALYSLRLDQAWPDPREVLWPPQPGQREECVRKGRDPLTECANFVRVLQPHNRTHLLACGTGAFQPTCALITVGHRGEHVLHLEPGSVESGRGRCPHEPSRPFASTFIDGELYTGLTADFLGREAMIFRSGGPRPALRSDSDQSLLHDPRFVMAARIPENSDQDNDKVYFFFSETVPSPDGGSNHVTVSRVGRVCVNDAGGQRVLVNKWSTFLKARLVCSVPGPGGAETHFDQLEDVFLLWPKAGKSLEVYALFSTVSAVFQGFAVCVYHMADIWEVFNGPFAHRDGPQHQWGPYGGKVPFPRPGVCPSKMTAQPGRPFGSTKDYPDEVLQFARAHPLMFWPVRPRHGRPVLVKTHLAQQLHQIVVDRVEAEDGTYDVIFLGTDSGSVLKVIALQAGGSAEPEEVVLEELQVFKVPTPITEMEISVKRQMLYVGSRLGVAQLRLHQCETYGTACAECCLARDPYCAWDGASCTHYRPSLGKRRFRRQDIRHGNPALQCLGQSQEEEAVGLVAATMVYGTEHNSTFLECLPKSPQAAVRWLLQRPGDEGPDQVKTDERVLHTERGLLFRRLSRFDAGTYTCTTLEHGFSQTVVRLALVVIVASQLDNLFPPEPKPEEPPARGGLASTPPKAWYKDILQLIGFANLPRVDEYCERVWCRGTTECSGCFRSRSRGKQARGKSWAGLELGKKMKSRVHAEHNRTPREVEAT

SEQ ID NO: 38886 - protein, 417 aa, Homo sapiens
MASSKLREPVDEVFDLDLAVPETARLDSSLHKARAQLLAKGRRHRPSRSRLRDSASSAEDGEGSDGPGGKVTDGCGSPLHRLRSPLHSGPGSPAGGSFCLDPPGLRRSLDEDEPPPSPLTRYRPLHNAASHEGLAAASCSPPRSAPSSDSSPSFVRRHPRAEPHSEDDSRDASPPEPASPTIGLDKKTRRKFLDLGVTLRRASTGKSRKEKGSNRLSMGSRESVEGSGRSGGSPFLPFSWFTDSGKGSASSGSTTSPTCSPKHEGFSPKKSASQESTLSDDSTPPSSSPKIPSGPWQEAKCSYPYHTLSQSSDEFLDEPLPPVHHWTSQQVGQWLQSLNLEQYAAEFAARQVDGPQLLQLDGSKLKSLGLSNSHDRALVKRKLKEMAAAAEKERKAQEKAARQREKLRRREQEAKKS

SEQ ID NO: 38887 - protein, 445 aa, Homo sapiens
MASSKLREPVDEVFDLDLAVPETARLDSSLHKARAQLLAKGRRHRPSRSRLRDSASSAEDGEGSDGPGGKVTDGCGSPLHRLRSPLHSGPGSPAGGSFCLDPPGLRRSLDEDEPPPSPLTRYRPLHNAASHEGLAAASCSPPRSAPSSDSSPSFVRRHPRAEPHSEDDSRDASPPEPASPTIGLDKKTRRKFLDLGVTLRRASTGKSRKEKGSNRLSMGSRESVEGSGRSGGSPFLPFSWFTDSGKGSASSGSTTSPTCSPKHEGFSPKKSASQAQLLAHAQEALSNSWCLVQDFGSTQIGMESTLSDDSTPPSSSPKIPSGPWQEAKCSYPYHTLSQSSDEFLDEPLPPVHHWTSQQVGQWLQSLNLEQYAAEFAARQVDGPQLLQLDGSKLKSLGLSNSHDRALVKRKLKEMAAAAEKERKAQEKAARQREKLRRREQEAKKS

SEQ ID NO: 38888 - protein, 733 aa, Homo sapiens
MERRSESPCLRDSPDRRSGSPDVKGPPPVKVARLEQNGSPMGARGRPNGAVAKAVGGLMIPVFCVVEQLDGSLEYDNREEHAEFVLVRKDVLFSQLVETALLALGYSHSSAAQAQGIIKLGRWNPLPLSYVTDAPDATVADMLQDVYHVVTLKIQLQSCSKLEDLPAEQWNHATVRNALKELLKEMNQSTLAKECPLSQSMISSIVNSTYYANVSATKCQEFGRWYKKYKKIKVERVERENLSDYCVLGQRPMHLPNMNQLASLGKTNEQSPHSQIHHSTPIRNQVPALQPIMSPGLLSPQLSPQLVRQQIAMAHLINQQIAVSRLLAHQHPQAINQQFLNHPPIPRAVKPEPTNSSVEVSPDIYQQVRDELKRASVSQAVFARVAFNRTQGLLSEILRKEEDPRTASQSLLVNLRAMQNFLNLPEVERDRIYQDERERSMNPNVSMVSSASSSPSSSRTPQAKTSTPTTDLPIKVDGANINITAAIYDEIQQEMKRAKVSQALFAKVAANKSQGWLCELLRWKENPSPENRTLWENLCTIRRFLNLPQHERDVIYEEESRHHHSERMQHVVQLPPEPVQVLHRQQSQPAKESSPPREEAPPPPPPTEDSCAKKPRSRTKISLEALGILQSFIHDVGLYPDQEAIHTLSAQLDLPKHTIIKFFQNQRYHVKHHGKLKEHLGSAVDVAEYKDEELLTESEENDSEEGSEEMYKVEAEEENADKSKAAPAEIDQR

SEQ ID NO: 38889 - protein, 615 aa, Homo sapiens
MERRSESPCLRDSPDRRSGSPDVKGPPPVKVARLEQNGSPMGARGRPNGAVAKAVGGLMIPVFCVVEQLDGSLEYDNREEHAEFVLVRKDVLFSQLVETALLALGYSHSSAAQAQVERVERENLSDYCVLGQRPMHLPNMNQLASLGKTNEQSPHSQIHHSTPIRNQVPALQPIMSPGLLSPQLSPQLVRQQIAMAHLINQQIAVSRLLAHQHPQAINQQFLNHPPIPRAVKPEPTNSSVEVSPDIYQQVRDELKRASVSQAVFARVAFNRTQGLLSEILRKEEDPRTASQSLLVNLRAMQNFLNLPEVERDRIYQDERERSMNPNVSMVSSASSSPSSSRTPQAKTSTPTTDLPIKVDGANINITAAIYDEIQQEMKRAKVSQALFAKVAANKSQGWLCELLRWKENPSPENRTLWENLCTIRRFLNLPQHERDVIYEEESRHHHSERMQHVVQLPPEPVQVLHRQQSQPAKESSPPREEAPPPPPPTEDSCAKKPRSRTKISLEALGILQSFIHDVGLYPDQEAIHTLSAQLDLPKHTIIKFFQNQRYHVKHHGKLKEHLGSAVDVAEYKDEELLTESEENDSEEGSEEMYKVEAEEENADKSKAAPAEIDQR

SEQ ID NO: 38890 - protein, 674 aa, Homo sapiens
MAEVPEDYDSGPDEDGELEPERPELPGLHKLYENAEPDTMAKADSKLPAEIYQEPQPETEEEDFKEGEPDSAKNVQLKPGGTSQEGIAKESKRDVPSETEPGIHQEVKSETSREMGEFFKDLEAPMDETHKESDLEPPEEAKPNVTEDVFLESAMETDPDPVPPTETMSEVSGATVRERNLELLEEETEPGVPEESLRVQHEETGLEPPEQTKQDFPSEKLGESLEETDLQPPKMTKPETPEETQRESTEKKRTEPPEQARLEFLEKEPRKSSEEAGLEPPEETQPEVPEEMQRKATEEKGTELPERTKPDFPDHKPRKSTDENVPEPLEEIKLEFPEEESRKTNEETILEQSEMMKPESPEEIRKSNEKKNPQPPEETGPVLPQEINPQVEEKTQTKPTEKILELPDETKPRETHVEFSKEDRPEPIKSKYSVGNDELEHREPKRGKLSLSDKFRKEYYALGSLRESEESIGTHYEFLQPLQKLLNVSEECSYSDPSESQTELSEFVHEKEVVDLSQELKERVSEDDETQPEKGTELQFEHLNWDPEEVAEWISQLGFPQYKECFITNFISGRKLIHVNCSNLPQMGITNFEDMKAISRHTQELLEIEEPLFKRSISLPYRDIIGLYLEQKGHTGIKSDSLTLSEFVKAAGLQDYAPEITAPEENEELPCTEP

SEQ ID NO: 38891 - protein, 570 aa, Homo sapiens
MAEVPEDYDSGPDEDGELEPERPELPGLHKLYENAEPDTMAKADSKLPAEIYQEPQPETEEEDFKEGEPDSAKNVQLKPGGTSQEGIAKESKRDVPSETEPGIHQEVKSETSREMGEFFKDLEAPMDETHKESDLEPPEEAKPNVTEDVFLESAMETDPDPVPPTETMSEVSGATVRERNLELLEEETEPGVPEESLRVQHEETGLEPPEQTKQDFPSEKLGESLEETDLQPPKMTKPETPEETQRESTEKKRTEPPEQARLEFLEKEPRKSSEEAGLEPPEETQPEVPEEMQRKATEEKGTELPERTKPDFPDHKPRKSTDENVPEPLEEIKLEFPEEESRKTNEETILEQSEMMKPESPEEIRKSNEKKNPQPPEETGPVLPQEINPQVEEKTQTKPTEKILELPDETKPRETHVEFSKEDRPEPIKSKYSVGNDELEHREPKRGKLSLSDKFRKEYYALGSLRESEESIGTHYEFLQPLQKLLNVSEECSYSDPSESQTELSEFVHEKEVVDLSQELKERVSEDDETQPEKGTELQFEHLNWDPEEVAEWISQLGFPQYKVYKNKMF

SEQ ID NO: 38892 - protein, 2357 aa, Homo sapiens
MQPPPQTVPSGMAGPPPAGNPRSVFWASSPYRRRANNNAAVAPTTCPLQPVTDPFAFSRQALQSTPLGSSSKSSPPVLQGPAPAGFSQHPGLLVPHTHARDSSQGPCEPLPGPLTQPRAHASPFSGALTPSAPPGPEMNRSAEVGPSSEPEVQTLPYLPHYIPGVDPETSHGGHPHGNMPGLDRPLSRQNPHDGVVTPAASPSLPQPGLQMPGQWGPVQGGPQPSGQHRSPCPEGPVPSGVPCATSVPHFPTPSILHQGPGHEQHSPLVAPPAALPSDGRDEVSHLQSGSHLANNSDPESTFRQNPRIVNHWASPELRQNPGVKNEHRPASALVNPLARGDSPENRTHHPLGAGAGSGCAPLEADSGASGALAMFFQGGETENEENLSSEKAGLSGQADFDDFCSSPGLGRPPAPTHVGAGSLCQALLPGPSNEAAGDVWGDTASTGVPDASGSQYENVENLEFVQNQEVLPSEPLNLDPSSPSDQFRYGPLPGPAVPRHGAVCHTGAPDATLHTVHPDSVSSSYSSRSHGRLSGSARPQELVGTFIQQEVGKPEDEASGSFFKQIDSSPVGGETDETTVSQNYRGSVSQPSTPSPPKPTGIFQTSANSSFEPVKSHLVGVKPFEADRANVVGEVRETCVRQKQCRPAAALPDASPGNLEQPPDNMETLCAPQVCPLPLNSTTEAVHMLPHAGAPPLDTVYPAPEKRPSARTQGPVKCESPATTLWAQSELPDFGGNVLLAPAAPALYVCAKPQPPVVQPPEEAMSGQQSRNPSSAAPVQSRGGIGASENLENPPKMGEEEALQSQASSGYASLLSSPPTESLQNPPVLIAQPDHSYNLAQPINFSVSLSNSHEKNQSWREALVGDRPAVSSWALGGDSGENTSLSGIPTSSVLSLSLPSSVAQSNFPQGSGASEMVSNQPANLLVQPPSQPVPENLVPESQKDRKAGSALPGFANSPAGSTSVVLVPPAHGTLVPDGNKANHSSHQEDTYGALDFTLSRTLENPVNVYNPSHSDSLASQQSVASHPRQSGPGAPNLDRFYQQVTKDAQGQPGLERAQQELVPPQQQASPPQLPKAMFSELSNPESLPAQGQAQNSAQSPASLVLVDAGQQLPPRPPQSSSVSLVSSGSGQAAVPSEQPWPQPVPALAPGPPPQDLAAYYYYRPLYDAYQPQYSLPYPPEPGAASLYYQDVYSLYEPRYRPYDGAASAYAQNYRYPEPERPSSRASHSSERPPPRQGYPEGYYSSKSGWSSQSDYYASYYSSQYDYGDPGHWDRYHYSARVRDPRTYDRRYWCDAEYDAYRREHSAFGDRPEKRDNNWRYDPRFTGSFDDDPDPHRDPYGEEVDRRSVHSEHSARSLHSAHSLASRRSSLSSHSHQSQIYRSHNVAAGSYEAPLPPGSFHGDFAYGTYRSNFSSGPGFPEYGYPADTVWPAMEQVSSRPTSPEKFSVPHVCARFGPGGQLIKVIPNLPSEGQPALVEVHSMEALLQHTSEQEEMRAFPGPLAKDDTHKVDVINFAQNKAMKCLQNENLIDKESASLLWNFIVLLCRQNGTVVGTDIAELLLRDHRTVWLPGKSPNEANLIDFTNEAVEQVEEEESGEAQLSFLTGGPAAAASSLERETERFRELLLYGRKKDALESAMKNGLWGHALLLASKMDSRTHARVMTRFANSLPINDPLQTVYQLMSGRMPAASTCCGDEKWGDWRPHLAMVLSNLNNNMDVESRTMATMGDTLASRGLLDAAHFCYLMAQAGFGVYTKKTTKLVLIGSNHSLPFLKFATNEAIQRTEAYEYAQSLGAETCPLPSFQVFKFIYSCRLAEMGLATQAFHYCEAIAKSILTQPHLYSPVLISQLVQMASQLRLFDPQLKEKPEEESLAAPTWLVHLQQVERQIKEGAGVWHQDGALPQQCPGTPSSEMEQLDRPGLSQPGALGIANPLLAVPAPSPEHSSPSVRLLPSAPQTLPDGPLASPARVPMFPVPLPPGPLEPGPGCVTPGPALGFLEPSGPGLPPGVPPLQERRHLLQEARSPDPGIVPQEAPVGNSLSELSEENFDGKFANLTPSRTVPDSEAPPGWDRADSGPTQPPLSLSPAPETKRPGQAAKKETKEPKKGESWFFRWLPGKKKTEAYLPDDKNKSIVWDEKKNQWVNLNEPEEEKKAPPPPPTSMPKTVQAAPPALPGPPGAPVNMYSRRAAGTRARYVDVLNPSGTQRSEPALAPADFVAPLAPLPIPSNLFVPTPDAEEPQLPDGTGREGPAAARGLANPEPAPEPKVLSSAASLPGSELPSSRPEGSQGGELSRCSSMSSLSREVSQHFNQAPGDLPAAGGPPSGAMPFYNPAQLAQACATSGSSRLGRIGQRKHLVLN

SEQ ID NO: 38893 - protein, 2312 aa, Homo sapiens
MQPPPQTVPSGMAGPPPAGNPRSVFWASSPYRRRANNNAAVAPTTCPLQPVTDPFAFSRQALQSTPLGSSSKSSPPVLQGPAPAGFSQHPGLLVPHTHARDSSQGPCEPLPGPLTQPRAHASPFSGALTPSAPPGPEMNRSAEVGPSSEPEVQTLPYLPHYIPGVDPETSHGGHPHGNMPGLDRPLSRQNPHDGVVTPAASPSLPQPGLQMPGQWGPVQGGPQPSGQHRSPCPEGPVPSGVPCATSVPHFPTPSILHQGPGHEQHSPLVAPPAALPSDGRDEVSHLQSGSHLANNSDPESTFRQNPRIVNHWASPELRQNPGVKNEHRPASALVNPLARGDSPENRTHHPLGAGAGSGCAPLEADSGASGALAMFFQGGETENEENLSSEKAGLSGQADFDDFCSSPGLGRPPAPTHVGAGSLCQALLPGPSNEAAGDVWGDTASTGVPDASGSQYENVENLEFVQNQEVLPSEPLNLDPSSPSDQFRYGPLPGPAVPRHGAVCHTGAPDATLHTVHPDSVSSSYSSRSHGRLSGSARPQELVGTFIQQEVGKPEDEASGSFFKQIDSSPVGGETDETTVSQNYRGSVSQPSTPSPPKPTGIFQTSANSSFEPVKSHLVGVKPFEADRANVVGEVRETCVRQKQCRPAAALPDASPGNLEQPPDNMETLCAPQVCPLPLNSTTEAVHMLPHAGAPPLDTVYPAPEKRPSARTQGPVKCESPATTLWAQSELPDFGGNVLLAPAAPALYVCAKPQPPVVQPPEEAMSGQQSRNPSSAAPVQSRGGIGASENLENPPKMGEEEALQSQASSGYASLLSSPPTESLQNPPVLIAQPDHSYNLAQPINFSVSLSNSHEKNQSWREALVGDRPAVSSWALGGDSGENTSLSGIPTSSVLSLSLPSSVAQSNFPQGSGASEMVSNQPANLLVQPPSQPVPENLVPESQKDRKAGSALPGFANSPAGSTSVVLVPPAHGTLVPDGNKANHSSHQEDTYGALDFTLSRTLENPVNVYNPSHSDSLASQQSVASHPRQSGPGAPNLDRFYQQVTKDAQGQPGLERAQQELVPPQQQASPPQLPKAMFSELSNPESLPAQGQAQNSAQSPASLVLVDAGQQLPPRPPQSSSVSLVSSGSGQAAVPSEQPWPQPVPALAPGPPPQDLAAYYYYRPLYDAYQPQYSLPYPPEPGAASLYYQDVYSLYEPRYRPYDGAASAYAQNYRYPEPERPSSRASHSSERPPPRQGYPEGYYSSKSGWSSQSDYYASYYSSQYDYGDPGHWDRYHYSARVRDPRTYDRRYWCDAEYDAYRREHSAFGDRPEKRDNNWRYDPRFTGSFDDDPDPHRDPYGEEVDRRSVHSEHSARSLHSAHSLASRRSSLSSHSHQSQIYRSHNVAAGSYEAPLPPGSFHGDFAYGTYRSNFSSGPGFPEYGYPADTVWPAMEQVSSRPTSPEKFSVPHVCARFGPGGQLIKVIPNLPSEGQPALVEVHSMEALLQHTSEQEEMRAFPGPLAKDDTHKVDVINFAQNKAMKCLQNENLIDKESASLLWNFIVLLCRQNGTVVGTDIAELLLRDHRTVWLPGKSPNEANLIDFTNEAVEQVEEEESGEAQLSFLTGGPAAAASSLERETERFRELLLYGRKKDALESAMKNGLWGHALLLASKMDSRTHARVMTRFANSLPINDPLQTVYQLMSGRMPAASTCCGDEKWGDWRPHLAMVLSNLNNNMDVESRTMATMGDTLASRGLLDAAHFCYLMAQAGFGVYTKKTTKLVLIGSNHSLPFLKFATNEAIQRTEAYEYAQSLGAETCPLPSFQVFKFIYSCRLAEMGLATQAFHYCEAIAKSILTQPHLYSPVLISQLVQMASQLRLFDPQLKEKPEEESLAAPTWLVHLQQVERQIKEGAGVWHQDGALPQQCPGTPSSEMEQLDRPGLSQPGALGIANPLLAVPAPSPEHSSPSVRLLPSAPQTLPDGPLASPARVPMFPVPLPPGPLEPGPGCVTPGPALGFLEPSGPGLPPGVPPLQERRHLLQEARSPDPGIVPQEAPVGNSLSELSEENFDGKFANLTPSRTVPDSEAPPGWDRADSGPTQPPLSLSPAPETKRPGQAAKKETKEPKKGESWFFRWLPGKKKTEAYLPDDKNKSIVWDEKKNQWVNLNEPEEEKKAPPPPPTSMPKTVQAAPPALPGPPGAPVNMYSRRAAGTRARYVDVLNPSGTQRSEPALAPADFVAPLAPLPIPSNLFVPTPDAEEPQLPDGTGREGPAAARGLANPEPAPEPKAPGDLPAAGGPPSGAMPFYNPAQLAQACATSGSSRLGRIGQRKHLVLN

SEQ ID NO: 38894 - protein, 2337 aa, Homo sapiens
MQPPPQTVPSGMAGPPPAGNPRSVFWASSPYRRRANNNAAVAPTTCPLQPVTDPFAFSRQALQSTPLGSSSKSSPPVLQGPAPAGFSQHPGLLVPHTHARDSSQGPCEPLPGPLTQPRAHASPFSGALTPSAPPGPEMNRSAEVGPSSEPEVQTLPYLPHYIPGVDPETSHGGHPHGNMPGLDRPLSRQNPHDGVVTPAASPSLPQPGLQMPGQWGPVQGGPQPSGQHRSPCPEGPVPSGVPCATSVPHFPTPSILHQGPGHEQHSPLVAPPAALPSDGRDEVSHLQSGSHLANNSDPESTFRQNPRIVNHWASPELRQNPGVKNEHRPASALVNPLARGDSPENRTHHPLGAGAGSGCAPLEADSGASGALAMFFQGGETENEENLSSEKAGLSGQADFDDFCSSPGLGRPPAPTHVGAGSLCQALLPGPSNEAAGDVWGDTASTGVPDASGSQYENVENLEFVQNQEVLPSEPLNLDPSSPSDQFRYGPLPGPAVPRHGAVCHTGAPDATLHTVHPDSVSSSYSSRSHGRLSGSARPQELVGTFIQQEVGKPEDEASGSFFKQIDSSPVGGETDETTVSQNYRGSVSQPSTPSPPKPTGIFQTSANSSFEPVKSHLVGVKPFEADRANVVGEVRETCVRQKQCRPAAALPDASPGNLEQPPDNMETLCAPQVCPLPLNSTTEAVHMLPHAGAPPLDTVYPAPEKRPSARTQGPVKCESPATTLWAQSELPDFGGNVLLAPAAPALYVCAKPQPPVVQPPEEAMSGQQSRNPSSAAPVQSRGGIGASENLENPPKMGEEEALQSQASSGYASLLSSPPTESLQNPPVLIAQPDHSYNLAQPINFSVSLSNSHEKNQSWREALVGDRPAVSSWALGGDSGENTSLSGIPTSSVLSLSLPSSVAQSNFPQGSGASEMVSNQPANLLVQPPSQPVPENLVPESQKDRKAGSALPGFANSPAGSTSVVLVPPAHGTLVPDGNKANHSSHQEDTYGALDFTLSRTLENPVNVYNPSHSDSLASQQSVASHPRQSGPGAPNLDRFYQQVTKDAQGQPGLERAQQELVPPQQQASPPQLPKAMFSELSNPESLPAQGQAQNSAQSPASLVLVDAGQQLPPRPPQSSSVSLVSSGSGQAAVPSEQPWPQPVPALAPGPPPQDLAAYYYYRPLYDAYQPQYSLPYPPEPGAASLYYQDVYSLYEPRYRPYDGAASAYAQNYRYPEPERPSSRASHSSERPPPRQGYPEGYYSSKSGWSSQSDYYASYYSSQYDYGDPGHWDRYHYSARVRDPRTYDRRYWCDAEYDAYRREHSAFGDRPEKRDNNWRYDPRFTGSFDDDPDPHRDPYGEEVDRRSVHSEHSARSLHSAHSLASRRSSLSSHSHQSQIYRSHNVAAGSYEAPLPPGSFHGDFAYGTYRSNFSSGPGFPEYGYPADTVWPAMEQVSSRPTSPEKFSVPHVCARFGPGGQLIKVIPNLPSEGQPALVEVHSMEALLQHTSEQEEMRAFPGPLAKDDTHKVDVINFAQNKAMKCLQNENLIDKESASLLWNFIVLLCRQNGTVVGTDIAELLLRDHRTVWLPGKSPNEANLIDFTNEAVEQVEEEESGEAQLSFLTGGPAAAASSLERETERFRELLLYGRKKDALESAMKNGLWGHALLLASKMDSRTHARVMTRFANSLPINDPLQTVYQLMSGRMPAASTCCGDEKWGDWRPHLAMVLSNLNNNMDVESRTMATMGDTLASRGLLDAAHFCYLMAQAGFGVYTKKTTKLVLIGSNHSLPFLKFATNEAIQRTEAYEYAQSLGAETCPLPSFQVFKFIYSCRLAEMGLATQAFHYCEAIAKSILTQPHLYSPVLISQLVQMASQLRLFDPQLKEKPEEESLAAPTWLVHLQQVERQIKEGAGVWHQDGALPQQCPGTPSSEMEQLDRPGLSQPGALGIANPLLAVPAPSPEHSSPSVRLLPSAPQTLPDGPLASPARVPMFPVPLPPGPLEPGPGCVTPGPALGFLEPSGPGLPPGVPPLQERRHLLQEARSPDPGIVPQEAPVGNSLSELSEENFDGKFANLTPSRTVPDSEAPPGWDRADSGPTQPPLSLSPAPETKRPGQAAKKETKEPKKGESWFFRWLPGKKKTEAYLPDDKNKSIVWDEKKNQWVNLNEPEEEKKAPPPPPTSMPKTVQAAPPALPGPPGAPVNMYSRRAAGTRARYVDVLNPSGTQRSEPALAPADFVAPLAPLPIPSNLFVPTPDAEEPQLPDGTGREGPAAARGLANPEPAPEPKVLSSAASLPGSELPSSRPEGSQGGEAPGDLPAAGGPPSGAMPFYNPAQLAQACATSGSSRLGRIGQRKHLVLN

SEQ ID NO: 38895 - protein, 2332 aa, Homo sapiens
MQPPPQTVPSGMAGPPPAGNPRSVFWASSPYRRRANNNAAVAPTTCPLQPVTDPFAFSRQALQSTPLGSSSKSSPPVLQGPAPAGFSQHPGLLVPHTHARDSSQGPCEPLPGPLTQPRAHASPFSGALTPSAPPGPEMNRSAEVGPSSEPEVQTLPYLPHYIPGVDPETSHGGHPHGNMPGLDRPLSRQNPHDGVVTPAASPSLPQPGLQMPGQWGPVQGGPQPSGQHRSPCPEGPVPSGVPCATSVPHFPTPSILHQGPGHEQHSPLVAPPAALPSDGRDEVSHLQSGSHLANNSDPESTFRQNPRIVNHWASPELRQNPGVKNEHRPASALVNPLARGDSPENRTHHPLGAGAGSGCAPLEADSGASGALAMFFQGGETENEENLSSEKAGLSGQADFDDFCSSPGLGRPPAPTHVGAGSLCQALLPGPSNEAAGDVWGDTASTGVPDASGSQYENVENLEFVQNQEVLPSEPLNLDPSSPSDQFRYGPLPGPAVPRHGAVCHTGAPDATLHTVHPDSVSSSYSSRSHGRLSGSARPQELVGTFIQQEVGKPEDEASGSFFKQIDSSPVGGETDETTVSQNYRGSVSQPSTPSPPKPTGIFQTSANSSFEPVKSHLVGVKPFEADRANVVGEVRETCVRQKQCRPAAALPDASPGNLEQPPDNMETLCAPQVCPLPLNSTTEAVHMLPHAGAPPLDTVYPAPEKRPSARTQGPVKCESPATTLWAQSELPDFGGNVLLAPAAPALYVCAKPQPPVVQPPEEAMSGQQSRNPSSAAPVQSRGGIGASENLENPPKMGEEEALQSQASSGYASLLSSPPTESLQNPPVLIAQPDHSYNLAQPINFSVSLSNSHEKNQSWREALVGDRPAVSSWALGGDSGENTSLSGIPTSSVLSLSLPSSVAQSNFPQGSGASEMVSNQPANLLVQPPSQPVPENLVPESQKDRKAGSALPGFANSPAGSTSVVLVPPAHGTLVPDGNKANHSSHQEDTYGALDFTLSRTLENPVNVYNPSHSDSLASQQSVASHPRQSGPGAPNLDRFYQQVTKDAQGQPGLERAQQELVPPQQQASPPQLPKAMFSELSNPESLPAQGQAQNSAQSPASLVLVDAGQQLPPRPPQSSSVSLVSSGSGQAAVPSEQPWPQPVPALAPGPPPQDLAAYYYYRPLYDAYQPQYSLPYPPEPGAASLYYQDVYSLYEPRYRPYDGAASAYAQNYRYPEPERPSSRASHSSERPPPRQGYPEGYYSSKSGWSSQSDYYASYYSSQYDYGDPGHWDRYHYSARVRDPRTYDRRYWCDAEYDAYRREHSAFGDRPEKRDNNWRYDPRFTGSFDDDPDPHRDPYGEEVDRRSVHSEHSARSLHSAHSLASRRSSLSSHSHQSQIYRSHNVAAGSYEAPLPPGSFHGDFAYGTYRSNFSSGPGFPEYGYPADTVWPAMEQVSSRPTSPEKFSVPHVCARFGPGGQLIKVIPNLPSEGQPALVEVHSMEALLQHTSEQEEMRAFPGPLAKDDTHKVDVINFAQNKAMKCLQNENLIDKESASLLWNFIVLLCRQNGTVVGTDIAELLLRDHRTVWLPGKSPNEANLIDFTNEAVEQVEEEESGEAQLSFLTGGPAAAASSLERETERFRELLLYGRKKDALESAMKNGLWGHALLLASKMDSRTHARVMTRFANSLPINDPLQTVYQLMSGRMPAASTCCGDEKWGDWRPHLAMVLSNLNNNMDVESRTMATMGDTLASRGLLDAAHFCYLMAQAGFGVYTKKTTKLVLIGSNHSLPFLKFATNEAIQRTEAYEYAQSLGAETCPLPSFQVFKFIYSCRLAEMGLATQAFHYCEAIAKSILTQPHLYSPVLISQLVQMASQLRLFDPQLKEKPEEESLAAPTWLVHLQQVERQIKEGAGVWHQDGALPQQCPGTPSSEMEQLDRPGLSQPGALGIANPLLAVPAPSPEHSSPSVRLLPSAPQTLPDGPLASPARVPMFPVPLPPGPLEPGPGCVTPGPALGFLEPSGPGLPPGVPPLQERRHLLQEARSPDPGIVPQEAPVGNSLSELSEENFDGKFANLTPSRTVPDSEAPPGWDRADSGPTQPPLSLSPAPETKRPGQAAKKETKEPKKGESWFFRWLPGKKKTEAYLPDDKNKSIVWDEKKNQWVNLNEPEEEKKAPPPPPTSMPKTVQAAPPALPGPPGAPVNMYSRRAAGTRARYVDVLNPSGTQRSEPALAPADFVAPLAPLPIPSNLFVPTPDAEEPQLPDGTGREGPAAARGLANPEPAPEPKLSRCSSMSSLSREVSQHFNQAPGDLPAAGGPPSGAMPFYNPAQLAQACATSGSSRLGRIGQRKHLVLN

SEQ ID NO: 38896 - protein, 2379 aa, Homo sapiens
MQPPPQTVPSGMAGPPPAGNPRSVFWASSPYRRRANNNAAVAPTTCPLQPVTDPFAFSRQALQSTPLGSSSKSSPPVLQGPAPAGFSQHPGLLVPHTHARDSSQGPCEPLPGPLTQPRAHASPFSGALTPSAPPGPEMNRSAEVGPSSEPEVQTLPYLPHYIPGVDPETSHGGHPHGNMPGLDRPLSRQNPHDGVVTPAASPSLPQPGLQMPGQWGPVQGGPQPSGQHRSPCPEGPVPSGVPCATSVPHFPTPSILHQGPGHEQHSPLVAPPAALPSDGRDEVSHLQSGSHLANNSDPESTFRQNPRIVNHWASPELRQNPGVKNEHRPASALVNPLARGDSPENRTHHPLGAGAGSGCAPLEADSGASGALAMFFQGGETENEENLSSEKAGLSGQADFDDFCSSPGLGRPPAPTHVGAGSLCQALLPGPSNEAAGDVWGDTASTGVPDASGSQYENVENLEFVQNQEVLPSEPLNLDPSSPSDQFRYGPLPGPAVPRHGAVCHTGAPDATLHTVHPDSVSSSYSSRSHGRLSGSARPQELVGTFIQQEVGKPEDEASGSFFKQIDSSPVGGETDETTVSQNYRGSVSQPSTPSPPKPTGIFQTSANSSFEPVKSHLVGVKPFEADRANVVGEVRETCVRQKQCRPAAALPDASPGNLEQPPDNMETLCAPQVCPLPLNSTTEAVHMLPHAGAPPLDTVYPAPEKRPSARTQGPVKCESPATTLWAQSELPDFGGNVLLAPAAPALYVCAKPQPPVVQPPEEAMSGQQSRNPSSAAPVQSRGGIGASENLENPPKMGEEEALQSQASSGYASLLSSPPTESLQNPPVLIAQPDHSYNLAQPINFSVSLSNSHEKNQSWREALVGDRPAVSSWALGGDSGENTSLSGIPTSSVLSLSLPSSVAQSNFPQGSGASEMVSNQPANLLVQPPSQPVPENLVPESQKDRKAGSALPGFANSPAGSTSVVLVPPAHGTLVPDGNKANHSSHQEDTYGALDFTLSRTLENPVNVYNPSHSDSLASQQSVASHPRQSGPGAPNLDRFYQQVTKDAQGQPGLERAQQELVPPQQQASPPQLPKAMFSELSNPESLPAQGQAQNSAQSPASLVLVDAGQQLPPRPPQSSSVSLVSSGSGQAAVPSEQPWPQPVPALAPGPPPQDLAAYYYYRPLYDAYQPQYSLPYPPEPGAASLYYQDVYSLYEPRYRPYDGAASAYAQNYRYPEPERPSSRASHSSERPPPRQGYPEGYYSSKSGWSSQSDYYASYYSSQYDYGDPGHWDRYHYSARVRDPRTYDRRYWCDAEYDAYRREHSAFGDRPEKRDNNWRYDPRFTGSFDDDPDPHRDPYGEEVDRRSVHSEHSARSLHSAHSLASRRSSLSSHSHQSQIYRSHNVAAGSYEAPLPPGSFHGDFAYGTYRSNFSSGPGFPEYGYPADTVWPAMEQVSSRPTSPEKFSVPHVCARFGPGGQLIKVIPNLPSEGQPALVEVHSMEALLQHTSEQEEMRAFPGPLAKDDTHKVDVINFAQNKAMKCLQNENLIDKESASLLWNFIVLLCRQNGTVVGTDIAELLLRDHRTVWLPGKSPNEANLIDFTNEAVEQVEEEESGEAQLSFLTGGPAAAASSLERETERFRELLLYGRKKDALESAMKNGLWGHALLLASKMDSRTHARVMTRFANSLPINDPLQTVYQLMSGRMPAASTCCGDEKWGDWRPHLAMVLSNLNNNMDVESRTMATMGDTLASRGLLDAAHFCYLMAQAGFGVYTKKTTKLVLIGSNHSLPFLKFATNEAIQRTEAYEYAQSLGAETCPLPSFQVFKFIYSCRLAEMGLATQAFHYCEAIAKSILTQPHLYSPVLISQLVQMASQLRLFDPQLKEKPEEESLAAPTWLVHLQQVERQIKEGAGVWHQDGALPQQCPGTPSSEMEQLDRPGLSQPGALGIANPLLAVPAPSPEHSSPSVRLLPSAPQTLPDGPLASPARVPMFPVPLPPGPLEPGPGCVTPGPALGFLEPSGPGLPPGVPPLQERRHLLQEARSPDPGIVPQEAPVGNSLSELSEENFDGKFANLTPSRTVPDSEAPPGWDRADSGPTQPPLSLSPAPETKRPGQAAKKETKEPKKGESWFFRWLPGKKKTEAYLPDDKNKSIVWDEKKNQWVNLNEPEEEKKAPPPPPTSMPKTVQAAPPALPGPPGAPVNMYSRRAAGTRARYVDVLNPSGTQRSEPALAPADFVAPLAPLPIPSNLFVPTPVSSVRPQGRSGRNDGLLALSSPDAEEPQLPDGTGREGPAAARGLANPEPAPEPKVLSSAASLPGSELPSSRPEGSQGGELSRCSSMSSLSREVSQHFNQAPGDLPAAGGPPSGAMPFYNPAQLAQACATSGSSRLGRIGQRKHLVLN

SEQ ID NO: 38897 - protein, 211 aa, Homo sapiens
MAVVPLLLLGGLWSAVGASSLGVVTCGSVVKLLNTRHNVRLHSHDVRYGSGSGQQSVTGVTSVDDSNSYWRIRGKSATVCERGTPIKCGQPIRLTHVNTGRNLHSHHFTSPLSGNQEVSAFGEEGEGDYLDDWTVLCNGPYWVRDGEVRFKHSSTEVLLSVTGEQYGRPISGQKEVHGMAQPSQNNYWKAMEGIFMKPSELLKAEAHHAEL

SEQ ID NO: 38898 - protein, 530 aa, Homo sapiens
MSMPDAMPLPGVGEELKQAKEIEDAEKYSFMATVTKAPKKQIQFADDMQEFTKFPTKTGRRSLSRSISQSSTDSYSSAASYTDSSDDEVSPREKQQTNSKGSSNFCVKNIKQAEFGRREIEIAEQDMSALISLRKRAQGEKPLAGAKIVGCTHITAQTAVLIETLCALGAQCRWSACNIYSTQNEVAAALAEAGVAVFAWKGESEDDFWWCIDRCVNMDGWQANMILDDGGDLTHWVYKKYPNVFKKIRGIVEESVTGVHRLYQLSKAGKLCVPAMNVNDSVTKQKFDNLYCCRESILDGLKRTTDVMFGGKQVVVCGYGEVGKGCCAALKALGAIVYITEIDPICALQACMDGFRVVKLNEVIRQVDVVITCTGNKNVVTREHLDRMKNSCIVCNMGHSNTEIDVTSLRTPELTWERVRSQVDHVIWPDGKRVVLLAEGRLLNLSCSTVPTFVLSITATTQALALIELYNAPEGRYKQDVYLLPKKMDEYVASLHLPSFDAHLTELTDDQAKYLGLNKNGPFKPNYYRY

SEQ ID NO: 38899 - protein, 483 aa, Homo sapiens
MQEFTKFPTKTGRRSLSRSISQSSTDSYSSAASYTDSSDDEVSPREKQQTNSKGSSNFCVKNIKQAEFGRREIEIAEQDMSALISLRKRAQGEKPLAGAKIVGCTHITAQTAVLIETLCALGAQCRWSACNIYSTQNEVAAALAEAGVAVFAWKGESEDDFWWCIDRCVNMDGWQANMILDDGGDLTHWVYKKYPNVFKKIRGIVEESVTGVHRLYQLSKAGKLCVPAMNVNDSVTKQKFDNLYCCRESILDGLKRTTDVMFGGKQVVVCGYGEVGKGCCAALKALGAIVYITEIDPICALQACMDGFRVVKLNEVIRQVDVVITCTGNKNVVTREHLDRMKNSCIVCNMGHSNTEIDVTSLRTPELTWERVRSQVDHVIWPDGKRVVLLAEGRLLNLSCSTVPTFVLSITATTQALALIELYNAPEGRYKQDVYLLPKKMDEYVASLHLPSFDAHLTELTDDQAKYLGLNKNGPFKPNYYRY

SEQ ID NO: 38900 - protein, 1073 aa, Homo sapiens
MRVFLLCAYILLLMVSQLRAVSFPEDDEPLNTVDYHYSRQYPVFRGRPSGNESQHRLDFQLMLKIRDTLYIAGRDQVYTVNLNEMPKTEVIPNKKLTWRSRQQDRENCAMKGKHKDECHNFIKVFVPRNDEMVFVCGTNAFNPMCRYYRLSTLEYDGEEISGLARCPFDARQTNVALFADGKLYSATVADFLASDAVIYRSMGDGSALRTIKYDSKWIKEPHFLHAIEYGNYVYFFFREIAVEHNNLGKAVYSRVARICKNDMGGSQRVLEKHWTSFLKARLNCSVPGDSFFYFDVLQSITDIIQINGIPTVVGVFTTQLNSIPGSAVCAFSMDDIEKVFKGRFKEQKTPDSVWTAVPEDKVPKPRPGCCAKHGLAEAYKTSIDFPDETLSFIKSHPLMDSAVPPIADEPWFTKTRVRYRLTAISVDHSAGPYQNYTVIFVGSEAGMVLKVLAKTSPFSLNDSVLLEEIEAYNHAKCSAENEEDKKVISLQLDKDHHALYVAFSSCIIRIPLSRCERYGSCKKSCIASRDPYCGWLSQGSCGRVTPGMLAEGYEQDTEFGNTAHLGDCHEILPTSTTPDYKIFGGPTSDMEVSSSSVTTMASIPEITPKVIDTWRPKLTSSRKFVVQDDPNTSDFTDPLSGIPKGVRWEVQSGESNQMVHMNVLITCVFAAFVLGAFIAGVAVYCYRDMFVRKNRKIHKDAESAQSCTDSSGSFAKLNGLFDSPVKEYQQNIDSPKLYSNLLTSRKELPPNGDTKSMVMDHRGQPPELAALPTPESTPVLHQKTLQAMKSHSEKAHGHGASRKETPQFFPSSPPPHSPLSHGHIPSAIVLPNATHDYNTSFSNSNAHKAEKKLQNIDHPLTKSSSKRDHRRSVDSRNTLNDLLKHLNDPNSNPKAIMGDIQMAHQNLMLDPMGSMSEVPPKVPNREASLYSPPSTLPRNSPTKRVDVPTTPGVPMTSLERQRGYHKNSSQRHSISAMPKNLNSPNGVLLSRQPSMNRGGYMPTPTGAKVDYIQGTPVSVHLQPSLSRQSSYTSNGTLPRTGLKRTPSLKPDVPPKPSFVPQTPSVRPLNKYTY

SEQ ID NO: 38901 - protein, 1011 aa, Homo sapiens
MRVFLLCAYILLLMVSQLRAVSFPEDDEPLNTVDYHYSRQYPVFRGRPSGNESQHRLDFQLMLKIRDTLYIAGRDQVYTVNLNEMPKTEVIPNKKLTWRSRQQDRENCAMKGKHKDECHNFIKVFVPRNDEMVFVCGTNAFNPMCRYYRLSTLEYDGEEISGLARCPFDARQTNVALFADGKLYSATVADFLASDAVIYRSMGDGSALRTIKYDSKWIKEPHFLHAIEYGNYVYFFFREIAVEHNNLGKAVYSRVARICKNDMGGSQRVLEKHWTSFLKARLNCSVPGDSFFYFDVLQSITDIIQINGIPTVVGVFTTQLNSIPGSAVCAFSMDDIEKVFKGRFKEQKTPDSVWTAVPEDKVPKPRPGCCAKHGLAEAYKTSIDFPDETLSFIKSHPLMDSAVPPIADEPWFTKTRVRYRLTAISVDHSAGPYQNYTVIFVGSEAGMVLKVLAKTSPFSLNDSVLLEEIEAYNHAKCSAENEEDKKVISLQLDKDHHALYVAFSSCIIRIPLSRCERYGSCKKSCIASRDPYCGWLSQGSCGRVTPGMLLLTEDFFAFHNHSAEGYEQDTEFGNTAHLGDCHGVRWEVQSGESNQMVHMNVLITCVFAAFVLGAFIAGVAVYCYRDMFVRKNRKIHKDAESAQSCTDSSGSFAKLNGLFDSPVKEYQQNIDSPKLYSNLLTSRKELPPNGDTKSMVMDHRGQPPELAALPTPESTPVLHQKTLQAMKSHSEKAHGHGASRKETPQFFPSSPPPHSPLSHGHIPSAIVLPNATHDYNTSFSNSNAHKAEKKLQNIDHPLTKSSSKRDHRRSVDSRNTLNDLLKHLNDPNSNPKAIMGDIQMAHQNLMLDPMGSMSEVPPKVPNREASLYSPPSTLPRNSPTKRVDVPTTPGVPMTSLERQRGYHKNSSQRHSISAMPKNLNSPNGVLLSRQPSMNRGGYMPTPTGAKVDYIQGTPVSVHLQPSLSRQSSYTSNGTLPRTGLKRTPSLKPDVPPKPSFVPQTPSVRPLNKYTY

SEQ ID NO: 38902 - protein, 998 aa, Homo sapiens
MRVFLLCAYILLLMVSQLRAVSFPEDDEPLNTVDYHYSRQYPVFRGRPSGNESQHRLDFQLMLKIRDTLYIAGRDQVYTVNLNEMPKTEVIPNKKLTWRSRQQDRENCAMKGKHKDECHNFIKVFVPRNDEMVFVCGTNAFNPMCRYYRLSTLEYDGEEISGLARCPFDARQTNVALFADGKLYSATVADFLASDAVIYRSMGDGSALRTIKYDSKWIKEPHFLHAIEYGNYVYFFFREIAVEHNNLGKAVYSRVARICKNDMGGSQRVLEKHWTSFLKARLNCSVPGDSFFYFDVLQSITDIIQINGIPTVVGVFTTQLNSIPGSAVCAFSMDDIEKVFKGRFKEQKTPDSVWTAVPEDKVPKPRPGCCAKHGLAEAYKTSIDFPDETLSFIKSHPLMDSAVPPIADEPWFTKTRVRYRLTAISVDHSAGPYQNYTVIFVGSEAGMVLKVLAKTSPFSLNDSVLLEEIEAYNHAKCSAENEEDKKVISLQLDKDHHALYVAFSSCIIRIPLSRCERYGSCKKSCIASRDPYCGWLSQGSCGRVTPGMLAEGYEQDTEFGNTAHLGDCHGVRWEVQSGESNQMVHMNVLITCVFAAFVLGAFIAGVAVYCYRDMFVRKNRKIHKDAESAQSCTDSSGSFAKLNGLFDSPVKEYQQNIDSPKLYSNLLTSRKELPPNGDTKSMVMDHRGQPPELAALPTPESTPVLHQKTLQAMKSHSEKAHGHGASRKETPQFFPSSPPPHSPLSHGHIPSAIVLPNATHDYNTSFSNSNAHKAEKKLQNIDHPLTKSSSKRDHRRSVDSRNTLNDLLKHLNDPNSNPKAIMGDIQMAHQNLMLDPMGSMSEVPPKVPNREASLYSPPSTLPRNSPTKRVDVPTTPGVPMTSLERQRGYHKNSSQRHSISAMPKNLNSPNGVLLSRQPSMNRGGYMPTPTGAKVDYIQGTPVSVHLQPSLSRQSSYTSNGTLPRTGLKRTPSLKPDVPPKPSFVPQTPSVRPLNKYTY

SEQ ID NO: 38903 - protein, 1017 aa, Homo sapiens
MRVFLLCAYILLLMVSQLRAVSFPEDDEPLNTVDYHYSRQYPVFRGRPSGNESQHRLDFQLMLKIRDTLYIAGRDQVYTVNLNEMPKTEVIPNKKLTWRSRQQDRENCAMKGKHKDECHNFIKVFVPRNDEMVFVCGTNAFNPMCRYYRLSTLEYDGEEISGLARCPFDARQTNVALFADGKLYSATVADFLASDAVIYRSMGDGSALRTIKYDSKWIKEPHFLHAIEYGNYVYFFFREIAVEHNNLGKAVYSRVARICKNDMGGSQRVLEKHWTSFLKARLNCSVPGDSFFYFDVLQSITDIIQINGIPTVVGVFTTQLNSIPGSAVCAFSMDDIEKVFKGRFKEQKTPDSVWTAVPEDKVPKPRPGCCAKHGLAEAYKTSIDFPDETLSFIKSHPLMDSAVPPIADEPWFTKTRVRYRLTAISVDHSAGPYQNYTVIFVGSEAGMVLKVLAKTSPFSLNDSVLLEEIEAYNHAKCSAENEEDKKVISLQLDKDHHALYVAFSSCIIRIPLSRCERYGSCKKSCIASRDPYCGWLSQGSCGRVTPGMLAEGYEQDTEFGNTAHLGDCHEILPTSTTPDYKIFGGPTSGVRWEVQSGESNQMVHMNVLITCVFAAFVLGAFIAGVAVYCYRDMFVRKNRKIHKDAESAQSCTDSSGSFAKLNGLFDSPVKEYQQNIDSPKLYSNLLTSRKELPPNGDTKSMVMDHRGQPPELAALPTPESTPVLHQKTLQAMKSHSEKAHGHGASRKETPQFFPSSPPPHSPLSHGHIPSAIVLPNATHDYNTSFSNSNAHKAEKKLQNIDHPLTKSSSKRDHRRSVDSRNTLNDLLKHLNDPNSNPKAIMGDIQMAHQNLMLDPMGSMSEVPPKVPNREASLYSPPSTLPRNSPTKRVDVPTTPGVPMTSLERQRGYHKNSSQRHSISAMPKNLNSPNGVLLSRQPSMNRGGYMPTPTGAKVDYIQGTPVSVHLQPSLSRQSSYTSNGTLPRTGLKRTPSLKPDVPPKPSFVPQTPSVRPLNKYTY

SEQ ID NO: 38904 - protein, 1030 aa, Homo sapiens
MRVFLLCAYILLLMVSQLRAVSFPEDDEPLNTVDYHYSRQYPVFRGRPSGNESQHRLDFQLMLKIRDTLYIAGRDQVYTVNLNEMPKTEVIPNKKLTWRSRQQDRENCAMKGKHKDECHNFIKVFVPRNDEMVFVCGTNAFNPMCRYYRLSTLEYDGEEISGLARCPFDARQTNVALFADGKLYSATVADFLASDAVIYRSMGDGSALRTIKYDSKWIKEPHFLHAIEYGNYVYFFFREIAVEHNNLGKAVYSRVARICKNDMGGSQRVLEKHWTSFLKARLNCSVPGDSFFYFDVLQSITDIIQINGIPTVVGVFTTQLNSIPGSAVCAFSMDDIEKVFKGRFKEQKTPDSVWTAVPEDKVPKPRPGCCAKHGLAEAYKTSIDFPDETLSFIKSHPLMDSAVPPIADEPWFTKTRVRYRLTAISVDHSAGPYQNYTVIFVGSEAGMVLKVLAKTSPFSLNDSVLLEEIEAYNHAKCSAENEEDKKVISLQLDKDHHALYVAFSSCIIRIPLSRCERYGSCKKSCIASRDPYCGWLSQGSCGRVTPGMLLLTEDFFAFHNHSAEGYEQDTEFGNTAHLGDCHEILPTSTTPDYKIFGGPTSGVRWEVQSGESNQMVHMNVLITCVFAAFVLGAFIAGVAVYCYRDMFVRKNRKIHKDAESAQSCTDSSGSFAKLNGLFDSPVKEYQQNIDSPKLYSNLLTSRKELPPNGDTKSMVMDHRGQPPELAALPTPESTPVLHQKTLQAMKSHSEKAHGHGASRKETPQFFPSSPPPHSPLSHGHIPSAIVLPNATHDYNTSFSNSNAHKAEKKLQNIDHPLTKSSSKRDHRRSVDSRNTLNDLLKHLNDPNSNPKAIMGDIQMAHQNLMLDPMGSMSEVPPKVPNREASLYSPPSTLPRNSPTKRVDVPTTPGVPMTSLERQRGYHKNSSQRHSISAMPKNLNSPNGVLLSRQPSMNRGGYMPTPTGAKVDYIQGTPVSVHLQPSLSRQSSYTSNGTLPRTGLKRTPSLKPDVPPKPSFVPQTPSVRPLNKYTY

SEQ ID NO: 38905 - protein, 1054 aa, Homo sapiens
MRVFLLCAYILLLMVSQLRAVSFPEDDEPLNTVDYHYSRQYPVFRGRPSGNESQHRLDFQLMLKIRDTLYIAGRDQVYTVNLNEMPKTEVIPNKKLTWRSRQQDRENCAMKGKHKDECHNFIKVFVPRNDEMVFVCGTNAFNPMCRYYRLSTLEYDGEEISGLARCPFDARQTNVALFADGKLYSATVADFLASDAVIYRSMGDGSALRTIKYDSKWIKEPHFLHAIEYGNYVYFFFREIAVEHNNLGKAVYSRVARICKNDMGGSQRVLEKHWTSFLKARLNCSVPGDSFFYFDVLQSITDIIQINGIPTVVGVFTTQLNSIPGSAVCAFSMDDIEKVFKGRFKEQKTPDSVWTAVPEDKVPKPRPGCCAKHGLAEAYKTSIDFPDETLSFIKSHPLMDSAVPPIADEPWFTKTRVRYRLTAISVDHSAGPYQNYTVIFVGSEAGMVLKVLAKTSPFSLNDSVLLEEIEAYNHAKCSAENEEDKKVISLQLDKDHHALYVAFSSCIIRIPLSRCERYGSCKKSCIASRDPYCGWLSQGSCGRVTPGMLAEGYEQDTEFGNTAHLGDCHDMEVSSSSVTTMASIPEITPKVIDTWRPKLTSSRKFVVQDDPNTSDFTDPLSGIPKGVRWEVQSGESNQMVHMNVLITCVFAAFVLGAFIAGVAVYCYRDMFVRKNRKIHKDAESAQSCTDSSGSFAKLNGLFDSPVKEYQQNIDSPKLYSNLLTSRKELPPNGDTKSMVMDHRGQPPELAALPTPESTPVLHQKTLQAMKSHSEKAHGHGASRKETPQFFPSSPPPHSPLSHGHIPSAIVLPNATHDYNTSFSNSNAHKAEKKLQNIDHPLTKSSSKRDHRRSVDSRNTLNDLLKHLNDPNSNPKAIMGDIQMAHQNLMLDPMGSMSEVPPKVPNREASLYSPPSTLPRNSPTKRVDVPTTPGVPMTSLERQRGYHKNSSQRHSISAMPKNLNSPNGVLLSRQPSMNRGGYMPTPTGAKVDYIQGTPVSVHLQPSLSRQSSYTSNGTLPRTGLKRTPSLKPDVPPKPSFVPQTPSVRPLNKYTY

SEQ ID NO: 38906 - protein, 476 aa, Homo sapiens
MRVFLLCAYILLLMVSQLRAVSFPEDDEPLNTVDYHYSRQYPVFRGRPSGNESQHRLDFQLMLKIRDTLYIAGRDQVYTVNLNEMPKTEVIPNKKLTWRSRQQDRENCAMKGKHKDECHNFIKVFVPRNDEMVFVCGTNAFNPMCRYYRLSTLEYDGEEISGLARCPFDARQTNVALFADGKLYSATVADFLASDAVIYRSMGDGSALRTIKYDSKWIKEPHFLHAIEYGNYVYFFFREIAVEHNNLGKAVYSRVARICKNDMGGSQRVLEKHWTSFLKARLNCSVPGDSFFYFDVLQSITDIIQINGIPTVVGVFTTQLNSIPGSAVCAFSMDDIEKVFKGRFKEQKTPDSVWTAVPEDKVPKPRPGCCAKHGLAEAYKTSIDFPDETLSFIKSHPLMDSAVPPIADEPWFTKTRVRYRLTAISVDHSAGPYQNYTVIFVGSEAGMVLKVLAKTSPFSLNDSVLLEEIEAYNHAK

SEQ ID NO: 38907 - protein, 597 aa, Homo sapiens
MRVFLLCAYILLLMVSQLRAVSFPEDDEPLNTVDYHYSRQYPVFRGRPSGNESQHRLDFQLMLKIRDTLYIAGRDQVYTVNLNEMPKTEVIPNKKLTWRSRQQDRENCAMKGKHKDECHNFIKVFVPRNDEMVFVCGTNAFNPMCRYYRLSTLEYDGEEISGLARCPFDARQTNVALFADGKLYSATVADFLASDAVIYRSMGDGSALRTIKYDSKWIKEPHFLHAIEYGNYVYFFFREIAVEHNNLGKAVYSRVARICKNDMGGSQRVLEKHWTSFLKARLNCSVPGDSFFYFDVLQSITDIIQINGIPTVVGVFTTQLNSIPGSAVCAFSMDDIEKVFKGRFKEQKTPDSVWTAVPEDKVPKPRPGCCAKHGLAEAYKTSIDFPDETLSFIKSHPLMDSAVPPIADEPWFTKTRVRYRLTAISVDHSAGPYQNYTVIFVGSEAGMVLKVLAKTSPFSLNDSVLLEEIEAYNHAKCSAENEEDKKVISLQLDKDHHALYVAFSSCIIRIPLSRCERYGSCKKSCIASRDPYCGWLSQGSCGRVTPGMLAEGYEQDTEFGNTAHLGDCHDMEVSSSSVTTMVYDGKSSLESPTRWST

SEQ ID NO: 38908 - protein, 476 aa, Homo sapiens
MSTQRLRNEDYHDYSSTDVSPEESPSEGLNNLSSPGSYQRFGQSNSTTWFQTLIHLLKGNIGTGLLGLPLAVKNAGIVMGPISLLIIGIVAVHCMGILVKCAHHFCRRLNKSFVDYGDTVMYGLESSPCSWLRNHAHWGRRVVDFFLIVTQLGFCCVYFVFLADNFKQVIEAANGTTNNCHNNETVILTPTMDSRLYMLSFLPFLVLLVFIRNLRALSIFSLLANITMLVSLVMIYQFIVQRIPDPSHLPLVAPWKTYPLFFGTAIFSFEGIGMVLPLENKMKDPRKFPLILYLGMVIVTILYISLGCLGYLQFGANIQGSITLNLPNCWLYQSVKLLYSIGIFFTYALQFYVPAEIIIPFFVSRAPEHCELVVDLFVRTVLVCLTCILAILIPRLDLVISLVGSVSSSALALIIPPLLEVTTFYSEGMSPLTIFKDALISILGFVGFVVGTYEALYELIQPSNAPIFINSTCAFI

SEQ ID NO: 38909 - protein, 386 aa, Homo sapiens
MSTQRLRNEDYHDYSSTDVSPEESPSEGLNNLSSPGSYQRFGQSNSTTWFQTLIHLLKGNIGTGLLGLPLAVKNAGIVMGPISLLIIGIVAVHCMGILVKCAHHFCRRLNKSFVDYGDTVMYGLESSPCSWLRNHAHWGRRVVDFFLIVTQLGFCCVYFVFLADNFKQVIEAANGTTNNCHNNETVILTPTMDSRLYMLSFLPFLVLLVFIRNLRALSIFSLLANITMLVSLVMIYQFIVQRIPDPSHLPLVAPWKTYPLFFGTAIFSFEGIGMVLPLENKMKDPRKFPLILYLGMVIVTILYISLGCLGYLQFGANIQGSITLNLPNCWLYQSVKLLYSIGIFFTYALQFYVPAEIIIPFFVSRAPEHCELVVDLFVRTVLVCLT

SEQ ID NO: 38910 - protein, 243 aa, Homo sapiens
MSTQRLRNEDYHDYSSTDVSPEESPSEGLNNLSSPGSYQRFGQSNSTTWFQTLIHLLKGNIGTGLLGLPLAVKNAGIVMGPISLLIIGIVAVHCMGILVKCAHHFCRRLNKSFVDYGDTVMYGLESSPCSWLRNHAHWGRRVVDFFLIVTQLGFCCVYFVFLADNFKQVIEAANGTTNNCHNNETVILTPTMDSRLYMLSFLPFLVLLVFIRNLRALSIFSLLANITMLVSLVMIYQFIVQIL

SEQ ID NO: 38911 - protein, 561 aa, Homo sapiens
MANMNSDSRHLGTSEVDHERDPGPMNIQFEPSDLRSKRPFCIEPTNIVNVNHVIQRVSDHASAMNKRIHYYSRLTTPADKALIAPDHVVPAPEECYVYSPLGSAYKLQSYTEGYGKNTSLVTIFMIWNTMMGTSILSIPWGIKQAGFTTGMCVIILMGLLTLYCCYRVVKSRTMMFSLDTTSWEYPDVCRHYFGSFGQWSSLLFSLVSLIGAMIVYWVLMSNFLFNTGKFIFNFIHHINDTDTILSTNNSNPVICPSAGSGGHPDNSSMIFYANDTGAQQFEKWWDKSRTVPFYLVGLLLPLLNFKSPSFFSKFNILGTVSVLYLIFLVTFKAVRLGFHLEFHWFIPTEFFVPEIRFQFPQLTGVLTLAFFIHNCIITLLKNNKKQENNVRDLCIAYMLVTLTYLYIGVLVFASFPSPPLSKDCIEQNFLDNFPSSDTLSFIARIFLLFQMMTVYPLLGYLARVQLLGHIFGDIYPSIFHVLILNLIIVGAGVIMACFYPNIGGIIRYSGAACGLAFVFIYPSLIYIISLHQEERLTWPKLIFHVFIIILGVANLIVQFFM

SEQ ID NO: 38912 - protein, 462 aa, Homo sapiens
MANMNSDSRHLGTSEVDHERDPGPMNIQFEPSDLRSKRPFCIEPTNIVNVNHVIQRVSDHASAMNKRIHYYSRLTTPADKALIAPDHVVPAPEECYVYSPLGSAYKLQSYTEGYGKNTSLVTIFMIWNTMMGTSILSIPWGIKQAGFTTGMCVIILMGLLTLYCCYRVVKSRTMMFSLDTTSWEYPDVCRHYFGSFGQWSSLLFSLVSLIGAMIVYWVLMSNFLFNTGKFIFNFIHHINDTDTILSTNNSNPVICPSAGSGGHPDNSSMIFYANDTGAQQFEKWWDKSRTVPFYLVGLLLPLLNFKSPSFFSKFNILGTVSVLYLIFLVTFKAVRLGFHLEFHWFIPTEFFVPEIRFQFPQLTGVLTLAFFIHNCIITLLKNNKKQENNVRDLCIAYMLVTLTYLYIGVLVFASFPSPPLSKDCIEQVRHRVPSLCDCVHFHVFIVGRVIQWQDITSDRPGF

SEQ ID NO: 38913 - protein, 498 aa, Homo sapiens
MAICILTWRIRPFCIEPTNIVNVNHVIQRVSDHASAMNKRIHYYSRLTTPADKALIAPDHVVPAPEECYVYSPLGSAYKLQSYTEGYGKNTSLVTIFMIWNTMMGTSILSIPWGIKQAGFTTGMCVIILMGLLTLYCCYRVVKSRTMMFSLDTTSWEYPDVCRHYFGSFGQWSSLLFSLVSLIGAMIVYWVLMSNFLFNTGKFIFNFIHHINDTDTILSTNNSNPVICPSAGSGGHPDNSSMIFYANDTGAQQFEKWWDKSRTVPFYLVGLLLPLLNFKSPSFFSKFNILEIRFQFPQLTGVLTLAFFIHNCIITLLKNNKKQENNVRDLCIAYMLVTLTYLYIGVLVFASFPSPPLSKDCIEQNFLDNFPSSDTLSFIARIFLLFQMMTVYPLLGYLARVQLLGHIFGDIYPSIFHVLILNLIIVGAGVIMACFYPNIGGIIRYSGAACGLAFVFIYPSLIYIISLHQEERLTWPKLIFHVFIIILGVANLIVQFFM

SEQ ID NO: 38914 - protein, 498 aa, Homo sapiens
MNKRIHYYSRLTTPADKALIAPDHVVPAPEECYVYSPLGSAYKLQSYTEGYGKNTSLVTIFMIWNTMMGTSILSIPWGIKQAGFTTGMCVIILMGLLTLYCCYRVVKSRTMMFSLDTTSWEYPDVCRHYFGSFGQWSSLLFSLVSLIGAMIVYWVLMSNFLFNTGKFIFNFIHHINDTDTILSTNNSNPVICPSAGSGGHPDNSSMIFYANDTGAQQFEKWWDKSRTVPFYLVGLLLPLLNFKSPSFFSKFNILGTVSVLYLIFLVTFKAVRLGFHLEFHWFIPTEFFVPEIRFQFPQLTGVLTLAFFIHNCIITLLKNNKKQENNVRDLCIAYMLVTLTYLYIGVLVFASFPSPPLSKDCIEQNFLDNFPSSDTLSFIARIFLLFQMMTVYPLLGYLARVQLLGHIFGDIYPSIFHVLILNLIIVGAGVIMACFYPNIGGIIRYSGAACGLAFVFIYPSLIYIISLHQEERLTWPKLIFHVFIIILGVANLIVQFFM

SEQ ID NO: 38915 - protein, 669 aa, Homo sapiens
  MOD_RES (667)..(667): Selenocysteine
MAVYRAALGASLAAARLLPLGRCSPSPAPRSTLSGAAMEPAPRWLAGLRFDNRALRALPVEAPPPGPEGAPSAPRPVPGACFTRVQPTPLRQPRLVALSEPALALLGLGAPPAREAEAEAALFFSGNALLPGAEPAAHCYCGHQFGQFAGQLGDGAAMYLGEVCTATGERWELQLKGAGPTPFSRQADGRKVLRSSIREFLCSEAMFHLGVPTTRAGACVTSESTVVRDVFYDGNPKYEQCTVVLRVASTFIRFGSFEIFKSADEHTGRAGPSVGRNDIRVQLLDYVISSFYPEIQAAHASDSVQRNAAFFREVTRRTARMVAEWQCVGFCHGVLNTDNMSILGLTIDYGPFGFLDRYDPDHVCNASDNTGRYAYSKQPEVCRWNLRKLAEALQPELPLELGEAILAEEFDAEFQRHYLQKMRRKLGLVQVELEEDGALVSKLLETMHLTGADFTNTFYLLSSFPVELESPGLAEFLARLMEQCASLEELRLAFRPQMDPRQLSMMLMLAQSNPQLFALMGTRAGIARELERVEQQSRLEQLSAAELQSRNQGHWADWLQAYRARLDKDLEGAGDAAAWQAEHVRVMHANNPKYVLRNYIAQNAIEAAERGDFSEVRRVLKLLETPYHCEAGAATDAEATEADGADGRQRSYSSKPPLWAAELCVTXSS

SEQ ID NO: 38916 - protein, 549 aa, Homo sapiens; identical to SEQ ID NO: 35846

SEQ ID NO: 38917 - protein, 291 aa, Homo sapiens
MDVVEVAGSWWAQEREDIIMKYEKGHRAGLPEDKGPKPFRSYNNNVDHLGIVHETELPPLTAREAKQIRREISRKSKWVDMLGDWEKYKSSRKLIDRAYKGMPMNIRGPMWSVLLNTEEMKLKNPGRYQIMKEKGKRSSEHIQRIDRDVSGTLRKHIFFRDRYGTKQRELLHILLAYEEYNPEVGYCRDLSHIAALFLLYLPEEDAFWALVQLLASERHSLQGFHSPNGGTVQGLQDQQEHVVATSQPKTMGHQSASRRRPGVARGHVFATGSLIPGPGMRTLCSSILGPL

SEQ ID NO: 38918 - protein, 62 aa, Homo sapiens
MDQLVFKETIWNDAFWQNPWDQGGLAVIILFITAVLLLILFAIVFGLLTSTENTQCEAGEEE

SEQ ID NO: 38919 - protein, 454 aa, Homo sapiens
MLKQILSEMYIDPDLLAELSEEQKQILFFKMREEQIRRWKEREAAMERKESLPVKPRPKKENGKSVHWKLGADKEVWVWVMGEHHLDKPYDVLCNEIIAERARLKAEQEAEEPRKTHSEEFTNSLKTKSQYHDLQAPDNQQTKDIWKKVAEKEELEQGSRPAPTLEEEKIRSLSSSSRNIQQMLADSINRMKAYAFHQKKESMKKKQDEEINQIEEERTKQICKSWKEDSEWQASLRKSKAADEKRRSLAKQAREDYKRLSLGAQKGRGGERLQSPLRVPQKPERPPLPPKPQFLNSGAYPQKPLRNQGVVRTLSSSAQEDIIRWFKEEQLPLRAGYQKTSDTIAPWFHGILTLKKANELLLSTGMPGSFLIRVSERIKGYALSYLSEDGCKHFLIDASADAYSFLGVDQLQHATLADLVEYHKEEPITSLGKELLLYPCGQQDQLPDYLELFE

SEQ ID NO: 38920 - protein, 409 aa, Homo sapiens
MWRVIEPPCPGAPSTENGKSVHWKLGADKEVWVWVMGEHHLDKPYDVLCNEIIAERARLKAEQEAEEPRKTHSEEFTNSLKTKSQYHDLQAPDNQQTKDIWKKVAEKEELEQGSRPAPTLEEEKIRSLSSSSRNIQQMLADSINRMKAYAFHQKKESMKKKQDEEINQIEEERTKQICKSWKEDSEWQASLRKSKAADEKRRSLAKQAREDYKRLSLGAQKGRGGERLQSPLRVPQKPERPPLPPKPQFLNSGAYPQKPLRNQGVVRTLSSSAQEDIIRWFKEEQLPLRAGYQKTSDTIAPWFHGILTLKKANELLLSTGMPGSFLIRVSERIKGYALSYLSEDGCKHFLIDASADAYSFLGVDQLQHATLADLVEYHKEEPITSLGKELLLYPCGQQDQLPDYLELFE

SEQ ID NO: 38921 - protein, 2005 aa, Homo sapiens
MAAADGGGPGGASVGTEEDGGGVGHRTVYLFDRREKESELGDRPLQVGERSDYAGFRACVCQTLGISPEEKFVITTTSRKEITCDNFDETVKDGVTLYLLQSVNQLLLTATKERIDFLPHYDTLVKSGMYEYYASEGQNPLPFALAELIDNSLSATSRNIGVRRIQIKLLFDETQGKPAVAVIDNGRGMTSKQLNNWAVYRLSKFTRQGDFESDHSGYVRPVPVPRSLNSDISYFGVGGKQAVFFVGQSARMISKPADSQDVHELVLSKEDFEKKEKNKEAIYSGYIRNRKPSDSVHITNDDERFLHHLIIEEKEKDSFTAVVITGVQPEHIQYLKNYFHLWTRQLAHIYHYYIHGPKGNEIRTSKEVEPFNNIDIEISMFEKGKVPKIVNLREIQDDMQTLYVNTAADSFEFKAHVEGDGVVEGIIRYHPFLYDRETYPDDPCFPSKLKDEDDEDDCFILEKAARGKRPIFECFWNGRLIPYTSVEDFDWCTPPKKRGLAPIECYNRISGALFTNDKFQVSTNKLTFMDLELKLKDKNTLFTRILNGQEQRMKIDREFALWLKDCHEKYDKQIKFTLFKGVITRPDLPSKKQGPWATYAAIEWDGKIYKAGQLVKTIKTLPLFYGSIVRFFLYGDHDGEVYATGGEVQIAMEPQALYDEVRTVPIAKLDRTVAEKAVKKYVEDEMARLPDRLSVTWPEGDELLPNEVRPAGTPIGALRIEILNKKGEAMQKLPGTSHGGSKKLLVELKVILHSSSGNKEIISHISQHGGKWPYWFKKMENIQKLGNYTLKLQVVLNESNADTYAGRPLPSKAIKFSVKEGKPEKFSFGLLDLPFRVGVPFNIPLEFQDEFGHTSQLVTDIQPVLEASGLSLHYEEITKGPNCVIRGVTAKGPVNSCQGKNYNLKVTLPGLKEDSQILKIRLLPGHPRRLKVKPDSEILVIENGTAFPFQVEVLDESDNITAQPKLIVHCKFSGAPNLPVYVVDCSSSGTSILTGSAIQVQNIKKDQTLKARIEIPSCKDVAPVEKTIKLLPSSHVARLQIFSVEGQKAIQIKHQDEVNWIAGDIMHNLIFQMYDEGEREINITSALAEKIKVNWTPEINKEHLLQGLLPDVQVPTSVKDMRYCQVSFQDDHVSLESAFTVRPLPDEPKHLKCEMKGGKTVQMGQELQGEVVIIITDQYGNQIQAFSPSSLSSLSIAGVGLDSSNLKTTFQENTQSISVRGIKFIPGPPGNKDLCFTWREFSDFIRVQLISGPPAKLLLIDWPELKESIPVINGRDLQNPIIVQLCDQWDNPAPVQHVKISLTKASNLKLMPSNQQHKTDEKGRANLGVFSVFAPRGEHTLQVKAIYNKSIIEGPIIKLMILPDPEKPVRLNVKYDKDASFLAGGLFTDFMISVISEDDSIIKNINPARISMKMWKLSTSGNRPPANAETFSCNKIKDNDKEDGCFYFRDKVIPNKVGTYCIQFGFMMDKTNILNSEQVIVEVLPNQPVKLVPKIKPPTPAVSNVRSVASRTLVRDLHLSITDDYDNHTGIDLVGTIIATIKGSNEEDTDTPLFIGKVRTLEFPFVNGSAEIMSLVLAESSPGRDSTEYFIVFEPRLPLLSRTLEPYILPFMFYNDVKKQQQMAALTKEKDQLSQSIVMYKSLFEASQQLLNEMKCQVEEARLKEAQLRNELKIHNIDIPTTQQVPHIEALLKRKLSEQEELKKKPRRSCTLPNYTKGSGDVLGKIAHLAQIEDDRAAMVISWHLASDMDCVVTLTTDAARRIYDETQGRQQVLPLDSIYKKTLPDWKRSLPHFRNGKLYFKPIGDPVFARDLLTFPDNVEHCETVFGMLLGDTIILDNLDAANHYRKEVVKITHCPTLLTRDGDRIRSNGKFGGLQNKAPPMDKLRGMVFGAPVPKQCLILGEQIDLLQQYRSAVCKLDSVNKDLNSQLEYLRTPDMRKKKQELDEHEKNLKLIEEKLGMTPIRKCNDSLRHSPKVETTDCPVPPKRMRREATRQNRIITKTDV

SEQ ID NO: 38922 - protein, 1917 aa, Homo sapiens
MAAADGGGPGGASVGTEEDGGGVGHRTVYLFDRREKESELGDRPLQVGERSDYAGFRACVCQTLGISPEEKFVITTTSRKEITCDNFDETVKDGVTLYLLQSVNQLLLTATKERIDFLPHYDTLVKSGMYEYYASEGQNPLPFALAELIDNSLSATSRNIGVRRIQIKLLFDETQGKPAVAVIDNGRGMTSKQLNNWAVYRLSKFTRQGDFESDHSGYVRPVPVPRSLNSDISYFGVGGKQAVFFVGQSARMISKPADSQDVHELVLSKEDFEKKEKNKEAIYSGYIRNRKPSDSVHITNDDERFLHHLIIEEKEKDSFTAVVITGVQPEHIQYLKNYFHLWTRQLAHIYHYYIHGPKGNEIRTSKEVEPFNNIDIEISMFEKGKVPKIVNLREIQDDMQTLYVNTAADSFEFKAHVEGDGVVEGIIRYHPFLYDRETYPDDPCFPSKLKDEDDEDDCFILEKAARGKRPIFECFWNGRLIPYTSVEDFDWCTPPKKRGLAPIECYNRISGALFTNDKFQVSTNKLTFMDLELKLKDKNTLFTRILNGQEQRMKIDREFALWLKDCHEKYDKQIKFTLFKGVITRPDLPSKKQGPWATYAAIEWDGKIYKAGQLVKTIKTLPLFYGSIVRFFLYGDHDGEVYATGGEVQIAMEPQALYDEVRTVPIAKLDRTVAEKAVKKYVEDEMARLPDRLSVTWPEGDELLPNEVRPAGTPIGALRIEILNKKGEAMQKLPGTSHGGSKKLLVELKVILHSSSGNKEIISHISQHGGKWPYWFKKMENIQKLGNYTLKLQVVLNESNADTYAGRPLPSKAIKFSVKEGKPEKFSFGLLDLPFRVGVPFNIPLEFQDEFGHTSQLVTDIQPVLEASGLSLHYEEITKGPNCVIRGVTAKGPVNSCQGKNYNLKVTLPGLKEDSQILKIRLLPGHPRRLKVKPDSEILVIENGTAFPFQVEVLDESDNITAQPKLIVHCKFSGAPNLPVYVVDCSSSGTSILTGSAIQVQNIKKDQTLKARIEIPSCKDVAPVEKTIKLLPSSHVARLQIFSVEGQKAIQIKHQDEVNWIAGDIMHNLIFQMYDEGEREINITSALAEKIKVNWTPEINKEHLLQGLLPDVQVPTSVKDMRYCQVSFQDDHVSLESAFTVRPLPDEPKHLKCEMKGGKTVQMGQELQGEVVIIITDQYGNQIQAFSPSSLSSLSIAGVGLDSSNLKTTFQENTQSISVRGIKFIPGPPGNKDLCFTWREFSDFIRVQLISGPPAKLLLIDWPELKESIPVINGRDLQNPIIVQLCDQWDNPAPVQHVKISLTKASNLKLMPSNQQHKTDEKGRANLGVFSVFAPRGEHTLQVKAIYNKSIIEGPIIKLMILPDPEKPVRLNVKYDKDASFLAGGLFTDFMISVISEDDSIIKNINPARISMKMWKLSTSGNRPPANAETFSCNKIKDNDKEDGCFYFRDKVIPNKVGTYCIQFGFMMDKTNILNSEQVIVEVLPNQPVKLVPKIKPPTPAVSNVRSVASRTLVRDLHLSITDDYDNHTGIDLVGTIIATIKGSNEEDTDTPLFIGKVRTLEFPFVNGSAEIMSLVLAESSPGRDSTEYFIVFEPRLPLLSRTLEPYILPFMFYNDVKKQQQMAALTKEKDQLSQSIVMYKSLFEASQQLLNEMKCQVEEARLKEAQLRNELKIHNIDIPTTQQVPHIEALLKRKLSEQEELKKKPRRSCTLPNYTKGSGDVLGKIAHLAQIEDDRAAMVISWHLASDMDCVVTLTTDAARRIYDETQGRQQVLPLDSIYKKTLPDWKRSLPHFRNGKLYFKPIGDPVFARDLLTFPDNVEHCETVFGMLLGDTIILDNLDAANHYRKEVVKITHCPTLLTRDGDRIRSNGKFGGLQNKAPPMDKLRGMVFGAPVPKQCLILGEQIVHACVPSYSGG

SEQ ID NO: 38923 - protein, 762 aa, Homo sapiens
MHNLIFQMYDEGEREINITSALAEKIKVNWTPEINKEHLLQGLLPDVQVPTSVKDMRYCQVSFQDDHVSLESAFTVRPLPDEPKHLKCEMKGGKTVQMGQELQGEVVIIITDQYGNQIQAFSPSSLSSLSIAGVGLDSSNLKTTFQENTQSISVRGIKFIPGPPGNKDLCFTWREFSDFIRVQLISGPPAKLLLIDWPELKESIPVINGRDLQNPIIVQLCDQWDNPAPVQHVKISLTKASNLKLMPSNQQHKTDEKGRANLGVFSVFAPRGEHTLQVKAIYNKSIIEGPIIKLMILPDPEKPVRLNVKYDKDASFLAGGLFTDFMISVISEDDSIIKNINPARISMKMWKLSTSGNRPPANAETFSCNKIKDNDKEDGCFYFRDKVIPNKVGTYCIQFGFMMDKTNILNSEQVIVEVLPNQPVKLVPKIKPPTPAVSNVRSVASRTLVRDLHLSITDDYDNHTGIDLVGTIIATIKGSNEEDTDTPLFIGKVRTLEFPFVNGSAEIMSLVLAESSPGRDSTEYFIVFEPRLPLLSRTLEPYILPFMFYNDVKKQQQMAALTKEKDQLSQSIVMYKSLFEASQQLLNEMKCQVEEARLKEAQLRNELKIHNIDIPTTQQVPHIEALLKRKLSEQEELKKKPRRSCTLPNYTKGSGDVLGKIAHLAQIEDDRAAMVISWHLASDMDCVVTLTTDAARRIYDETQGRQQVLPLDSIYKKTLPDWKRSLPHFRNGKLYFKPIGDPVFARDLLTFPDNVEHCETGC

SEQ ID NO: 38924 - protein, 65 aa, Homo sapiens
MPAKGKKGKGQGKSHGKKQKKPEVDILSPAAMLNLYYIAHNVADCLHLRGFHWPGAPKGKKGRSK

SEQ ID NO: 38925 - protein, 540 aa, Homo sapiens
MRVAAATAAAGAGPAMAVWTRATKAGLVELLLRERWVRVVAELSGESLSLTGDAAAAELEPALGPAAAAFNGLPNGGGAGDSLPGSPSRGLGPPSPPAPPRGPAGEAGASPPVRRVRVVKQEAGGLGISIKGGRENRMPILISKIFPGLAADQSRALRLGDAILSVNGTDLRQATHDQAVQALKRAGKEVLLEVKFIREVTPYIKKPSLVSDLPWEGAAPQSPSFSGSEDSGSPKHQNSTKDRKIIPLKMCFAARNLSMPDLENRLIELHSPDSRNTLILRCKDTATAHSWFVAIHTNIMALLPQVLAELNAMLGATSTAGGSKEVKHIAWLAEQAKLDGGRQQWRPVLMAVTEKDLLLYDCMPWTRDAWASPCHSYPLVATRLVHSGSGCRSPSLGSDLTFATRTGSRQGIEMHLFRVETHRDLSSWTRILVQGCHAAAELIKEVSLGCMLNGQEVRLTIHYENGFTISRENGGSSSILYRYPFERLKMSADDGIRNLYLDFGGPEGELTMDLHSCPKPIVFVLHTFLSAKVTRMGLLV

SEQ ID NO: 38926 - protein, 267 aa, Homo sapiens
MRVAAATAAAGAGPAMAVWTRATKAGLVELLLRERWVRVVAELSGESLSLTGDAAAAELEPALGPAAAAFNGLPNGGGAGDSLPGSPSRGLGPPSPPAPPRGPAGEAGASPPVRRVRVVKQEAGGLGISIKGGRENRMPILISKIFPGLAADQSRALRLGDAILSVNGTDLRQATHDQAVQALKRAGKEVLLEVKFIREVTPYIKKPSLVSDLPWEGAAPQSPSFSGSEDSGSPKHQNSTKDRKIIPLKMCFAARNLSMPDLENRQN

SEQ ID NO: 38927 - protein, 224 aa, Homo sapiens
MVEDELALFDKSINEFWNKFKSTDTSCQMAGLRDTYKDSIKAFAEKLSVKLKEEERMVEMFLEYQNQISRQNKLIQEKKDNLLKLIAEVKGKKQELEVLTANIQDLKEEYSRKKETISTANKANAERLKRLQKSADLYKDRLGLEIRKIYGEKLQFIFTNIDPKNPESPFMFSLHLNEARDYEVSDSAPHLEGLAEFQENVRKTNNFSAFLANVRKAFTATVYN

SEQ ID NO: 38928 - protein, 549 aa, Homo sapiens
MDVVEVAGSWWAQEREDIIMKYEKGHRAGLPEDKGPKPFRSYNNNVDHLGIVHETELPPLTAREAKQIRREISRKSKWVDMLGDWEKYKSSRKLIDRAYKGMPMNIRGPMWSVLLNTEEMKLKNPGRYQIMKEKGKRSSEHIQRIDRDISGTLRKHMFFRDRYGTKQRELLHILLAYEEYNPEVGYCRDLSHIAALFLLYLPEEDAFWALVQLLASERHSLQGFHSPNGGTVQGLQDQQEHVVATSQPKTMGHQDKKDLCGQCSPLGCLIRILIDGISLGLTLRLWDVYLVEGEQALMPITRIAFKVQQKRLTKTSRCGPWARFCNRFVDTWARDEDTVLKHLRASMKKLTRKQGDLPPPAKPEQGSSASRPVPASRGGKTLCKGDRQAPPGPPARFPRPIWSASPPRAPRSSTPCPGGAVREDTYPVGTQGVPSPALAQGGPQGSWRFLQWNSMPRLPTDLDVEGPWFRHYDFRQSCWVRAISQEDQLAPCWQAEHPAERVRSAFAAPSTDSDQGTPFRARDEQQCAPTSGPCLCGLHLESSQFPPGF

SEQ ID NO: 38929 - protein, 355 aa, Homo sapiens
MSVNYAAGLSPYADKGKCGLPEIFDPPEELERKVWELARLVWQSSSVVFHTGAGISTASGIPDFRGPHGVWTMEERGLAPKFDTTFESARPTQTHMALVQLERVGLLRFLVSQNVDGLHVRSGFPRDKLAELHGNMFVEECAKCKTQYVRDTVVGTMGLKATGRLCTVAKARGLRACRGELRDTILDWEDSLPDRDLALADEASRNADLSITLGTSLQIRPSGNLPLATKRRGGRLVIVNLQPTKHDRHADLRIHGYVDEVMTRLMKHLGLEIPAWDGPRVLERALPPLPRPPTPKLEPKEESPTRINGSIPAGPKQEPCAQHNGSEPASPKRERPTSPAPHRPPKRVKAKAVPS

SEQ ID NO: 38930 - protein, 328 aa, Homo sapiens
MSVNYAAGLSPYADKGKCGLPEIFDPPEELERKVWELARLVWQSSSVVFHTGAGISTASGIPDFRGPHGVWTMEERGLAPKFDTTFESARPTQTHMALVQLERVGLLRFLVSQNVDGLHVRSGFPRDKLAELHGNMFVEECAKCKTQYVRDTVVGTMGLKATGRLCTVAKARGLRACRNADLSITLGTSLQIRPSGNLPLATKRRGGRLVIVNLQPTKHDRHADLRIHGYVDEVMTRLMKHLGLEIPAWDGPRVLERALPPLPRPPTPKLEPKEESPTRINGSIPAGPKQEPCAQHNGSEPASPKRERPTSPAPHRPPKRVKAKAVPS

SEQ ID NO: 38931 - protein, 77 aa, Homo sapiens
MAATDFVQEMRAVGERLLLKLQRLPQAEPVEIVAFSVIILFTATVLLLLLIACSCCCTHCCCPERRGRKVQVQPTPP

SEQ ID NO: 38932 - protein, 295 aa, Homo sapiens
MDNSGKEAEAMALLAEAERKVKNSQSFFSGLFGGSSKIEEACEIYARAANMFKMAKNWSAAGNAFCQAAQLHLQLQSKHDAATCFVDAGNAFKKADPQEAINCLMRAIEIYTDMGRFTIAAKHHISIAEIYETELVDIEKAIAHYEQSADYYKGEESNSSANKCLLKVAGYAALLEQYQKAIDIYEQVGTNAMDSPLLKYSAKDYFFKAALCHFCIDMLNAKLAVQKYEELFPAFSDSRECKLMKKLLEAHEEQNVDSYTESVKEYDSISRLDQWLTTMLLRIKKTIQGDEEDLR

SEQ ID NO: 38933 - protein, 583 aa, Homo sapiens
MDLLPPKPKYNPLRNESLSSLEEGASGSTPPEELPSPSASSLGPILPPLPGDDSPTTLCSFFPRMSNLRLANPAGGRPGSKGEPGRAADDGEGIVGAAMPDSGPLPLLQDMNKLSGGGGRRTRVEGGQLGGEEWTRHGSFVNKPTRGWLHPNDKVMGPGVSYLVRYMGCVEVLQSMRALDFNTRTQVTREAISLVCEAVPGAKGATRRRKPCSRPLSSILGRSNLKFAGMPITLTVSTSSLNLMAADCKQIIANHHMQSISFASGGDPDTAEYVAYVAKDPVNQRACHILECPEGLAQDVISTIGQAFELRFKQYLRNPPKLVTPHDRMAGFDGSAWDEEEEEPPDHQYYNDFPGKEPPLGGVVDMRLREGAAPGAARPTAPNAQTPSHLGATLPVGQPVGGDPEVRKQMPPPPPCPGRELFDDPSYVNVQNLDKARQAVGGAGPPNPAINGSAPRDLFDMKPFEDALRVPPPPQSVSMAEQLRGEPWFHGKLSRREAEALLQLNGDFLVRESTTTPGQYVLTGLQSGQPKHLLLVDPEGVVRTKDHRFESVSHLISYHMDNHLPIISAGSELCLQQPVERKL

SEQ ID NO: 38934 - protein, 473 aa, Homo sapiens
MNKLSGGGGRRTRVEGGQLGGEEWTRHGSFVNKPTRGWLHPNDKVMGPGVSYLVRYMGCVEVLQSMRALDFNTRTQVTREAISLVCEAVPGAKGATRRRKPCSRPLSSILGRSNLKFAGMPITLTVSTSSLNLMAADCKQIIANHHMQSISFASGGDPDTAEYVAYVAKDPVNQRACHILECPEGLAQDVISTIGQAFELRFKQYLRNPPKLVTPHDRMAGFDGSAWDEEEEEPPDHQYYNDFPGKEPPLGGVVDMRLREGAAPGAARPTAPNAQTPSHLGATLPVGQPVGGDPEVRKQMPPPPPCPGRELFDDPSYVNVQNLDKARQAVGGAGPPNPAINGSAPRDLFDMKPFEDALRVPPPPQSVSMAEQLRGEPWFHGKLSRREAEALLQLNGDFLVRESTTTPGQYVLTGLQSGQPKHLLLVDPEGVVRTKDHRFESVSHLISYHMDNHLPIISAGSELCLQQPVERKL

SEQ ID NO: 38935 - protein, 428 aa, Homo sapiens
MGPGVSYLVRYMGCVEVLQSMRALDFNTRTQVTREAISLVCEAVPGAKGATRRRKPCSRPLSSILGRSNLKFAGMPITLTVSTSSLNLMAADCKQIIANHHMQSISFASGGDPDTAEYVAYVAKDPVNQRACHILECPEGLAQDVISTIGQAFELRFKQYLRNPPKLVTPHDRMAGFDGSAWDEEEEEPPDHQYYNDFPGKEPPLGGVVDMRLREGAAPGAARPTAPNAQTPSHLGATLPVGQPVGGDPEVRKQMPPPPPCPGRELFDDPSYVNVQNLDKARQAVGGAGPPNPAINGSAPRDLFDMKPFEDALRVPPPPQSVSMAEQLRGEPWFHGKLSRREAEALLQLNGDFLVRESTTTPGQYVLTGLQSGQPKHLLLVDPEGVVRTKDHRFESVSHLISYHMDNHLPIISAGSELCLQQPVERKL

SEQ ID NO: 38936 - protein, 369 aa, Homo sapiens
MSLCHRWRSNLKFAGMPITLTVSTSSLNLMAADCKQIIANHHMQSISFASGGDPDTAEYVAYVAKDPVNQRACHILECPEGLAQDVISTIGQAFELRFKQYLRNPPKLVTPHDRMAGFDGSAWDEEEEEPPDHQYYNDFPGKEPPLGGVVDMRLREGAAPGAARPTAPNAQTPSHLGATLPVGQPVGGDPEVRKQMPPPPPCPGRELFDDPSYVNVQNLDKARQAVGGAGPPNPAINGSAPRDLFDMKPFEDALRVPPPPQSVSMAEQLRGEPWFHGKLSRREAEALLQLNGDFLVRESTTTPGQYVLTGLQSGQPKHLLLVDPEGVVRTKDHRFESVSHLISYHMDNHLPIISAGSELCLQQPVERKL

SEQ ID NO: 38937 - protein, 584 aa, Homo sapiens
MDLLPPKPKYNPLRNESLSSLEEGASGSTPPEELPSPSASSLGPILPPLPGDDSPTTLCSFFPRMSNLRLANPAGGRPGSKGEPGRAADDGEGIVGAAMPDSGPLPLLQDMNKLSGGGGRRTRVEGGQLGGEEWTRHGSFVNKPTRGWLHPNDKVMGPGVSYLVRYMGCVEVLQSMRALDFNTRTQVTREAISLVCEAVPGAKGATRRRKPCSRPLSSILGRSNLKFAGMPITLTVSTSSLNLMAADCKQIIANHHMQSISFASGGDPDTAEYVAYVAKDPVNQRACHILECPEGLAQDVISTIGQAFELRFKQYLRNPPKLVTPHDRMAGFDGSAWDEEEEEPPDHQYYNDFPGKEPPLGGVVDMRLREGAAPGAARPTAPNAQTPSHLGATLPVGQPVGGDPEVRKQMPPPPPCPAGRELFDDPSYVNVQNLDKARQAVGGAGPPNPAINGSAPRDLFDMKPFEDALRVPPPPQSVSMAEQLRGEPWFHGKLSRREAEALLQLNGDFLVRESTTTPGQYVLTGLQSGQPKHLLLVDPEGVVRTKDHRFESVSHLISYHMDNHLPIISAGSELCLQQPVERKL

SEQ ID NO: 38938 - protein, 474 aa, Homo sapiens
MNKLSGGGGRRTRVEGGQLGGEEWTRHGSFVNKPTRGWLHPNDKVMGPGVSYLVRYMGCVEVLQSMRALDFNTRTQVTREAISLVCEAVPGAKGATRRRKPCSRPLSSILGRSNLKFAGMPITLTVSTSSLNLMAADCKQIIANHHMQSISFASGGDPDTAEYVAYVAKDPVNQRACHILECPEGLAQDVISTIGQAFELRFKQYLRNPPKLVTPHDRMAGFDGSAWDEEEEEPPDHQYYNDFPGKEPPLGGVVDMRLREGAAPGAARPTAPNAQTPSHLGATLPVGQPVGGDPEVRKQMPPPPPCPAGRELFDDPSYVNVQNLDKARQAVGGAGPPNPAINGSAPRDLFDMKPFEDALRVPPPPQSVSMAEQLRGEPWFHGKLSRREAEALLQLNGDFLVRESTTTPGQYVLTGLQSGQPKHLLLVDPEGVVRTKDHRFESVSHLISYHMDNHLPIISAGSELCLQQPVERKL

SEQ ID NO: 38939 - protein, 888 aa, Homo sapiens
MDESALLDLLECPVCLERLDASAKVLPCQHTFCKRCLLGIVGSRNELRCPECRTLVGSGVEELPSNILLVRLLDGIKQRPWKPGPGGGSGTNCTNALRSQSSTVANCSSKDLQSSQGGQQPRVQSWSPPVRGIPQLPCAKALYNYEGKEPGDLKFSKGDIIILRRQVDENWYHGEVNGIHGFFPTNFVQIIKPLPQPPPQCKALYDFEVKDKEADKDCLPFAKDDVLTVIRRVDENWAEGMLADKIGIFPISYVEFNSAAKQLIEWDKPPVPGVDAGECSSAAAQSSTAPKHSDTKKNTKKRHSFTSLTMANKSSQASQNRHSMEISPPVLISSSNPTAAARISELSGLSCSAPSQVHISTTGLIVTPPPSSPVTTGPSFTFPSDVPYQAALGTLNPPLPPPPLLAATVLASTPPGATAAAAAAGMGPRPMAGSTDQIAHLRPQTRPSVYVAIYPYTPRKEDELELRKGEMFLVFERCQDGWFKGTSMHTSKIGVFPGNYVAPVTRAVTNASQAKVPMSTAGQTSRGVTMVSPSTAGGPAQKLQGNGVAGSPSVVPAAVVSAAHIQTSPQAKVLLHMTGQMTVNQARNAVRTVAAHNQERPTAAVTPIQVQNAAGLSPASVGLSHHSLASPQPAPLMPGSATHTAAISISRASAPLACAAAAPLTSPSITSASLEAEPSGRIVTVLPGLPTSPDSASSACGNSSATKPDKDSKKEKKGLLKLLSGASTKRKPRVSPPASPTLEVELGSAELPLQGAVGPELPPGGGHGRAGSCPVDGDGPVTTAVAGAALAQDAFHRKASSLDSAVPIAPPPRQACSSLGPVLNESRPVVCERHRVVVSYPPQSEAELELKEGDIVFVHKKREDGWFKGTLQRNGKTGLFPGSFVENI

SEQ ID NO: 38940 - protein, 441 aa, Homo sapiens
MDESALLDLLECPVCLERLDASAKVLPCQHTFCKRCLLGIVGSRNELRCPECRTLVGSGVEELPSNILLVRLLDGIKQRPWKPGPGGGSGTNCTNALRSQSSTVANCSSKDLQSSQGGQQPRVQSWSPPVRGIPQLPCAKALYNYEGKEPGDLKFSKGDIIILRRQVDENWYHGEVNGIHGFFPTNFVQIIKPLPQPPPQCKALYDFEVKDKEADKDCLPFAKDDVLTVIRRVDENWAEGMLADKIGIFPISYVEFNSAAKQLIEWDKPPVPGVDAGECSSAAAQSSTAPKHSDTKKNTKKRHSFTSLTMANKSSQASQNRHSMEISPPVLISSSNPTAAARISELSGLSCSAPSQVHISTTGLIVTPPPSSPVTTGPSFTFPSDVPYQAALGAPPPLLLLLEWDRGPWQDPLTRLHIYGRRLAPVCMLLYIHTLLGKRIN

SEQ ID NO: 38941 - protein, 630 aa, Homo sapiens
MRERGQDSLAGLVLYVGLFGHPGMLHRAKYSRFRNESITSLDEGSSGGSVGNKGSPQPPHPALAPHLPTEDATLPSQESPTPLCTLIPRMASMKLANPATLLSLKNFCLGTKEVPRLKLQESRDPGSSGPSSPETSLSRSGTAPPPQQDLVGHRATALTPDSCPLPGPGEPTLRSRQDRHFLQHLLGMGMNYCVRYMGCVEVLQSMRSLDFGMRTQVTREAISRLCEAVPGANGAIKKRKPPVKFLSTVLGKSNLQFSGMNIKLTISTCSLTLMNLDNQQIIANHHMQSISFASGGDPDTTDYVAYVAKDPVNQRACHILECHNGMAQDVISTIGQAFELRFKQYLKNPSLNTSCESEEVHIDSHAEEREDHEYYNEIPGKQPPVGGVSDMRIKVQATEQMAYCPIQCEKLCYLPGNSKCSSVYENCLEQSRAIGNVHPRGVQSQRDTSLLKHTCRVDLFDDPCYINTQALQSTPGSAGNQRSAQPLGSPWHCGKAPETVQPGATAQPASSHSLPHIKQQLWSEECYHGKLSRKAAESLLVKDGDFLVRESATSPGQYVLSGLQGGQAKHLLLVDPEGKVRTKDHVFDNVGHLIRYHMDNSLPIISSGSEVSLKQPVRKDNNPALLHSNK

SEQ ID NO: 38942 - protein, 387 aa, Homo sapiens
MLPALEHWIPKFFSFRTRTGSPLSLACRQPIVGPCDHIIANHHMQSISFASGGDPDTTDYVAYVAKDPVNQRACHILECHNGMAQDVISTIGQAFELRFKQYLKNPSLNTSCESEEVHIDSHAEEREDHEYYNEIPGKQPPVGGVSDMRIKVQATEQMAYCPIQCEKLCYLPGNSKCSSVYENCLEQSRAIGNVHPRGVQSQRDTSLLKHTCRVDLFDDPCYINTQALQSTPGSAGNQRSAQPLGSPWHCGKAPETVQPGATAQPASSHSLPHIKQQLWSEECYHGKLSRKAAESLLVKDGDFLVRESATSPGQYVLSGLQGGQAKHLLLVDPEGKVRTKDHVFDNVGHLIRYHMDNSLPIISSGSEVSLKQPVRKDNNPALLHSNK

SEQ ID NO: 38943 - protein, 509 aa, Homo sapiens
MSQRQVLQVFEQYQKARTQFVQMVAELATRPQNIETLQNAGVMSLLRTLLLDVVPTIQQTAALALGRLANYNDDLAEAVVKCDILPQLVYSLAEQNRFYKKAAAFVLRAVGKHSPQLAQAIVDCGALDTLVICLEDFDPGVKEAAAWALRYIARHNAELSQAVVDAGAVPLLVLCIQEPEIALKRIAASALSDIAKHSPELAQTVVDAGAVAHLAQMILNPDAKLKHQILSALSQVSKHSVDLAEMVVEAEIFPVVLTCLKDKDEYVKKNASTLIREIAKHTPELSQLVVNAGGVAAVIDCIGSCKGNTRLPGIMMLGYVAAHSENLAMAVIISKGVPQLSVCLSEEPEDHIKAAAAWALGQIGRHTPEHARAVAVTNTLPVLLSLYMSTESSEDLQVKSKKAIKNILQKCTYLPALEPFLYDAPPNILKHVVGQFSKVLPHDSKARRLFVTSGGLKKVQEIKAEPGSLLQEYINSINSCYPEEIVRYYSPGYSDTLLQRVDSYQPLNN

SEQ ID NO: 38944 - protein, 458 aa, Homo sapiens
MSQRQVLQVFEQYQKARTQFVQMVAELATRPQNIETLQNAGVMSLLRTLLLDVVPTIQQTAALALGRLANYNDDLAEAVVKCDILPQLVYSLAEQNRFYKKAAAFVLRAVGKHSPQLAQAIVDCGALDTLVICLEDFDPGVKEAAAWALRYIARHNAELSQAVVDAGAVPLLVLCIQEPEIALKRIAASALSDIAKHSPELAQTVVDAGAVAHLAQMILNPDAKLKHQILSALSQVSKHSVDLAEMVVEAEIFPVVLTCLKDKDEYVKKNASTLIREIAKHTPELSQLVVNAGGVAAVIDCIGSCKGNTRLPGIMMLGYVAAHSENLAMAVIISKGVPQLSVCLSEEPEDHIKAAAAWALGQIGRHTPEHARAVAVTNTLPVLLSLYMSTESSEDLQVKSKKAIKNILQKCTYLPALEPFLYDAPPNILKHVVGQFSKVLFPWIFRYTSAEGGQLSTT

SEQ ID NO: 38945 - protein, 585 aa, Homo sapiens
MSQRQVLQVFEQYQKARTQFVQMVAELATRPQNIETLQNAGEPGARTPVAPRALSPRRLRPAALPVELLGSRSVGTGVRKSIHSFQRVFGGQAERVKLPDGCGRCALSLFPSSLHTGVMSLLRTLLLDVVPTIQQTAALALGRLANYNDDLAEAVVKCDILPQLVYSLAEQNRFYKKAAAFVLRAVGKHSPQLAQAIVDCGALDTLVICLEDFDPGVKEAAAWALRYIARHNAELSQAVVDAGAVPLLVLCIQEPEIALKRIAASALSDIAKHSPELAQTVVDAGAVAHLAQMILNPDAKLKHQILSALSQVSKHSVDLAEMVVEAEIFPVVLTCLKDKDEYVKKNASTLIREIAKHTPELSQLVVNAGGVAAVIDCIGSCKGNTRLPGIMMLGYVAAHSENLAMAVIISKGVPQLSVCLSEEPEDHIKAAAAWALGQIGRHTPEHARAVAVTNTLPVLLSLYMSTESSEDLQVKSKKAIKNILQKCTYLPALEPFLYDAPPNILKHVVGQFSKVLPHDSKARRLFVTSGGLKKVQEIKAEPGSLLQEYINSINSCYPEEIVRYYSPGYSDTLLQRVDSYQPLNN

SEQ ID NO: 38946 - protein, 270 aa, Homo sapiens
MSQRQVLQVFEQYQKARTQFVQMVAELATRPQNIETLQNAGVMSLLRTLLLDVVPTIQQTAALALGRLANYNDDLAEAVVKCDILPQLVYSLAEQNGVPQLSVCLSEEPEDHIKAAAAWALGQIGRHTPEHARAVAVTNTLPVLLSLYMSTESSEDLQVKSKKAIKNILQKCTYLPALEPFLYDAPPNILKHVVGQFSKVLPHDSKARRLFVTSGGLKKVQEIKAEPGSLLQEYINSINSCYPEEIVRYYSPGYSDTLLQRVDSYQPLNN

SEQ ID NO: 38947 - protein, 484 aa, Homo sapiens
MHSLTMDLWIPNGQAGVMSLLRTLLLDVVPTIQQTAALALGRLANYNDDLAEAVVKCDILPQLVYSLAEQNRFYKKAAAFVLRAVGKHSPQLAQAIVDCGALDTLVICLEDFDPGVKEAAAWALRYIARHNAELSQAVVDAGAVPLLVLCIQEPEIALKRIAASALSDIAKHSPELAQTVVDAGAVAHLAQMILNPDAKLKHQILSALSQVSKHSVDLAEMVVEAEIFPVVLTCLKDKDEYVKKNASTLIREIAKHTPELSQLVVNAGGVAAVIDCIGSCKGNTRLPGIMMLGYVAAHSENLAMAVIISKGVPQLSVCLSEEPEDHIKAAAAWALGQIGRHTPEHARAVAVTNTLPVLLSLYMSTESSEDLQVKSKKAIKNILQKCTYLPALEPFLYDAPPNILKHVVGQFSKVLPHDSKARRLFVTSGGLKKVQEIKAEPGSLLQEYINSINSCYPEEIVRYYSPGYSDTLLQRVDSYQPLNN

SEQ ID NO: 38948 - protein, 134 aa, Homo sapiens
MKSLTWILGLWALAACFTPGESQRGPRGPYPPGPLAPPPPPCFPFGTGFVPPPHPPPYGPGRFPPPLSPPYGPGRIPPSPPPPYGPGRIQSHSLPPPYGPGYPQPPSQPRPYPPGPPFFPVNSPTDPALPTPAP

SEQ ID NO: 38949 - protein, 392 aa, Homo sapiens
MPLEVVVELQIRAISCPGVFLPGKQDVYLGVYLMNQYLETNSFPSAFPIMIQESMRFEKVFESAVDPGAVVDLLEMWDELAYYEENTRDFLFPEPKLTPSHPRRCREVLMKTALGFPGIAPKIEFSTRTAIRECVFLHRNRFLEERHESRRPLSTSHEPIFPLNTIKMKLKENNLNRLPKGMQARAPSQYSTRHFFQDQPAQLNLGNNFKISGGSKPPFVVRHVDSAKPFGENISEHHLRRSRRKSKFSDFPFPTRRASSLDSLAANVKVIKEPDERIVLRSDSSSCLDSSQFGKSSSSKQGDADFHGKASFATYQHSTSPGPLDQPLLRERFHPGSQSTWKNIHERVCSLLTSHRAQLHQNKEDSTSEVNYIIERPSYPLKKYSLHEQRYF

SEQ ID NO: 38950 - protein, 165 aa, Homo sapiens
MPLEVVVELQIRAISCPGVFLPGKQDVYLGVYLMNQYLETNSFPSAFPIMIQESMRFEKVFESAVDPGAVVDLLESFLARFELIQLVPPVWDELAYYEENTRDFLFPEPKLTPSHPRRCREVLMKTALGFPGIAPKIEFSTRTAIRECVFLHRNRFLVDSKSWLL

SEQ ID NO: 38951 - protein, 334 aa, Homo sapiens
MPLEVVVELQIRAISCPGVFLPGKQDVYLGVYLMNQYLETNSFPSAFPIMIQESMRFEKGIAPKIEFSTRTAIRECVFLHRNRFLEERHESRRPLSTSHEPIFPLNTIKMKLKENNLNRLPKGMQARAPSQYSTRHFFQDQPAQLNLGNNFKISGGSKPPFVVRHVDSAKPFGENISEHHLRRSRRKSKFSDFPFPTRRASSLDSLAANVKVIKEPDERIVLRSDSSSCLDSSQFGKSSSSKQGDADFHGKASFATYQHSTSPGPLDQPLLRERFHPGSQSTWKNIHERVCSLLTSHRAQLHQNKEDSTSEVNYIIERPSYPLKKYSLHEQRYF

SEQ ID NO: 38952 - protein, 183 aa, Homo sapiens
MSAARESHPHGVKRSASPDDDLGSSNWEAADLGNEERKQKFLRLMGAGKKEHTGRLVIGDHKSTSHFRTGEEDKKINEELESQYQQSMDSKLSGRYRRHCGLGFSEVEDHDGEGDVAGDDDDDDDDSPDPESPDDSESDSESEKEESAEELQAAEHPDEVEDPKNKKDAKSNYKMMFVKSSGS

SEQ ID NO: 38953 - protein, 804 aa, Homo sapiens
MDLPVDEWKSYLLQKWASLPTSVQVTISTAETLRDIFLHSSSLLQPEDELFLKRLSKGYLVGKDSDAPLFYREEGNKKFQEKDYTGAAVLYSKGVSHSRPNTEDMSLCHANRSAALFHLGQYETCLKDINRAQTHGYPERLQPKIMLRKAECLVALGRLQEASQTISDLERNFTATPALADVLPQTLQRNLHRLKMKMQEKDSLTESFPAALAKTLEDAALREENEQLSNASSSIGLCVDPLKGRCLVATKDILPGELLVQEDAFVSVLNPGELPPPHHGLDSKWDTRVTNGDLYCHRCLKHTLATVPCDGCSYAKYCSQECLQQAWELYHRTECPLGGLLLTLGVFCHIALRLTLLVGFEDVRKIITKLCDKISNKDICLPESNNQVKTLNYGLGESEKNGNIVETPIPGCDINGKYENNYNAVFNLLPHTENHSPEHKFLCALCVSALCRQLEAASLQAIPTERIVNSSQLKAAVTPELCPDVTIWGVAMLRHMLQLQCNAQAMTTIQHTGPKGSIVTDSRQVRLATGIFPVISLLNHSCSPNTSVSFISTVATIRASQRIRKGQEILHCYGPHKSRMGVAERQQKLRSQYFFDCACPACQTEAHRMAAGPRWEAFCCNSCGAPMQGDDVLRCGSRSCAESAVSRDHLVSRLQDLQQQVRVAQKLLRDGELERAVQRLSGCQRDAESFLWAEHAVVGEIADGLARACAALGDWQKSATHLQRSLYVVEVRHGPSSVEMGHELFKLAQIFFNGFAVPEALSTIQKAEEVLSLHCGPWDDEIQELQKMKSCLLDLPPTPVGPAL

SEQ ID NO: 38954 - protein, 246 aa, Homo sapiens
MFQLPILNFSPQQVAGVCETLEESGDVERLGRFLWSLPVAPAACEALNKNESVLRARAIVAFHGGNYRELYHILENHKFTKESHAKLQALWLEAHYQEAEKLRGRPLGPVDKYRVRKKFPLPRTIWDGEQKTHCFKERTRHLLREWYLQDPYPNPSKKRELAQATGLTPTQVGNWFKNRRQRDRAAAAKNRLQQQVLSQGSGRALRAEGDGTPEVLGVATSPAASLSSKAATSAISITSSDSECDI

SEQ ID NO: 38955 - protein, 265 aa, Homo sapiens; identical to SEQ ID NO: 1791

SEQ ID NO: 38956 - protein, 104 aa, Homo sapiens
MKLAALLGLCVALSCSSAAAFLVGSAKPVAQPVAALESAAEAGAGTLANPLGTLNPLKLLLSSLGIPVNHLIEGSQKCVAELGPQAVGAVKALKALLGALTVFG

SEQ ID NO: 38957 - protein, 359 aa, Homo sapiens
MQAAALPEEIRWLLEDAEEFLAEGLRNENLSAVARDHRDHILRGFQQIKARYYWDFQPQGGDIGQDSSDDNHSGTLGLSLTSDAPFLSDYQDEGMEDIVKGAQELDNVIKQGYLEKKSKDHSFFGSEWQKRWCVVSRGLFYYYANEKSKQPKGTFLIKGYGVRMAPHLRRDSKKESCFELTSQDRRSYEFTATSPAEARDWVDQISFLLKDLSSLTIPYEEDEEEEEKEETYDDIDGFDSPSCGSQCRPTILPGSVGIKEPTEEKEEEDIYEVLPDEEHDLEEDESGTRRKGVDYASYYQGLWDCHGDQPDELSFQRGDLIRILSKEYNMYGWWVGELNSLVGIVPKEYLTTAFEVEER

SEQ ID NO: 38958 - protein, 358 aa, Homo sapiens
MQAAALPEEIRWLLEDAEEFLAEGLRNENLSAVARDHRDHILRGFQQIKARYYWDFQPQGGDIGQDSSDDNHSGTLGLSLTSDAPFLSDYQDEGMEDIVKGAQELDNVIKQGYLEKKSKDHSFFGSEWQKRWCVVSRGLFYYYANEKSKQPKGTFLIKGYGVRMAPHLRRDSKKESCFELTSQDRRSYEFTATSPAEARDWVDQISFLLKDLSSLTIPYEEDEEEEEKEETYDDIDGFDSPSCGSQCRPTILPGSVGIKEPTEEKEEEDIYEVLPDEEHDLEEDESGTRRKGDYASYYQGLWDCHGDQPDELSFQRGDLIRILSKEYNMYGWWVGELNSLVGIVPKEYLTTAFEVEER

SEQ ID NO: 38959 - protein, 513 aa, Homo sapiens [sequence omitted]

SEQ ID NO: 38960 - protein, 352 aa, Homo sapiens
MALLGQALKWQQHQGLLPPGMTIDLFRGKAAVKDVEEEKFPTQLSRHIKFGQKSHVECARFSPDGQYLVTGSVDGFIEVWNFTTGKIRKDLKYQAQDNFMMMDDAVLCMCFSRDTEMLATGAQDGKIKVWKIQSGQCLRRFERAHSKGVTCLSFSKDSSQILSASFDQTIRIHGLKSGKTLKEFRGHSSFVNEATFTQDGHYIISASSDGTVKIWNMKTTECSNTFKSLGSTAGTDITVNSVILLPKNPEHFVVCNRSNTVVIMNMQGQIVRSFSSGKREGGDFVCCALSPRGEWIYCVGEDFVLYCFSTVTGKLERTLTVHEKDVIGIAHHPHQNLIATYSEDGLLKLWKP

SEQ ID NO: 38961 - protein, 1082 aa, Homo sapiens
MAARRITQETFDAVLQEKAKRYHMDASGEAVSETLQFKAQDLLRAVPRSRAEMYDDVHSDGRYSLSGSVAHSRDAGREGLRSDVFPGPSFRSSNPSISDDSYFRKECGRDLEFSHSDSRDQVIGHRKLGHFRSQDWKFALRGSWEQDFGHPVSQESSWSQEYSFGPSAVLGDFGSSRLIEKECLEKESRDYDVDHPGEADSVLRGGSQVQARGRALNIVDQEGSLLGKGETQGLLTAKGGVGKLVTLRNVSTKKIPTVNRITPKTQGTNQIQKNTPSPDVTLGTNPGTEDIQFPIQKIPLGLDLKNLRLPRRKMSFDIIDKSDVFSRFGIEIIKWAGFHTIKDDIKFSQLFQTLFELETETCAKMLASFKCSLKPEHRDFCFFTIKFLKHSALKTPRVDNEFLNMLLDKGAVKTKNCFFEIIKPFDKYIMRLQDRLLKSVTPLLMACNAYELSVKMKTLSNPLDLALALETTNSLCRKSLALLGQTFSLASSFRQEKILEAVGLQDIAPSPAAFPNFEDSTLFGREYIDHLKAWLVSSGCPLQVKKAEPEPMREEEKMIPPTKPEIQAKAPSSLSDAVPQRADHRVVGTIDQLVKRVIEGSLSPKERTLLKEDPAYWFLSDENSLEYKYYKLKLAEMQRMSENLRGADQKPTSADCAVRAMLYSRAVRNLKKKLLPWQRRGLLRAQGLRGWKARRATTGTQTLLSSGTRLKHHGRQAPGLSQAKPSLPDRNDAAKDCPPDPVGPSPQDPSLEASGPSPKPAGVDISEAPQTSSPCPSADIDMKTMETAEKLARFVAQVGPEIEQFSIENSTDNPDLWFLHDQNSSAFKFYRKKVFELCPSICFTSSPHNLHTGGGDTTGSQESPVDLMEGEAEFEDEPPPREAELESPEVMPEEEDEDDEDGGEEAPAPGGAGKSEGSTPADGLPGEAAEDDLAGAPALSQASSGTCFPRKRISSKSLKVGMIPAPKRVCLIQEPKVHEPVRIAYDRPRGRPMSKKKKPKDLDFAQQKLTDKNLGFQMLQKMGWKEGHGLGSLGKGIREPVSVGTPSEGEGLGADGQEHKEDTFDVFRQRMMQMYRHKRANK

SEQ ID NO: 38962 - protein, 1040 aa, Homo sapiens
MAARRITQETFDAVLQEKAKRYHMDASGEAVSETLQFKAQDLLRAVPRSRAEMYDDVHSDGRYSLSGSVAHSRDAGREGLRSDVFPGPSFRSSNPSISDDSYFRKECGRDLEFSHSDSRDQVIGHRKLGHFRSQDWKFALRGSWEQDFGHPVSQESSWSQEYSFGPSAVLGDFGSSRLIEKECLEKESRDYDVDHPGEADSVLRGGSQVQARGRALNIVDQEGSLLGKGETQGLLTAKGGVGKLVTLRNVSTKKIPTVNRITPKTQGTNQIQKNTPSPDVTLGTNPGTEDIQFPIQKIPLGLDLKNLRLPRRKMSFDIIDKSDVFSRFGIEIIKWAGFHTIKDDIKFSQLFQTLFELETETCAKMLASFKCSLKPEHRDFCFFTIKFLKHSALKTPRVDNEFLNMLLDKGAVKTKNCFFEIIKPFDKYIMRLQDRLLKSVTPLLMACNAYELSVKMKTLSNPLDLALALETTNSLCRKSLALLGQTFSLASSFRQEKILEAVGLQDIAPSPAAFPNFEDSTLFGREYIDHLKAWLVSSGCPLQVKKAEPEPMREEEKMIPPTKPEIQAKAPSSLSDAVPQRADHRVVGTIDQLVKRVIEGSLSPKERTLLKEDPAYWFLSDENSLEYKYYKLKLAEMQRMSENLRGADQKPTSADCAVRAMLYSRAVRNLKKKLLPWQRRGLLRAQGLRGWKARRATTGTQTLLSSGTRLKHHGRQAPGLSQAKPSLPDRNDAAKDCPPDPVGPSPQDPSLEASGPSPKPAGVDISEAPQTSSPCPSADIDMKTMETAEKLARFVAQVGPEIEQFSIENSTDNPDLWFLHDQNSSAFKFYRKKVFELCPSICFTSSPHNLHTGGGDTTGSQESPVDLMEGEAEFEDEPPPREAELESPEASSGTCFPRKRISSKSLKVGMIPAPKRVCLIQEPKVHEPVRIAYDRPRGRPMSKKKKPKDLDFAQQKLTDKNLGFQMLQKMGWKEGHGLGSLGKGIREPVSVYAAGSLGWEWVGPQSFHLQPAAWLLHSQDGLQLAVDFCFLNRRHLQMRS

SEQ ID NO: 38963 - protein, 1030 aa, Homo sapiens
MAARRITQETFDAVLQEKAKRYHMDASGEAVSETLQFKAQDLLRAVPRSRAEMYDDVHSDGRYSLSGSVAHSRDAGREGLRSDVFPGPSFRSSNPSISDDSYFRKECGRDLEFSHSDSRDQVIGHRKLGHFRSQDWKFALRGSWEQDFGHPVSQESSWSQEYSFGPSAVLGDFGSSRLIEKECLEKESRDYDVDHPGEADSVLRGGSQVQARGRALNIVDQEGSLLGKGETQGLLTAKGGVGKLVTLRNVSTKKIPTVNRITPKTQGTNQIQKNTPSPDVTLGTNPGTEDIQFPIQKIPLGLDLKNLRLPRRKMSFDIIDKSDVFSRFGIEIIKWAGFHTIKDDIKFSQLFQTLFELETETCAKMLASFKCSLKPEHRDFCFFTIKFLKHSALKTPRVDNEFLNMLLDKGAVKTKNCFFEIIKPFDKYIMRLQDRLLKSVTPLLMACNAYELSVKMKTLSNPLDLALALETTNSLCRKSLALLGQTFSLASSFRQEKILEAVGLQDIAPSPAAFPNFEDSTLFGREYIDHLKAWLVSSGCPLQVKKAEPEPMREEEKMIPPTKPEIQAKAPSSLSDAVPQRADHRVVGTIDQLVKRVIEGSLSPKERTLLKEDPAYWFLSDENSLEYKYYKLKLAEMQRMSENLRGADQKPTSADCAVRAMLYSRAVRNLKKKLLPWQRRGLLRAQGLRGWKARRATTGTQTLLSSGTRLKHHGRQAPGLSQAKPSLPDRNDAAKDCPPDPVGPSPQDPSLEASGPSPKPAGVDISEAPQTSSPCPSADIDMKTMETAEKLARFVAQVGPEIEQFSIENSTDNPDLWFLHDQNSSAFKFYRKKVFELCPSICFTSSPHNLHTGGGDTTGSQESPVDLMEGEAEFEDEPPPREAELESPEASSGTCFPRKRISSKSLKVGMIPAPKRVCLIQEPKVHEPVRIAYDRPRGRPMSKKKKPKDLDFAQQKLTDKNLGFQMLQKMGWKEGHGLGSLGKGIREPVSVGTPSEGEGLGADGQEHKEDTFDVFRQRMMQMYRHKRANK

SEQ ID NO: 38964 - protein, 545 aa, Homo sapiens
MLLLHRAVVLRLQQACRLKSIPSRICIQACSTNDSFQPQRPSLTFSGDNSSTQGWRVMGTLLGLGAVLAYQDHRCRAAQESTHIYTKEEVSSHTSPETGIWVTLGSEVFDVTEFVDLHPGGPSKLMLAAGGPLEPFWALYAVHNQSHVRELLAQYKIGELNPEDKVAPTVETSDPYADDPVRHPALKVNSQRPFNAEPPPELLTENYITPNPIFFTRNHLPVPNLDPDTYRLHVVGAPGGQSLSLSLDDLHNFPRYEITVTLQCAGNRRSEMTQVKEVKGLEWRTGAISTARWAGARLCDVLAQAGHQLCETEAHVCFEGLDSDPTGTAYGASIPLARAMDPEAEVLLAYEMNGQPLPRDHGFPVRVVVPGVVGARHVKWLGRVSVQPEESYSHWQRRDYKGFSPSVDWETVDFDSAPSIQELPVQSAITEPRDGETVESGEVTIKGYAWSGGGRAVIRVDVSLDGGLTWQVAKLDGEEQRPRKAWAWRLWQLKAPVPAGQKELNIVCKAVDDGYNVQPDTVAPIWNLRGVLSNAWHRVHVYVSP

SEQ ID NO: 38965 - protein, 491 aa, Homo sapiens
MEQPPAPKSKLKKLSEDSLTKQPEEVFDVLEKLGEGSYGSVFKAIHKESGQVVAIKQVPVESDLQEIIKEISIMQQCDSPYVVKYYGSYFKNTDLWIVMEYCGAGSVSDIIRLRNKTLIEDEIATILKSTLKGLEYLHFMRKIHRDIKAGNILLNTEGHAKLADFGVAGQLTDTMAKRNTVIGTPFWMAPEVIQEIGYNCVADIWSLGITSIEMAEGKPPYADIHPMRAIFMIPTNPPPTFRKPELWSDDFTDFVKKCLVKNPEQRATATQLLQHPFIKNAKPVSILRDLITEAMEIKAKRHEEQQRELEEEEENSDEDELDSHTMVKTSVESVGTMRATSTMSEGAQTMIEHNSTMLESDLGTMVINSEDEEEEDGTMKRNATSPQVQRPSFMDYFDKQDFKNKSHENCNQNMHEPFPMSKNVFPDNWKVPQDGDFDFLKNLSLEELQMRLKALDPMMEREIEELRQRYTAKRQPILDAMDAKKRRQQNF

SEQ ID NO: 38966 - protein, 519 aa, Homo sapiens
MLQLMDSGITICLRNGAASVFKKKEWSTQGEENKQDSKLKKLSEDSLTKQPEEVFDVLEKLGEGSYGSVFKAIHKESGQVVAIKQVPVESDLQEIIKEISIMQQCDSPYVVKYYGSYFKNTDLWIVMEYCGAGSVSDIIRLRNKTLIEDEIATILKSTLKGLEYLHFMRKIHRDIKAGNILLNTEGHAKLADFGVAGQLTDTMAKRNTVIGTPFWMAPEVIQEIGYNCVADIWSLGITSIEMAEGKPPYADIHPMRAIFMIPTNPPPTFRKPELWSDDFTDFVKKCLVKNPEQRATATQLLQHPFIKNAKPVSILRDLITEAMEIKAKRHEEQQRELEEEEENSDEDELDSHTMVKTSVESVGTMRATSTMSEGAQTMIEHNSTMLESDLGTMVINSEDEEEEDGTMKRNATSPQVQRPSFMDYFDKQDFKNKSHENCNQNMHEPFPMSKNVFPDNWKVPQDGDFDFLKNLSLEELQMRLKALDPMMEREIEELRQRYTAKRQPILDAMDAKKRRQQNF

SEQ ID NO: 38967 - protein, 432 aa, Homo sapiens
MASPVAAQAGKLLRALALRPRFLAAGSQAVQLTSRRWLNLQEYQSKKLMSDNGVRVQRFFVADTANEALEAAKRLNAKEIVLKAQILAGGRGKGVFNSGLKGGVHLTKDPNVVGQLAKQMIGYNLATKQTPKEGVKVNKVMVAEALDISRETYLAILMDRSCNGPVLVGSPQGGVDIEEVAASNPELIFKEQIDIFEGIKDSQAQRMAENLGFVGPLKSQAADQITKLYNLFLKIDATQVEVNPFGETPEGQVVCFDAKINFDDNAEFRQKDIFAMDDKSENEPIENEAAKYDLKYIGLDGNIACFVNGAGLAMATCDIIFLNGGKPANFLDLGGGVKEAQVYQAFKLLTADPKVEAILVNIFGGIVNCAIIANGITKACRELELKVPLVVRLEGTNVQEAQKILNNSGLPITSAIDLEDAAKKAVASVAKK

SEQ ID NO: 38968 - protein, 440 aa, Homo sapiens
MASPVAAQAGKLLRALALRPRFLAAGSQAVQLTSRRWLNLQEYQSKKLMSDNGVRVQRFFVADTANEALEAAKRLNAKEIVLKAQILAGGRGKGVFNSGLKGGVHLTKDPNVVGQLAKQMIGYNLATKQTPKEGVKVNKVMVAEALDISRETYLAILMDRSCNGPVLVGSPQGGVDIEEVAASNPELIFKEQIDIFEGIKDSQAQRMAENLGFVGPLKSQAADQITKLYNLFLKIDATQVEVNPFGETPEGQVVCFDAKINFDDNAEFRQKDIFAMDDKSENEPIENEAAKYDLKYIGLDGNIACFVNGAGLAMATCDIIFLNGGKPANFLDLGGGVKEAQVYQAFKLLTADPKVEAILVNIFGGIVNCAIIANGITKACRELELKVPLVVRLEGTFMEKKGSYMHIKQETGNSNENITGIQENVAHQNLSKCAISIFLC

SEQ ID NO: 38969 - protein, 275 aa, Homo sapiens
MGNFRGHALPGTFFFIIGLWWCTKSILKYICKKQKRTCYLGSKTLFYRLEILEGITIVGMALTGMAGEQFIPGGPHLMLYDYKQGHWNQLLGWHHFTMYFFFGLLGVADILCFTISSLPVSLTKLMLSNALFVEAFIFYNHTHGREMLDIFVHQLLVLVVFLTGLVAFLEFLVRNNVLLELLRSSLILLQGSWFFQIGFVLYPPSGGPAWDLMDHENILFLTICFCWHYAVTIVIVGMNYAFITWLVKSRLKRLCSSEVGLLKNAEREQESEEEM

SEQ ID NO: 38970 - protein, 330 aa, Homo sapiens
MGKIDVDKILFFNQEIRLWQLIMATPEENSNPHDRATPQLPAQLQELEHRVARRRLSQARHRATLAALFNNLRKTVYSQSDLIASKWQVLNKAKSHIPELEQTLDNLLKLKASFNLEDGHASSLEEVKKEYASMYSGNDSFPQNGSSPWYLNFYKQTMDLLTGSGIITPQEAALPIVSAAISHLWQNLSEERKASLRQAWAQKHRGPATLAEACREPACAEGSVKDSGVDSQGASCSLVSTPEEILFEDAFDVASFLDKSEVPSTSSSSSVLASCNPENPEEKFQLYMQIINFFKGLSCANTQVKQEASFPVDEEMIMLQCTETFDDEDL

SEQ ID NO: 38971 - protein, 459 aa, Homo sapiens
MYDRAPRLLKLAEGGSTEAHVGPGSYQVPFLKQQATGSNAPFLSLTARESTFTIASSIEKAVPGPGHYNVSEAQKISRSPTLTRSVDVPSIPSCGKSYGYHINDDGSIIKCFPPACDSTLGPAYYKPQFDVSNATLKYKGIHFGNSSGRQELPKKSGPGPGQYDIVQKKTSYYENVNIKRDQQQNYCSFIPRLYEIIVLQEKKKRFLPMKSITPAPGTYNEPRTALKSLKKTSGLKNIPFGQSAVRFTQDIRTEEMPGPGFYNVLNNTIIASVRNICSKKQKKSAFGSSVPRTFFSVQKEACATPGPADYQEFWHSQGVGISDELPNLTNKYAAFLSRAKRTMKVPDMVIPAPGSYDVHKSYEMSQVKHKYMPPRSLVAKRKHASFLSATPRCLEKVTDGPGPAAYNPVLRKSCPIPLFVKASKRFEESKEITPGPATYEISQEKKKGNLIGEMAADIM

SEQ ID NO: 38972 - protein, 388 aa, Homo sapiens
MFAKGKGSAVPSDGQAREKLALYVYEYLLHVGAQKSAQTFLSEIRWEKNITLGEPPGFLHSWWCVFWDLYCAAPERRDTCEHSSEAKAFHDYSAAAAPSPVLGNIPPNDGMPGGPIPPGFFQGPPGSQPSPHAQPPPHNPSSMMGPHSQPFMSPRYAGGPRPPIRMGNQPPGGVPGTQPLLPNSMDPTRQQGHPNMGGSMQRMNPPRGMGPMGPGPQNYGSGMRPPPNSLGPAMPGINMGPGAGRPWPNPNSANSIPYSSSSPGTYVGPPGGGGPPGTPIMPSPADSTNSSDNIYTMINPVPPGGSRSNFPMGPGSDGPMGGMGGMEPHHMNGSLGSGDIDGLPKNSPNNISGISNPPGTPRDDGELGGNFLHSFQNDNYSPSMTMSV

SEQ ID NO: 38973 - protein, 361 aa, Homo sapiens
MFAKGKGSAVPSDGQAREKLALYVYEYLLHVGAQKSAQTFLSEIRWEKNITLGEPPGFLHSWWCVFWDLYCAAPERRDTCEHSSEAKAFHDYSAAAAPSPVLGNIPPNDGMPGGPIPPGFFQPFMSPRYAGGPRPPIRMGNQPPGGVPGTQPLLPNSMDPTRQQGHPNMGGSMQRMNPPRGMGPMGPGPQNYGSGMRPPPNSLGPAMPGINMGPGAGRPWPNPNSANSIPYSSSSPGTYVGPPGGGGPPGTPIMPSPADSTNSSDNIYTMINPVPPGGSRSNFPMGPGSDGPMGGMGGMEPHHMNGSLGSGDIDGLPKNSPNNISGISNPPGTPRDDGELGGNFLHSFQNDNYSPSMTMSV

SEQ ID NO: 38974 - protein, 368 aa, Homo sapiens
MFAKGKGSAVPSDGQAREKLALYVYEYLLHVGAQKSAQTFLSEIRWEKNITLGEPPGFLHSWWCVFWDLYCAAPERRDTCEHSSEAKAFHDYSAAAAPSPVLGNIPPNDGMPGGPIPPGFFQGPPGSQPSPHAQPPPHNPSSMMGPHSQPPGGVPGTQPLLPNSMDPTRQQGHPNMGGSMQRMNPPRGMGPMGPGPQNYGSGMRPPPNSLGPAMPGINMGPGAGRPWPNPNSANSIPYSSSSPGTYVGPPGGGGPPGTPIMPSPADSTNSSDNIYTMINPVPPGGSRSNFPMGPGSDGPMGGMGGMEPHHMNGSLGSGDIDGLPKNSPNNISGISNPPGTPRDDGELGGNFLHSFQNDNYSPSMTMSV

SEQ ID NO: 38975 - protein, 837 aa, Homo sapiens
MEPAVGGPGPLIVNNKQPQPPPPPPPAAAQPPPGAPRAAAGLLPGGKAREFNRNQRKDSEGYSESPDLEFEYADTDKWAAELSELYSYTEGPEFLMNRKCFEEDFRIHVTDKKWTELDTNQHRTHAMRLLDGLEVTAREKRLKVARAILYVAQGTFGECSSEAEVQSWMRYNIFLLLEVGTFNALVELLNMEIDNSAACSSAVRKPAISLADSTDLRVLLNIMYLIVETVHQECEGDKAEWRTMRQTFRAELGSPLYNNEPFAIMLFGMVTKFCSGHAPHFPMKKVLLLLWKTVLCTLGGFEELQSMKAEKRSILGLPPLPEDSIKVIRNMRAASPPASASDLIEQQQKRGRREHKALIKQDNLDAFNERDPYKADDSREEEEENDDDNSLEGETFPLERDEVMPPPLQHPQTDRLTCPKGLPWAPKVREKDIEMFLESSRSKFIGYTLGSDTNTVVGLPRPIHESIKTLKQHKYTSIAEVQAQMEEEYLRSPLSGGEEEVEQVPAETLYQGLLPSLPQYMIALLKILLAAAPTSKAKTDSINILADVLPEEMPTTVLQSMKLGVDVNRHKEVIVKAISAVLLLLLKHFKLNHVYQFEYMAQHLVFANCIPLILKFFNQNIMSYITAKNSISVLDYPHCVVHELPELTAESLEAGDSNQFCWRNLFSCINLLRILNKLTKWKHSRTMMLVVFKSAPILKRALKVKQAMMQLYVLKLLKVQTKYLGRQWRKSNMKTMSAIYQKVRHRLNDDWAYGNDLDARPWDFQAEECALRANIERFNARRYDRAHSNPDFLPVDNCLQSVLGQRVDLPEDFQMNYDLWLEREVFSKPISWEELLQ

SEQ ID NO: 38976 - protein, 742 aa, Homo sapiens
MNRKCFEEDFRIHVTDKKWTELDTNQHRTHAMRLLDGLEVTAREKRLKVARAILYVAQGTFGECSSEAEVQSWMRYNIFLLLEVGTFNALVELLNMEIDNSAACSSAVRKPAISLADSTDLRVLLNIMYLIVETVHQECEGDKAEWRTMRQTFRAELGSPLYNNEPFAIMLFGMVTKFCSGHAPHFPMKKVLLLLWKTVLCTLGGFEELQSMKAEKRSILGLPPLPEDSIKVIRNMRAASPPASASDLIEQQQKRGRREHKALIKQDNLDAFNERDPYKADDSREEEEENDDDNSLEGETFPLERDEVMPPPLQHPQTDRLTCPKGLPWAPKVREKDIEMFLESSRSKFIGYTLGSDTNTVVGLPRPIHESIKTLKQHKYTSIAEVQAQMEEEYLRSPLSGGEEEVEQVPAETLYQGLLPSLPQYMIALLKILLAAAPTSKAKTDSINILADVLPEEMPTTVLQSMKLGVDVNRHKEVIVKAISAVLLLLLKHFKLNHVYQFEYMAQHLVFANCIPLILKFFNQNIMSYITAKNSISVLDYPHCVVHELPELTAESLEAGDSNQFCWRNLFSCINLLRILNKLTKWKHSRTMMLVVFKSAPILKRALKVKQAMMQLYVLKLLKVQTKYLGRQWRKSNMKTMSAIYQKVRHRLNDDWAYGNDLDARPWDFQAEECALRANIERFNARRYDRAHSNPDFLPVDNCLQSVLGQRVDLPEDFQMNYDLWLEREVFSKPISWEELLQ

SEQ ID NO: 38977 - protein, 440 aa, Homo sapiens
MLFGMVTKFCSGHAPHFPMKKVLLLLWKTVLCTLGGFEELQSMKAEKRSILGLPPLPEDSIKVIRNMRAASPPASASDLIEQQQKRGRREHKALIKQDNLDAFNERDPYKADDSREEEEENDDDNSLEGETFPLERDEVMPPPLQHPQTDRLTCPKGLPWAPKVREKDIEMFLESSRSKFIGYTLGSDTNTVVGLPRPIHESIKTLKQHKYTSIAEVQAQMEEEYLRSPLSGGEEEVEQVPAETLYQGLLPSLPQYMIALLKILLAAAPTSKAKTDSINILADVLPEEMPTTVLQSMKLGVDVNRHKEVIVKAISAVLLLLLKHFKLNHVYQVPTGLSLLSCGLGPRALLLLQPTRTGALAFDPLELCMNVLRHGPSAKAFHPWRKEGKVPRAAPFFFFFFSCWLQFEYMAQHLVFANCIPLILKFFNQNIMSYITAKNR

SEQ ID NO: 38978 - protein, 212 aa, Homo sapiens
MEPAVGGPGPLIVNNKQPQPPPPPPPAAAQPPPGAPRAAAGLLPGGKAREFNRNQRKDSEGYSESPDLEFEYADTDKWAAELSELYSYTEGPEFLMNRKCFEEDFRIHVTDKKWTELDTNQHRTHAMRLLDGLEVTAREKRLKVARAILYVAQGTFGECSSEAEVQSWMRYNIFLLLEVGTFNALVELLNMEIEHCCVRPAVSALAGGQAQD

SEQ ID NO: 38979 - protein, 262 aa, Homo sapiens
MKTPFGKTPGQRSRADAGHAGVSANMMKKRTSHKKHRSSVGPSKPVSQPRRNIVGCRIQHGWKEGNGPVTQWKGTVLDQVPVNPSLYLIKYDGFDCVYGLELNKDERVSALEVLPDRVATSRISDAHLADTMIGKAVEHMFETEDGSKDEWRGMVLARAPVMNTWFYITYEKDPVLYMYQLLDDYKEGDLRIMPDSNDSPPAEREPGEVVDSLVGKQVEYAKEDGSKRTGMVIHQVEAKPSVYFIKFDDDFHIYVYDLVKTS

SEQ ID NO: 38980 - protein, 685 aa, Homo sapiens
MDFREILMIASKGQGVNNVPKRYSLAVGPPKKDPKVKGVQSAAVQAFLKRKEEELRRKALEEKRRKEELVKKRIELKHDKKARAMAKRTKDNFHGYNGIPIEEKSKKRQATESHTSQGTDREYEMEEENEFLEYNHAESEQEYEEEQEPPKVESKPKVPLKSAPPPMNFTDLLRLAEKKQFEPVEIKVVKKSEERPMTAEELREREFLERKHRRKKLETDGKLPPTVSKKAPSQKESVGTKLSKGSGDRHPSSKGMPLPHAEKKSRPSMANEKHLALSSSKSMPGERIKAGSGNSSQPSLREGHDKPVFNGAGKPHSSTSSPSVPKTSASRTQKSAVEHKAKKSLSHPSHSRPGPMVTPHNKAKSPGVRQPGSSSSSAPGQPSTGVARPTVSSGPVPRRQNGSSSSGPERSISGSKKPTNDSNPSRRTVSGTCGPGQPASSSGGPGRPISGSVSSARPLGSSRGPGRPVSSPHELRRPVSGLGPPGRSVSGPGRSISGSIPAGRTVSNSVPGRPVSSLGPGQTVSSSGPTIKPKCTVVSETISSKNIISRSSNGQMNGMKPPLSGYRAAQGPQRLPFPTGYKRQREYEEEDDDDDEYDSEMEDFIEDEGEPQEEISKHIREIFGYDRKKYKDESDYALRYMESSWKEQQKEEAKSLRLGMQEDLEEMRREEEEMQRRRAKKLKRR

SEQ ID NO: 38981 - protein, 673 aa, Homo sapiens
MDFREILMIASKGQGVNNVPKRYSLAVGPPKKDPKVKGVQSAAVQAFLKRKEEELRRKALEEKRRKEELVKKRIELKHDKKARAMAKRTKDNFHGYNGIPIEEKSKKRQATESHTSQGTDREYEMEEENEFLEYNHAESEQEYEEEQEPPKVESKPKVPLKSAPPPMNFTDLLRLAEKKQFEPVEIKVVKKSEERPMTAEELREREFLERKHRRKKLETDGKLPPTVSKKAPSQKESVGTKLSKGSGDRHPSSKGMPLPHAEKKSRPSMANEKHLALSSSKSMPGERIKAGSGNSSQPSLREGHDKPVFNGAGKPHSSTSSPSVPKTSASRTQKSAVEHKAKKSLSHPSHSRPGPMVTPHNKAKSPGVRQPGSSSSSAPGQPSTGVARPTVSSGPVPRRQNGSSSSGPERSISGSKKPTNDSNPSRRTVSGTCGPGQPASSSGGPGRPISGSVSSARPLGSSRGPGRPVSSPHELRRPVSGLGPPGRSVSGPGRSISGSIPAGRTVSNSVPGRPVSSLGPGQTVSSSGPTIKPKCTVVSETISSKNIISRSSNGQMNGMKPPLSGYRAAQGPQRLPFPTGYKRQREYEEEDDDDDEYDSEMEDFIEDEGEPQEEISKHIREIFGYDRKKYKDESDYALRYMESSWKEMQEDLEEMRREEEEMQRRRAKKLKRR

SEQ ID NO: 38982 - protein, 351 aa, Homo sapiens
MDFREILMIASKGQGVNNVPKRYSLAVGPPKKDPKVKGVQSAAVQAFLKRKEEELRRKALEEKRRKEELVKKRIELKHDKKARAMAKRTKDNFHGYNGIPIEEKSKRQATESHTSQGTDREYEMEEENEFLEYNHAESEQEYEEEQEPPKVESKPKVPLKSAPPPMNFTDLLRLAEKKQFEPVEIKVVKKSEERPMTAEELREREFLERKHRRKKLETDGKLPPTVSKKAPSQKESVGTKLSKGSGDRHPSSKGMPLPHAEKKSRPSMANEKHLALSSSKSMPGERIKAGSGNSSQPSLREGHDKPVFNGAGKPHSSTSSPKHVWKENKYMKRDWLFYFQCIEYIRLLFIF

SEQ ID NO: 38983 - protein, 83 aa, Homo sapiens
MAELGEADEAELQRLVAAEQQKAQFTAQVHHFMELCWDKCVEKPGNRLDSRTENCLSSCVDRFIDTTLAITSRFAQIVQKGGQ

SEQ ID NO: 38984 - protein, 714 aa, Homo sapiens
MARAGSCGGAAAGAGRPEPWELSLEEVLKAYEQPLNEEQAWAVCFQGCRGLRGSPGRRLRDTGDLLLRGDGSVGAREPEAAEPATMVVPLASSEAQTVQSLGFAIYRALDWGLDESEERELSPQLERLIDLMANNDSEDSGCGAADEGYGGPEEEEEAEGVPRSVRTFAQAMRLCAARLTDPRGAQAHYQAVCRALFVETLELRAFLARVREAKEMLQKLREDEPHLETPRAELDSLGHTDWARLWVQLMRELRRGVKLKKVQEQEFNPLPTEFQLTPFEMLMQDIRARNYKLRKVMVDGDIPPRVKKDAHELILDFIRSRPPLKQVSERRLRPLPPKQRSLHEKILEEIKQERRLRPVRGEGWAARGFGSLPCILNACSGDAKSTSCINLSVTDAGGSAQRPRPRVLLKAPTLAEMEEMNTSEEEESPCGEVTLKRDRSFSEHDLAQLRSEVASGLQSATHPPGGTEPPRPRAGSAHVWRPGSRDQGTCPASVSDPSHPLLSNRGSSGDRPEASMTPDAKHLWLEFSHPVESLALTVEEVMDVRRVLVKAEMEKFLQNKELFSSLKKGKICCCCRAKFPLFSWPPSCLFCKRAVCTSCSIKMKMPSKKFGHIPVYTLGFESPQRVSAAKTAPIQRRDIFQSLQGPQWQSVEEAFPHIYSHGCVLKDVCSECTSFVADVVRSSRKSVDVLNTTPRRSRQTQSLYIPNTRTLDFK

SEQ ID NO: 38985 - protein, 666 aa, Homo sapiens
MARAGSCGGAAAGAGRPEPWELSLEEVLKAYEQPLNEEQAWAVCFQGCRGLRGSPGRRLRDTGDLLLRGDGSVGAREPEAAEPATMVVPLASSEAQTVQSLGFAIYRALDWGLDESEERELSPQLERLIDLMANNDSEDSGCGAADEGYGGPEEEEEAEGVPRSVRTFAQAMRLCAARLTDPRGAQAHYQAVCRALFVETLELRAFLARVREAKEMLQKLREDEPHLETPRAELDSLGHTDWARLWVQLMRELRRGVKLKKVQEQEFNPLPTEFQLTPFEMLMQDIRARNYKLRKVMVDGDIPPRVKKDAHELILDFIRSRPPLKQVSERRLRPLPPKQRSLHEKILEEIKQERRLRPVRGEGWAARGFGSLPCILNACSGDAKSTSCINLSVTDAGGSAQRPRPRVLLKAPTLAEMEEMNTSEEEESPCGEVTLKRDRSFSEHDLAQLRSEVASGLQSATHPPGGTEPPRPRAGSAHVWRPGSRDQGTCPASVSDPSHPLLSNRGSSGDRPEASMTPDAKHLWLEFSHPVESLALTVEEVMDVRRVLVKAEMEKFLQNKELFSSLKKGKICCCCRAKFPLFSWPPSCLFCKRSLQGPQWQSVEEAFPHIYSHGCVLKDVCSECTSFVADVVRSSRKSVDVLNTTPRRSRQTQSLYIPNTRTLDFK

SEQ ID NO: 38986 - protein, 666 aa, Homo sapiens
MSCLCLGLLWTDSCCLPGRVLGPLHPPAAFSPPHPPAVPPSDRAPVPQTVQSLGFAIYRALDWGLDESEERELSPQLERLIDLMANNDSEDSGCGAADEGYGGPEEEEEAEGVPRSVRTFAQAMRLCAARLTDPRGAQAHYQAVCRALFVETLELRAFLARVREAKEMLQKLREDEPHLETPRAELDSLGHTDWARLWVQLMRELRRGVKLKKVQEQEFNPLPTEFQLTPFEMLMQDIRARNYKLRKVMVDGDIPPRVKKDAHELILDFIRSRPPLKQVSERRLRPLPPKQRSLHEKILEEIKQERRLRPVRGEGWAARGFGSLPCILNACSGDAKSTSCINLSVTDAGGSAQRPRPRVLLKAPTLAEMEEMNTSEEEESPCGEVTLKRDRSFSEHDLAQLRSEVASGLQSATHPPGGTEPPRPRAGSAHVWRPGSRDQGTCPASVSDPSHPLLSNRGSSGDRPEASMTPDAKHLWLEFSHPVESLALTVEEVMDVRRVLVKAEMEKFLQNKELFSSLKKGKICCCCRAKFPLFSWPPSCLFCKRAVCTSCSIKMKMPSKKFGHIPVYTLGFESPQRVSAAKTAPIQRRDIFQSLQGPQWQSVEEAFPHIYSHGCVLKDVCSECTSFVADVVRSSRKSVDVLNTTPRRSRQTQSLYIPNTRTLDFK

SEQ ID NO: 38987 - protein, 581 aa, Homo sapiens
MANNDSEDSGCGAADEGYGGPEEEEEAEGVPRSVRTFAQAMRLCAARLTDPRGAQAHYQAVCRALFVETLELRAFLARVREAKEMLQKLREDEPHLETPRAELDSLGHTDWARLWVQLMRELRRGVKLKKVQEQEFNPLPTEFQLTPFEMLMQDIRARNYKLRKVDGDIPPRVKKDAHELILDFIRSRPPLKQVSERRLRPLPPKQRSLHEKILEEIKQERRLRPVRGEGWAARGFGSLPCILNACSGDAKSTSCINLSVTDAGGSAQRPRPRVLLKAPTLAEMEEMNTSEEEESPCGEVTLKRDRSFSEHDLAQLRSEVASGLQSATHPPGGTEPPRPRAGSAHVWRPGSRDQGTCPASVSDPSHPLLSNRGSSGDRPEASMTPDAKHLWLEFSHPVESLALTVEEVMDVRRVLVKAEMEKFLQNKELFSSLKKGKICCCCRAKFPLFSWPPSCLFCKRAVCTSCSIKMKMPSKKFGHIPVYTLGFESPQRVSAAKTAPIQRRDIFQSLQGPQWQSVEEAFPHIYSHGCVLKDVCSECTSFVADVVRSSRKSVDVLNTTPRRSRQTQSLYIPNTRTLDFK

SEQ ID NO: 38988 - protein, 252 aa, Homo sapiens
MAQLCGLRRSRAFLALLGSLLLSGVLAADRERSIHDFCLVSKVVGRCRASMPRWWYNVTDGSCQLFVYGGCDGNSNNYLTKEECLKKCATVTENATGDLATSRNAADSSVPSAPRRQDSEDHSSDMFNYEEYCTANAVTGPCRASFPRWYFDVERNSCNNFIYGGCRGNKNSYRSEEACMLRCFRQQENPPLPLGSKVVVLAGLFVMVLILFLGASMVYLIRVARRNQERALRTVWSSGDDKEQLVKNTYVL

SEQ ID NO: 38989 - protein, 195 aa, Homo sapiens
MAQLCGLRRSRAFLALLGSLLLSGVLAADRERSIHENATGDLATSRNAADSSVPSAPRRQDSEDHSSDMFNYEEYCTANAVTGPCRASFPRWYFDVERNSCNNFIYGGCRGNKNSYRSEEACMLRCFRQQENPPLPLGSKVVVLAGLFVMVLILFLGASMVYLIRVARRNQERALRTVWSSGDDKEQLVKNTYVL

SEQ ID NO: 38990 - protein, 770 aa, Homo sapiens
MAQWNQLQQLDTRYLEQLHQLYSDSFPMELRQFLAPWIESQDWAYAASKESHATLVFHNLLGEIDQQYSRFLQESNVLYQHNLRRIKQFLQSRYLEKPMEIARIVARCLWEESRLLQTAATAAQQGGQANHPTAAVVTEKQQMLEQHLQDVRKRVQDLEQKMKVVENLQDDFDFNYKTLKSQGDMQDLNGNNQSVTRQKMQQLEQMLTALDQMRRSIVSELAGLLSAMEYVQKTLTDEELADWKRRQQIACIGGPPNICLDRLENWITSLAESQLQTRQQIKKLEELQQKVSYKGDPIVQHRPMLEERIVELFRNLMKSAFVVERQPCMPMHPDRPLVIKTGVQFTTKVRLLVKFPELNYQLKIKVCIDKDSGDVAALRGSRKFNILGTNTKVMNMEESNNGSLSAEFKHLTLREQRCGNGGRANCDASLIVTEELHLITFETEVYHQGLKIDLETHSLPVVVISNICQMPNAWASILWYNMLTNNPKNVNFFTKPPIGTWDQVAEVLSWQFSSTTKRGLSIEQLTTLAEKLLGPGVNYSGCQITWAKFCKENMAGKGFSFWVWLDNIIDLVKKYILALWNEGYIMGFISKERERAILSTKPPGTFLLRFSESSKEGGVTFTWVEKDISGKTQIQSVEPYTKQQLNNMSFAEIIMGYKIMDATNILVSPLVYLYPDIPKEEAFGKYCRPESQEHPEADPGSAAPYLKTKFICVTPTTCSNTIDLPMSPRTLDSLMQFGNNGEGAEPSAGGQFESLTFDMELTSECATSPM

SEQ ID NO: 38991 - protein, 769 aa, Homo sapiens
MAQWNQLQQLDTRYLEQLHQLYSDSFPMELRQFLAPWIESQDWAYAASKESHATLVFHNLLGEIDQQYSRFLQESNVLYQHNLRRIKQFLQSRYLEKPMEIARIVARCLWEESRLLQTAATAAQQGGQANHPTAAVVTEKQQMLEQHLQDVRKRVQDLEQKMKVVENLQDDFDFNYKTLKSQGDMQDLNGNNQSVTRQKMQQLEQMLTALDQMRRSIVSELAGLLSAMEYVQKTLTDEELADWKRRQQIACIGGPPNICLDRLENWITSLAESQLQTRQQIKKLEELQQKVSYKGDPIVQHRPMLEERIVELFRNLMKSAFVVERQPCMPMHPDRPLVIKTGVQFTTKVRLLVKFPELNYQLKIKVCIDKDSGDVAALRGSRKFNILGTNTKVMNMEESNNGSLSAEFKHLTLREQRCGNGGRANCDASLIVTEELHLITFETEVYHQGLKIDLETHSLPVVVISNICQMPNAWASILWYNMLTNNPKNVNFFTKPPIGTWDQVAEVLSWQFSSTTKRGLSIEQLTTLAEKLLGPGVNYSGCQITWAKFCKENMAGKGFSFWVWLDNIIDLVKKYILALWNEGYIMGFISKERERAILSTKPPGTFLLRFSESSKEGGVTFTWVEKDISGKTQIQSVEPYTKQQLNNMSFAEIIMGYKIMDATNILVSPLVYLYPDIPKEEAFGKYCRPESQEHPEADPGAAPYLKTKFICVTPTTCSNTIDLPMSPRTLDSLMQFGNNGEGAEPSAGGQFESLTFDMELTSECATSPM

SEQ ID NO: 38992 - protein, 722 aa, Homo sapiens
MAQWNQLQQLDTRYLEQLHQLYSDSFPMELRQFLAPWIESQDWAYAASKESHATLVFHNLLGEIDQQYSRFLQESNVLYQHNLRRIKQFLQSRYLEKPMEIARIVARCLWEESRLLQTAATAAQQGGQANHPTAAVVTEKQQMLEQHLQDVRKRVQDLEQKMKVVENLQDDFDFNYKTLKSQGDMQDLNGNNQSVTRQKMQQLEQMLTALDQMRRSIVSELAGLLSAMEYVQKTLTDEELADWKRRQQIACIGGPPNICLDRLENWITSLAESQLQTRQQIKKLEELQQKVSYKGDPIVQHRPMLEERIVELFRNLMKSAFVVERQPCMPMHPDRPLVIKTGVQFTTKVRLLVKFPELNYQLKIKVCIDKDSGDVAALRGSRKFNILGTNTKVMNMEESNNGSLSAEFKHLTLREQRCGNGGRANCDASLIVTEELHLITFETEVYHQGLKIDLETHSLPVVVISNICQMPNAWASILWYNMLTNNPKNVNFFTKPPIGTWDQVAEVLSWQFSSTTKRGLSIEQLTTLAEKLLGPGVNYSGCQITWAKFCKENMAGKGFSFWVWLDNIIDLVKKYILALWNEGYIMGFISKERERAILSTKPPGTFLLRFSESSKEGGVTFTWVEKDISGKTQIQSVEPYTKQQLNNMSFAEIIMGYKIMDATNILVSPLVYLYPDIPKEEAFGKYCRPESQEHPEADPGSAAPYLKTKFICVTPFIDAVWK

SEQ ID NO: 38993 - protein, 285 aa, Homo sapiens
MLLATFKLCAGSSYRHMRNMKGLRQQAVMAISQELNRRALGGPTPSTWINQVRRRSSLLGSRLEETLYSDQELAYLQQGEEAMQKALGILSNQEGWKKESQQDNGDKVMSKVVPDVGKVFRLEVVVDQPMERLYEELVERMEAMGEWNPNVKEIKVLQKIGKDTFITHELAAEAAGNLVGPRDFVSVRCAKRRGSTCVLAGMATDFGNMPEQKGVIRAEHGPTCMVLHPLAGSPSKTKLTWLLSIDLKGWLPKSIINQVLSQTQVDFANHLRKRLESHPASEARC

SEQ ID NO: 38994 - protein, 2564 aa, Homo sapiens
MAQVPGEVDNMEGLPAPNNNPAARWESPDRGWEREQPAASTAAASLFECSRIKALADEREAVQKKTFTKWVNSHLARVGCHIGDLYVDLRDGFVLTRLLEVLSGEQLPRPTRGRMRIHSLENVDKALQFLKEQRVHLENVGSHDIVDGNHRLTLGLVWTIILRFQIQVIKIETEDNRETRSAKDALLLWCQMKTAGYPEVNIQNFTTSWRDGLAFNALIHRHRPDLVDFSKLTKSNANYNLQRAFRTAEQHLGLARLLDPEDVNMEAPDEKSIITYVVSFYHYFSKMKALAVEGKRIGKVLDQVLEVGKIIERYEELAAELLAWIHRTVGLISNQKFANSLSGVQQQLQAFTAYCTLEKPVKFQEKGNLEVLLFSIQSKLRACNRRLFVPREGCGIWDIDKAWGELEKAEHEREAALRAELIRQEKLELLAQRFDHKVAMRESWLNENQRLVSQDNFGYELPAVEAAMKKHEAIEADIAAYEERVQGVAELAQALAAEGYYDIRRVAAQRDSVLRQWALLTGLVGARRTRLEQNLALQKVFQEMVYMVDWMEEMQAQLLSRECGQHLVEADDLLQKHGLLEGDIAAQSERVEALNAAALRFSQLQGYQPCDPQVICNRVNHVHGCLAELQEQAARRRAELEASRSLWALLQELEEAESWARDKERLLEAAGGGGAAGAAGAAGTAGGAHDLSSTARLLAQHKILQGELGGRRALLQQALRCGEELVAAGGAVGPGADTVHLVGLAERAASARRRWQRLEEAAARRERRLQEARALHQFGADLDGLLDWLRDAYRLAAAGDFGHDEASSRRLARQHRALTGEVEAHRGPVSGLRRQLATLGGASGAGPLVVALQVRVVEAEQLFAEVTEVAALRRQWLRDALAVYRMFGEVHACELWIGEKEQWLLSMRVPDSLDDVEVVQHRFESLDQEMNSLMGRVLDVNHTVQELVEGGHPSSDEVRSCQDHLNSRWNRIVELVEQRKEEMSAVLLVENHVLEVAEVRAQVREKRRAVESAPRAGGALQWRLSGLEAALQALEPRQAALLEEAALLAERFPAQAARLHQGAEELGAEWGALASAAQACGEAVAAAGRLQRFLHDLDAFLDWLVRAQEAAGGSEGPLPNSLEEADALLARHAALKEEVDQREEDYARIVAASEALLAADGAELGPGLALDEWLPHLELGWHKLLGLWEARREALVQAHIYQLFLRDLRQALVVLRNQEMALSGAELPGTVESVEEALKQHRDFLTTMELSQQKMQVAVQAAEGLLRQGNIYGEQAQEAVTRLLEKNQENQLRAQQWMQKLHDQLELQHFLRDCHELDGWIHEKMLMARDGTREDNHKLHKRWLRHQAFMAELAQNKEWLEKIEREGQQLMQEKPELAASVRKKLGEIRQCWAELESTTQAKARQLFEASKADQLVQSFAELDKKLLHMESQLQDVDPGGDLATVNSQLKKLQSMESQVEEWYREVGELQAQTAALPLEPASKELVGERQNAVGERLVRLLEPLQERRRLLLASKELHQVAHDLDDELAWVQERLPLAMQTERGNGLQAVQQHIKKNQGLRREIQAHGPRLEEVLERAGALASLRSPEAEAVRRGLEQLQSAWAGLREAAERRQQVLDAAFQVEQYYFDVAEVEAWLGEQELLMMSEDKGKDEQSTLQLLKKHLQLEQGVENYEESIAQLSRQCRALLEMGHPDSEQISRRQSQVDRLYVALKELGEERRVALEQQYWLYQLSRQVSELEHWIAEKEVVAGSPELGQDFEHVSVLQEKFSEFASETGMAGRERLAAVNQMVDELIECGHTAAATMAEWKDGLNEAWAELLELMGTRAQLLAASRELHKFFSDARELQGQIEEKRRRLPRLTTPPEPRPSASSMQRTLRAFEHDLQLLVSQVRQLQEGAAQLRTVYAGEHAEAIASREQEVLQGWKELLSACEDARLHVSSTADALRFHSQVRDLLSWMDGIASQIGAADKPRDVSSVEVLMNYHQGLKTELEARVPELTTCQELGRSLLLNKSAMADEIQAQLDKLGTRKEEVSEKWDRHWEWLQQMLEVHQFAQEAVVADAWLTAQEPLLQSRELGSSVDEVEQLIRRHEAFRKAAAAWEERFSSLRRLTTIEKIKAEQSKQPPTPLLGRKFFGDPTELAAKAAPLLRPGGYERGLEPLARRASDTLSAEVRTRVGYVRQELKPERLQPRIDRLPEIPGRVEPAALPAAPEDAAETPATPAAAEQVRPRPERQESADRAEELPRRRRPERQESVDQSEEAARRRRPERQESAEHEAAHSLTLGRYEQMERRRERRERRLERQESSEQEMPIRGDLVKGKATLADIVEQLQEKEAGPGLPAGPSLPQPRELPPGRLPNGLELPERTPRPDRPRARDRPKPRRRPRPREGGEGGGSRRSRSAPAQGGSAPAPPPPPTHTVQHEGFLLRKRELDANRKSSNRSWVSLYCVLSKGELGFYKDSKGPASGSTHGGEPLLSLHKATSEVASDYKKKKHVFKLQTQDGSEFLLQAKDEEEMNGWLEAVASSVAEHAEIARWGQTLPTTSSTDEGNPKREGGDRRASGRRK

SEQ ID NO: 38995 - protein, 1309 aa, Homo sapiens
MAQVPGEVDNMEGLPAPNNNPAARWESPDRGWEREQPAASTAAASLFECSRIKALADEREAVQKKTFTKWVNSHLARVGCHIGDLYVDLRDGFVLTRLLEVLSGEQLPRPTRGRMRIHSLENVDKALQFLKEQRVHLENVGSHDIVDGNHRLTLGLVWTIILRFQIQVIKIETEDNRETRSAKDALLLWCQMKTAGYPEVNIQNFTTSWRDGLAFNALIHRHRPDLVDFSKLTKSNANYNLQRAFRTAEQHLGLARLLDPEDVNMEAPDEKSIITYVVSFYHYFSKMKALAVEGKRIGKVLDQVLEVGKIIERYEELAAELLAWIHRTVGLISNQKFANSLSGVQQQLQAFTAYCTLEKPVKFQEKGNLEVLLFSIQSKLRACNRRLFVPREGCGIWDIDKAWGELEKAEHEREAALRAELIRQEKLELLAQRFDHKVAMRESWLNENQRLVSQDNFGYELPAVEAAMKKHEAIEADIAAYEERVQGVAELAQALAAEGYYDIRRVAAQRDSVLRQWALLTGLVGARRTRLEQNLALQKVFQEMVYMVDWMEEMQAQLLSRECGQHLVEADDLLQKHGLLEGDIAAQSERVEALNAAALRFSQLQGYQPCDPQVICNRVNHVHGCLAELQEQAARRRAELEASRSLWALLQELEEAESWARDKERLLEAAGGGGAAGAAGAAGTAGGAHDLSSTARLLAQHKILQGELGGRRALLQQALRCGEELVAAGGAVGPGADTVHLVGLAERAASARRRWQRLEEAAARRERRLQEARALHQFGADLDGLLDWLRDAYRLAAAGDFGHDEASSRRLARQHRALTGEVEAHRGPVSGLRRQLATLGGASGAGPLVVALQVRVVEAEQLFAEVTEVAALRRQWLRDALAVYRMFGEVHACELWIGEKEQWLLSMRVPDSLDDVEVVQHRFESLDQEMNSLMGRVLDVNHTVQELVEGGHPSSDEVRSCQDHLNSRWNRIVELVEQRKEEMSAVLLVENHVLEVAEVRAQVREKRRAVESAPRAGGALQWRLSGLEAALQALEPRQAALLEEAALLAERFPAQAARLHQGAEELGAEWGALASAAQACGEAVAAAGRLQRFLHDLDAFLDWLVRAQEAAGGSEGPLPNSLEEADALLARHAALKEEVDQREEDYARIVAASEALLAADGAELGPGLALDEWLPHLELGWHKLLGLWEARREALVQAHIYQLFLRDLRQALVVLRNQEMALSGAELPGTVESVEEALKQHRDFLTTMELSQQKMQVAVQAAEGLLRQGNIYGEQAQEAVTRLLEKCLIIHPALLHPPWEPPYLPRSSS

SEQ ID NO: 38996 - protein, 1307 aa, Homo sapiens
MPHYPSCSSAPSLGTPIPPQIQQLEARHRNQENQLRAQQWMQKLHDQLELQHFLRDCHELDGWIHEKMLMARDGTREDNHKLHKRWLRHQAFMAELAQNKEWLEKIEREGQQLMQEKPELAASVRKKLGEIRQCWAELESTTQAKARQLFEASKADQLVQSFAELDKKLLHMESQLQDVDPGGDLATVNSQLKKLQSMESQVEEWYREVGELQAQTAALPLEPASKELVGERQNAVGERLVRLLEPLQERRRLLLASKELHQVAHDLDDELAWVQERLPLAMQTERGNGLQAVQQHIKKNQGLRREIQAHGPRLEEVLERAGALASLRSPEAEAVRRGLEQLQSAWAGLREAAERRQQVLDAAFQVEQYYFDVAEVEAWLGEQELLMMSEDKGKDEQSTLQLLKKHLQLEQGVENYEESIAQLSRQCRALLEMGHPDSEQISRRQSQVDRLYVALKELGEERRVALEQQYWLYQLSRQVSELEHWIAEKEVVAGSPELGQDFEHVSVLQEKFSEFASETGMAGRERLAAVNQMVDELIECGHTAAATMAEWKDGLNEAWAELLELMGTRAQLLAASRELHKFFSDARELQGQIEEKRRRLPRLTTPPEPRPSASSMQRTLRAFEHDLQLLVSQVRQLQEGAAQLRTVYAGEHAEAIASREQEVLQGWKELLSACEDARLHVSSTADALRFHSQVRDLLSWMDGIASQIGAADKPRDVSSVEVLMNYHQGLKTELEARVPELTTCQELGRSLLLNKSAMADEIQAQLDKLGTRKEEVSEKWDRHWEWLQQMLEVHQFAQEAVVADAWLTAQEPLLQSRELGSSVDEVEQLIRRHEAFRKAAAAWEERFSSLRRLTTIEKIKAEQSKQPPTPLLGRKFFGDPTELAAKAAPLLRPGGYERGLEPLARRASDTLSAEVRTRVGYVRQELKPERLQPRIDRLPEIPGRVEPAALPAAPEDAAETPATPAAAEQVRPRPERQESADRAEELPRRRRPERQESVDQSEEAARRRRPERQESAEHEAAHSLTLGRYEQMERRRERRERRLERQESSEQEMPIRGDLVKGKATLADIVEQLQEKEAGPGLPAGPSLPQPRELPPGRLPNGLELPERTPRPDRPRARDRPKPRRRPRPREGGEGGGSRRSRSAPAQGGSAPAPPPPPTHTVQHEGFLLRKRELDANRKSSNRSWVSLYCVLSKGELGFYKDSKGPASGSTHGGEPLLSLHKATSEVASDYKKKKHVFKLQTQDGSEFLLQAKDEEEMNGWLEAVASSVAEHAEIARWGQTLPTTSSTDEGNPKREGGDRRASGRRK

SEQ ID NO: 38997 - protein, 2154 aa, Homo sapiens
MAQVPGEVDNMEGLPAPNNNPAARWESPDRGWEREQPAASTAAASLFECSRIKALADEREAVQKKTFTKWVNSHLARVGCHIGDLYVDLRDGFVLTRLLEVLSGEQLPRPTRGRMRIHSLENVDKALQFLKEQRVHLENVGSHDIVDGNHRLTLGLVWTIILRFQIQVIKIETEDNRETRSAKDALLLWCQMKTAGYPEVNIQNFTTSWRDGLAFNALIHRHRPDLVDFSKLTKSNANYNLQRAFRTAEQHLGLARLLDPEDVNMEAPDEKSIITYVVSFYHYFSKMKALAVEGKRIGKVLDQVLEVGKIIERYEELAAELLAWIHRTVGLISNQKFANSLSGVQQQLQAFTAYCTLEKPVKFQEKGNLEVLLFSIQSKLRACNRRLFVPREGCGIWDIDKAWGELEKAEHEREAALRAELIRQEKLELLAQRFDHKVAMRESWLNENQRLVSQDNFGYELPAVEAAMKKHEAIEADIAAYEERVQGVAELAQALAAEGYYDIRRVAAQRDSVLRQWALLTGLVGARRTRLEQNLALQKVFQEMVYMVDWMEEMQAQLLSRECGQHLVEADDLLQKHGLLEGDIAAQSERVEALNAAALRFSQLQGYQPCDPQVICNRVNHVHGCLAELQEQAARRRAELEASRSLWALLQELEEAESWARDKERLLEAAGGGGAAGAAGAAGTAGGAHDLSSTARLLAQHKILQGELGGRRALLQQALRCGEELVAAGGAVGPGADTVHLVGLAERAASARRRWQRLEEAAARRERRLQEARALHQFGADLDGLLDWLRDAYRLAAAGDFGHDEASSRRLARQHRALTGEVEAHRGPVSGLRRQLATLGGASGAGPLVVALQVRVVEAEQLFAEVTEVAALRRQWLRDALAVYRMFGEVHACELWIGEKEQWLLSMRVPDSLDDVEVVQHRFESLDQEMNSLMGRVLDVNHTVQELVEGGHPSSDEVRSCQDHLNSRWNRIVELVEQRKEEMSAVLLVENHVLEVAEVRAQVREKRRAVESAPRAGGALQWRLSGLEAALQALEPRQAALLEEAALLAERFPAQAARLHQGAEELGAEWGALASAAQACGEAVAAAGRLQRFLHDLDAFLDWLVRAQEAAGGSEGPLPNSLEEADALLARHAALKEEVDQREEDYARIVAASEALLAADGAELGPGLALDEWLPHLELGWHKLLGLWEARREALVQAHIYQLFLRDLRQALVVLRNQEMALSGAELPGTVESVEEALKQHRDFLTTMELSQQKMQVAVQAAEGLLRQGNIYGEQAQEAVTRLLEKNQENQLRAQQWMQKLHDQLELQHFLRDCHELDGWIHEKMLMARDGTREDNHKLHKRWLRHQAFMAELAQNKEWLEKIEREGQQLMQEKPELAASVRKKLGEIRQCWAELESTTQAKARQLFEASKADQLVQSFAELDKKLLHMESQLQDVDPGGDLATVNSQLKKLQSMESQVEEWYREVGELQAQTAALPLEPASKELVGERQNAVGERLVRLLEPLQERRRLLLASKELHQVAHDLDDELAWVQERLPLAMQTERGNGLQAVQQHIKKNQGLRREIQAHGPRLEEVLERAGALASLRSPEAEAVRRGLEQLQSAWAGLREAAERRQQVLDAAFQVEQYYFDVAEVEAWLGEQELLMMSEDKGKDEQSTLQLLKKHLQLEQGVENYEESIAQLSRQCRALLEMGHPDSEQISRRQSQVDRLYVALKELGEERRVALEQQYWLYQLSRQVSELEHWIAEKEVVAGSPELGQDFEHVSVLQEKFSEFASETGMAGRERLAAVNQMVDELIECGHTAAATMAEWKDGLNEAWAELLELMGTRAQLLAASRELHKFFSDARELQGQIEEKRRRLPRLTTPPEPRPSASSMQRTLRAFEHDLQLLVSQVRQLQEGAAQLRTVYAGEHAEAIASREQEVLQGWKELLSACEDARLHVSSTADALRFHSQVRDLLSWMDGIASQIGAADKPRDVSSVEVLMNYHQGLKTELEARVPELTTCQELGRSLLLNKSAMADEIQAQLDKLGTRKEEVSEKWDRHWEWLQQMLEVHQFAQEAVVADAWLTAQEPLLQSRELGSSVDEVEQLIRRHEAFRKAAAAWEERFSSLRRLTTPRREDHLNPGVQDQPWQHTEKPSLPKPKANKEKTARRDGTCL

SEQ ID NO: 38998 - protein, 678 aa, Homo sapiens
MLMARDGTREDNHKLHKRWLRHQAFMAELAQNKEWLEKIEREGQQLMQEKPELAASVRKKLGEIRQCWAELESTTQAKARQLFEASKADQLVQSFAELDKKLLHMESQLQDVDPGGDLATVNSQLKKLQSMESQVEEWYREVGELQAQTAALPLEPASKELVGERQNAVGERLVRLLEPLQERRRLLLASKELHQVAHDLDDELAWVQERLPLAMQTERGNGLQAVQQHIKKNQGLRREIQAHGPRLEEVLERAGALASLRSPEAEAVRRGLEQLQSAWAGLREAAERRQQVLDAAFQVEQYYFDVAEVEAWLGEQELLMMSEDKGKDEQSTLQLLKKHLQLEQGVENYEESIAQLSRQCRALLEMGHPDSEQISRRQSQVDRLYVALKELGEERRVALEQQYWLYQLSRQVSELEHWIAEKEVVAGSPELGQDFEHVSVLQEKFSEFASETGMAGRERLAAVNQMVDELIECGHTAAATMAEWKDGLNEAWAELLELMGTRAQLLAASRELHKFFSDARELQGQIEEKRRRLPRLTTPPEPRPSASSMQRTLRAFEHDLQLLVSQVRQLQEGAAQLRTVYAGEHAEAIASREQEVLQGWKELLSACEDARLHVSSTADALRFHSQVRDLLSWMDGIASQIGAADKPRCPSSLLGLPASPWWPTPATPSPLTAPFSME

SEQ ID NO: 38999 - protein, 1093 aa, Homo sapiens
MSWFNASQLSSFAKQALSQAQKSIDRVLDIQEEEPSIWAETIPYGEPGISSPVSGGWDTSTWGLKSNTEPQSPPIASPKAITKPVRRTVVDESENFFSAFLSPTDVQTIQKSPVVSKPPAKSQRPEEEVKSSLHESLHIGQSRTPETTESQVKDSSLCVSGETLAAGTSSPKTEGKHEETVNKESDMKVPTVSLKVSESVIDVKTTMESISNTSTQSLTAETKDIALEPKEQKHEDRQSNTPSPPVSTFSSGTSTTSDIEVLDHESVISESSASSRQETTDSKSSLHLMQTSFQLLSASACPEYNRLDDFQKLTESCCSSDAFERIDSFSVQSLDSRSVSEINSDDELSGKGYALVPIIVNSSTPKSKTVESAEGKSEEVNETLVIPTEEAEMEESGRSATPVNCEQPDILVSSTPINEGQTVLDKVAEQCEPAESQPEALSEKEDVCKTVEFLNEKLEKREAQLLSLSKEKALLEEAFDNLKDEMFRVKEESSSISSLKDEFTQRIAEAEKKVQLACKERDAAKKEIKNIKEELATRLNSSETADLLKEKDEQIRGLMEEGEKLSKQQLHNSNIIKKLRAKDKENENMVAKLNKKVKELEEELQHLKQVLDGKEEVEKQHRENIKKLNSMVERQEKDLGRLQVDMDELEEKNRSIQAALDSAYKELTDLHKANAAKDSEAQEAALSREMKAKEELSAALEKAQEEARQQQETLAIQVGDLRLALQRTEQAAARKEDYLRHEIGELQQRLQEAENRNQELSQSVSSTTRPLLRQIENLQATLGSQTSSWEKLEKNLSDRLGESQTLLAAAVERERAATEELLANKIQMSSMESQNSLLRQENSRFQAQLESEKNRLCKLEDENNRYQVELENLKDEYVRTLEETRKEKTLLNSQLEMERMKVEQERKKAIFTQETIKEKERKPFSVSSTPTMSRSSSISGVDMAGLQTSFLSQDESHDHSFGPMPISANGSNLYDAVRMGAGSSIIENLQSQLKLREGEITHLQLEIGNLEKTRSIMAEELVKLTNQNDELEEKVKEIPKLRTQLRDLDQRYNTILQMYGEKAEEAEELRLDLEDVKNMYKTQIDELLRQSLS

SEQ ID NO: 39000 - protein, 1096 aa, Homo sapiens
MSWFNASQLSSFAKQALSQAQKSIDRVLDIQEEEPSIWAETIPYGEPGISSPVSGGWDTSTWGLKSNTEPQSPPIASPKAITKPVRRTVVDESENFFSAFLSPTDVQTIQKSPVVSKPPAKSQRPEEEVKSSLHESLHIGQSRTPETTESQVKDSSLCVSGETLAAGTSSPKTEGKHEETVNKESDMKVPTVSLKVSESVIDVKTTMESISNTSTQSLTAETKDIALEPKEQKHEDRQSNTPSPPVSTFSSGTSTTSDIEVLDHESVISESSASSRQETTDSKSSLHLMQTSFQLLSASACPEYNRLDDFQKLTESCCSSDAFERIDSFSVQSLDSRSVSEINSDDELSGKGYALVPIIVNSSTPKSKTVESAEGKSEEVNETLVIPTEEAEMEESGRSATPVNCEQPDILVSSTPINEGQTVLDKVAEQCEPAESQPEALSEKEDVCKVTLTVEFLNEKLEKREAQLLSLSKEKALLEEAFDNLKDEMFRVKEESSSISSLKDEFTQRIAEAEKKVQLACKERDAAKKEIKNIKEELATRLNSSETADLLKEKDEQIRGLMEEGEKLSKQQLHNSNIIKKLRAKDKENENMVAKLNKKVKELEEELQHLKQVLDGKEEVEKQHRENIKKLNSMVERQEKDLGRLQVDMDELEEKNRSIQAALDSAYKELTDLHKANAAKDSEAQEAALSREMKAKEELSAALEKAQEEARQQQETLAIQVGDLRLALQRTEQAAARKEDYLRHEIGELQQRLQEAENRNQELSQSVSSTTRPLLRQIENLQATLGSQTSSWEKLEKNLSDRLGESQTLLAAAVERERAATEELLANKIQMSSMESQNSLLRQENSRFQAQLESEKNRLCKLEDENNRYQVELENLKDEYVRTLEETRKEKTLLNSQLEMERMKVEQERKKAIFTQETIKEKERKPFSVSSTPTMSRSSSISGVDMAGLQTSFLSQDESHDHSFGPMPISANGSNLYDAVRMGAGSSIIENLQSQLKLREGEITHLQLEIGNLEKTRSIMAEELVKLTNQNDELEEKVKEIPKLRTQLRDLDQRYNTILQMYGEKAEEAEELRLDLEDVKNMYKTQIDELLRQSLS

SEQ ID NO: 39001 - protein, 71 aa, Homo sapiens
MAGMALARAWKQMSWFYYQYLLVTALYMLEPWERTVFNSMLVSIVGMALYTGYVFMPQHIMAILHYFEIVQ

SEQ ID NO: 39002 - protein, 562 aa, Homo sapiens
MRPEPGGCCCRRTVRANGCVANGEVRNGYVRSSAAAAAAAAAGQIHHVTQNGGLYKRPFNEAFEETPMLVAVLTYVGYGVLTLFGYLRDFLRYWRIEKCHHATEREEQKDFVSLYQDFENFYTRNLYMRIRDNWNRPICSVPGARVDIMERQSHDYNWSFKYTGNIIKGVINMGSYNYLGFARNTGSCQEAAAKVLEEYGAGVCSTRQEIGNLDKHEELEELVARFLGVEAAMAYGMGFATNSMNIPALVGKGCLILSDELNHASLVLGARLSGATIRIFKHNNMQSLEKLLKDAIVYGQPRTRRPWKKILILVEGIYSMEGSIVRLPEVIALKKKYKAYLYLDEAHSIGALGPTGRGVVEYFGLDPEDVDVMMGTFTKSFGASGGYIGGKKELIDYLRTHSHSAVYATSLSPPVVEQIITSMKCIMGQDGTSLGKECVQQLAENTRYFRRRLKEMGFIIYGNEDSPVVPLMLYMPAKIGAFGREMLKRNIGVVVVGFPATPIIESRARFCLSAAHTKEILDTALKEIDEVGDLLQLKYSRHRLVPLLDRPFDETTYEETED

SEQ ID NO: 39003 - protein, 97 aa, Homo sapiens
MDKQSSAGGVKRSVPCDSNEANEMMPETPTGDSDPQPAPKKMKTSESSTILVVRYRRNFKRTSPEELLNDHARENRINPLQMEEEEFMEIMVEIPAK

SEQ ID NO: 39004 - protein, 225 aa, Homo sapiens
MAGTGLVAGEVVVDALPYFDQGYEAPGVREAAAALVEEETRRYRPTKNYLSYLTAPDYSAFETDIMRNEFERLAARQPIELLSMKRYELPAPSSGQKNDITAWQECVNNSMAQLEHQAVRIENLELMSQHGCNAWKVYNENLVHMIEHAQKELQKLRKHIQDLNWQRKNMQLTAGSKLREMESNWVSLVSKNYEIERTIVQLENEIYQIKQQHGEANKENIRQDF

SEQ ID NO: 39005 - protein, 238 aa, Homo sapiens
MSEDLAKQLASYKAQLQQVEAALSGNGENEDLLKLKKDLQEVIELTKDLLSTQPSETLASSDSFASTQPTHSWKVGDKCMAVWSEDGQCYEAEIEEIDEENGTAAITFAGYGNAEVTPLLNLKPVEEGRKAKEDSGNKPMSKKEMIAQQREYKKKKALKKAQRIKELEQEREDQKVKWQQFNNRAYSKNKKGQVKRSIFASPESVTGKVGVGTCGIADKPMTQYQDTSKYNVRHLMPQ

SEQ ID NO: 39006 - protein, 585 aa, Homo sapiens
MGSLKEELLKAIWHAFTALDQDHSGKVSKSQLKVLSHNLCTVLKVPHDPVALEEHFRDDDEGPVSNQGYMPYLNRFILEKVQDNFDKIEFNRMCWTLCVKKNLTKNPLLITEEDAFKIWVIFNFLSEDKYPLIIVSEEIEYLLKKLTEAMGGGWQQEQFEHYKINFDDSKNGLSAWELIELIGNGQFSKGMDRQTVSMAINEVFNELILDVLKQGYMMKKGHRRKNWTERWFVLKPNIISYYVSEDLKDKKGDILLDENCCVESLPDKDGKKCLFLVKCFDKTFEISASDKKKKQEWIQAIHSTIHLLKLGSPPPHKEARQRRKELRKKQLAEQEELERQMKELQAANESKQQELEAVRKKLEEAASRAAEEEKKRLQTQVELQARFSTELEREKLIRQQMEEQVAQKSSELEQYLQRVRELEDMYLKLQEALEDERQARQDEETVRKLQARLLEEESSKRAELEKWHLEQQQAIQTTEAEKQELENQRVLKEQALQEAMEQLEQLELERKQALEQYEEVKKKLEMATNKTKSWKDKVAHHEGLIRLIEPGSKNPHLITNWGPAAFTEAELEEREKNWKEKKTTE

SEQ ID NO: 39007 - protein, 134 aa, Homo sapiens
MSPLRPLLLALALASVPCAQGACPASADLKHSDGTRTCAKLYDKSDPYYENCCGGAELSLESGADLPYLPSNWANTASSLVVAPRCELTVWSRQGKAGKTHKFSAGTYPRLEEYRRGILGDWSNAISALYCRCS

SEQ ID NO: 39008 - protein, 5183 aa, Homo sapiens
MATSGGEEAAAAAPAPGTPATGADTTPGWEVAVRPLLSASYSAFEMKELPQLVASVIESESEILHHEKQYEPFYSSFVALSTHYITTVCSLIPRNQLQSVAAACKVLIEFSLLRLENPDEACAVSQKHLILLIKGLCTGCSRLDRTEIITFTAMMKSAKLPQTVKTLSDVEDQKELASPVSPELRQKEVQMNFLNQLTSVFNPRTVASQPISTQTLVEGENDEQSSTDQASAIKTKNVFIAQNVASLQELGGSEKLLRVCLNLPYFLRYINRFQDAVLANSFFIMPATVADATAVRNGFHSLVIDVTMALDTLSLPVLEPLNPSRLQDVTVLSLSCLYAGVSVATCMAILHVGSAQQVRTGSTSSKEDDYESDAATIVQKCLEIYDMIGQAISSSRRAGGEHYQNFQLLGAWCLLNSLFLILNLSPTALADKGKEKDPLAALRVRDILSRTKEGVGSPKLGPGKGHQGFGVLSVILANHAIKLLTSLFQDLQVEALHKGWETDGPPAALSIMAQSTSIQRIQRLIDSVPLMNLLLTLLSTSYRKACVLQRQRKGSMSSDASASTDSNTYYEDDFSSTEEDSSQDDDSEPILGQWFEETISPSKEKAAPPPPPPPPPLESSPRVKSPSKQAPGEKGNILASRKDPELFLGLASNILNFITSSMLNSRNNFIRNYLSVSLSEHHMATLASIIKEVDKDGLKGSSDEEFAAALYHFNHSLVTSDLQSPNLQNTLLQQLGVAPFSEGPWPLYIHPQSLSVLSRLLLIWQHKASAQGDPDVPECLKVWDRFLSTMKQNALQGVVPSETEDLNVEHLQMLLLIFHNFTETGRRAILSLFVQIIQELSVNMDAQMRFVPLILARLLLIFDYLLHQYSKAPVYLFEQVQHNLLSPPFGWASGSQDSNSRRATTPLYHGFKEVEENWSKHFSSDAVPHPRFYCVLSPEASEDDLNRLDSVACDVLFSKLVKYDELYAALTALLAAGSQLDTVRRKENKNVTALEACALQYYFLILWRILGILPPSKTYINQLSMNSPEMSECDILHTLRWSSRLRISSYVNWIKDHLIKQGMKAEHASSLLELASTTKCSSVKYDVEIVEEYFARQISSFCSIDCTTILQLHEIPSLQSIYTLDAAISKVQVSLDEHFSKMAAETDPHKSSEITKNLLPATLQLIDTYASFTRAYLLQNFNEEGTTEKPSKEKLQGFAAVLAIGSSRCKANTLGPTLVQNLPSSVQTVCESWNNINTNEFPNIGSWRNAFANDTIPSESYISAVQAAHLGTLCSQSLPLAASLKHTLLSLVRLTGDLIVWSDEMNPPQVIRTLLPLLLESSTESVAEISSNSLERILGPAESDEFLARVYEKLITGCYNILANHADPNSGLDESILEECLQYLEKQLESSQARKAMEEFFSDSGELVQIMMATANENLSAKFCNRVLKFFTKLFQLTEKSPNPSLLHLCGSLAQLACVEPVRLQAWLTRMTTSPPKDSDQLDVIQENRQLLQLLTTYIVRENSQVGEGVCAVLLGTLTPMATEMLANGDGTGFPELMVVMATLASAGQGAGHLQLHNAAVDWLSRCKKYLSQKNVVEKLNANVMHGKHVMILECTCHIMSYLADVTNALSQSNGQGPSHLSVDGEERAIEVDSDWVEELAVEEEDSQAEDSDEDSLCNKLCTFTITQKEFMNQHWYHCHTCKMVDGVGVCTVCAKVCHKDHEISYAKYGSFFCDCGAKEDGSCLALVKRTPSSGMSSTMKESAFQSEPRISESLVRHASTSSPADKAKVTISDGKVADEEKPKKSSLCRTVEGCREELQNQANFSFAPLVLDMLNFLMDAIQTNFQQASAVGSSSRAQQALSELHTVEKAVEMTDQLMVPTLGSQEGAFENVRMNYSGDQGQTIRQLISAHVLRRVAMCVLSSPHGRRQHLAVSHEKGKITVLQLSALLKQADSSKRKLTLTRLASAPVPFTVLSLTGNPCKEDYLAVCGLKDCHVLTFSSSGSVSDHLVLHPQLATGNFIIKAVWLPGSQTELAIVTADFVKIYDLCVDALSPTFYFLLPSSKIRDVTFLFNEEGKNIIVIMSSAGYIYTQLMEEASSAQQGPFYVTNVLEINHEDLKDSNSQVAGGGVSVYYSHVLQMLFFSYCQGKSFAATISRTTLEVLQLFPINIKSSNGGSKTSPALCQWSEVMNHPGLVCCVQQTTGVPLVVMVKPDTFLIQEIKTLPAKAKIQDMVAIRHTACNEQQRTTMILLCEDGSLRIYMANVENTSYWLQPSLQPSSVISIMKPVRKRKTATITTRTSSQVTFPIDFFEHNQQLTDVEFGGNDLLQVYNAQQIKHRLNSTGMYVANTKPGGFTIEISNNNSTMVMTGMRIQIGTQAIERAPSYIEIFGRTMQLNLSRSRWFDFPFTREEALQADKKLNLFIGASVDPAGVTMIDAVKIYGKTKEQFGWPDEPPEEFPSASVSNICPSNLNQSNGTGDSDSAAPTTTSGTVLERLVVSSLEALESCFAVGPIIEKERNKNAAQELATLLLSLPAPASVQQQSKSLLASLHTSRSAYHSHKDQALLSKAVQCLNTSSKEGKDLDPEVFQRLVITARSIAIMRPNNLVHFTESKLPQMETEGMDEGKEPQKQLEGDCCSFITQLVNHFWKLHASKPKNAFLAPACLPGLTHIEATVNALVDIIHGYCTCELDCINTASKIYMQMLLCPDPAVSFSCKQALIRVLRPRNKRRHVTLPSSPRSNTPMGDKDDDDDDDADEKMQSSGIPNGGHIRQESQEQSEVDHGDFEMVSESMVLETAENVNNGNPSPLEALLAGAEGFPPMLDIPPDADDETMVELAIALSLQQDQQGSSSSALGLQSLGLSGQAPSSSSLDAGTLSDTTASAPASDDEGSTAATDGSTLRTSPADHGGSVGSESGGSAVDSVAGEHSVSGRSSAYGDATAEGHPAGPGSVSSSTGAISTTTGHQEGDGSEGEGEGETEGDVHTSNRLHMVRLMLLERLLQTLPQLRNVGGVRAIPYMQVILMLTTDLDGEDEKDKGALDNLLSQLIAELGMDKKDVSKKNERSALNEVHLVVMRLLSVFMSRTKSGSKSSICESSSLISSATAAALLSSGAVDYCLHVLKSLLEYWKSQQNDEEPVATSQLLKPHTTSSPPDMSPFFLRQYVKGHAADVFEAYTQLLTEMVLRLPYQIKKITDTNSRIPPPVFDHSWFYFLSEYLMIQQTPFVRRQVRKLLLFICGSKEKYRQLRDLHTLDSHVRGIKKLLEEQGIFLRASVVTASSGSALQYDTLISLMEHLKACAEIAAQRTINWQKFCIKDDSVLYFLLQVSFLVDEGVSPVLLQLLSCALCGSKVLAALAASSGSSSASSSSAPVAASSGQATTQSKSSTKKSKKEEKEKEKDGETSGSQEDQLCTALVNQLNKFADKETLIQFLRCFLLESNSSSVRWQAHCLTLHIYRNSSKSQQELLLDLMWSIWPELPAYGRKAAQFVDLLGYFSLKTPQTEKKLKEYSQKAVEILRTQNHILTNHPNSNIYNTLSGLVEFDGYYLESDPCLVCNNPEVPFCYIKLSSIKVDTRYTTTQQVVKLIGSHTISKVTVKIGDLKRTKMVRTINLYYNNRTVQAIVELKNKPARWHKAKKVQLTPGQTEVKIDLPLPIVASNLMIEFADFYENYQASTETLQCPRCSASVPANPGVCGNCGENVYQCHKCRSINYDEKDPFLCNACGFCKYARFDFMLYAKPCCAVDPIENEEDRKKAVSNINTLLDKADRVYHQLMGHRPQLENLLCKVNEAAPEKPQDDSGTAGGISSTSASVNRYILQLAQEYCGDCKNSFDELSKIIQKVFASRKELLEYDLQQREAATKSSRTSVQPTFTASQYRALSVLGCGHTSSTKCYGCASAVTEHCITLLRALATNPALRHILVSQGLIRELFDYNLRRGAAAMREEVRQLMCLLTRDNPEATQQMNDLIIGKVSTALKGHWANPDLASSLQYEMLLLTDSISKEDSCWELRLRCALSLFLMAVNIKTPVVVENITLMCLRILQKLIKPPAPTSKKNKDVPVEALTTVKPYCNEIHAQAQLWLKRDPKASYDAWKKCLPIRGIDGNGKAPSKSELRHLYLTEKYVWRWKQFLSRRGKRTSPLDLKLGHNNWLRQVLFTPATQAARQAACTIVEALATIPSRKQQVLDLLTSYLDELSIAGECAAEYLALYQKLITSAHWKVYLAARGVLPYVGNLITKEIARLLALEEATLSTDLQQGYALKSLTGLLSSFVEVESIKRHFKSRLVGTVLNGYLCLRKLVVQRTKLIDETQDMLLEMLEDMTTGTESETKAFMAVCIETAKRYNLDDYRTPVFIFERLCSIIYPEENEVTEFFVTLEKDPQQEDFLQGRMPGNPYSSNEPGIGPLMRDIKNKICQDCDLVALLEDDSGMELLVNNKIISLDLPVAEVYKKVWCTTNEGEPMRIVYRMRGLLGDATEEFIESLDSTTDEEEDEEEVYKMAGVMAQCGGLECMLNRLAGIRDFKQGRHLLTVLLKLFSYCVKVKVNRQQLVKLEMNTLNVMLGTLNLALVAEQESKDSGGAAVAEQVLSIMEIILDESNAEPLSEDKGNLLLTGDKDQLVMLLDQINSTFVRSNPSVLQGLLRIIPYLSFGEVEKMQILVERFKPYCNFDKYDEDHSGDDKVFLDCFCKIAAGIKNNSNGHQLKDLILQKGITQNALDYMKKHIPSAKNLDADIWKKFLSRPALPFILRLLRGLAIQHPGTQVLIGTDSIPNLHKLEQVSSDEGIGTLAENLLEALREHPDVNKKIDAARRETRAEKKRMAMAMRQKALGTLGMTTNEKGQVVTKTALLKQMEELIEEPGLTCCICREGYKFQPTKVLGIYTFTKRVALEEMENKPRKQQGYSTVSHFNIVHYDCHLAAVRLARGREEWESAALQNANTKCNGLLPVWGPHVPESAFATCLARHNTYLQECTGQREPTYQLNIHDIKLLFLRFAMEQSFSADTGGGGRESNIHLIPYIIHTVLYVLNTTRATSREEKNLQGFLEQPKEKWVESAFEVDGPYYFTVLALHILPPEQWRATRVEILRRLLVTSQARAVAPGGATRLTDKAVKDYSAYRSSLLFWALVDLIYNMFKKVPTSNTEGGWSCSLAEYIRHNDMPIYEAADKALKTFQEEFMPVETFSEFLDVAGLLSEITDPESFLKDLLNSVP

SEQ ID NO: 39009 - protein, 5204 aa, Homo sapiens
MATSGGEEAAAAAPAPGTPATGADTTPGWEVAVRPLLSASYSAFEMKELPQLVASVIESESEILHHEKQYEPFYSSFVALSTHYITTVCSLIPRNQLQSVAAACKVLIEFSLLRLENPDEACAVSQKHLILLIKGLCTGCSRLDRTEIITFTAMMKSAKLPQTVKTLSDVEDQKELASPVSPELRQKEVQMNFLNQLTSVFNPRTVASQPISTQTLVEGENDEQSSTDQASAIKTKNVFIAQNVASLQELGGSEKLLRVCLNLPYFLRYINRFQDAVLANSFFIMPATVADATAVRNGFHSLVIDVTMALDTLSLPVLEPLNPSRLQDVTVLSLSCLYAGVSVATCMAILHVGSAQQVRTGSTSSKEDDYESDAATIVQKCLEIYDMIGQAISSSRRAGGEHYQNFQLLGAWCLLNSLFLILNLSPTALADKGKEKDPLAALRVRDILSRTKEGVGSPKLGPGKGHQGFGVLSVILANHAIKLLTSLFQDLQVEALHKGWETDGPPAALSIMAQSTSIQRIQRLIDSVPLMNLLLTLLSTSYRKACVLQRQRKGSMSSDASASTDSNTYYEDDFSSTEEDSSQDDDSEPILGQWFEETISPSKEKAAPPPPPPPPPLESSPRVKSPSKQAPGEKGNILASRKDPELFLGLASNILNFITSSMLNSRNNFIRNYLSVSLSEHHMATLASIIKEVDKDGLKGSSDEEFAAALYHFNHSLVTSDLQSPNLQNTLLQQLGVAPFSEGPWPLYIHPQSLSVLSRLLLIWQHKASAQGDPDVPECLKVWDRFLSTMKQNALQGVVPSETEDLNVEHLQMLLLIFHNFTETGRRAILSLFVQIIQELSVNMDAQMRFVPLILARLLLIFDYLLHQYSKAPVYLFEQVQHNLLSPPFGWASGSQDSNSRRATTPLYHGFKEVEENWSKHFSSDAVPHPRFYCVLSPEASEDDLNRLDSVACDVLFSKLVKYDELYAALTALLAAGSQLDTVRRKENKNVTALEACALQYYFLILWRILGILPPSKTYINQLSMNSPEMSECDILHTLRWSSRLRISSYVNWIKDHLIKQGMKAEHASSLLELASTTKCSSVKYDVEIVEEYFARQISSFCSIDCTTILQLHEIPSLQSIYTLDAAISKVQVSLDEHFSKMAAETDPHKSSEITKNLLPATLQLIDTYASFTRAYLLQNFNEEGTTEKPSKEKLQGFAAVLAIGSSRCKANTLGPTLVQNLPSSVQTVCESWNNINTNEFPNIGSWRNAFANDTIPSESYISAVQAAHLGTLCSQSLPLAASLKHTLLSLVRLTGDLIVWSDEMNPPQVIRTLLPLLLESSTESVAEISSNSLERILGPAESDEFLARVYEKLITGCYNILANHADPNSGLDESILEECLQYLEKQLESSQARKAMEEFFSDSGELVQIMMATANENLSAKFCNRVLKFFTKLFQLTEKSPNPSLLHLCGSLAQLACVEPVRLQAWLTRMTTSPPKDSDQLDVIQENRQLLQLLTTYIVRENSQVGEGVCAVLLGTLTPMATEMLANGDGTGFPELMVVMATLASAGQGAGHLQLHNAAVDWLSRCKKYLSQKNVVEKLNANVMHGKHVMILECTCHIMSYLADVTNALSQSNGQGPSHLSVDGEERAIEVDSDWVEELAVEEEDSQAEDSDEDSLCNKLCTFTITQKEFMNQHWYHCHTCKMVDGVGVCTVCAKVCHKDHEISYAKYGSFFCDCGAKEDGSCLALVKRTPSSGMSSTMKESAFQSEPRISESLVRHASTSSPADKAKVTISDGKVADEEKPKKSSLCRTVEGCREELQNQANFSFAPLVLDMLNFLMDAIQTNFQQASAVGSSSRAQQALSELHTVEKAVEMTDQLMVPTLGSQEGAFENVRMNYSGDQGQTIRQLISAHVLRRVAMCVLSSPHGRRQHLAVSHEKGKITVLQLSALLKQADSSKRKLTLTRLASAPVPFTVLSLTGNPCKEDYLAVCGLKDCHVLTFSSSGSVSDHLVLHPQLATGNFIIKAVWLPGSQTELAIVTADFVKIYDLCVDALSPTFYFLLPSSKIRDVTFLFNEEGKNIIVIMSSAGYIYTQLMEEASSAQQGPFYVTNVLEINHEDLKDSNSQVAGGGVSVYYSHVLQMLFFSYCQGKSFAATISRTTLEVLQLFPINIKSSNGGSKTSPALCQWSEVMNHPGLVCCVQQTTGVPLVVMVKPDTFLIQEIKTLPAKAKIQDMVAIRHTACNEQQRTTMILLCEDGSLRIYMANVENTSYWLQPSLQPSSVISIMKPVRKRKTATITTRTSSQVTFPIDFFEHNQQLTDVEFGGNDLLQVYNAQQIKHRLNSTGMYVANTKPGGFTIEISNNNSTMVMTGMRIQIGTQAIERAPSYIEIFGRTMQLNLSRSRWFDFPFTREEALQADKKLNLFIGASVDPAGVTMIDAVKIYGKTKEQFGWPDEPPEEFPSASVSNICPSNLNQSNGTGDSDSAAPTTTSGTVLERLVVSSLEALESCFAVGPIIEKERNKNAAQELATLLLSLPAPASVQQQSKSLLASLHTSRSAYHSHKDQALLSKAVQCLNTSSKEGKDLDPEVFQRLVITARSIAIMRPNNLVHFTESKLPQMETEGMDEGKEPQKQLEGDCCSFITQLVNHFWKLHASKPKNAFLAPACLPGLTHIEATVNALVDIIHGYCTCELDCINTASKIYMQMLLCPDPAVSFSCKQALIRVLRPRNKRRHVTLPSSPRSNTPMGDKDDDDDDDADEKMQSSGIPNGGHIRQESQEQSEVDHGDFEMVSESMVLETAENVNNGNPSPLEALLAGAEGFPPMLDIPPDADDETMVELAIALSLQQDQQGSSSSALGLQSLGLSGQAPSSSSLDAGTLSDTTASAPASDDEGSTAATDGSTLRTSPADHGGSVGSESGGSAVDSVAGEHSVSGRSSAYGDATAEGHPAGPGSVSSSTGAISTTTGHQEGDGSEGEGEGETEGDVHTSNRLHMVRLMLLERLLQTLPQLRNVGGVRAIPYMQVILMLTTDLDGEDEKDKGALDNLLSQLIAELGMDKKDVSKKNERSALNEVHLVVMRLLSVFMSRTKSGSKSSICESSSLISSATAAALLSSGAVDYCLHVLKSLLEYWKSQQNDEEPVATSQLLKPHTTSSPPDMSPFFLRQYVKGHAADVFEAYTQLLTEMVLRLPYQIKKITDTNSRIPPPVFDHSWFYFLSEYLMIQQTPFVRRQVRKLLLFICGSKEKYRQLRDLHTLDSHVRGIKKLLEEQGIFLRASVVTASSGSALQYDTLISLMEHLKACAEIAAQRTINWQKFCIKDDSVLYFLLQVSFLVDEGVSPVLLQLLSCALCGSKVLAALAASSGSSSASSSSAPVAASSGQATTQSKSSTKKSKKEEKEKEKDGETSGSQEDQLCTALVNQLNKFADKETLIQFLRCFLLESNSSSVRWQAHCLTLHIYRNSSKSQQELLLDLMWSIWPELPAYGRKAAQFVDLLGYFSLKTPQTEKKLKEYSQKAVEILRTQNHILTNHPNSNIYNTLSGLVEFDGYYLESDPCLVCNNPEVPFCYIKLSSIKVDTRYTTTQQVVKLIGSHTISKVTVKIGDLKRTKMVRTINLYYNNRTVQAIVELKNKPARWHKAKKVQLTPGQTEVKIDLPLPIVASNLMIEFADFYENYQASTETLQCPRCSASVPANPGVCGNCGENVYQCHKCRSINYDEKDPFLCNACGFCKYARFDFMLYAKPCCAVDPIENEEDRKKAVSNINTLLDKADRVYHQLMGHRPQLENLLCKVNEAAPEKPQDDSGTAGGISSTSASVNRYILQLAQEYCGDCKNSFDELSKIIQKVFASRKELLEYDLQQREAATKSSRTSVQPTFTASQYRALSVLGCGHTSSTKCYGCASAVTEHCITLLRALATNPALRHILVSQGLIRELFDYNLRRGAAAMREEVRQLMCLLTRDNPEATQQMNDLIIGKVSTALKGHWANPDLASSLQYEMLLLTDSISKEDSCWELRLRCALSLFLMAVNIKTPVVVENITLMCLRILQKLIKPPAPTSKKNKDVPVEALTTVKPYCNEIHAQAQLWLKRDPKASYDAWKKCLPIRGIDGNGKAPSKSELRHLYLTEKYVWRWKQFLSRRGKRTSPLDLKLGHNNWLRQVLFTPATQAARQAACTIVEALATIPSRKQQVLDLLTSYLDELSIAGECAAEYLALYQKLITSAHWKVYLAARGVLPYVGNLITKEIARLLALEEATLSTDLQQGYALKSLTGLLSSFVEVESIKRHFKSRLVGTVLNGYLCLRKLVVQRTKLIDETQDMLLEMLEDMTTGTESETKAFMAVCIETAKRYNLDDYRTPVFIFERLCSIIYPEENEVTEFFVTLEKDPQQEDFLQGRMPGNPYSSNEPGIGPLMRDIKNKICQDCDLVALLEDDSGMELLVNNKIISLDLPVAEVYKKVWCTTNEGEPMRIVYRMRGLLGDATEEFIESLDSTTDEEEDEEEVYKMAGVMAQCGGLECMLNRLAGIRDFKQGRHLLTVLLKLFSYCVKVKVNRQQLVKLEMNTLNVMLGTLNLALVAEQESKDSGGAAVAEQVLSIMEIILDESNAEPLSEDKGNLLLTGDKDQLVMLLDQINSTFVRSNPSVLQGLLRIIPYLSFGEVEKMQILVERFKPYCNFDKYDEDHSGDDKVFLDCFCKIAAGIKNNSNGHQLKDLILQKGITQNALDYMKKHIPSAKNLDADIWKKFLSRPALPFILRLLRGLAIQHPGTQVLIGTDSIPNLHKLEQVSSDEGIGTLAENLLEALREHPDVNKKIDAARRETRAEKKRMAMAMRQKALGTLGMTTNEKGQVVTKTALLKQMEELIEEPGLTCCICREGYKFQPTKVLGIYTFTKRVALEEMENKPRKQQGYSTVSHFNIVHYDCHLAAVRLARGREEWESAALQNANTKCNGLLPVWGPHVPESAFATCLARHNTYLQECTGQREPTYQLNIHDIKLLFLRFAMEQSFSADTGGGGRESNIHLIPYIIHTVLYVLNTTRATSREEKNLQGFLEQPKEKWVESAFEVDGPYYFTVLALHILPPEQWRATRVEILRRLLVTSQARAVAPGGATRLTDKAVKDYSAYRSSLLFWALVDLIYNMFKKQTTPTVGGIDTGSLEPCVCEKVPTSNTEGGWSCSLAEYIRHNDMPIYEAADKALKTFQEEFMPVETFSEFLDVAGLLSEITDPESFLKDLLNSVP

SEQ ID NO: 39010 - protein, 5159 aa, Homo sapiens
MATSGGEEAAAAAPAPGTPATGADTTPGWEVAVRPLLSASYSAFEMKELPQLVASVIESESEILHHEKQYEPFYSSFVALSTHYITTVCSLIPRNQLQSVAAACKVLIEFSLLRLENPDEACAVSQKHLILLIKGLCTGCSRLDRTEIITFTAMMKSAKLPQTVKTLSDVEDQKELASPVSPELRQKEVQMNFLNQLTSVFNPRTVASQPISTQTLVEGENDEQSSTDQASAIKTKNVFIAQNVASLQELGGSEKLLRVCLNLPYFLRYINRFQDAVLANSFFIMPATVADATAVRNGFHSLVIDVTMALDTLSLPVLEPLNPSRLQDVTVLSLSCLYAGVSVATCMAILHVGSAQQVRTGSTSSKEDDYESDAATIVQKCLEIYDMIGQAISSSRRAGGEHYQNFQLLGAWCLLNSLFLILNLSPTALADKGKEKDPLAALRVRDILSRTKEGVGSPKLGPGKGHQGFGVLSVILANHAIKLLTSLFQDLQVEALHKGWETDGPPAALSIMAQSTSIQRIQRLIDSVPLMNLLLTLLSTSYRKACVLQRQRKGSMSSDASASTDSNTYYEDDFSSTEEDSSQDDDSEPILGQWFEETISPSKEKAAPPPPPPPPPLESSPRVKSPSKQAPGEKGNILASRKDPELFLGLASNILNFITSSMLNSRNNFIRNYLSVSLSEHHMATLASIIKEVDKDGLKGSSDEEFAAALYHFNHSLVTSDLQSPNLQNTLLQQLGVAPFSEGPWPLYIHPQSLSVLSRLLLIWQHKASAQGDPDVPECLKVWDRFLSTMKQNALQGVVPSETEDLNVEHLQMLLLIFHNFTETGRRAILSLFVQIIQELSVNMDAQMRFVPLILARLLLIFDYLLHQYSKAPVYLFEQVQHNLLSPPFGWASGSQDSNSRRATTPLYHGFKEVEENWSKHFSSDAVPHPRFYCVLSPEASEDDLNRLDSVACDVLFSKLVKYDELYAALTALLAAGSQLDTVRRKENKNVTALEACALQYYFLILWRILGILPPSKTYINQLSMNSPEMSECDILHTLRWSSRLRISSYVNWIKDHLIKQGMKAEHASSLLELASTTKCSSVKYDVEIVEEYFARQISSFCSIDCTTILQLHEIPSLQSIYTLDAAISKVQVSLDEHFSKMAAETDPHKSSEITKNLLPATLQLIDTYASFTRAYLLQNFNEEGTTEKPSKEKLQGFAAVLAIGSSRCKANTLGPTLVQNLPSSVQTVCESWNNINTNEFPNIGSWRNAFANDTIPSESYISAVQAAHLGTLCSQSLPLAASLKHTLLSLVRLTGDLIVWSDEMNPPQVIRTLLPLLLESSTESVAEISSNSLERILGPAESDEFLARVYEKLITGCYNILANHADPNSGLDESILEECLQYLEKQLESSQARKAMEEFFSDSGELVQIMMATANENLSAKFCNRVLKFFTKLFQLTEKSPNPSLLHLCGSLAQLACVEPVRLQAWLTRMTTSPPKDSDQLDVIQENRQLLQLLTTYIVRENSQVGEGVCAVLLGTLTPMATEMLANGDGTGFPELMVVMATLASAGQGAGHLQLHNAAVDWLSRCKKYLSQKNVVEKLNANVMHGKHVMILECTCHIMSYLADVTNALSQSNGQGPSHLSVDGEERAIEVDSDWVEELAVEEEDSQAEDSDEDSLCNKLCTFTITQKEFMNQHWYHCHTCKMVDGVGVCTVCAKVCHKDHEISYAKYGSFFCDCGAKEDGSCLALVKRTPSSGMSSTMKESAFQSEPRISESLVRHASTSSPADKAKVTISDGKVADEEKPKKSSLCRTVEGCREELQNQANFSFAPLVLDMLNFLMDAIQTNFQQASAVGSSSRAQQALSELHTVEKAVEMTDQLMVPTLGSQEGAFENVRMNYSGDQGQTIRQLISAHVLRRVAMCVLSSPHGRRQHLAVSHEKGKITVLQLSALLKQADSSKRKLTLTRLASAPVPFTVLSLTGNPCKEDYLAVCGLKDCHVLTFSSSGSVSDHLVLHPQLATGNFIIKAVWLPGSQTELAIVTADFVKIYDLCVDALSPTFYFLLPSSKIRDVTFLFNEEGKNIIVIMSSAGYIYTQLMEEASSAQQGPFYVTNVLEINHEDLKDSNSQVAGGGVSVYYSHVLQMLFFSYCQGKSFAATISRTTLEVLQLFPINIKSSNGGSKTSPALCQWSEVMNHPGLVCCVQQTTGVPLVVMVKPDTFLIQEIKTLPAKAKIQDMVAIRHTACNEQQRTTMILLCEDGSLRIYMANVENTSYWLQPSLQPSSVISIMKPVRKRKTATITTRTSSQVTFPIDFFEHNQQLTDVEFGGNDLLQVYNAQQIKHRLNSTGMYVANTKPGGFTIEISNNNSTMVMTGMRIQIGTQAIERAPSYIEIFGRTMQLNLSRSRWFDFPFTREEALQADKKLNLFIGASVDPAGVTMIDAVKIYGKTKEQFGWPDEPPEEFPSASVSNICPSNLNQSNGTGDSDSAAPTTTSGTVLESSETESLTKLDRLVVSSLEALESCFAVGPIIEKERNKNAAQELATLLLSLPAPASVQQQSKSLLASLHTSRSAYHSHKDQALLSKAVQCLNTSSKEGKDLDPEVFQRLVITARSIAIMRPNNLVHFTESKLPQMETEGMDEGKEPQKQLEGDCCSFITQLVNHFWKLHASKPKNAFLAPACLPGLTHIEATVNALVDIIHGYCTCELDCINTASKIYMQMLLCPDPAVSFSCKQALIRVLRPRNKRRHVTLPSSPRSNTPMGDKDDDDDDDADEKMQSSGIPNGGHIRQESQEQSEVDHGDFEMVSESMVLETAENVNNGNPSPLEALLAGAEGFPPMLDIPPDADDETMVELAIALSLQQDQQAPASDDEGSTAATDGSTLRTSPADHGGSVGSESGGSAVDSVAGEHSVSGRSSAYGDATAEGHPAGPGSVSSSTGAISTTTGHQEGDGSEGEGEGETEGDVHTSNRLHMVRLMLLERLLQTLPQLRNVGGVRAIPYMQVILMLTTDLDGEDEKDKGALDNLLSQLIAELGMDKKDVSKKNERSALNEVHLVVMRLLSVFMSRTKSGSKSSICESSSLISSATAAALLSSGAVDYCLHVLKSLLEYWKSQQNDEEPVATSQLLKPHTTSSPPDMSPFFLRQYVKGHAADVFEAYTQLLTEMVLRLPYQIKKITDTNSRIPPPVFDHSWFYFLSEYLMIQQTPFVRRQVRKLLLFICGSKEKYRQLRDLHTLDSHVRGIKKLLEEQGIFLRASVVTASSGSALQYDTLISLMEHLKACAEIAAQRTINWQKFCIKDDSVLYFLLQVSFLVDEGVSPVLLQLLSCALCGSKVLAALAASSGSSSASSSSAPVAASSGQATTQSKSSTKKSKKEEKEKEKDGETSGSQEDQLCTALVNQLNKFADKETLIQFLRCFLLESNSSSVRWQAHCLTLHIYRNSSKSQQELLLDLMWSIWPELPAYGRKAAQFVDLLGYFSLKTPQTEKKLKEYSQKAVEILRTQNHILTNHPNSNIYNTLSGLVEFDGYYLESDPCLVCNNPEVPFCYIKLSSIKVDTRYTTTQQVVKLIGSHTISKVTVKIGDLKRTKMVRTINLYYNNRTVQAIVELKNKPARWHKAKKVQLTPGQTEVKIDLPLPIVASNLMIEFADFYENYQASTETLQCPRCSASVPANPGVCGNCGENVYQCHKCRSINYDEKDPFLCNACGFCKYARFDFMLYAKPCCAVDPIENEEDRKKAVSNINTLLDKADRVYHQLMGHRPQLENLLCKVNEAAPEKPQDDSGTAGGISSTSASVNRYILQLAQEYCGDCKNSFDELSKIIQKVFASRKELLEYDLQQREAATKSSRTSVQPTFTASQYRALSVLGCGHTSSTKCYGCASAVTEHCITLLRALATNPALRHILVSQGLIRELFDYNLRRGAAAMREEVRQLMCLLTRDNPEATQQMNDLIIGKVSTALKGHWANPDLASSLQYEMLLLTDSISKEDSCWELRLRCALSLFLMAVNIKTPVVVENITLMCLRILQKLIKPPAPTSKKNKDVPVEALTTVKPYCNEIHAQAQLWLKRDPKASYDAWKKCLPIRGIDGNGKAPSKSELRHLYLTEKYVWRWKQFLSRRGKRTSPLDLKLGHNNWLRQVLFTPATQAARQAACTIVEALATIPSRKQQVLDLLTSYLDELSIAGECAAEYLALYQKLITSAHWKVYLAARGVLPYVGNLITKEIARLLALEEATLSTDLQQGYALKSLTGLLSSFVEVESIKRHFKSRLVGTVLNGYLCLRKLVVQRTKLIDETQDMLLEMLEDMTTGTESETKAFMAVCIETAKRYNLDDYRTPVFIFERLCSIIYPEENEVTEFFVTLEKDPQQEDFLQGRMPGNPYSSNEPGIGPLMRDIKNKICQDCDLVALLEDDSGMELLVNNKIISLDLPVAEVYKKVWCTTNEGEPMRIVYRMRGLLGDATEEFIESLDSTTDEEEDEEEVYKMAGVMAQCGGLECMLNRLAGIRDFKQGRHLLTVLLKLFSYCVKVKVNRQQLVKLEMNTLNVMLGTLNLALVAEQESKDSGGAAVAEQVLSIMEIILDESNAEPLSEDKGNLLLTGDKDQLVMLLDQINSTFVRSNPSVLQGLLRIIPYLSFGEVEKMQILVERFKPYCNFDKYDEDHSGDDKVFLDCFCKIAAGIKNNSNGHQLKDLILQKGITQNALDYMKKHIPSAKNLDADIWKKFLSRPALPFILRLLRGLAIQHPGTQVLIGTDSIPNLHKLEQVSSDEGIGTLAENLLEALREHPDVNKKIDAARRETRAEKKRMAMAMRQKALGTLGMTTNEKGQVVTKTALLKQMEELIEEPGLTCCICREGYKFQPTKVLGIYTFTKRVALEEMENKPRKQQGYSTVSHFNIVHYDCHLAAVRLARGREEWESAALQNANTKCNGLLPVWGPHVPESAFATCLARHNTYLQECTGQREPTYQLNIHDIKLLFLRFAMEQSFSADTGGGGRESNIHLIPYIIHTVLYVLNTTRATSREEKNLQGFLEQPKEKWVESAFEVDGPYYFTVLALHILPPEQWRATRVEILRRLLVTSQARAVAPGGATRLTDKAVKDYSAYRSSLLFWALVDLIYNMFKKVPTSNTEGGWSCSLAEYIRHNDMPIYEAADKALKTFQEEFMPVETFSEFLDVAGLLSEITDPESFLKDLLNSVP

SEQ ID NO: 39011 - protein, 5176 aa, Homo sapiens
MATSGGEEAAAAAPAPGTPATGADTTPGWEVAVRPLLSASYSAFEMKELPQLVASVIESESEILHHEKQYEPFYSSFVALSTHYITTVCSLIPRNQLQSVAAACKVLIEFSLLRLENPDEACAVSQKHLILLIKGLCTGCSRLDRTEIITFTAMMKSAKLPQTVKTLSDVEDQKELASPVSPELRQKEVQMNFLNQLTSVFNPRTVASQPISTQTLVEGENDEQSSTDQASAIKTKNVFIAQNVASLQELGGSEKLLRVCLNLPYFLRYINRFQDAVLANSFFIMPATVADATAVRNGFHSLVIDVTMALDTLSLPVLEPLNPSRLQDVTVLSLSCLYAGVSVATCMAILHVGSAQQVRTGSTSSKEDDYESDAATIVQKCLEIYDMIGQAISSSRRAGGEHYQNFQLLGAWCLLNSLFLILNLSPTALADKGKEKDPLAALRVRDILSRTKEGVGSPKLGPGKGHQGFGVLSVILANHAIKLLTSLFQDLQVEALHKGWETDGPPAALSIMAQSTSIQRIQRLIDSVPLMNLLLTLLSTSYRKACVLQRQRKGSMSSDASASTDSNTYYEDDFSSTEEDSSQDDDSEPILGQWFEETISPSKEKAAPPPPPPPPPLESSPRVKSPSKQAPGEKGNILASRKDPELFLGLASNILNFITSSMLNSRNNFIRNYLSVSLSEHHMATLASIIKEVDKDGLKGSSDEEFAAALYHFNHSLVTSDLQSPNLQNTLLQQLGVAPFSEGPWPLYIHPQSLSVLSRLLLIWQHKASAQGDPDVPECLKVWDRFLSTMKQNALQGVVPSETEDLNVEHLQMLLLIFHNFTETGRRAILSLFVQIIQELSVNMDAQMRFVPLILARLLLIFDYLLHQYSKAPVYLFEQVQHNLLSPPFGWASGSQDSNSRRATTPLYHGFKEVEENWSKHFSSDAVPHPRFYCVLSPEASEDDLNRLDSVACDVLFSKLVKYDELYAALTALLAAGSQLDTVRRKENKNVTALEACALQYYFLILWRILGILPPSKTYINQLSMNSPEMSECDILHTLRWSSRLRISSYVNWIKDHLIKQGMKAEHASSLLELASTTKCSSVKYDVEIVEEYFARQISSFCSIDCTTILQLHEIPSLQSIYTLDAAISKVQVSLDEHFSKMAAETDPHKSSEITKNLLPATLQLIDTYASFTRAYLLQNFNEEGTTEKPSKEKLQGFAAVLAIGSSRCKANTLGPTLVQNLPSSVQTVCESWNNINTNEFPNIGSWRNAFANDTIPSESYISAVQAAHLGTLCSQSLPLAASLKHTLLSLVRLTGDLIVWSDEMNPPQVIRTLLPLLLESSTESVAEISSNSLERILGPAESDEFLARVYEKLITGCYNILANHADPNSGLDESILEECLQYLEKQLESSQARKAMEEFFSDSGELVQIMMATANENLSAKFCNRVLKFFTKLFQLTEKSPNPSLLHLCGSLAQLACVEPVRLQAWLTRMTTSPPKDSDQLDVIQENRQLLQLLTTYIVRENSQVGEGVCAVLLGTLTPMATEMLANGDGTGFPELMVVMATLASAGQGAGHLQLHNAAVDWLSRCKKYLSQKNVVEKLNANVMHGKHVMILECTCHIMSYLADVTNALSQSNGQGPSHLSVDGEERAIEVDSDWVEELAVEEEDSQAEDSDEDSLCNKLCTFTITQKEFMNQHWYHCHTCKMVDGVGVCTVCAKVCHKDHEISYAKYGSFFCDCGAKEDGSCLALVKRTPSSGMSSTMKESAFQSEPRISESLVRHASTSSPADKAKVTISDGKVADEEKPKKSSLCRTVEGCREELQNQANFSFAPLVLDMLNFLMDAIQTNFQQASAVGSSSRAQQALSELHTVEKAVEMTDQLMVPTLGSQEGAFENVRMNYSGDQGQTIRQLISAHVLRRVAMCVLSSPHGRRQHLAVSHEKGKITVLQLSALLKQADSSKRKLTLTRLASAPVPFTVLSLTGNPCKEDYLAVCGLKDCHVLTFSSSGSVSDHLVLHPQLATGNFIIKAVWLPGSQTELAIVTADFVKIYDLCVDALSPTFYFLLPSSKIRDVTFLFNEEGKNIIVIMSSAGYIYTQLMEEASSAQQGPFYVTNVLEINHEDLKDSNSQVAGGGVSVYYSHVLQMLFFSYCQGKSFAATISRTTLEVLQLFPINIKSSNGGSKTSPALCQWSEVMNHPGLVCCVQQTTGVPLVVMVKPDTFLIQEIKTLPAKAKIQDMVAIRHTACNEQQRTTMILLCEDGSLRIYMANVENTSYWLQPSLQPSSVISIMKPVRKRKTATITTRTSSQVTFPIDFFEHNQQLTDVEFGGNDLLQVYNAQQIKHRLNSTGMYVANTKPGGFTIEISNNNSTMVMTGMRIQIGTQAIERAPSYIEIFGRTMQLNLSRSRWFDFPFTREEALQADKKLNLFIGASVDPAGVTMIDAVKIYGKTKEQFGWPDEPPEEFPSASVSNICPSNLNQSNGTGDSDSAAPTTTSGTVLERLVVSSLEALESCFAVGPIIEKERNKNAAQELATLLLSLPAPASVQQQSKSLLASLHTSRSAYHSHKDQALLSKAVQCLNTSSKEGKDLDPEVFQRLVITARSIAIMRPNNLVHFTESKLPQMETDCFFPRCACWSLGIVGILIGAPLETPSPEGMDEGKEPQKQLEGDCCSFITQLVNHFWKLHASKPKNAFLAPACLPGLTHIEATVNALVDIIHGYCTCELDCINTASKIYMQMLLCPDPAVSFSCKQALIRVLRPRNKRRHVTLPSSPRSNTPMGDKDDDDDDDADEKMQSSGIPNGGHIRQESQEQSEVDHGDFEMVSESMVLETAENVNNGNPSPLEALLAGAEGFPPMLDIPPDADDETMVELAIALSLQQDQQAPASDDEGSTAATDGSTLRTSPADHGGSVGSESGGSAVDSVAGEHSVSGRSSAYGDATAEGHPAGPGSVSSSTGAISTTTGHQEGDGSEGEGEGETEGDVHTSNRLHMVRLMLLERLLQTLPQLRNVGGVRAIPYMQVILMLTTDLDGEDEKDKGALDNLLSQLIAELGMDKKDVSKKNERSALNEVHLVVMRLLSVFMSRTKSGSKSSICESSSLISSATAAALLSSGAVDYCLHVLKSLLEYWKSQQNDEEPVATSQLLKPHTTSSPPDMSPFFLRQYVKGHAADVFEAYTQLLTEMVLRLPYQIKKITDTNSRIPPPVFDHSWFYFLSEYLMIQQTPFVRRQVRKLLLFICGSKEKYRQLRDLHTLDSHVRGIKKLLEEQGIFLRASVVTASSGSALQYDTLISLMEHLKACAEIAAQRTINWQKFCIKDDSVLYFLLQVSFLVDEGVSPVLLQLLSCALCGSKVLAALAASSGSSSASSSSAPVAASSGQATTQSKSSTKKSKKEEKEKEKDGETSGSQEDQLCTALVNQLNKFADKETLIQFLRCFLLESNSSSVRWQAHCLTLHIYRNSSKSQQELLLDLMWSIWPELPAYGRKAAQFVDLLGYFSLKTPQTEKKLKEYSQKAVEILRTQNHILTNHPNSNIYNTLSGLVEFDGYYLESDPCLVCNNPEVPFCYIKLSSIKVDTRYTTTQQVVKLIGSHTISKVTVKIGDLKRTKMVRTINLYYNNRTVQAIVELKNKPARWHKAKKVQLTPGQTEVKIDLPLPIVASNLMIEFADFYENYQASTETLQCPRCSASVPANPGVCGNCGENVYQCHKCRSINYDEKDPFLCNACGFCKYARFDFMLYAKPCCAVDPIENEEDRKKAVSNINTLLDKADRVYHQLMGHRPQLENLLCKVNEAAPEKPQDDSGTAGGISSTSASVNRYILQLAQEYCGDCKNSFDELSKIIQKVFASRKELLEYDLQQREAATKSSRTSVQPTFTASQYRALSVLGCGHTSSTKCYGCASAVTEHCITLLRALATNPALRHILVSQGLIRELFDYNLRRGAAAMREEVRQLMCLLTRDNPEATQQMNDLIIGKVSTALKGHWANPDLASSLQYEMLLLTDSISKEDSCWELRLRCALSLFLMAVNIKTPVVVENITLMCLRILQKLIKPPAPTSKKNKDVPVEALTTVKPYCNEIHAQAQLWLKRDPKASYDAWKKCLPIRGIDGNGKAPSKSELRHLYLTEKYVWRWKQFLSRRGKRTSPLDLKLGHNNWLRQVLFTPATQAARQAACTIVEALATIPSRKQQVLDLLTSYLDELSIAGECAAEYLALYQKLITSAHWKVYLAARGVLPYVGNLITKEIARLLALEEATLSTDLQQGYALKSLTGLLSSFVEVESIKRHFKSRLVGTVLNGYLCLRKLVVQRTKLIDETQDMLLEMLEDMTTGTESETKAFMAVCIETAKRYNLDDYRTPVFIFERLCSIIYPEENEVTEFFVTLEKDPQQEDFLQGRMPGNPYSSNEPGIGPLMRDIKNKICQDCDLVALLEDDSGMELLVNNKIISLDLPVAEVYKKVWCTTNEGEPMRIVYRMRGLLGDATEEFIESLDSTTDEEEDEEEVYKMAGVMAQCGGLECMLNRLAGIRDFKQGRHLLTVLLKLFSYCVKVKVNRQQLVKLEMNTLNVMLGTLNLALVAEQESKDSGGAAVAEQVLSIMEIILDESNAEPLSEDKGNLLLTGDKDQLVMLLDQINSTFVRSNPSVLQGLLRIIPYLSFGEVEKMQILVERFKPYCNFDKYDEDHSGDDKVFLDCFCKIAAGIKNNSNGHQLKDLILQKGITQNALDYMKKHIPSAKNLDADIWKKFLSRPALPFILRLLRGLAIQHPGTQVLIGTDSIPNLHKLEQVSSDEGIGTLAENLLEALREHPDVNKKIDAARRETRAEKKRMAMAMRQKALGTLGMTTNEKGQVVTKTALLKQMEELIEEPGLTCCICREGYKFQPTKVLGIYTFTKRVALEEMENKPRKQQGYSTVSHFNIVHYDCHLAAVRLARGREEWESAALQNANTKCNGLLPVWGPHVPESAFATCLARHNTYLQECTGQREPTYQLNIHDIKLLFLRFAMEQSFSADTGGGGRESNIHLIPYIIHTVLYVLNTTRATSREEKNLQGFLEQPKEKWVESAFEVDGPYYFTVLALHILPPEQWRATRVEILRRLLVTSQARAVAPGGATRLTDKAVKDYSAYRSSLLFWALVDLIYNMFKKVPTSNTEGGWSCSLAEYIRHNDMPIYEAADKALKTFQEEFMPVETFSEFLDVAGLLSEITDPESFLKDLLNSVP

SEQ ID NO: 39012 - protein, 2456 aa, Homo sapiens
MATSGGEEAAAAAPAPGTPATGADTTPGWEVAVRPLLSASYSAFEMKELPQLVASVIESESEILHHEKQYEPFYSSFVALSTHYITTVCSLIPRNQLQSVAAACKVLIEFSLLRLENPDEACAVSQKHLILLIKGLCTGCSRLDRTEIITFTAMMKSAKLPQTVKTLSDVEDQKELASPVSPELRQKEVQMNFLNQLTSVFNPRTVASQPISTQTLVEGENDEQSSTDQASAIKTKNVFIAQNVASLQELGGSEKLLRVCLNLPYFLRYINRFQDAVLANSFFIMPATVADATAVRNGFHSLVIDVTMALDTLSLPVLEPLNPSRLQDVTVLSLSCLYAGVSVATCMAILHVGSAQQVRTGSTSSKEDDYESDAATIVQKCLEIYDMIGQAISSSRRAGGEHYQNFQLLGAWCLLNSLFLILNLSPTALADKGKEKDPLAALRVRDILSRTKEGVGSPKLGPGKGHQGFGVLSVILANHAIKLLTSLFQDLQVEALHKGWETDGPPAALSIMAQSTSIQRIQRLIDSVPLMNLLLTLLSTSYRKACVLQRQRKGSMSSDASASTDSNTYYEDDFSSTEEDSSQDDDSEPILGQWFEETISPSKEKAAPPPPPPPPPLESSPRVKSPSKQAPGEKGNILASRKDPELFLGLASNILNFITSSMLNSRNNFIRNYLSVSLSEHHMATLASIIKEVDKDGLKGSSDEEFAAALYHFNHSLVTSDLQSPNLQNTLLQQLGVAPFSEGPWPLYIHPQSLSVLSRLLLIWQHKASAQGDPDVPECLKVWDRFLSTMKQNALQGVVPSETEDLNVEHLQMLLLIFHNFTETGRRAILSLFVQIIQELSVNMDAQMRFVPLILARLLLIFDYLLHQYSKAPVYLFEQVQHNLLSPPFGWASGSQDSNSRRATTPLYHGFKEVEENWSKHFSSDAVPHPRFYCVLSPEASEDDLNRLDSVACDVLFSKLVKYDELYAALTALLAAGSQLDTVRRKENKNVTALEACALQYYFLILWRILGILPPSKTYINQLSMNSPEMSECDILHTLRWSSRLRISSYVNWIKDHLIKQGMKAEHASSLLELASTTKCSSVKYDVEIVEEYFARQISSFCSIDCTTILQLHEIPSLQSIYTLDAAISKVQVSLDEHFSKMAAETDPHKSSEITKNLLPATLQLIDTYASFTRAYLLQNFNEEGTTEKPSKEKLQGFAAVLAIGSSRCKANTLGPTLVQNLPSSVQTVCESWNNINTNEFPNIGSWRNAFANDTIPSESYISAVQAAHLGTLCSQSLPLAASLKHTLLSLVRLTGDLIVWSDEMNPPQVIRTLLPLLLESSTESVAEISSNSLERILGPAESDEFLARVYEKLITGCYNILANHADPNSGLDESILEECLQYLEKQLESSQARKAMEEFFSDSGELVQIMMATANENLSAKFCNRVLKFFTKLFQLTEKSPNPSLLHLCGSLAQLACVEPVRLQAWLTRMTTSPPKDSDQLDVIQENRQLLQLLTTYIVRENSQVGEGVCAVLLGTLTPMATEMLANGDGTGFPELMVVMATLASAGQGAGHLQLHNAAVDWLSRCKKYLSQKNVVEKLNANVMHGKHVMILECTCHIMSYLADVTNALSQSNGQGPSHLSVDGEERAIEVDSDWVEELAVEEEDSQAEDSDEDSLCNKLCTFTITQKEFMNQHWYHCHTCKMVDGVGVCTVCAKVCHKDHEISYAKYGSFFCDCGAKEDGSCLALVKRTPSSGMSSTMKESAFQSEPRISESLVRHASTSSPADKAKVTISDGKVADEEKPKKSSLCRTVEGCREELQNQANFSFAPLVLDMLNFLMDAIQTNFQQASAVGSSSRAQQALSELHTVEKAVEMTDQLMVPTLGSQEGAFENVRMNYSGDQGQTIRQLISAHVLRRVAMCVLSSPHGRRQHLAVSHEKGKITVLQLSALLKQADSSKRKLTLTRLASAPVPFTVLSLTGNPCKEDYLAVCGLKDCHVLTFSSSGSVSDHLVLHPQLATGNFIIKAVWLPGSQTELAIVTADFVKIYDLCVDALSPTFYFLLPSSKIRDVTFLFNEEGKNIIVIMSSAGYIYTQLMEEASSAQQGPFYVTNVLEINHEDLKQDSNSQVAGGGVSVYYSHVLQMLFFSYCQGKSFAATISRTTLEVLQLFPINIKSSNGGSKTSPALCQWSEVMNHPGLVCCVQQTTGVPLVVMVKPDTFLIQEIKTLPAKAKIQDMVAIRHTACNEQQRTTMILLCEDGSLRIYMANVENTSYWLQPSLQPSSVISIMKPVRKRKTATITTRTSSQVTFPIDFFEHNQQLTDVEFGGNDLLQVYNAQQIKHRLNSTGMYVANTKPGGFTIEISNNNSTMVMTGMRIQIGTQAIERAPSYIEIFGRTMQLNLSRSRWFDFPFTREEALQADKKLNLFSESPTPGADSVLIVTAKLGATGLWLSNILGSLHSADFSVLSSGNFELHLMY

SEQ ID NO: 39013 - protein, 212 aa, Homo sapiens
MVRTINLYYNNRTVQAIVELKNKPARWHKAKKVQLTPGQTEVKIDLPLPIVASNLMIEFADFYENYQASTETLQCPRCSASVPANPGVCGNCGENVYQCHKCRSINYDEKDPFLCNACGFCKYARFDFMLYAKPCCAVDPIENEEDRKKAVSNINTLLDKADRVYHQLMGHRPQLENLLCKVNEAAPEKPQVVPRCKGHLDKGLGLDQKTAS

SEQ ID NO: 39014 - protein, 548 aa, Homo sapiens
MEEDLFQLRQLPVVKFRRTGESARSEDDTASGEHEVQIEGVHVGLEAVELDDGAAVPKEFANPTDDTFMVEDAVEAIGFGKFQWKLSVLTGLAWMADAMEMMILSILAPQLHCEWRLPSWQVALLTSVVFVGMMSSSTLWGNISDQYGRKTGLKISVLWTLYYGILSAFAPVYSWILVLRGLVGFGIGGVPQSVTLYAEFLPMKARAKCILLIEVFWAIGTVFEVVLAVFVMPSLGWRWLLILSAVPLLLFAVLCFWLPESARYDVLSGNQEKAIATLKRIATENGAPMPLGKLIISRQEDRGKMRDLFTPHFRWTTLLLWFIWFSNAFSYYGLVLLTTELFQAGDVCGISSRKKAVEAKCSLACEYLSEEDYMDLLWTTLSEFPGVLVTLWIIDRLGRKKTMALCFVIFSFCSLLLFICVGRNVLTLLLFIARAFISGGFQAAYVYTPEVYPTATRALGLGTCSGMARVGALITPFIAQVMLESSVYLTLAVYSGCCLLAALASCFLPIETKGRGLQESSHREWGQEMVGRGMHGAGVTRSNSGSQE

SEQ ID NO: 39015 - protein, 205 aa, Homo sapiens
MLQQDSNDDTEDVSLFDAEEETTNRPRKAKIRHPVASFFHLFFRVSAIIVYLLCGLLSSSFITCMVTIILLLSCDFWAVKNVTGRLMVGLRWWNHIDEDGKSHWVFESRKESSQENKTVSEAESRIFWLGLIACPVLWVIFAFSALFSFRVKWLAVVIMGVVLQGANLYGYIRCKVRSRKHLTSMATSYFGKQFLRQNTGDDQTS

SEQ ID NO: 39016 - protein, 106 aa, Homo sapiens
MWGVFLLYVSMKMGGTTGQNIDQPTEMTATEGAIVQINCTYQTSGFNGLFWYQQHAGEAPTFLSYNVLDGLEEKGRFSSFLSRSKGYSYLLLKELQMKDSASYLCA

SEQ ID NO: 39017 - protein, 116 aa, Homo sapiens
MSLSSLLKVVTASLWLGPGIAQKITQTQPGMFVQEKEAVTLDCTYDTSDPSYGLFWYKQPSSGEMIFLIYQGSYDQQNATEGRYSLNFQKARKSANLVISASQLGDSAMYFCAMRE

SEQ ID NO: 39018 - protein, 109 aa, Homo sapiens
MKPTLISVLVIIFILRGTRAQRVTQPEKLLSVFKGAPVELKCNYSYSGSPELFWYVQYSRQRLQLLLRHISRESIKGFTADLNKGETSFHLKKPFAQEEDSAMYYCALS

SEQ ID NO: 39019 - protein, 112 aa, Homo sapiens
METLLGVSLVILWLQLARVNSQQGEEDPQALSIQEGENATMNCSYKTSINNLQWYRQNSGRGLVHLILIRSNEREKHSGRLRVTLDTSKKSSSLLITASRAADTASYFCATD

SEQ ID NO: 39020 - protein, 111 aa, Homo sapiens
MLSASCSGLVILLIFRRTSGDSVTQTEGPVTLPERAALTLNCTYQSSYSTFLFWYVQYLNKEPELLLKSSENQETDSRGFQASPIKSDSSFHLEKPSVQLSDSAVYYCALR

SEQ ID NO: 39021 - protein, 116 aa, Homo sapiens
MLTASLLRAVIASICVVSSMAQKVTQAQTEISVVEKEDVTLDCVYETRDTTYYLFWYKQPPSGELVFLIRRNSFDEQNEISGRYSWNFQKSTSSFNFTITASQVVDSAVYFCALSE

SEQ ID NO: 39022 - protein, 537 aa, Homo sapiens
MSAPKLLSLGCIFFPLLLFQQARAQFPRQCATVEALRSGMCCPDLSPVSGPGTDRCGSSSGRGRCEAVTADSRPHSPQYPHDGRDDREVWPLRFFNRTCHCNGNFSGHNCGTCRPGWRGAACDQRVLIVRRNLLDLSKEEKNHFVRALDMAKRTTHPLFVIATRRSEEILGPDGNTPQFENISIYNYFVWTHYYSVKKTFLGVGQESFGEVDFSHEGPAFLTWHRYHLLRLEKDMQEMLQEPSFSLPYWNFATGKNVCDICTDDLMGSRSNFDSTLISPNSVFSQWRVVCDSLEDYDTLGTLCNSTEDGPIRRNPAGNVARPMVQRLPEPQDVAQCLEVGLFDTPPFYSNSTNSFRNTVEGYSDPTGKYDPAVRSLHNLAHLFLNGTGGQTHLSPNDPIFVLLHTFTDAVFDEWLRRYNADISTFPLENAPIGHNRQYNMVPFWPPVTNTEMFVTAPDNLGYTYEIQWPSREFSVPEIIAIAVVGALLLVALIFGTASYLIRARRSMDEANQPLLTDQYQCYAEEYEKLQNPNQSVV

SEQ ID NO: 39023 - protein, 112 aa, Homo sapiens
MEKMLECAFIVLWLQLGWLSGEDQVTQSPEALRLQEGESSSLNCSYTVSGLRGLFWYRQDPGKGPEFLFTLYSAGEEKEKERLKATLTKKESFLHITAPKPEDSATYLCAVQ

SEQ ID NO: 39024 - protein, 112 aa, Homo sapiens
METLLGLLILWLQLQWVSSKQEVTQIPAALSVPEGENLVLNCSFTDSAIYNLQWFRQDPGKGLTSLLLIQSSQREQTSGRLNASLDKSSGRSTLYIAASQPGDSATYLCAVR

SEQ ID NO: 39025 - protein, 318 aa, Homo sapiens
MALPIIVKWGGQEYSVTTLSEDDTVLDLKQFLKTLTGVLPERQKLLGLKVKGKPAENDVKLGALKLKPNTKIMMMGTREESLEDVLGPPPDNDDVVNDFDIEDEVVEVENREENLLKISRRVKEYKVEILNPPREGKKLLVLDVDYTLFDHRSCAETGVELMRPYLHEFLTSAYEDYDIVIWSATNMKWIEAKMKELGVSTNANYKITFMLDSAAMITVHTPRRGLIDVKPLGVIWGKFSEFYSKKNTIMFDDIGRNFLMNPQNGLKIRPFMKAHLNRDKDKELLKLTQYLKEIAKLDDFLDLNHKYWERYLSKKQGQ

SEQ ID NO: 39026 - protein, 119 aa, Homo sapiens
MAMLLGASVLILWLQPDWVNSQQKNDDQQVKQNSPSLSVQEGRISILNCDYTNSMFDYFLWYKKYPAEGPTFLISISSIKDKNEDGRFTVFLNKSAKHLSLHIVPSQPGDSAVYFCAAS

SEQ ID NO: 39027 - protein, 112 aa, Homo sapiens
MALQSTLGAVWLGLLLNSLWKVAESKDQVFQPSTVASSEGAVVEIFCNHSVSNAYNFFWYLHFPGCAPRLLVKGSKPSQQGRYNMTYERFSSSLLILQVREADAAVYYCAVE

SEQ ID NO: 39028 - protein, 265 aa, Homo sapiens
MCMVIFAPLFAIFAFATCGGYSGGLRLSVDCVNKTESNLSIDIAFAYPFRLHQVTFEVPTCEGKERQKLALIGDSSSSAEFFVTVAVFAFLYSLAATVVYIFFQNKYRENNRGPLIDFIVTVVFSFLWLVGSSAWAKGLSDVKVATDPKEVLLLMSACKQPSNKCMAIHSPVMSSLNTSVVFGFLNFILWAGNIWFVFKETGWHSSGQRYLSDPMEKHSSSYNQGGYNQDSYGSSSGYSQQASLGPTSDEFGQQPTGPTSFTNQI

SEQ ID NO: 39029 - protein, 285 aa, Homo sapiens
MDPVSQLASAGTFRVLKEPLAFLRALELLFAIFAFATCGGYSGGLRLSVDCVNKTESNLSIDIAFAYPFRLHQVTFEVPTCEGKERQKLALIGDSSSSAEFFVTVAVFAFLYSLAATVVYIFFQNKYRENNRGPLIDFIVTVVFSFLWLVGSSAWAKGLSDVKVATDPKEVLLLMSACKQPSNKCMAIHSPVMSSLNTSVVFGFLNFILWAGNIWFVFKETGWHSSGQRYLSDPMEKHSSSYNQGGYNQDSYGSSSGYSQQASLGPTSDEFGQQPTGPTSFTNQI

SEQ ID NO: 39030 - protein, 2136 aa, Homo sapiens
MADVTARSLQYEYKANSNLVLQADRSLIDRTRRDEPTGEVLSLVGKLEGTRMGDKAQRTKPQMQEERRAKRRKRDEDRHDINKMKGYTLLSEGIDEMVGIIYKPKTKETRETYEVLLSFIQAALGDQPRDILCGAADEVLAVLKNEKLRDKERRKEIDLLLGQTDDTRYHVLVNLGKKITDYGGDKEIQNMDDNIDETYGVNVQFESDEEEGDEDVYGEVREEASDDDMEGDEAVVRCTLSANLVASGELMSSKKKDLHPRDIDAFWLQRQLSRFYDDAIVSQKKADEVLEILKTASDDRECENQLVLLLGFNTFDFIKVLRQHRMMILYCTLLASAQSEAEKERIMGKMEADPELSKFLYQLHETEKEDLIREERSRRERVRQSRMDTDLETMDLDQGGEALAPRQVLDLEDLVFTQGSHFMANKRCQLPDGSFRRQRKGYEEVHVPALKPKPFGSEEQLLPVEKLPKYAQAGFEGFKTLNRIQSKLYRAALETDENLLLCAPTGAGKTNVALMCMLREIGKHINMDGTINVDDFKIIYIAPMRSLVQEMVGSFGKRLATYGITVAELTGDHQLCKEEISATQIIVCTPEKWDIITRKGGERTYTQLVRLIILDEIHLLHDDRGPVLEALVARAIRNIEMTQEDVRLIGLSATLPNYEDVATFLRVDPAKGLFYFDNSFRPVPLEQTYVGITEKKAIKRFQIMNEIVYEKIMEHAGKNQVLVFVHSRKETGKTARAIRDMCLEKDTLGLFLREGSASTEVLRTEAEQCKNLELKDLLPYGFAIHHAGMTRVDRTLVEDLFADKHIQVLVSTATLAWGVNLPAHTVIIKGTQVYSPEKGRWTELGALDILQMLGRAGRPQYDTKGEGILITSHGELQYYLSLLNQQLPIESQMVSKLPDMLNAEIVLGNVQNAKDAVNWLGYAYLYIRMLRSPTLYGISHDDLKGDPLLDQRRLDLVHTAALMLDKNNLVKYDKKTGNFQVTELGRIASHYYITNDTVQTYNQLLKPTLSEIELFRVFSLSSEFKNITVREEEKLELQKLLERVPIPVKESIEEPSAKINVLLQAFISQLKLEGFALMADMVYVTQSAGRLMRAIFEIVLNRGWAQLTDKTLNLCKMIDKRMWQSMCPLRQFRKLPEEVVKKIEKKNFPFERLYDLNHNEIGELIRMPKMGKTIHKYVHLFPKLELSVHLQPITRSTLKVELTITPDFQWDEKVHGSSEAFWILVEDVDSEVILHHEYFLLKAKYAQDEHLITFFVPVFEPLPPQYFIRVVSDRWLSCETQLPVSFRHLILPEKYPPPTELLDLQPLPVSALRNSAFESLYQDKFPFFNPIQTQVFNTVYNSDDNVFVGAPTGSGKTICAEFAILRMLLQSSEGRCVYITPMEALAEQVYMDWYEKFQDRLNKKVVLLTGETSTDLKLLGKGNIIISTPEKWDILSRRWKQRKNVQNINLFVVDEVHLIGGENGPVLEVICSRMRYISSQIERPIRIVALSSSLSNAKDVAHWLGCSATSTFNFHPNVRPVPLELHIQGFNISHTQTRLLSMAKPVYHAITKHSPKKPVIVFVPSRKQTRLTAIDILTTCAADIQRQRFLHCTEKDLIPYLEKLSDSTLKETLLNGVGYLHEGLSPMERRLVEQLFSSGAIQVVVASRSLCWGMNVAAHLVIIMDTQYYNGKIHAYVDYPIYDVLQMVGHANRPLQDDEGRCVIMCQGSKKDFFKKFLYEPLPVESHLDHCMHDHFNAEIVTKTIENKQDAVDYLTWTFLYRRMTQNPNYYNLQGISHRHLSDHLSELVEQTLSDLEQSKCISIEDEMDVAPLNLGMIAAYYYINYTTIELFSMSLNAKTKVRGLIEIISNAAEYENIPIRHHEDNLLRQLAQKVPHKLNNPKFNDPHVKTNLLLQAHLSRMQLSAELQSDTEEILSKAIRLIQACVDVLSSNGWLSPALAAMELAQMVTQAMWSKDSYLKQLPHFTSEHIKRCTDKGVESVFDIMEMEDEERNALLQLTDSQIADVARFCNRYPNIELSYEVVDKDSIRSGGPVVVLVQLEREEEVTGPVIAPLFPQKREEGWWVVIGDAKSNSLISIKRLTLQQKAKVKLDFVAPATGAHNYTLYFMSDAYMGCDQEYKFSVDVKEAETDSDSD

SEQ ID NO: 39031 - protein, 625 aa, Homo sapiens
MADVTARSLQYEYKANSNLVLQADRSLIDRTRRDEPTGEVLSLVGKLEGTRMGDKAQRTKPQMQEERRAKRRKRDEDRHDINKMKGYTLLSEGIDEMVGIIYKPKTKETRETYEVLLSFIQAALGDQPRDILCGAADEVLAVLKNEKLRDKERRKEIDLLLGQTDDTRYHVLVNLGKKITDYGGDKEIQNMDDNIDETYGVNVQFESDEEEGDEDVYGEVREEASDDDMEGDEAVVRCTLSANLVASGELMSSKKKDLHPRDIDAFWLQRQLSRFYDDAIVSQKKADEVLEILKTASDDRECENQLVLLLGFNTFDFIKVLRQHRMMILYCTLLASAQSEAEKERIMGKMEADPELSKFLYQLHETEKEDLIREERSRRERVRQSRMDTDLETMDLDQGGEALAPRQVLDLEDLVFTQGSHFMANKRCQLPDGSFRRQRKGYEEVHVPALKPKPFGSEEQLLPVEKLPKYAQAGFEGFKTLNRIQSKLYRAALETDENLLLCAPTGAGKTNVALMCMLREIGKHINMDGTINVDDFKIIYIAPMRSLVQEMVGSFGKRLAKSNSLISIKRLTLQQKAKVKLDFVAPATGAHNYTLYFMSDAYMGCDQEYKFSVDVKEAETDSDSD

SEQ ID NO: 39032 - protein, 112 aa, Homo sapiens
METVLQVLLGILGFQAAWVSSQELEQSPQSLIVQEGKNLTINCTSSKTLYGLYWYKQKYGEGLIFLMMLQKGGEEKSHEKITAKLDEKKQQSSLHITASQPSHAGIYLCGAD

SEQ ID NO: 39033 - protein, 110 aa, Homo sapiens
MLLEHLLIILWMQLTWVSGQQLNQSPQSMFIQEGEDVSMNCTSSSIFNTWLWYKQEPGEGPVLLIALYKAGELTSNGRLTAQFGITRKDSFLNISASIPSDVGIYFCAGQ

SEQ ID NO: 39034 - protein, 331 aa, Homo sapiens
MTERPPSEAARSDPQLEGRDAAEASMAPPHLVLLNGVAKETSRAAAAEPPVIELGARGGPGGGPAGGGGAARDLKGRDAATAEARHRVPTTELCRPPGPAPAPAPASVTAELPGDGRMVQLSPPALAAPAAPGRALLYSLSQPLASLGSGFFGEPDAFPMFTTNNRVKRRPSPYEMEITDGPHTKVVRRIFTNSRERWRQQNVNGAFAELRKLIPTHPPDKKLSKNEILRLAMKYINFLAKLLNDQEEEGTQRAKTGKDPVVGAGGGGGGGGGGAPPDDLLQDVLSPNSSCGSSLDGAASPDSYTEEPAPKHTARSLHPAMLPAADGAGPR

SEQ ID NO: 39035 - protein, 306 aa, Homo sapiens
MAPPHLVLLNGVAKETSRAAAAEPPVIELGARGGPGGGPAGGGGAARDLKGRDAATAEARHRVPTTELCRPPGPAPAPAPASVTAELPGDGRMVQLSPPALAAPAAPGRALLYSLSQPLASLGSGFFGEPDAFPMFTTNNRVKRRPSPYEMEITDGPHTKVVRRIFTNSRERWRQQNVNGAFAELRKLIPTHPPDKKLSKNEILRLAMKYINFLAKLLNDQEEEGTQRAKTGKDPVVGAGGGGGGGGGGAPPDDLLQDVLSPNSSCGSSLDGAASPDSYTEEPAPKHTARSLHPAMLPAADGAGPR

SEQ ID NO: 39036 - protein, 156 aa, Homo sapiens
MEITDGPHTKVVRRIFTNSRERWRQQNVNGAFAELRKLIPTHPPDKKLSKNEILRLAMKYINFLAKLLNDQEEEGTQRAKTGKDPVVGAGGGGGGGGGGAPPDDLLQDVLSPNSSCGSSLDGAASPDSYTEEPAPKHTARSLHPAMLPAADGAGPR

SEQ ID NO: 39037 - protein, 686 aa, Homo sapiens
MGPRSRERRAGAVQNTNDSSALSKRSLAARGYVQDPFAALLVPGAARRAPLIHRGYYVRARAVRHCVRAFLEQIGAPQAALRAQILSLGAGFDSLYFRLKTAGRLARAAVWEVDFPDVARRKAERIGETPELCALTGPFERGEPASALCFESADYCILGLDLRQLQRVEEALGAAGLDAASPTLLLAEAVLTYLEPESAAALIAWAAQRFPNALFVVYEQMRPQDAFGQFMLQHFRQLNSPLHGLERFPDVEAQRRRFLQAGWTACGAVDMNEFYHCFLPAEERRRVENIEPFDEFEEWHLKCAHYFILAASRGDTLSHTLVFPSSEAFPRVNPASPSGVFPASVVSSEGQVPNLKRYGHASVFLSPDVILSAGGFGEQEGRHCRVSQFHLLSRDCDSEWKGSQIGSCGTGVQWDGRLYHTMTRLSESRVLVLGGRLSPVSPALGVLQLHFFKSEDNNTEDLKVTITKAGRKDDSTLCCWRHSTTEVSCQNQEYLFVYGGRSVVEPVLSDWHFLHVGTMAWVRIPVEGEVPEARHSHSACTWQGGALIAGGLGASEEPLNSVLFLRPISCGFLWESVDIQPPITPRYSHTAHVLNGKLLLVGGIWIHSSSFPGVTVINLTTGLSSEYQIDTTYVPWPLMLHNHTSILLPEEQQLLLLGGGGNCFSFGTYFNPHTVTLDLSSLSAGQ

SEQ ID NO: 39038 - protein, 110 aa, Homo sapiens
MKKLLAMILWLQLDRLSGELKVEQNPLFLSMQEGKNYTIYCNYSTTSDRLYWYRQDPGKSLESLFVLLSNGAVKQEGRLMASLDTKARLSTLHITAAVHDLSATYFCAVD

SEQ ID NO: 39039 - protein, 224 aa, Homo sapiens
MRLWKARVLKLVLKTAKDSRLGLNSKWLSLKLGDAGNPRSLAIRFILTNYNKLSIQSWFSLRRVEIISNNSIQAVFNPTGVYAPSGYSYRCQRVGSLQQDQALLLPSDTDDGSSLWEVTFIDFQIQGFAIKGGRFTKAQDCASSFSPAFLIGLAMSLILLLVLAYALHMLIYLRYLDQQYDLIASPAHFSQLKARDTAEEKELLRSQGAECYKLRSQQISKIYV

SEQ ID NO: 39040 - protein, 226 aa, Homo sapiens
MALSDVDVKKQIKHMMAFIEQEANEKAEEIDAKAEEEFNIEKGRLVQTQRLKIMEYYEKKEKQIEQQKKILMSTMRNQARLKVLRARNDLISDLLSEAKLRLSRIVEDPEVYQGLLDKLVLQGLLRLLEPVMIVRCRPQDLLLVEAAVQKAIPEYMTISQKHVEVQIDKEAYLAVNAAGGVEVYSGNQRIKVSNTLESRLDLSAKQKMPEIRMALFGANTNRKFFI

SEQ ID NO: 39041 - protein, 176 aa, Homo sapiens
MSRQLNIDALRQNFWKEEYLREKMLRCEWYRKYGSMVKAKQKAKAAARLPLKLPTLHPKAPLSPPPAPKSAPSKVPSPVPEAPFQSEMYPVPPITRALLYEGISHDFQGRYRYLNTRKLDMPETRYLFPITTSFTYGWQLGPPVKQELVSCKMCRIESFFRKNGAFALLDPRDLAL

SEQ ID NO: 39042 - protein, 380 aa, Homo sapiens
MSETVICSSRATVMLYDDGNKRWLPAGTGPQAFSRVQIYHNPTANSFRVVGRKMQPDQQVVINCAIVRGVKYNQATPNFHQWRDARQVWGLNFGSKEDAAQFAAGMASALEALEGGGPPPPPALPTWSVPNGPSPEEVEQQKRQQPGPSEHIERRVSNAGGPPAPPAGGPPPPPGPPPPPGPPPPPGLPPSGVPAAAHGAGGGPPPAPPLPAAQGPGGGGAGAPGLAAAIAGAKLRKVSKQEEASGGPTAPKAESGRSGGGGLMEEMNAMLARRRKATQVGEKTPKDESANQEEPEARVPAQSESVRRPWEKNSTTLPRMKSSSSVTTSETQPCTPSSSDYSDLQRVKQELLEEVKKELQKVKEEIIEAFVQELRKRGSP

SEQ ID NO: 39043 - protein, 780 aa, Homo sapiens
MSKMPAKKKSCFQITSVTTAQVATSITEDTESLDDPDESRTEDVSSEIFDVSRATDYGPEEVCERSSSEETLNNVGDAETPGTVSPNLLLDGQLAAAAAAPANGGGVVSARSVSGALASTLAAAATSAPAPGAPGGPQLAGSSAGPVTAAPSQPPTTCSSRFRVIKLDHGSGEPYRRGRWTCMEYYERDSDSSVLTRSGDCIRHSSTFDQTAERDSGLGATGGSVVVVVASMQGAHGPESGTDSSLTAVSQLPPSEKMSQPTPAQPQSFSVGQPQPPPPPVGGAVAQSSAPLPPFPGAATGPQPMMAAAQPSQPQGAGPGGQTLPPTNVTLAQPAMSLPPQPGPAVGAPAAQQPQQFAYPQPQIPPGHLLPVQPSGQSEYLQQHVAGLQPPSPAQPSSTGAAASPATAATLPVGTGQNASSVGAQLMGASSQPSEAMAPRTGPAQGGQVAPCQPTGVPPATVGGVVQPCLGPAGAGQPQSVPPPQMGGSGPLSAVPGGPHAVVPGVPNVPAAVPAPSVPSVSTTSVTMPNVPAPLAQSQQLSSHTPVSRSSSIIQHVGLPLAPGTHSAPTSLPQSDLSQFQTQTQPLVGQVDDTRRKSEPLPQPPLSLIAENKPVVKPPVADSLANPLQLTPMNSLATSVFSIAIPVDGDEDRNPSTAFYQAFHLNTLKESKSLWDSASGGGVVAIDNKIEQAMDLVKSHLMYAVREEVEVLKEQIKELVERNSLLERENALLKSLSSNDQLSQLPTQQANPGSTSQQQAVIAQPPQPTQPPQQPNVSSA

SEQ ID NO: 39044 - protein, 756 aa, Homo sapiens
MSKMPAKKKSCFQITSVTTAQVATSITEDTESLDDPDESRTEDVSSEIFDVSRATDYGPEEVCERSSSEETLNNVGDAETPGTVSPNLLLDGQLAAAAAAPANGGGVVSARSVSGALASTLAAAATSAPAPGAPGGPQLAGSSAGPVTAAPSQPPTTCSSRFRVIKLDHGSGEPYRRGRWTCMEYYERDSDSSVLTRSGDCIRHSSTFDQTAERDSGLGATGGSVVVVVASMQGAHGPESGTDSSLTAVSQLPPSEKMSQPTPAQPQSFSVGQPQPPPPPVGGAVAQSSAPLPPFPGAATGPQPMMAAAQPSQPQGAGPGGQTLPPTNVTLAQPAMSLPPQPGPAVGAPAAQQPQQFAYPQPQIPPGHLLPVQPSGQSEYLQQHVAGLQPPSPAQPSSTGAAASPATAATLPVGTGQNASSVGAQLMGASSQPSEAMAPRTGPAQGGQVAPCQPTGVPPATVGGVVQPCLGPAGAGQPQSVPPPQMGGSGPLSAVPGGPHAVVPGVPNVPAAVPAPSVPSVSTTSVTMPNVPAPLAQSQQLSSHTPVSRSSSIIQHVGLPLAPGTHSAPTSLPQSDLSQFQTQTQPLVGQVDDTRRKSEPLPQPPLSLIAENKPVVKPPVADSLANPLQLTPMNSLATSVFSIAIPVDGDEDSASGGGVVAIDNKIEQAMDLVKSHLMYAVREEVEVLKEQIKELVERNSLLERENALLKSLSSNDQLSQLPTQQANPGSTSQQQAVIAQPPQPTQPPQQPNVSSA

SEQ ID NO: 39045 - protein, 2809 aa, Homo sapiens
MTLEGLYLARGPLARLLLAWSALLCMAGGQGRWDGALEAAGPGRVRRRGSPGILQGPNVCGSRFHAYCCPGWRTFPGRSQCVVPICRRACGEGFCSQPNLCTCADGTLAPSCGVSRGSGCSVSCMNGGTCRGASCLCQKGYTGTVCGQPICDRGCHNGGRCIGPNRCACVYGFMGPQCERDYRTGPCFGQVGPEGCQHQLTGLVCTKALCCATVGRAWGLPCELCPAQPHPCRRGFIPNIHTGACQDVDECQAVPGLCQGGSCVNMVGSFHCRCPVGHRLSDSSAACEDYRAGACFSVLFGGRCAGDLAGHYTRRQCCCDRGRCWAAGPVPELCPPRGSNEFQQLCAQRLPLLPGHPGLFPGLLGFGSNGMGPPLGPARLNPHGSDARGIPSLGPGNSNIGTATLNQTIDICRHFTNLCLNGRCLPTPSSYRCECNVGYTQDVRGECIDVDECTSSPCHHGDCVNIPGTYHCRCYPGFQATPTRQACVDVDECIVSGGLCHLGRCVNTEGSFQCVCNAGFELSPDGKNCVDHNECATSTMCVNGVCLNEDGSFSCLCKPGFLLAPGGHYCMDIDECQTPGICVNGHCTNTEGSFRCQCLGGLAVGTDGRVCVDTHVRSTCYGAIEKGSCARPFPGTVTKSECCCANPDHGFGEPCQLCPAKDSAEFQALCSSGLGITTDGRDINECALDPEVCANGVCENLRGSYRCVCNLGYEAGASGKDCTDVDECALNSLLCDNGWCQNSPGSYSCSCPPGFHFWQDTEICKDVDECLSSPCVSGVCRNLAGSYTCKCGPGSRLDPSGTFCLDSTKGTCWLKIQESRCEVNLQGASLRSECCATLGAAWGSPCERCEIDPACARGFARMTGVTCDDVNECESFPGVCPNGRCVNTAGSFRCECPEGLMLDASGRLCVDVRLEPCFLRWDEDECGVTLPGKYRMDVCCCSIGAVWGVECEACPDPESLEFASLCPRGLGFASRDFLSGRPFYKDVNECKVFPGLCTHGTCRNTVGSFHCACAGGFALDAQERNCTDIDECRISPDLCGQGTCVNTPGSFECECFPGYESGFMLMKNCMDVDECARDPLLCRGGTCTNTDGSYKCQCPPGHELTAKGTACEDIDECSLSDGLCPHGQCVNVIGAFQCSCHAGFQSTPDRQGCVDINECRVQNGGCDVHCINTEGSYRCSCGQGYSLMPDGRACADVDECEENPRVCDQGHCTNMPGGHRCLCYDGFMATPDMRTCVDVDECDLNPHICLHGDCENTKGSFVCHCQLGYMVRKGATGCSDVDECEVGGHNCDSHASCLNIPGSFSCRCLPGWVGDGFECHDLDECVSQEHRCSPRGDCLNVPGSYRCTCRQGFAGDGFFCEDRDECAENVDLCDNGQCLNAPGGYRCECEMGFDPTEDHRACQDVDECAQGNLCAFGSCENLPGMFRCICNGGYELDRGGGNCTDINECADPVNCINGVCINTPGSYLCSCPQDFELNPSGVGCVDTRAGNCFLETHDRGDSGISCSAEIGVGVTRASCCCSLGRAWGNPCELCPMANTTEYRTLCPGGEGFQPNRITVILEDIDECQELPGLCQGGDCVNTFGSFQCECPPGYHLSEHTRICEDIDECSTHSGICGPGTCYNTLGNYTCVCPAEYLQVNGGNNCMDMRKSVCFRHYNGTCQNELAFNVTRKMCCCSYNIGQAWNRPCEACPTPISPDYQILCGNQAPGFLTDIHTGKPLDIDECGEIPAICANGICINQIGSFRCECPAGFNYNSILLACEDVDECGSRESPCQQNADCINIPGSYRCKCTRGYKLSPGGACVGRNECREIPNVCSHGDCMDTEGSYMCLCHRGFQASADQTLCMDIDECDRQPCGNGTCKNIIGSYNCLCFPGFVVTHNGDCVDFDECTTLVGQVCRFGHCLNTAGSFHCLCQDGFELTADGKNCVDTNECLSLAGTCLPGTCQNLEGSFRCICPPGFQVQSDHCIDIDECSEEPNLCLFGTCTNSPGSFQCLCPPGFVLSDNGHRCFDTRQSFCFTRFEAGKCSVPKAFNTTKTRCCCSKRPGEGWGDPCELCPQEGSAAFQELCPFGHGAVPGPDDSREDVNECAENPGVCTNGVCVNTDGSFRCECPFGYSLDFTGINCVDTDECSVGHPCGQGTCTNVIGGFECACADGFEPGLMMTCEDIDECSLNPLLCAFRCHNTEGSYLCTCPAGYTLREDGAMCRDVDECADGQQDCHARGMECKNLIGTFACVCPPGMRPLPGSGEGCTDDNECHAQPDLCVNGRCVNTAGSFRCDCDEGFQPSPTLTECHDIRQGPCFAEVLQTMCRSLSSSSEAVTRAECCCGGGRGWGPRCELCPLPGTSAYRKLCPHGSGYTAEGRDVDECRMLAHLCAHGECINSLGSFRCHCQAGYTPDATATTCLDMDECSQVPKPCTFLCKNTKGSFLCSCPRGYLLEEDGRTCKDLDECTSRQHNCQFLCVNTVGAFTCRCPPGFTQHHQACFDNDECSAQPGPCGAHGHCHNTPGSFRCECHQGFTLVSSGHGCEDVNECDGPHRCQHGCQNQLGGYRCSCPQGFTQHSQWAQCVDENECALSPPTCGSASCRNTLGGFRCVCPSGFDFDQALGGCQEVDECAGRRGPCSYSCANTPGGFLCGCPQGYFRAGQGHCVSGLGFSPGPQDTPDKEELLSSEACYECKINGLSPRDRPRRSAHRDHQVNLATLDSEALLTLGLNLSHLGRAERILELRPALEGLEGRIRYVIVRGNEQGFFRMHHLRGVSSLQLGRRRPGPGTYRLEVVSHMAGPWGVQPEGQPGPWGQALRLKVQLQLL

SEQ ID NO: 39046 - protein, 605 aa, Homo sapiens
MSWGTELWDQFDSLDKHTQWGIDFLERYAKFVKERIEIEQNYAKQLRNLVKKYCPKRSSKDEEPRFTSCVAFFNILNELNDYAGQREVVAEEMAHRVYGELMRYAHDLKTERKMHLQEGRKAQQYLDMCWKQMDNSKKKFERECREAEKAQQSYERLDNDTNATKADVEKAKQQLNLRTHMADENKNEYAAQLQNFNGEQHKHFYVVIPQIYKQLQEMDERRTIKLSECYRGFADSERKVIPIISKCLEGMILAAKSVDERRDSQMVVDSFKSGFEPPGDFPFEDYSQHIYRTISDGTISASKQESGKMDAKTTVGKAKGKLWLFGKKPKPQSPPLTPTSLFTSSTPNGSQFLTFSIEPVHYCMNEIKTGKPRIPSFRSLKRGWSVKMGPALEDFSHLPPEQRRKKLQQRIDELNRELQKESDQKDALNKMKDVYEKNPQMGDPGSLQPKLAETMNNIDRLRMEIHKNEAWLSEVEGKTGGRGDRRHSSDINHLVTQGRESPEGSYTDDANQEVRGPPQQHGHHNEFDDEFEDDDPLPAIGHCKAIYPFDGHNEGTLAMKEGEVLYIIEEDKGDGWTRARRQNGEEGYVPTSYIDVTLEKNSKGS

SEQ ID NO: 39047 - protein, 600 aa, Homo sapiens
MSWGTELWDQFDSLDKHTQWGIDFLERYAKFVKERIEIEQNYAKQLRNLVKKYCPKRSSKDEEPRFTSCVAFFNILNELNDYAGQREVVAEEMAHRVYGELMRYAHDLKTERKMHLQEGRKAQQYLDMCWKQMDNSKKKFERECREAEKAQQSYERLDNDTNATKADVEKAKQQLNLRTHMADENKNEYAAQLQNFNGEQHKHFYVVIPQIYKQLQEMDERRTIKLSECYRGFADSERKVIPIISKCLEGMILAAKSVDERRDSQMVVDSFKSGFEPPGDFPFEDYSQHIYRTISDGTISASKQESGKMDAKTTVGKAKGKLWLFGKKPKPQSPPLTPTSLFTSSTPNGSQFLTFSIEPVHYCMNEIKTGKPRIPSFRSLKRGGPALEDFSHLPPEQRRKKLQQRIDELNRELQKESDQKDALNKMKDVYEKNPQMGDPGSLQPKLAETMNNIDRLRMEIHKNEAWLSEVEGKTGGRGDRRHSSDINHLVTQGRESPEGSYTDDANQEVRGPPQQHGHHNEFDDEFEDDDPLPAIGHCKAIYPFDGHNEGTLAMKEGEVLYIIEEDKGDGWTRARRQNGEEGYVPTSYIDVTLEKNSKGS

SEQ ID NO: 39048 - protein, 547 aa, Homo sapiens
MSWGTELWDQFDSLDKHTQWGIDFLERYAKFVKERIEIEQNYAKQLRNLVKKYCPKRSSKDEEPRFTSCVAFFNILNELNDYAGQREVVAEEMAHRVYGELMRYAHDLKTERKMHLQEGRKAQQYLDMCWKQMDNSKKKFERECREAEKAQQSYERLDNDTNATKADVEKAKQQLNLRTHMADENKNEYAAQLQNFNGEQHKHFYVVIPQIYKQLQEMDERRTIKLSECYRGFADSERKVIPIISKCLEGMILAAKSVDERRDSQMVVDSFKSGFEPPGDFPFEDYSQHIYRTISDGTISASKQESGKMDAKTTVGKAKGKLWLFGKKPKGPALEDFSHLPPEQRRKKLQQRIDELNRELQKESDQKDALNKMKDVYEKNPQMGDPGSLQPKLAETMNNIDRLRMEIHKNEAWLSEVEGKTGGRGDRRHSSDINHLVTQGRESPEGSYTDDANQEVRGPPQQHGHHNEFDDEFEDDDPLPAIGHCKAIYPFDGHNEGTLAMKEGEVLYIIEEDKGDGWTRARRQNGEEGYVPTSYIDVTLEKNSKGS

SEQ ID NO: 39049 - protein, 551 aa, Homo sapiens
MSWGTELWDQFDSLDKHTQWGIDFLERYAKFVKERIEIEQNYAKQLRNLVKKYCPKRSSKDEEPRFTSCVAFFNILNELNDYAGQREVVAEEMAHRVYGELMRYAHDLKTERKMHLQEGRKAQQYLDMCWKQMDNSKKKFERECREAEKAQQSYERLDNDTNATKADVEKAKQQLNLRTHMADENKNEYAAQLQNFNGEQHKHFYVVIPQIYKQLQEMDERRTIKLSECYRGFADSERKVIPIISKCLEGMILAAKSVDERRDSQMVVDSFKSGFEPPGDFPFEDYSQHIYRTISDGTISASKQESGKMDAKTTVGKAKGKLWLFGKKPKGPALEDFSHLPPEQRRKKLQQRIDELNRELQKESDQKDALNKMKDVYEKNPQMGDPGSLQPKLAETMNNIDRLRMEIHKNEAWLSEVEGKTGGRGDRRHSSDINHLVTQGRESPEGSYTDDANQEVRGPPQQHGHHNEFDDEFEDDDPLPAIGHCKAIYPFDGHNEGTLAMKEGEVLYIIEEDKGDGWTRARRQNGEEGYVPTSYIDVTLEKNSKGAVTYI

SEQ ID NO: 39050 - protein, 604 aa, Homo sapiens
MSWGTELWDQFDSLDKHTQWGIDFLERYAKFVKERIEIEQNYAKQLRNLVKKYCPKRSSKDEEPRFTSCVAFFNILNELNDYAGQREVVAEEMAHRVYGELMRYAHDLKTERKMHLQEGRKAQQYLDMCWKQMDNSKKKFERECREAEKAQQSYERLDNDTNATKADVEKAKQQLNLRTHMADENKNEYAAQLQNFNGEQHKHFYVVIPQIYKQLQEMDERRTIKLSECYRGFADSERKVIPIISKCLEGMILAAKSVDERRDSQMVVDSFKSGFEPPGDFPFEDYSQHIYRTISDGTISASKQESGKMDAKTTVGKAKGKLWLFGKKPKPQSPPLTPTSLFTSSTPNGSQFLTFSIEPVHYCMNEIKTGKPRIPSFRSLKRGGPALEDFSHLPPEQRRKKLQQRIDELNRELQKESDQKDALNKMKDVYEKNPQMGDPGSLQPKLAETMNNIDRLRMEIHKNEAWLSEVEGKTGGRGDRRHSSDINHLVTQGRESPEGSYTDDANQEVRGPPQQHGHHNEFDDEFEDDDPLPAIGHCKAIYPFDGHNEGTLAMKEGEVLYIIEEDKGDGWTRARRQNGEEGYVPTSYIDVTLEKNSKGAVTYI

SEQ ID NO: 39051 - protein, 373 aa, Homo sapiens
MGSQVSVESGALHVVIVGGGFGGIAAASQLQALNVPFMLVDMKDSFHHNVAALRASVETGFAKKTFISYSVTFKDNFRQGLVVGIDLKNQMVLLQGGEALPFSHLILATGSTGPFPGKFNEVSSQQAAIQAYEDMVRQVQRSRFIVVVGGGSAGVEMAAEIKTEYPEKEVTLIHSQVALADKELLPSVRQEVKEILLRKGVQLLLSERVSNLEELPLNEYREYIKVQTDKGTEVATNLVILCTGIKINSSAYRKAFESRLASSGALRVNEHLQVEGHSNVYAIGDCADVRTPKMAYLAGLHANIAVANIVNSVKQRPLQAYKPGALTFLLSMGRNDGVGQISGFYVGRLMVRLTKSRDLFVSTSWKTMRQSPP

SEQ ID NO: 39052 - protein, 336 aa, Homo sapiens
MGSQVSVESGALHVVIVGGGFGGIAAASQLQALNVPFMLVDMKDSFHHNVAALRASVETGFAKKTFISYSVTFKDNFRQGLVVGIDLKNQMVLLQGGEVQRSRFIVVVGGGSAGVEMAAEIKTEYPEKEVTLIHSQVALADKELLPSVRQEVKEILLRKGVQLLLSLLGERVSNLEELPLNEYREYIKVQTDKGTEVATNLVILCTGIKINSSAYRKAFESRLASSGALRVNEHLQVEGHSNVYAIGDCADVRTPKMAYLAGLHANIAVANIVNSVKQRPLQAYKPGALTFLLSMGRNDGVGQISGFYVGRLMVRLTKSRDLFVSTSWKTMRQSPP

SEQ ID NO: 39053 - protein, 129 aa, Homo sapiens
MKTLQFFFLFCCWKAICCNSCELTNITIAIEKEECRFCISINTTWCAGYCYTRDLVYKDPARPKIQKTCTFKELVYETVRVPGCAHHADSLYTYPVATQCHCGKCDSDSTDCTVRGLGPSYCSFGEMKE

SEQ ID NO: 39054 - protein, 183 aa, Homo sapiens
MAGGPPNTKAEMEMSLAEELNHGRQGENQEHLVIAEMMELGSRSRGASQKKQKLEQKAAGSASAKRVWNMTATRPKKMGSQLPKPRMLRESGHGDAHLQEYAGNFQGIRFHYDRNPGTDAVAQTSLEEFNVLEMEVMRRQLYAVNRRLRALEEQGATWRHRETLIIAVLVSASIANLWLWMNQ

SEQ ID NO: 39055 - protein, 359 aa, Homo sapiens
MTSTSKGILRPFLIVCIILGCFMACLLIYIKPTNSWIFSPMESASSVLKMKNFFSTKTDYFNETTILVWVWPFGQTFDLTSCQAMFNIQGCHLTTDRSLYNKSHAVLIHHRDISWDLTNLPQQARPPFQKWIWMNLESPTHTPQKSGIEHLFNLTLTYRRDSDIQVPYGFLTVSTNPFVFEVPSKEKLVCWVVSNWNPEHARVKYYNELSKSIEIHTYGQAFGEYVNDKNLIPTISTCKFYLSFENSIHKDYITEKLYNAFLAGSVPVVLGPSRENYENYIPADSFIHVEDYNSPSELAKYLKEVDKNNKLYLSYFNWRKDFTVNLPRFWESHACLACDHVKRHQEYKSVGNLEKWFWN

SEQ ID NO: 39056 - protein, 417 aa, Homo sapiens
MNLPRAERLRSTPQRSLRDSDGEDGKIDVLGEEEDEDEVEDEEEAASQQFLEQSLQPGLQVARWGGVALPREHIEGGGGPSDPSEFGTKFRAPPRSAAASEDARQPAKPPYSYIALITMAILQNPHKRLTLSGICAFISGRFPYYRRKFPAWQNSIRHNLSLNDCFVKIPREPGHPGKGNYWSLDPASQDMFDNGSFLRRRKRFKRHQLTPGAHLPHPFPLPAAHAALHNPHPGPLLGAPAPPQPVPGAYPNTAPGRRPYALLHPHPLRYLLLSAPVYAGAPKKAEGAALATPAPFPCCSPHLVLSLGRRARVWRRHREADASLSALRVLCKGSGERVQGLRRVCPRPRGATATCSSDHQACCIPRPLPLCCKCPPPPLLGQFCSNSSSIRRRTAPTAALPPRARCWAGTCRPRRPC

SEQ ID NO: 39057 - protein, 242 aa, Homo sapiens [sequence omitted]

SEQ ID NO: 39058 - protein, 533 aa, Homo sapiens
MARLPAGIRFIISFSRDQWYRAFIFILTFLLYASFHLSRKPISIVKGELHKYCTAWDEADVRFSSQNRKSGSAAPHQLPDNETDCGWAPFDKNNYQQLLGALDYSFLCAYAVGMYLSGIIGERLPIRYYLTFGMLASGAFTALFGLGYFYNIHSFGFYVVTQVINGLVQTTGWPSVVTCLGNWFGKGRRGLIMGVWNSHTSVGNILGSLIAGYWVSTCWGLSFVVPGAIVAAMGIVCFLFLIEHPNDVRCSSTLVTHSKGYENGTNRLRLQKQILKSEKNKPLDPEMQCLLLSDGKGSIHPNHVVILPGDGGSGTAAISFTGALKIPGVIEFSLCLLFAKLVSYTFLFWLPLYITNVDHLDAKKAGELSTLFDVGGIFGGILAGVISDRLEKRASTCGLMLLLAAPTLYIFSTVSKMGLEATIAMLLLSGALVSGPYTLITTAVSADLGTHKSLKGNAHALSTVTAIIDGTGSVGAALGPLLAGLLSPSGWSNVFYMLMFADACALLFLIRLIHKELSCPGSATGDQVPFKEQ

SEQ ID NO: 39059 - protein, 399 aa, Homo sapiens
MRPERPRPRGSAPGPMETPPWDPARNDSLPPTLTPAVPPYVKLGLTVVYTVFYALLFVFIYVQLWLVLRYRHKRLSYQSVFLFLCLFWASLRTVLFSFYFKDFVAANSLSPFVFWLLYCFPVCLQFFTLTLMNLYFTQVIFKAKSKYSPELLKYRLPLYLASLFISLVFLLVNLTCAVLVKTGNWERKVIVSVRVAINDTLFVLCAVSLSICLYKISKMSLANIYLESKGSSVCQVTAIGVTVILLYTSRACYNLFILSFSQNKSVHSFDYDWYNVSDQADLKNQLGDAGYVLFGVVLFVWELLPTTLVVYFFRVRNPTKDLTNPGMVPSHGFSPRSYFFDNPRRYDSDDDLAWNIAPQGLQGGFAPDYYDWGQQTNSFLAQAGTLQDSTLDPDKPSLG

SEQ ID NO: 39060 - protein, 1578 aa, Homo sapiens
MEELETSLFQTRKAHRIEQMVARWLRRSRDSSARAKVAAADGPARNPTQTLIPVRHTVKIDKDTLLQDYGFHISESLPLTVVAVTAGGSAHGKLFPGDQILQMNNEPAEDLSWERAVDILREAEDSLSITVVRCTSGVPKSSFLTEEKRARLKTNPVKVHFAEEVLISGHSQGNSLLCMPNVLKLYLENGQTKAFKFEANTTVKDIILTVKEKLSIRSIEYFALALEEQYSISRLHLLHEEELIQQVVEREESHDYRCLFRVCFVPKDPLDLLKEDPVAFEYLYLQSCSDVLQERFAVEMKCSSALRLAALHIQERIYACAQPQKISLKYIEKDWGIENFISPTLLRNMKGKDIKKAISFHMKRNQNLLEPRQKQLISAAQLRLNYLQILGELKTYGGRIFNATLMLQDRESYIALLVGAKYGISQVINSKLNIMSTLAEFANISRVELTEESEKVSVVKVYLQDVKVLTLLLESNSAKDLACLIAGYYRLLVDPVTSIFLWPGNKQQAHRVSAEEGYESRACSDSEESSEVDCVLEPLSDRRLVKLAPCRSLIKEEQPPGNSPTPEVARRGPSTCGASSTTDSAESEASDSANTESRGYRTSGSSESMDALEEDDLDTCSSSRSTFFHFGSPGLAESIDSDSQEERSGIETSGFLCLLDLAQRANPQCQKTEFSESAALETFGWAPELSTVRLDPRLYEGSHADYYSLCSSVSPASYLSDSSESTASRQGGAPPAWGQQGWTEAQPSSMLEPLALHPPLAFEDGSSDEEYYDAADKLTPPGPPSGPRDVSTAEPSATSLQNKASTSSPENSLPCGPDGRQPSRRGGVKKYAKTLRKRRSFLQTDYTSQVSFPLVPSASLESVDDVCYYDREPYLALGAPSPTVSSLQDMQGEPGLLETKALGLLAPLRETKSTNPASRVMEMEPETMETKSVIDSRVSSISAIRFRIDPNNKENSGVVPAASSSASTPHCSNPGSSGPDTAQARPSQILPLSQDLDGIAPKEPTIEHGDSSFSLSSGDPNPDRACLASNPGLNNVSQGDTLELQLEPHVQLEMGLESFCTNHIQETAPKYTEPLLSPRDEPRSDECGINPGEKIASIPTKEEPQGQLSLERDREVTNKNGTNVFQEESRKDSGDSPGDVSNNVSQTLDISSPAGKIVTSLSLDAPVTGTEQIPPHPPRDPQGQSREPPGQGCQAQEQKLFVELDLDPDFFLGKQTVSPAVPPEGIKAEAPNHVTGQDIAPRDSPEWVCFNPEPSLPEPLPCPQEDPHLETSNHCLLSEGKSDSSSICLSAEKSFLCFAPESHPEVSASLRVATSLGFAGMNEMVAPRIGMDQCSCQFSYATCFRGPQPETEEEDRDLEAHPMAPLTSPPSAGSPVVLPWRPARAHSCTTAPLSRKSHIWPEYCSRALRQLKATPASTPEGFIQLMESLLELQDILETSWGVGNKHPPEKCTWHFTESRSRLCMGSQKLLSSCRHVIRMDQSPEEMQGAVRDTFQHLVQLAGLCFQFTDCSRCSARHREAAGNLRDVVYTYHQFIEAAKSTCERGYHDLSVKLLARQCTALTAAVFCLTQKFRASTAL

SEQ ID NO: 39061 - protein, 634 aa, Homo sapiens
MPNVLKLYLENGQTKAFKFEANTTVKDIILTVKEKLSIRSIEYFALALEEQYSISRLHLLHEEELIQQVVEREESHDYRCLFRVCFVPKDPLDLLKEDPVAFEYLYLQSCSDVLQERFAVEMKCSSALRLAALHIQERIYACAQPQKISLKYIEKDWGIENFISPTLLRNMKGKDIKKAISFHMKRNQNLLEPRQKQLISAAQLRLNYLQILGELKTYGGRIFNATLMLQDRESYIALLVGAKYGISQVINSKLNIMSTLAEFANISRVELTEESEKVSVVKVYLQDVKVLTLLLESNSAKDLACLIAGYYRLLVDPVTSIFLWPGNKQQAHRVSAEEGYESRACSDSEESSEVDCVLEPLSDRRLVKLAPCRSLIKEEQPPGNSPTPEVARRGPSTCGASSTTDSAESEASDSANTESRGYRTSGSSESMDALEEDDLDTCSSSRSTFFHFGSPGLAESIDSDSQEERSGIETSGFLCLLDLAQRANPQCQKTEFSESAALETFGWAPELSTVRLDPRLYEGSHADYYSLCSSVSPASYLSDSSESTASRQGGAPPAWGQQGWTEAQPSSMLEPLALHPPLAFEDGSSDEEYYDAADKLTPPGPPSGEPSLAGLQTRQAAPECLPGIKAWGQA

SEQ ID NO: 39062 - protein, 681 aa, Homo sapiens
MAEVGGVPKSSFLTEEKRARLKTNPVKVHFAEEVLISGHSQGNSLLCMPNVLKLYLENGQTKAFKFEANTTVKDIILTVKEKLSIRSIEYFALALEEQYSISRLHLLHEEELIQQVVEREESHDYRCLFRVCFVPKDPLDLLKEDPVAFEYLYLQSCSDVLQERFAVEMKCSSALRLAALHIQERIYACAQPQKISLKYIEKDWGIENFISPTLLRNMKGKDIKKAISFHMKRNQNLLEPRQKQLISAAQLRLNYLQILGELKTYGGRIFNATLMLQDRESYIALLVGAKYGISQVINSKLNIMSTLAEFANISRVELTEESEKVSVVKVYLQDVKVLTLLLESNSAKDLACLIAGYYRLLVDPVTSIFLWPGNKQQAHRVSAEEGYESRACSDSEESSEVDCVLEPLSDRRLVKLAPCRSLIKEEQPPGNSPTPEVARRGPSTCGASSTTDSAESEASDSANTESRGYRTSGSSESMDALEEDDLDTCSSSRSTFFHFGSPGLAESIDSDSQEERSGIETSGFLCLLDLAQRANPQCQKTEFSESAALETFGWAPELSTVRLDPRLYEGSHADYYSLCSSVSPASYLSDSSESTASRQGGAPPAWGQQGWTEAQPSSMLEPLALHPPLAFEDGSSDEEYYDAADKLTPPGPPSGEPSLAGLQTRQAAPECLPGIKAWGQA

SEQ ID NO: 39063 - protein, 880 aa, Homo sapiens
MSQPAGGRRKPRTLGPPVCSIRPFKSSEQYLEAMKEDLAEWLRDLYGLDIDAANFLQVLETGLVLCQHANVVTDAALAFLAEAPAQAQKIPMPRVGVSCNGAAQPGTFQARDNVSNFIQWCRKEMGIQEVLMFETEDLVLRKNVKNVVLCLLELGRRAWRFGVAAPTLVQLEEEIEEEVRRELALPPPDPSPPAPPRRQPCHFRNLDQMVQSLVSHCTCPVQFSMVKVSEGKYRVGDSNTLIFIRILRNHVMVRVGGGWDTLGHYLDKHDPCRCTSLSHKPGSFLKPPAPPVQHEVRVQDGPSQTQPTMTISRSQSPPPPVDWKTYTSSDRRLRPPTPSSPRPRRERGAGTGASREMAPFLRCQERSLIPSWRQPTAGDSPPSPQSSSTQKGRDPQCTSSGKREERYPPELPRGRIPTSWVHEETDSWGTDAGNPTPQRLRAIEATTKGISARGPSPLPRSFGPAECLGLRLPLRDEAKGAFFQFREPESVRSPTPVQGLTKIPIRLPPARPPTPGRSFPGATSGSPRTELGRDPIPLRAVTVDLAGSTHGDCSVEVRQEDQQLDIQVMAEARESWDLGLQEQEGRYTPLPLGGNKEQAIYCSLEEEILGNMKLLEVRSACPQGTRSGVIPRSGVYIPRLAGQWPEPGGPYDKAIQELAQGSPSLLKVDLEAWKAAPTGSPKPAVTPGPGSLKGKLGARQSGPRTKASLSAKGTHMRKVPPQGGQDCSASTVSASPEAPTPSPLDPNSDKAKACLSKGRRTLRKPKRVPSIYKLKLRPRIRPRRDHRPEKQPSRIPRPLAYVFLGPARQPPKDRLLRAVLGSKGGEASRVDGASVGEEEEEGKEEKEPAAPLESSPQPPEGLQPHWLNQAPLPPEEESWV

SEQ ID NO: 39064 - protein, 293 aa, Homo sapiens
MSQPAGGRRKPRTLGPPVCSIRPFKSSEQYLEAMKEDLAEWLRDLYGLDIDAANFLQVLETGLVLCQHANVVTDAALAFLAEAPAQAQKIPMPRVGVSCNGAAQPGTFQARDNVSNFIQWCRKEMGIQEVLMFETEDLVLRKNVKNVVLCLLELGRRAWRFGVAAPTLVQLEEEIEEEVRRELALPLPQPGPDGAEPCEPLHVPSAVLHGQSVYVFLGPARQPPKDRLLRAVLGSKGGEASRVDGASVGEEEEEGKEEKEPAAPLESSPQPPEGLQPHWLNQAPLPPEEESWV

SEQ ID NO: 39065 - protein, 3013 aa, Homo sapiens
MASQQDSGFFEISIKYLLKSWSNTSPVGNGYIKPPVPPASGTHREKGPPTMLPINVDPDSKPGEYVLKSLFVNFTTQAERKIRIIMAEPLEKPLTKSLQRGEDPQFDQVISSMSSLSEYCLPSILRTLFDWYKRQNGIEDESHEYRPRTSNKSKSDEQQRDYLMERRDLAIDFIFSLVLIEVLKQIPLHPVIDSLIHDVINLAFKHFKYKEGYLGPNTGNMHIVADLYAEVIGVLAQAKFPAVKKKFMAELKELRHKEQNPYVVQSIISLIMGMKFFRIKMYPVEDFEASLQFMQECAHYFLEVKDKDIKHALAGLFVEILVPVAAAVKNEVNVPCLRNFVESLYDTTLELSSRKKHSLALYPLVTCLLCVSQKQLFLNRWHIFLNNCLSNLKNKDPKMARVALESLYRLLWVYMIRIKCESNTATQSRLITIITTLFPKGSRGVVPRDMPLNIFVKIIQFIAQERLDFAMKEIIFDFLCVGKPAKAFSLNPERMNIGLRAFLVIADSLQQKDGEPPMPVTGAVLPSGNTLRVKKTYLSKTLTEEEAKMIGMSLYYSQVRKAVDNILRHLDKEVGRCMMLTNVQMLNKEPEDMITGERKPKIDLFRTCVAAIPRLLPDGMSKLELIDLLARLSIHMDDELRHIAQNSLQGLLVDFSDWREDVLFGFTNFLLREVNDMHHTLLDSSLKLLLQLLTQWKLVIQTQGKVYEQANKIRNSELIANGSSHRIQSERGPHCSVLHAVEGFALVLLCSFQVATRKLSVLILKEIRALFIALGQPEDDDRPMIDVMDQLSSSILESFIHVAVSDSATLPLTHNVDLQWLVEWNAVLVNSHYDVKSPSHVWIFAQSVKDPWVLCLFSFLRQENLPKHCPTALSYAWPYAFTRLQSVMPLVDPNSPINAKKTSTAGSGDNYVTLWRNYLILCFGVAKPSIMSPGHLRASTPEIMATTPDGTVSYDNKAIGTPSVGVLLKQLVPLMRLESIEITESLVLGFGRTNSLVFRELVEELHPLMKEALERRPENKKRRERRDLLRLQLLRIFELLADAGVISDSTNGALERDTLALGALFLEYVDLTRMLLEAENDKEVEILKDIRAHFSAMVANLIQCVPVHHRRFLFPQQSLRHHLFILFSQWAGPFSIMFTPLDRYSDRNHQITRYQYCALKAMSAVLCCGPVFDNVGLSPDGYLYKWLDNILACQDLRVHQLGCEVVVLLLELNPDQINLFNWAIDRCYTGSYQLASGCFKAIATVCGSRNYPFDIVTLLNLVLFKASDTNREIYEISMQLMQILEAKLFVYSKKVAEQRPGSILYGTHGPLPPLYSVSLALLSCELARMYPELTLPLFSEVSQRFPTTHPNGRQIMLTYLLPWLHNIELVDSRLLLPGSSPSSPEDEVKDREGDVTASHGLRGNGWGSPEATSLVLNNLMYMTAKYGDEVPGPEMENAWNALANNEKWSNNLRITLQFLISLCGVSSDTVLLPYIKKVAIYLCRNNTIQTMEELLFELQQTEPVNPIVQHCDNPPFYRFTASSKASAAASGTTSSSNTVVAGQENFPDAEENKILKESDERFSNVIRAHTRLESRYSNSSGGSYDEDKNDPISPYTGWLLTITETKQPQPLPMPCTGGCWAPLVDYLPETITPRGPLHRCNIAVIFMTEMVVDHSVREDWALHLPLLLHAVFLGLDHYRPEVFEHSKKLLLHLLIALSCNSNFHSIASVLLQTREMGEAKTLTVQPAYQPEYLYTGGFDFLREDQSSPVPDSGLSSSSTSSSISLGGSSGNLPQMTQEVEDVDTAAETDEKANKLIEFLTTRAFGPLWCHEDITPKNQNSKSAEQLTNFLRHVVSVFKDSKSGFHLEHQLSEVALQTALASSSRHYAGRSFQIFRALKQPLSAHALSDLLSRLVEVIGEHGDEIQGYVMEALLTLEAAVDNLSDCLKNSDLLTVLSRSSSPDLSSSSKLTASRKSTGQLNMNPGTTSGNTATAERSRHQRSFSVPKKFGVIDRSSDPPRSATLDRIQACTQQGLSSKTRSSSSLKDSLTDPSHINHPTNLLATIFWVTVALMESDFEFEYLMALRLLSRLLAHMPLDKAENREKLEKLQAQLKWADFSGLQQLLLKGFTSLTTTDLTLQLFSLLTPVSKISMVDASHAIGFPLNVLCLLPQLIQHFENPNQFCKDIAERIAQVCLEEKNPKLSNLAHVMTLYKTHSYTRDCATWVNVVCRYLHEAYADITLNMVTYLAELLEKGLPSVQQPLLQVIYSLLSYMDLSVVPVKQFNVEVLKTIEKYVQSVHWREALNILKLVVSRSASLVLPSYQHSDLSKIEIHRVWTSASKELPGKTLDFHFDISETPIIGRRYDELQNSSGRDGKPRAMAVTRSTSSTSSGSNSNVLVPVSWKRPQYSQKRTKEKLVHVLSLCGQEVGLSKNPSVIFSSCGDLDLLEHQTSLVSSEDGAREQENMDDTNSEQQFRVFRDFDFLDVELEDGEGESMDNFNWGVRRRSLDSLDKCDMQILEERQLSGSTPSLNKMHHEDSDESSEEEDLTASQILEHSDLIMTLSPSEETNPMELLTTACDSTPAEPHSFNTRMSSFDASLPDMNNLQISEGSKAEAVREEEDTTVHEDDLSSSINELPAAFECSDSFSLDMTEGEEKGNRALDQFTLASFGEGDRGVSPPPSPFFSAILAAFQPAACDDAEEAWRSHINQLMCDSDGSCAVYTFHVFSSLFKNIQKRFCFLTCDAASYLGDNLRGIGSKFVSSSQMLTSCSECPTLFVDAETLLSCGLLDKLKFSVLELQEYLDTYNNRKEATLSWLANCKATFAGGSRDGVITCQPGDSEEKQLELCQRLYKLHFQLLLLFQSYCKLIGQVHEVSSMPELLNMSRELSDLKKHLKEASAVIAADPLYSDGAWSEPTFTSTEAAIQSMLECLKNNELGKALRQIRECRSLWPNDIFGSSSDDEVQTLLNIYFRHQTLGQTGTYALVGSNQSLTEICTKLMELNMEIRDMIRRAQSYRVLTTFLPDSSVSGTSL

SEQ ID NO: 39066 - protein, 493 aa, Homo sapiens
MTANGTAEAVQIQFGLINCGNKYLTAEAFGFKVNASASSLKKKQIWTLEQPPDEAGSAAVCLRSHLGRYLAADKDGNVTCEREVPGPDCRFLIVAHDDGRWSLQSEAHRRYFGGTEDRLSCFAQTVSPAEKWSVHIAMHPQVNIYSVTRKRYAHLSARPADEIAVDRDVPWGVDSLITLAFQDQRYSVQTADHRFLRHDGRLVARPEPATGYTLEFRSGKVAFRDCEGRYLAPSGPSGTLKAGKATKVGKDELFALEQSCAQVVLQAANERNVSTRQGMDLSANQDEETDQETFQLEIDRDTKKCAFRTHTGKYWTLTATGGVQSTASSKNASCYFDIEWRDRRITLRASNGKFVTSKKNGQLAASVETAGDSELFLMKLINRPIIVFRGEHGFIGCRKVTGTLDANRSSYDVFQLEFNDGAYNIKDSTGKYWTVGSDSAVTSSGDTPVDFFFEFCDYNKVAIKVGGRYLKGDHAGVLKASAETVDPASLWEY

SEQ ID NO: 39067 - protein, 457 aa, Homo sapiens
MLGAVKMEGHEPSDWSSYYAEPEGYSSVSNMNAGLGMNGMNTYMSMSAAAMGSGSGNMSAGSMNMSSYVGAGMSPSLAGMSPGAGAMAGMGGSAGAAGVAGMGPHLSPSLSPLGGQAAGAMGGLAPYANMNSMSPMYGQAGLSRARDPKTYRRSYTHAKPPYSYISLITMAIQQSPNKMLTLSEIYQWIMDLFPFYRQNQQRWQNSIRHSLSFNDCFLKVPRSPDKPGKGSFWTLHPDSGNMFENGCYLRRQKRFKCEKQLALKEAAGAAGSGKKAAAGAQASQAQLGEAAGPASETPAGTESPHSSASPCQEHKRGGLGELKGTPAAALSPPEPAPSPGQQQQAAAHLLGPPHHPGLPPEAHLKPEHHYAFNHPFSINNLMSSEQQHHHSHHHHQPHKMDLKAYEQVMHYPGYGSPMPGSLAMGPVTNKTGLDASPLAADTSYYQGVYSRPIMNSS

SEQ ID NO: 39068 - protein, 463 aa, Homo sapiens
MHSASSMLGAVKMEGHEPSDWSSYYAEPEGYSSVSNMNAGLGMNGMNTYMSMSAAAMGSGSGNMSAGSMNMSSYVGAGMSPSLAGMSPGAGAMAGMGGSAGAAGVAGMGPHLSPSLSPLGGQAAGAMGGLAPYANMNSMSPMYGQAGLSRARDPKTYRRSYTHAKPPYSYISLITMAIQQSPNKMLTLSEIYQWIMDLFPFYRQNQQRWQNSIRHSLSFNDCFLKVPRSPDKPGKGSFWTLHPDSGNMFENGCYLRRQKRFKCEKQLALKEAAGAAGSGKKAAAGAQASQAQLGEAAGPASETPAGTESPHSSASPCQEHKRGGLGELKGTPAAALSPPEPAPSPGQQQQAAAHLLGPPHHPGLPPEAHLKPEHHYAFNHPFSINNLMSSEQQHHHSHHHHQPHKMDLKAYEQVMHYPGYGSPMPGSLAMGPVTNKTGLDASPLAADTSYYQGVYSRPIMNSS

SEQ ID NO: 39069 - protein, 3169 aa, Homo sapiens
MHSAGTPGLSSRRTGNSTSFQPGPPPPPRLLLLLLLLLSLVSRVPAQPAAFGRALLSPGLAGAAGVPAEEAIVLANRGLRVPFGREVWLDPLHDLVLQVQPGDRCAVSVLDNDALAQRPGRLSPKRFPCDFGPGEVRYSHLGARSPSRDRVRLQLRYDAPGGAVVLPLVLEVEVVFTQLEVVTRNLPLVVEELLGTSNALDARSLEFAFQPETEECRVGILSGLGALPRYGELLHYPQVPGGAREGGAPETLLMDCKAFQELGVRYRHTAASRSPNRDWIPMVVELRSRGAPVGSPALKREHFQVLVRIRGGAENTAPKPSFVAMMMMEVDQFVLTALTPDMLAAEDAESPSDLLIFNLTSPFQPGQGYLVSTDDRSLPLSSFTQRDLRLLKIAYQPPSEDSDQERLFELELEVVDLEGAASDPFAFMVVVKPMNTMAPVVTRNTGLILYEGQSRPLTGPAGSGPQNLVISDEDDLEAVRLEVVAGLRHGHLVILGASSGSSAPKSFTVAELAAGQVVYQHDDRDGSLSDNLVLRMVDGGGRHQVQFLFPITLVPVDDQPPVLNANTGLTLAEGETVPILPLSLSATDMDSDDSLLLFVLESPFLTTGHLLLRQTHPPHEKQELLRGLWRKEGAFYERTVTEWQQQDITEGRLFYRHSGPHSPGPVTDQFTFRVQDNHDPPNQSGLQRFVIRIHPVDRLPPELGSGCPLRMVVQESQLTPLRKKWLRYTDLDTDDRELRYTVTQSPTDTDENHLPAPLGTLVLTDNPSVVVTHFTQAQINHHKIAYRPPGQELGVATRVAQFQFQVEDRAGNVAPGTFTLYLHPVDNQPPEILNTGFTIQEKGHHILSETELHVNDVDTDVAHISFTLTQAPKHGHMRVSGQILHVGGLFHLEDIKQGRVSYAHNGDKSLTDSCSLEVSDRHHVVPITLRVNVRPVDDEVPILSHPTGTLESYLDVLENGATEITANVIKGTNEETDDLMLTFLLEDPPLYGEILVNGIPAEQFTQRDILEGSVVYTHTSGEIGLLPKADSFNLSLSDMSQEWRIGGNTIQGVTIWVTILPVDSQAPEIFVGEQLIVMEGDKSVITSVHISAEDVDSLNDDILCTIVIQPTSGYVENISPAPGSEKSRAGIAISAFNLKDLRQGHINYVQSVHKGVEPVEDRFVFRCSDGINFSERQFFPIVIIPTNDEQPEMFMREFMVMEGMSLVIDTPILNAADADVPLDDLTFTITQFPTHGHIMNQLINGTVLVESFTLDQIIESSSIIYEHDDSETQEDSFVIKLTDGKHSVEKTVLIIVIPVDDETPRMTINNGLEIEIGDTKIINNKILMATDLDSEDKSLVYIIRYGPGHGLLQRRKPTGAFENITLGMNFTQDEVDRNLIQYVHLGQEGIRDLIKFDVTDGINPLIDRYFYVSIGSIDIVFPDVISKGVSLKEGGKVTLTTDLLSTSDLNSPDENLVFTITRAPMRGHLECTDQPGVSITSFTQLQLAGNKIYYIHTADDEVKMDSFEFQVTDGRNPVFRTFRISISDVDNKKPVVTIHKLVVSESENKLITPFELTVEDRDTPDKLLKFTITQVPIHGHLLFNNTRPVMVFTKQDLNENLISYKHDGTESSEDSFSFTVTDGTHTDFYVFPDTVFETRRPQVMKIQVLAVDNSVPQIAVNKGASTLRTLATGHLGFMITSKILKVEDRDSLHISLRFIVTEAPQHGYLLNLDKGNHSITQFTQADIDDMKICYVLREGANATSDMFYFAVEDGGGNKLTYQNFRLNWAWISFEKEYYLVNEDSKFLDVVLKRRGYLGETSFISIGTRDRTAEKDKDFKGKAQKQVQFNPGQTRATWRVRILSDGEHEQSETFQVVLSEPVLAALEFPTVATVEIVDPGDEPTVFIPQSKYSVEEDVGELFIPIRRSGDVSQELMVVCYTQQGTATGTVPTSVLSYSDYISRPEDHTSVVRFDKDEREKLCRIVIIDDSLYEEEETFHVLLSMPMGGRIGSEFPGAQVTIVPDKDDEPIFYFGDVEYSVDESAGYVEVQVWRTGTDLSKSSSVTVRSRKTDPPSADAGTDYVGISRNLDFAPGVNMQPVRVVILDDLGQPALEGIEKFELVLRMPMNAALGEPSKATVSINDSVSDLPKMQFKERIYTGSESDGQIVTMIHRTGDVQYRSSVRCYTRQGSAQVMMDFEERPNTDTSIITFLPGETEKPCILELMDDVLYEEVEELRLVLGTPQSNSPFGAAVGEQNETLIRIRDDADKTVIKFGETKFSVTEPKEPGESVVIRIPVIRQGDTSKVSIVRVHTKDGSATSGEDYHPVSEEIEFKEGETQHVVEIEVTFDGVREMREAFTVHLKPDENMIAEMQLTKAIVYIEEMSSMADVTFPSVPQIVSLLMYDDTSKAKESAEPMSGYPVICITACNPKYSDYDKTGSICASENINDTLTRYRWLISAPAGPDGVTSPMREVDFDTFFTSSKMVTLDSIYFQPGSRVQCAARAVNTNGDEGLELMSPIVTISREEGLCQPRVPGVVGAEPFSAKLRYTGPEDADYTNLIKLTVTMPHIDGMLPVISTRELSNFELTLSPDGTRVGNHKCSNLLDYTEVKTHYGFLTDATKNPEIIGETYPYQYSLSIRGSTTLRFYRNLNLEACLWEFVSYYDMSELLADCGGTIGTDGQVLNLVQSYVTLRVPLYVSYVFHSPVGVGGWQHFDLKSELRLTFVYDTAILWNDGIGSPPEAELQGSLYPTSMRIGDEGRLAVHFKTEAQFHGLFVLSHPASFTSSVIMSADHPGLTFSLRLIRSEPTYNQPVQQWSFVSDFAVRDYSGTYTVKLVPCTAPSHQEYRLPVTCNPREPVTFDLDIRFQQVSDPVAAEFSLNTQMYLLSKKSLWLSDGSMGFGQESDVAFAEGDIIYGRVMVDPVQNLGDSFYCSIEKVFLCTGADGYVPKYSPMNAEYGCLADSPSLLYRFKIVDKAQPETQATSFGNVLFNAKLAVDDPEAILLVNQPGSDGFKVDSTPLFQVALGREWYIHTIYTVRSKDNANRGIGKRSVEYHSLVSQGKPQSTTKSRKKREIRSTPSLAWEIGAENSRGTNIQHIALDRTKRQIPHGRAPPDGILPWELNSPSSAVSLVTVVGGTTVGLLTICLTVIAVLMCRGKESFRGKDAPKGSSSSEPMVPPQSHHNDSSEV

SEQ ID NO: 39070 - protein, 2667 aa, Homo sapiens
MHSAGTPGLSSRRTGNSTSFQPGPPPPPRLLLLLLLLLSLVSRVPAQPAAFGRALLSPGLAGAAGVPAEEAIVLANRGLRVPFGREVWLDPLHDLVLQVQPGDRCAVSVLDNDALAQRPGRLSPKRFPCDFGPGEVRYSHLGARSPSRDRVRLQLRYDAPGGAVVLPLVLEVEVVFTQLEVVTRNLPLVVEELLGTSNALDARSLEFAFQPETEECRVGILSGLGALPRYGELLHYPQVPGGAREGGAPETLLMDCKAFQELGVRYRHTAASRSPNRDWIPMVVELRSRGAPVGSPALKREHFQVLVRIRGGAENTAPKPSFVAMMMMEVDQFVLTALTPDMLAAEDAESPSDLLIFNLTSPFQPGQGYLVSTDDRSLPLSSFTQRDLRLLKIAYQPPSEDSDQERLFELELEVVDLEGAASDPFAFMVVVKPMNTMAPVVTRNTGLILYEGQSRPLTGPAGSGPQNLVISDEDDLEAVRLEVVAGLRHGHLVILGASSGSSAPKSFTVAELAAGQVVYQHDDRDGSLSDNLVLRMVDGGGRHQVQFLFPITLVPVDDQPPVLNANTGLTLAEGETVPILPLSLSATDMDSDDSLLLFVLESPFLTTGHLLLRQTHPPHEKQELLRGLWRKEGAFYERTVTEWQQQDITEGRLFYRHSGPHSPGPVTDQFTFRVQDNHDPPNQSGLQRFVIRIHPVDRLPPELGSGCPLRMVVQESQLTPLRKKWLRYTDLDTDDRELRYTVTQSPTDTDENHLPAPLGTLVLTDNPSVVVTHFTQAQINHHKIAYRPPGQELGVATRVAQFQFQVEDRAGNVAPGTFTLYLHPVDNQPPEILNTGFTIQEKGHHILSETELHVNDVDTDVAHISFTLTQAPKHGHMRVSGQILHVGGLFHLEDIKQGRVSYAHNGDKSLTDSCSLEVSDRHHVVPITLRVNVRPVDDEVPILSHPTGTLESYLDVLENGATEITANVIKGTNEETDDLMLTFLLEDPPLYGEILVNGIPAEQFTQRDILEGSVVYTHTSGEIGLLPKADSFNLSLSDMSQEWRIGGNTIQGVTIWVTILPVDSQAPEIFVGEQLIVMEGDKSVITSVHISAEDVDSLNDDILCTIVIQPTSGYVENISPAPGSEKSRAGIAISAFNLKDLRQGHINYVQSVHKGVEPVEDRFVFRCSDGINFSERQFFPIVIIPTNDEQPEMFMREFMVMEGMSLVIDTPILNAADADVPLDDLTFTITQFPTHGHIMNQLINGTVLVESFTLDQIIESSSIIYEHDDSETQEDSFVIKLTDGKHSVEKTVLIIVIPVDDETPRMTINNGLEIEIGDTKIINNKILMATDLDSEDKSLVYIIRYGPGHGLLQRRKPTGAFENITLGMNFTQDEVDRNLIQYVHLGQEGIRDLIKFDVTDGINPLIDRYFYVSIGSIDIVFPDVISKGVSLKEGGKVTLTTDLLSTSDLNSPDENLVFTITRAPMRGHLECTDQPGVSITSFTQLQLAGNKIYYIHTADDEVKMDSFEFQVTDGRNPVFRTFRISISDVDNKKPVVTIHKLVVSESENKLITPFELTVEDRDTPDKLLKFTITQVPIHGHLLFNNTRPVMVFTKQDLNENLISYKHDGTESSEDSFSFTVTDGTHTDFYVFPDTVFETRRPQVMKIQVLAVDNSVPQIAVNKGASTLRTLATGHLGFMITSKILKVEDRDSLHISLRFIVTEAPQHGYLLNLDKGNHSITQFTQADIDDMKICYVLREGANATSDMFYFAVEDGGGNKLTYQNFRLNWAWISFEKEYYLVNEDSKFLDVVLKRRGYLGETSFISIGTRDRTAEKDKDFKGKAQKQVQFNPGQTRATWRVRILSDGEHEQSETFQVVLSEPVLAALEFPTVATVEIVDPGDEPTVFIPQSKYSVEEDVGELFIPIRRSGDVSQELMVVCYTQQGTATGTVPTSVLSYSDYISRPEDHTSVVRFDKDEREKLCRIVIIDDSLYEEEETFHVLLSMPMGGRIGSEFPGAQVTIVPDKDDEPIFYFGDVEYSVDESAGYVEVQVWRTGTDLSKSSSVTVRSRKTDPPSADAGTDYVGISRNLDFAPGVNMQPVRVVILDDLGQPALEGIEKFELVLRMPMNAALGEPSKATVSINDSVSDLPKMQFKERIYTGSESDGQIVTMIHRTGDVQYRSSVRCYTRQGSAQVMMDFEERPNTDTSIITFLPGETEKPCILELMDDVLYEEVEELRLVLGTPQSNSPFGAAVGEQNETLIRIRDDADKTVIKFGETKFSVTEPKEPGESVVIRIPVIRQGDTSKVSIVRVHTKDGSATSGEDYHPVSEEIEFKEGETQHVVEIEVTFDGVREMREAFTVHLKPDENMIAEMQLTKAIVYIEEMSSMADVTFPSVPQIVSLLMYDDTSKAKESAEPMSGYPVICITACNPKYSDYDKTGSICASENINDTLTRYRWLISAPAGPDGVTSPMREVDFDTFFTSSKMVTLDSIYFQPGSRVQCAARAVNTNGDEGLELMSPIVTISREEGLCQPRVPGVVGAEPFSAKLRYTGPEDADYTNLIKLTVTMPHIDGMLPVISTRELSNFELTLSPDGTRVGNHKCSNLLDYTEVKTHYGFLTDATKNPEIIGETYPYQYSLSIRGSTTLRFYRNLNLEACLWEFVSYYDMSELLADCGGTIGTDGQVQIYNI

SEQ ID NO: 39071 - protein, 574 aa, Homo sapiens
MASDLESSLTSIDWLPQLTLRATIEKLGSASQAGPPGSSRKCSPGSPTDPNATLSKDEAAVHQDGKPRYSYATLITYAINSSPAKKMTLSEIYRWICDNFPYYKNAGIGWKNSIRHNLSLNKCFRKVPRPRDDPGKGSYWTIDTCPDISRKRRHPPDDDLSQDSPEQEASKSPRGGVAGSGEASLPPEGNPQMSLQSPTSIASYSQGTGSVDGGAVAAGASGRESAEGPPPLYNTNHDFKFSYSEINFQDLSWSFRNLYKSMLEKSSSSSQHGFSSLLGDIPPSNNYYMYQQQQPPPPQQQQQQQQPPQPPPQQSQPQQQQAPAQGPSAVGGAPPLHTPSTDGCTPPGGKQAGAEGYGPPPVMAMHPPPLQHGGYHPHQHHPHSHPAQQPPPPQPQAQGQAPINNTGFAFPSDWCSNIDSLKESFKMVNRLNWSSIEQSQFSELMESLRQAEQKNWTLDQHHIANLCDSLNHFLTQTGHVPPQGGTHRPPAPARIADSCALTSGKQESAMSQVNSYGHPQAPHLYPGPSPMYPIPTQDSAGYNRPAHHMVPRPSVPPPGANEEIPDDFDWDLIT

SEQ ID NO: 39072 - protein, 526 aa, Homo sapiens
MASDLESSLTSIDWLPQLTLRATIEKLGSASQAGPPGSSRKCSPGSPTDPNATLSKDEAAVHQDGKPRYSYATLITYAINSSPAKKMTLSEIYRWICDNFPYYKNAGIGWKNSIRHNLSLNKCFRKVPRPRDDPGKGSYWTIDTCPDISRKRRHPPDDDLSQDSPEQEASKSPRGGVAGSGEASLPPEGNPQMSLQSPTSIASYSQGTGSVDGGAVAAGASGRESAEGPPPLYNTNHDFKFSYSEINFQDLSWSFRNLYKSMLEKSSSSSQHGFSSLLGDIPPSNNYYMYQQQQPPPPQQQQQQQQPPQPPPQQSQPQQQQAPAQGPSAVGGAPPLHTPSTDGCTPPGGKQAGAEGYGPPPVMAMHPPPLQHGGYHPHQHHPHSHPAQQPPPPQPQAQGQAPINNTGFAFPSDWCSNIDSLKESFKMVNRLNWSSIEQSQFSELMESLRQAEQKNWTLDQHHIANLCDSLNHFLTQTGHVPPQGGTHRPPAPARIADSCALTSGKQESAMSQGTAPSQLPWRWRLC

SEQ ID NO: 39073 - protein, 233 aa, Homo sapiens
MFDSSQYPYNCFNYDADDYPAGSSDEDKRLTRPAYSYIALIAMAIQQSPAGRVTLSGIYDFIMRKFPYYRANQRAWQNSIRHNLSLNSCFVKVPRSEGHEKGKGNYWTFAGGCESLLDLFENGNYRRRRRRRGPKREGPRGPRAGGAQGPSGPSEPPAAQGRLAPDSAGEGAPGREPPASPAPPGKEHPRDLKFSIDYILSSPDPFPGLKPPCLAQEGRYPRLENVGLHFWTM

SEQ ID NO: 39074 - protein, 644 aa, Homo sapiens
MADYSTVPPPSSGSAGGGGGGGGGGGVNDAFKDALQRARQIAAKIGGDAGTSLNSNDYGYGGQKRPLEDGDQPDAKKVAPQNDSFGTQLPPMHQQQSRSVMTEEYKVPDGMVGFIIGRGGEQISRIQQESGCKIQIAPDSGGLPERSCMLTGTPESVQSAKRLLDQIVEKGRPAPGFHHGDGPGNAVQEIMIPASKAGLVIGKGGETIKQLQERAGVKMVMIQDGPQNTGADKPLRITGDPYKVQQAKEMVLELIRDQGGFREVRNEYGSRIGGNEGIDVPIPRFAVGIVIGRNGEMIKKIQNDAGVRIQFKPDDGTTPERIAQITGPPDRCQHAAEIITDLLRSVQAGNPGGPGPGGRGRGRGQGNWNMGPPGGLQEFNFIVPTGKTGLIIGKGGETIKSISQQSGARIELQRNPPPNADPNMKLFTIRGTPQQIDYARQLIEEKIGGPVNPLGPPVPHGPHGVPGPHGPPGPPGPGTPMGPYNPAPYNPGPPGPAPHGPPAPYAPQGWGNAYPHWQQQAPPDPAKAGTDPNSAAWAAYYAHYYQQQAQPPPAAPAGAPTTTQTNGQGDQQNPAPAGQVDYTKAWEEYYKKMGQAVPAPTGAPPGGQPDYSAAWAEYYRQQAAYYAQTSPQGMPQHPPAPQGQ

SEQ ID NO: 39075 - protein, 653 aa, Homo sapiens
MADYSTVPPPSSGSAGGGGGGGGGGGVNDAFKDALQRARQIAAKIGGDAGTSLNSNDYGYGGQKRPLEDGDQPDAKKVAPQNDSFGTQLPPMHQQQRSVMTEEYKVPDGMVGFIIGRGGEQISRIQQESGCKIQIAPDSGGLPERSCMLTGTPESVQSAKRLLDQIVEKGRPAPGFHHGDGPGNAVQEIMIPASKAGLVIGKGGETIKQLQERAGVKMVMIQDGPQNTGADKPLRITGDPYKVQQAKEMVLELIRDQGGFREVRNEYGSRIGGNEGIDVPIPRFAVGIVIGRNGEMIKKIQNDAGVRIQFKPDDGTTPERIAQITGPPDRCQHAAEIITDLLRSVQAGNPGGPGPGGRGRGRGQGNWNMGPPGGLQEFNFIVPTGKTGLIIGKGGETIKSISQQSGARIELQRNPPPNADPNMKLFTIRGTPQQIDYARQLIEEKIGGPVNPLGPPVPHGPHGVPGPHGPPGPPGPGTPMGPYNPAPYNPGPPGPAPHGPPAPYAPQGWGNAYPHWQQQAPPDPAKAGTDPNSAAWAAYYAHYYQQQAQPPPAAPAGAPTTTQTNGQGDQQNPAPAGQVDYTKAWEEYYKKMGQAVPAPTGAPPGGQPDYSAAWAEYYRQQAAYYAQTSPQGMPQHPPAPQCRFDPASIELAL

SEQ ID NO: 39076 - protein, 1151 aa, Homo sapiens
MSRRKQSKPRQIKRPLEDAIEDEEEECPSEETDIISKGDFPLEESFSTEFGPENLSCEEVEYFCNKGDDEGIQETAESDGDTQSEKPGQPGVETDDWDGPGELEVFQKDGERKIQSRQQLPVGTTWGPFPGKMDLNNNSLKTKAQVPMVLTAGPKWLLDVTWQGVEDNKNNCIVYSKGGQLWCTTTKAISEGEELIAFVVDFDSRLQAASQMTLTEGMYPARLLDSIQLLPQQAAMASILPTAIVNKDIFPCKSCGIWYRSERNLQAHLMYYCSGRQREAAPVSEENEDSAHQISSLCPFPQCTKSFSNARALEMHLNSHSGVKMEEFLPPGASLKCTVCSYTADSVINFHQHLFSHLTQAAFRCNHCHFGFQTQRELLQHQELHVPSGKLPRESDMEHSPSATEDSLQPATDLLTRSELPQSQKAMQTKDASSDTELDKCEKKTQLFLTNQRPEIQPTTNKQSFSYTKIKSEPSSPRLASSPVQPNIGPSFPVGPFLSQFSFPQDITMVPQASEILAKMSELVHRRLRHGSSSYPPVIYSPLMPKGATCFECNITFNNLDNYLVHKKHYCSSRWQQMAKSPEFPSVSEKMPEALSPNTGQTSINLLNPAAHSADPENPLLQTSCINSSTVLDLIGPNGKGHDKDFSTQTKKLSTSSNNDDKINGKPVDVKNPSVPLVDGESDPNKTTCEACNITFSRHETYMVHKQYYCATRHDPPLKRSASNKVPAMQRTMRTRKRRKMYEMCLPEQEQRPPLVQQRFLDVANLNNPCTSTQEPTEGLGECYHPRCDIFPGIVSKHLETSLTINKCVPVSKCDTTHSSVSCLEMDVPIDLSKKCLSQSERTTTSPKRLLDYHECTVCKISFNKVENYLAHKQNFCPVTAHQRNDLGQLDGKVFPNPESERNSPDVSYERSIIKCEKNGNLKQPSPNGNLFSSHLATLQGLKVFSEAAQLIATKEENRHLFLPQCLYPGAIKKAKGADQLSPYYGIKPSDYISGSLVIHNTDIEQSRNAENESPKGQASSNGCAALKKDSLPLLPKNRGMVIVNGGLKQDERPAANPQQENISQNPQHEDDHKSPSWISENPLAANENVSPGIPSAEEQLSSIAKGVNGSSQAPTSGKYCRLCDIQFNNLSNFITHKKFYCSSHAAEHVK

SEQ ID NO: 39077 - protein, 1019 aa, Homo sapiens
MDLNNNSLKTKAQVPMVLTAGPKWLLDVTWQGVEDNKNNCIVYSKGGQLWCTTTKAISEGEELIAFVVDFDSRLQAASQMTLTEGMYPARLLDSIQLLPQQAAMASILPTAIVNSKCSVLCSPALEVMGIYGRKKCLLTRNQEQTFFLQKKKKKKEDSAHQISSLCPFPQCTKSFSNARALEMHLNSHSGVKMEEFLPPGASLKCTVCSYTADSVINFHQHLFSHLTQAAFRCNHCHFGFQTQRELLQHQELHVPSGKLPRESDMEHSPSATEDSLQPATDLLTRSELPQSQKAMQTKDASSDTELDKCEKKTQLFLTNQRPEIQPTTNKQSFSYTKIKSEPSSPRLASSPVQPNIGPSFPVGPFLSQFSFPQDITMVPQASEILAKMSELVHRRLRHGSSSYPPVIYSPLMPKGATCFECNITFNNLDNYLVHKKHYCSSRWQQMAKSPEFPSVSEKMPEALSPNTGQTSINLLNPAAHSADPENPLLQTSCINSSTVLDLIGPNGKGHDKDFSTQTKKLSTSSNNDDKINGKPVDVKNPSVPLVDGESDPNKTTCEACNITFSRHETYMVHKQYYCATRHDPPLKRSASNKVPAMQRTMRTRKRRKMYEMCLPEQEQRPPLVQQRFLDVANLNNPCTSTQEPTEGLGECYHPRCDIFPGIVSKHLETSLTINKCVPVSKCDTTHSSVSCLEMDVPIDLSKKCLSQSERTTTSPKRLLDYHECTVCKISFNKVENYLAHKQNFCPVTAHQRNDLGQLDGKVFPNPESERNSPDVSYERSIIKCEKNGNLKQPSPNGNLFSSHLATLQGLKVFSEAAQLIATKEENRHLFLPQCLYPGAIKKAKGADQLSPYYGIKPSDYISGSLVIHNTDIEQSRNAENESPKGQASSNGCAALKKDSLPLLPKNRGMVIVNGGLKQDERPAANPQQENISQNPQHEDDHKSPSWISENPLAANENVSPGIPSAEEQLSSIAKGVNGSSQAPTSGKYCRLCDIQFNNLSNFITHKKFYCSSHAAEHVK

SEQ ID NO: 39078 - protein, 147 aa, Homo sapiens
MSSSRVGLRLAACLLNVSEAGRKYIVENIAKAALLDKNGKKHPQVSVLNIFSDQDYKRSVITIATSVDKLGLAEDLVLHVPGCSVFLFGEADLPEKRSLVQRRKQLGWFTRRDFSALQPDLGAAPSQRCGLTGSEHGFCFALFFFFF

SEQ ID NO: 39079 - protein, 881 aa, Homo sapiens
MAGAAPRVRYLAGFCCPLGGLAAGKPRVLCHEAEVFLSTGSELVYVYDQEGGLLTAAFRFPDQVWHLELLAPRRLLYALCARRGLYCLSLDHPGRSRSTSQDDRDSEDGDQPSPVIPVDPDACILPDAALCAFTLLDSVLVTLVQGPARWKMQLFEQPCPGEDPRPGGQIGEVELSSYTPPAGVPGKPAAPHFLPVLCSVSPSGSRVPHDLLGGSGGFTLEDALFGLLFGADATLLQSPVVLCGLPDGQLCCVILKALVTSRSAPGDPNALVKILHHLEEPVIFIGALKTEPQAAEAAENFLPDEDVHCDCLVAFGHHGRMLAIKASWDESGKLVPELREYCLPGPVLCAACGGGGRVYHSTPSDLCVVDLSRGSTPLGPEQPEEGPGGLPPMLCPASLNICSVVSLSASPRTHEGGTKLLALSAKGRLMTCSLDLDSEMPGPARMTTESAGQKIKELLSGIGNISERVSFLKKAVDQRNKALTSLNEAMNVSCALLSSGTGPRPISCTTSTTWSRLQTQDVLMATCVLENSSSFSLDQGWTLCIQVLTSSCALDLDSACSAITYTIPVDQLGPGARREVTLPLGPGENGGLDLPVTVSCTLFYSLREVVGGALAPSDSEDPFLDECPSDVLPEQEGVCLPLSRHTVDMLQCLRFPGLAPPHTRAPSPLGPTRDPVATFLETCREPGSQPAGPASLRAEYLPPSVASIKVSAELLRAALKDGHSGVPLCCATLQWLLAENAAVDVVRARALSSIQGVAPDGANVHLIVREVAMTDLCPAGPIQAVEIQVESSSLADICRAHHAVVGRMQTMVTEQATQGSSAPDLRVQYLRQIHANHETLLREVQTLRDRLCTEDEASSCATAQRLLQVYRQLRHPSLILL

SEQ ID NO: 39080 - protein, 253 aa, Homo sapiens
MPASFPMLRCARSPCWTVCWSPWCRALPDGRCSCLSSPSPLGPTRDPVATFLETCREPGSQPAGPASLRAEYLPPSVASIKVSAELLRAALKDGHSGVPLCCATLQWLLAENAAVDVVRARALSSIQGVAPDGANVHLIVREVAMTDLCPAGPIQAVEIQVESSSLADICRAHHAVVGRMQTMVTEQATQGSSAPDLRVQYLRQIHANHETLLREVQTLRDRLCTEDEASSCATAQRLLQVYRQLRHPSLILL

SEQ ID NO: 39081 - protein, 730 aa, Homo sapiens
MQLFEQPCPGEDPRPGGQIGEVELSSYTPPAGVPGKPAAPHFLPVLCSVSPSGSRVPHDLLGGSGGFTLEDALFGLLFGADATLLQSPVVLCGLPDGQLCCVILKALVTSRSAPGDPNALVKILHHLEEPVIFIGALKTEPQAAEAAENFLPDEDVHCDCLVAFGHHGRMLAIKASWDESGKLVPELREYCLPGPVLCAACGGGGRVYHSTPSDLCVVDLSRGSTPLGPEQPEEGPGGLPPMLCPASLNICSVVSLSASPRTHEGGTKLLALSAKGRLMTCSLDLDSEMPGPARMTTESAGQKIKELLSGIGNISERVSFLKKAVDQRNKALTSLNEAMNVSCALLSSGTGPRPISCTTSTTWSRLQTQDVLMATCVLENSSSFSLDQGWTLCIQVLTSSCALDLDSACSAITYTIPVDQLGPGARREVTLPLGPGENGGLDLPVTVSCTLFYSLREVVGGALAPSDSEDPFLDECPSDVLPEQEGVCLPLSRHTVDMLQCLRFPGLAPPHTRAPSPLGPTRDPVATFLETCREPGSQPAGPASLRAEYLPPSVASIKVSAELLRAALKDGHSGVPLCCATLQWLLAENAAVDVVRARALSSIQGVAPDGANVHLIVREVAMTDLCPAGPIQAVEIQVESSSLADICRAHHAVVGRMQTMVTEQATQGSSAPDLRVQYLRQIHANHETLLREVQTLRDRLCTEDEASSCATAQRLLQVYRQLRHPSLILL

SEQ ID NO: 39082 - protein, 311 aa, Homo sapiens
MDLKLKDCEFWYSLHGQVPGLLDWDMRNELFLPCTTDQCSLAEQILAKYRVGVMKPPEMPQKRRPSPDGDGPPCEPNLWMWVDPNILCPLGSQEAPKPSGKEDLTNISPFPQPPQKDEGSNCSEDKVVESLPSSSSEQSPLQKQGIHSPSDFELTEEEAEEPDDNSLQSPEMKCYQSQKLWQINNQEKSWQRPPLNCSHLIALALRNNPHCGLSVQEIYNFTRQHFPFFWTAPDGWKSTIHYNLCFLDSFEKVPDSLKDEDNARPRSCLWKLTKEGHRRFWEETRVLAFAQRERIQECMSQPELLTSLFDL

SEQ ID NO: 39083 - protein, 587 aa, Homo sapiens
MSRARSHLRAALFLAAASARGITTQVAARRGLSAWPVPQEPSMEYQDAVRMLNTLQTNAGYLEQVKRQRGDPQTQLEAMELYLARSGLQVEDLDRLNIIHVTGTKGKGSTCAFTECILRSYGLKTGFFSSPHLVQVRERIRINGQPISPELFTKYFWRLYHRLEETKDGSCVSMPPYFRFLTLMAFHVFLQEKVDLAVVEVGIGGAYDCTNIIRKPVVCGVSSLGIDHTSLLGDTVEKIAWQKGGIFKQGVPAFTVLQPEGPLAVLRDRAQQISCPLYLCPMLEALEEGGPPLTLGLEGEHQRSNAALALQLAHCWLQRQDRHGAGEPKASRPGLLWQLPLAPVFQPTSHMRLGLRNTEWPGRTQVLRRGPLTWYLDGAHTASSAQACVRWFRQALQGRERPSGGPEVRVLLFNATGDRDPAALLKLLQPCQFDYAVFCPNLTEVSSTGNADQQNFTVTLDQVLLRCLEHQQHWNHLDEEQASPDLWSAPSPEPGGSASLLLAPHPPHTCSASSLVFSCISHALQWISQGRDPIFQPPSPPKGLLTHPVAHSGASILREAAAIHVLVTGSLHLVGGVLKLLEPALSQ

SEQ ID NO: 39084 - protein, 545 aa, Homo sapiens
MEYQDAVRMLNTLQTNAGYLEQVKRQRGDPQTQLEAMELYLARSGLQVEDLDRLNIIHVTGTKGKGSTCAFTECILRSYGLKTGFFSSPHLVQVRERIRINGQPISPELFTKYFWRLYHRLEETKDGSCVSMPPYFRFLTLMAFHVFLQEKVDLAVVEVGIGGAYDCTNIIRKPVVCGVSSLGIDHTSLLGDTVEKIAWQKGGIFKQGVPAFTVLQPEGPLAVLRDRAQQISCPLYLCPMLEALEEGGPPLTLGLEGEHQRSNAALALQLAHCWLQRQDRHGAGEPKASRPGLLWQLPLAPVFQPTSHMRLGLRNTEWPGRTQVLRRGPLTWYLDGAHTASSAQACVRWFRQALQGRERPSGGPEVRVLLFNATGDRDPAALLKLLQPCQFDYAVFCPNLTEVSSTGNADQQNFTVTLDQVLLRCLEHQQHWNHLDEEQASPDLWSAPSPEPGGSASLLLAPHPPHTCSASSLVFSCISHALQWISQGRDPIFQPPSPPKGLLTHPVAHSGASILREAAAIHVLVTGSLHLVGGVLKLLEPALSQ

SEQ ID NO: 39085 - protein, 537 aa, Homo sapiens
MLNTLQTNAGYLEQVKRQRGDPQTQLEAMELYLARSGLQVEDLDRLNIIHVTGTKGKGSTCAFTECILRSYGLKTGFFSSPHLVQVRERIRINGQPISPELFTKYFWRLYHRLEETKDGSCVSMPPYFRFLTLMAFHVFLQEKVDLAVVEVGIGGAYDCTNIIRKPVVCGVSSLGIDHTSLLGDTVEKIAWQKGGIFKQGVPAFTVLQPEGPLAVLRDRAQQISCPLYLCPMLEALEEGGPPLTLGLEGEHQRSNAALALQLAHCWLQRQDRHGAGEPKASRPGLLWQLPLAPVFQPTSHMRLGLRNTEWPGRTQVLRRGPLTWYLDGAHTASSAQACVRWFRQALQGRERPSGGPEVRVLLFNATGDRDPAALLKLLQPCQFDYAVFCPNLTEVSSTGNADQQNFTVTLDQVLLRCLEHQQHWNHLDEEQASPDLWSAPSPEPGGSASLLLAPHPPHTCSASSLVFSCISHALQWISQGRDPIFQPPSPPKGLLTHPVAHSGASILREAAAIHVLVTGSLHLVGGVLKLLEPALSQ

SEQ ID NO: 39086 - protein, 561 aa, Homo sapiens
MSRARSHLRAALFLAAASARGITTQVAARRGLSAWPVPQEPSMEYQDAVRMLNTLQTNAGYLEQVKRQRGDPQTQLEAMELYLARSGLQVEDLDRLNIIHVTGTKGKGSTCAFTECILRSYGLKTGFFSSPHLVQVRERIRINGQPISPELFTKYFWRLYHRLEETKVDLAVVEVGIGGAYDCTNIIRKPVVCGVSSLGIDHTSLLGDTVEKIAWQKGGIFKQGVPAFTVLQPEGPLAVLRDRAQQISCPLYLCPMLEALEEGGPPLTLGLEGEHQRSNAALALQLAHCWLQRQDRHGAGEPKASRPGLLWQLPLAPVFQPTSHMRLGLRNTEWPGRTQVLRRGPLTWYLDGAHTASSAQACVRWFRQALQGRERPSGGPEVRVLLFNATGDRDPAALLKLLQPCQFDYAVFCPNLTEVSSTGNADQQNFTVTLDQVLLRCLEHQQHWNHLDEEQASPDLWSAPSPEPGGSASLLLAPHPPHTCSASSLVFSCISHALQWISQGRDPIFQPPSPPKGLLTHPVAHSGASILREAAAIHVLVTGSLHLVGGVLKLLEPALSQ

SEQ ID NO: 39087 - protein, 24 aa, Homo sapiens
MTPRGFSCLLLPTSETDLPVKRRT

SEQ ID NO: 39088 - protein, 24 aa, Homo sapiens
MATGGFGCLLLLIREIDLSVKRQI

SEQ ID NO: 39089 - protein, 24 aa, Homo sapiens
MARRGFSCLLLSTTATDLPVKRRT

SEQ ID NO: 39090 - protein, 508 aa, Homo sapiens
MQRLLTPVKRILQLTRAVQETSLTPARLLPVAHQRFSTASAVPLAKTDTWPKDVGILALEVYFPAQYVDQTDLEKYNNVEAGKYTVGLGQTRMGFCSVQEDINSLCLTVVQRLMERIQLPWDSVGRLEVGTETIIDKSKAVKTVLMELFQDSGNTDIEGIDTTNACYGGTASLFNAANWMESSSWDGRYAMVVCGDIAVYPSGNARPTGGAGAVAMLIGPKAPLALERGLRGTHMENVYDFYKPNLASEYPIVDGKLSIQCYLRALDRCYTSYRKKIQNQWKQAGSDRPFTLDDLQYMIFHTPFCKMVQKSLARLMFNDFLSASSDTQTSLYKGLEAFGGLKLEDTYTNKDLDKALLKASQDMFDKKTKASLYLSTHNGNMYTSSLYGCLASLLSHHSAQELAGSRIGAFSYGSGLAASFFSFRVSQDAAPGSPLDKLVSSTSDLPKRLASRKCVSPEEFTEIMNQREQFYHKVNFSPPGDTNSLFPGTWYLERVDEQHRRKYARRPV

SEQ ID NO: 39091 - protein, 466 aa, Homo sapiens
MQRLLTPVKRILQLTRAVQETSLTPARLLPVAHQRFSTASAVPLAKTDTWPKDVGILALEVYFPAQYVDQTDLEKYNNVEAGKYTVGLGQTRMGFCSVQEDINSLCLTVVQRLMERIQLPWDSVGRLEVGTETIIDKSKAVKTVLMELFQDSGNTDIEGIDTTNACYGGTASLFNAANWMESSSWDGLRGTHMENVYDFYKPNLASEYPIVDGKLSIQCYLRALDRCYTSYRKKIQNQWKQAGSDRPFTLDDLQYMIFHTPFCKMVQKSLARLMFNDFLSASSDTQTSLYKGLEAFGGLKLEDTYTNKDLDKALLKASQDMFDKKTKASLYLSTHNGNMYTSSLYGCLASLLSHHSAQELAGSRIGAFSYGSGLAASFFSFRVSQDAAPGSPLDKLVSSTSDLPKRLASRKCVSPEEFTEIMNQREQFYHKVNFSPPGDTNSLFPGTWYLERVDEQHRRKYARRPV

SEQ ID NO: 39092 - protein, 453 aa, Homo sapiens
MQRLLTPVKRILQLTRAVQETSLTPARLLPVAHQRFSTASAVPLAKTDTWPKDVGILALEVYFPAQYVDQTDLEKYNNVEAGKYTVGLGQTRMGFCSVQEDINSLCLTVVQRLMERIQLPWDSVGRLEVGTETIIDKSKAVKTVLMELFQDSGNTDIEGIDTTNACYGGTASLFNAANWMESSSWDGRYAMVVCGDIAVYPSGNARPTGGAGAVAMLIGPKAPLALERAGSDRPFTLDDLQYMIFHTPFCKMVQKSLARLMFNDFLSASSDTQTSLYKGLEAFGGLKLEDTYTNKDLDKALLKASQDMFDKKTKASLYLSTHNGNMYTSSLYGCLASLLSHHSAQELAGSRIGAFSYGSGLAASFFSFRVSQDAAPGSPLDKLVSSTSDLPKRLASRKCVSPEEFTEIMNQREQFYHKVNFSPPGDTNSLFPGTWYLERVDEQHRRKYARRPV

SEQ ID NO: 39093 - protein, 288 aa, Homo sapiens
MERPQPDSMPQDLSEALKEATKEVHTQAENAEFMRNFQKGQVTRDGFKLVMASLYHIYVALEEEIERNKESPVFAPVYFPEELHRKAALEQDLAFWYGPRWQEVIPYTPAMQRYVKRLHEVGRTEPELLVAHAYTRYLGDLSGGQVLKKIAQKALDLPSSGEGLAFFTFPNIASATKFKQLYRSRMNSLEMTPAVRQRVIEEAKTAFLLNIQLFEELQELLTHDTKDQSPSRAPGLRQRASNKVQDSAPVETPRGKPPLNTRSQAPLLRWVLTLSFLVATVAVGLYAM

SEQ ID NO: 39094 - protein, 398 aa, Homo sapiens
MNWHLPLFLLASVTLPSICSHFNPLSLEELGSNTGIQVFNQIVKSRPHDNIVISPHGIASVLGMLQLGADGRTKKQLAMVMRYGVNGVGKILKKINKAIVSKKNKDIVTVANAVFVKNASEIEVPFVTRNKDVFQCEVRNVNFEDPASACDSINAWVKNETRDMIDNLLSPDLIDGVLTRLVLVNAVYFKGLWKSRFQPENTKKRTFVAADGKSYQVPMLAQLSVFRCGSTSAPNDLWYNFIELPYHGESISMLIALPTESSTPLSAIIPHISTKTIDSWMSIMVPKRVQVILPKFTAVAQTDLKEPLKVLGITDMFDSSKANFAKITTGSENLHVSHILQKAKIEVSEDGTKASAATTAILIARSSPPWFIVDRPFLFFIRHNPTGAVLFMGQINKP

SEQ ID NO: 39095 - protein, 397 aa, Homo sapiens
MNWHLPLFLLASVTLPSICSHFNPLSLEELGSNTGIQVFNQIVKSRPHDNIVISPHGIASVLGMLQLGADGRTKKQLAMVMRYGVNGVGKILKKINKAIVSKKNKDIVTVANAVFVKNASEIEVPFVTRNKDVFQCEVRNVNFEDPASACDSINAWVKNETRDMIDNLLSPDLIDGVLTRLVLVNAVYFKGLWKSRFQPENTKKRTFVAADGKSYQVPMLAQLSVFRCGSTSAPNDLWYNFIELPYHGESISMLIALPTESSTPLSAIIPHISTKTIDSWMSIMVPKRVQVILPKFTAVAQTDLKEPLKVLGITDMFDSSKANFAKITRSENLHVSHILQKAKIEVSEDGTKASAATTAILIARSSPPWFIVDRPFLFFIRHNPTGAVLFMGQINKP

SEQ ID NO: 39096 - protein, 409 aa, Homo sapiens
MSDCRSSLVEGTMNWHLPLFLLASVTLPSICSHFNPLSLEELGSNTGIQVFNQIVKSRPHDNIVISPHGIASVLGMLQLGADGRTKKQLAMVMRYGVNGVGKILKKINKAIVSKKNKDIVTVANAVFVKNASEIEVPFVTRNKDVFQCEVRNVNFEDPASACDSINAWVKNETRDMIDNLLSPDLIDGVLTRLVLVNAVYFKGLWKSRFQPENTKKRTFVAADGKSYQVPMLAQLSVFRCGSTSAPNDLWYNFIELPYHGESISMLIALPTESSTPLSAIIPHISTKTIDSWMSIMVPKRVQVILPKFTAVAQTDLKEPLKVLGITDMFDSSKANFAKITRSENLHVSHILQKAKIEVSEDGTKASAATTAILIARSSPPWFIVDRPFLFFIRHNPTGAVLFMGQINKP

SEQ ID NO: 39097 - protein, 341 aa, Homo sapiens
MGELMAFLLPLIIVLMVKHSDSRTHSLRYFRLGVSDPIHGVPEFISVGYVDSHPITTYDSVTRQKEPRAPWMAENLAPDHWERYTQLLRGWQQMFKVELKRLQRHYNHSGSHTYQRMIGCELLEDGSTTGFLQYAYDGQDFLIFNKDTLSWLAVDNVAHTIKQAWEANQHELLYQKNWLEEECIAWLKRFLEYGKDTLQRTEPPLVRVNRKETFPGVTALFCKAHGFYPPEIYMTWMKNGEEIVQEIDYGDILPSGDGTYQAWASIELDPQSSNLYSCHVEHCGVHMVLQVPQESETIPLVMKAVSGSIVLVIVLAGVGVLVWRRRPREQNGAIYLPTPDR

SEQ ID NO: 39098 - protein, 296 aa, Homo sapiens
MGELMAFLLPLIIVLMVKHSDSRTHSLRYFRLGVSDPIHGVPEFISVGYVDSHPITTYDSVTRQKEPRAPWMAENLAPDHWERYTQLLRGWQQMFKVELKRLQRHYNHSDNVAHTIKQAWEANQHELLYQKNWLEEECIAWLKRFLEYGKDTLQRTEPPLVRVNRKETFPGVTALFCKAHGFYPPEIYMTWMKNGEEIVQEIDYGDILPSGDGTYQAWASIELDPQSSNLYSCHVEHCGVHMVLQVPQESETIPLVMKAVSGSIVLVIVLAGVGVLVWRRRPREQNGAIYLPTPDR

SEQ ID NO: 39099 - protein, 249 aa, Homo sapiens
MGELMAFLLPLIIVLMVKHSDSRTHSLRYFRLGVSDPIHGVPEFISVGYVDSHPITTYDSVTRQKEPRAPWMAENLAPDHWERYTQLLRGWQQMFKVELKRLQRHYNHSGSHTYQRMIGCELLEDGSTTGFLQYAYDGQDFLIFNKDTLSWLAVDNVAHTIKQAWEANQHELLYQKNWLEEECIAWLKRFLEYGKDTLQRTESETIPLVMKAVSGSIVLVIVLAGVGVLVWRRRPREQNGAIYLPTPDR

SEQ ID NO: 39100 - protein, 220 aa, Homo sapiens
MGELMAFLLPLIIVLMVKHSDSRTHSLRYFRLGVSDPIHGVPEFISVGYVDSHPITTYDSVTRQKEPRAPWMAENLAPDHWERYTQLLRGWQQMFKVELKRLQRHYNHSGSHTYQRMIGCELLEDGSTTGFLQYAYDGQDFLIFNKDTLSWLAVDNVAHTIKQAWEANQHELLYQKNWLEEECIAWLKRFLEYGKDTLQRTGKEKEKASFPHCLNNCFYT

SEQ ID NO: 39101 - protein, 214 aa, Homo sapiens
MGELMAFLLPLIIVLMVKHSDSRTHSLRYFRLGVSDPIHGVPEFISVGYVDSHPITTYDSVTRQKEPRAPWMAENLAPDHWERYTQLLRGWQQMFKVELKRLQRHYNHSGSHTYQRMIGCELLEDGSTTGFLQYAYDGQDFLIFNKDTLSWLAVDNVAHTIKQAWEANQHELLYQKNWLEEECIAWLKRFLEYGKDTLQRTEQNGAIYLPTPDR

SEQ ID NO: 39102 - protein, 392 aa, Homo sapiens
MEEQQPEPKSQRDSALGAAAAATPGGLSLSLSPGASGSSGSGSDGDSVPVSPQPAPPSPPAAPCLPPLAHHPHLPPHPPPPPPQHLAAPAHQPQPAAQLHRTTNFFIDNILRPDFGCKKEQPPPQLLVAAAARGGAGGGGRVERDRGQTAAGRDPVHPLGTRAPGAASLLCAPDANCGPPDGSQPAAAGAGASKAGNPAAAAAAAAAAVAAAAAAAAAKPSDTGGGGSGGGAGSPGAQGTKYPEHGNPAILLMGSANGGPVVKTDSQQPLVWPAWVYCTRYSDRPSSGPRTRKLKKKKNEKEDKRPRTAFTAEQLQRLKAEFQANRYITEQRRQTLAQELSLNESQIKIWFQNKRAKIKKATGIKNGLALHLMAQGLYNHSTTTVQDKDESE

SEQ ID NO: 39103 - protein, 333 aa, Homo sapiens
MEENDPKPGEAAAAVEGQRQPESSPGGGSGGGGGSSPGEADTGRRRALMLPAVLQAPGNHQHPHRITNFFIDNILRPEFGRRKDAGTCCAGAGGGRGGGAGGEGGASGAEGGGGAGGSEQLLGSGSREPRQNPPCAPGAGGPLPAAGSDSPGDGEGGSKTLSLHGGAKKGGDPGGPLDGSLKARGLGGGDLSVSSDSDSSQAGANLGAQPMLWPAWVYCTRYSDRPSSGPRSRKPKKKNPNKEDKRPRTAFTAEQLQRLKAEFQTNRYLTEQRRQSLAQELSLNESQIKIWFQNKRAKIKKATGNKNTLAVHLMAQGLYNHSTTAKEGKSDSE

SEQ ID NO: 39104 - protein, 276 aa, Homo sapiens
MNSKRMLLLVLFAFSLMLVERYFRNHQVEELRLSDWFHPRKRPDVITKTDWLAPVLWEGTFDRRVLEKHYRRRNITVGLAVFATGRFAEEYLRPFLHSANKHFMTGYRVIFYIMVDAFFKLPDIEPSPLRTFKAFKVGTERWWLDGPLVHVKSLGEHIASHIQDEVDFLFSMAANQVFQNEFGVETLGPLVAQLHAWWYFRNTKNFPYERRPTSAACIPFGQGDFYYGNLMVGGTPHNILDFIKEYLNGVIHDIKNGLNSTYEKHLNKYFYLNKPT

SEQ ID NO: 39105 - protein, 323 aa, Homo sapiens
MADKQISLPAKLINGGIAGLIGVTCVFPIDLAKTRLQNQQNGQRVYTSMSDCLIKTVRSEGYFGMYRGAAVNLTLVTPEKAIKLAANDFFRHQLSKDGQKLTLLKEMLAGCGAGTCQVIVTTPMEMLKIQLQDAGRIAAQRKILAAQGQLSAQGGAQPSVEAPAAPRPTATQLTRDLLRSRGIAGLYKGLGATLLRDVPFSVVYFPLFANLNQLGRPASEEKSPFYVSFLAGCVAGSAAAVAVNPCDVVKTRLQSLQRGVNEDTYSGILDCARKILRHEGPSAFLKGAYCRALVIAPLFGIAQVVYFLGIAESLLGLLQDPQA

SEQ ID NO: 39106 - protein, 376 aa, Homo sapiens
MAALGDIQESPSVPSPVSLSSPGTPGTQHHEPQLHLHGHQHGSPGSSPKVLSQPSDLDLQDVEEVEIGRDTFWPDSEPKPEQAPRSPGSQAPDEGAGGALRSLLRSLPRRARCSAGFGPESSAERPAGQPPGAVPCAQPRGAWRVTLVQQAAAGPEGAPERAAELGVNFGRSRQGSARGAKPHRCEACGKSFKYNSLLLKHQRIHTGEKPYACHECGKRFRGWSGFIQHHRIHTGEKPYECGQCGRAFSHSSHFTQHLRIHNGEKPYKCGECGQAFSQSSNLVRHQRLHTGEKPYACSQCGKAFIWSSVLIEHQRIHTGEKPYECSDCGKAFRGRSHFFRHLRTHTGEKPFACGACGKAFGQSSQLIQHQRVHYRE

SEQ ID NO: 39107 - protein, 697 aa, Homo sapiens
MARLVAVCRDGEEEFPFERRQIPLYIDDTLTMVMEFPDNVLNLDGHQNNGAQLKQFIQRHGMLKQQDLSIAMVVTSREVLSALSQLVPCVGCRRSVERLFSQLVESGNPALEPLTVGPKGVLSVTRSCMTDAKKLYTLFYVHGSKLNDMIDAIPKSKKNKRCQLHSLDTHKPKPLGGCWMDVWELMSQECRDEVVLIDSSCLLETLETYLRKHRFCTDCKNKVLRAYNILIGELDCSKEKGYCAALYEGLRCCPHERHIHVCCETDFIAHLLGRAEPEFAGGRRERHAKTIDIAQEEVLTCLGIHLYERLHRIWQKLRAEEQTWQMLFYLGVDALRKSFEMTVEKVQGISRLEQLCEEFSEEERVRELKQEKKRQKRKNRRKNKCVCDIPTPLQTADEKEVSQEKETDFIENSSCKACGSTEDGNTCVEVIVTNENTSCTCPSSGNLLGSPKIKKGLSPHCNGSDCGYSSSMEGSETGSREGSDVACTEGICNHDEHGDDSCVHHCEDKEDDGDSCVECWANSEENDTKGKNKKKKKKSKILKCDEHIQKLGSCITDPGNRETSGNTMHTVFHRDKTKDTHPESCCSSEKGGQPLPWFEHRKNVPQFAEPTETLFGPDSGKGAKSLVELLDESECTSDEEIFISQDEIQSFMANNQSFYSNREQYRQHLKEKFNKYCRLNDHKRPICSGWLTTAGAN

SEQ ID NO: 39108 - protein, 288 aa, Homo sapiens
MARLVAVCRDGEEEFPFERRQIPLYIDDTLTMVMEFPDNVLNLDGHQNNGAQLKQFIQRHGMLKQQDLSIAMVVTSREVLSALSQLVPCVGCRRSVERLFSQLVESGNPALEPLTVGPKGVLSVTRSCMTDAKKLYTLFYVHGSKLNDMIDAIPKSKKNKRCQLHSLDTHKPKPLGGCWMDVWELMSQECRDEVVLIDSSCLLETLETYLRKHRFCTDCKNKVLRAYNILIGELDCSKEKGYCAALYEGLRCCPHERHIHVCCETDFIAHLLGRAEPEFAGGYEYVIC

SEQ ID NO: 39109 - protein, 457 aa, Homo sapiens
MARLVAVCRDGEEEFPFERRQIPLYIDDTLTMVMEFPDNVLNLDGHQNNGAQLKQFIQRHGMLKQQDLSIAMVVTSREVLSALSQLVPCVGCRRSVERLFSQLVESGNPALEPLTVGPKGVLSVTRSCMTDAKKLYTLFYVHGSKLNDMIDAIPKSKKNKRCQLHSLDTHKPKPLGGCWMDVWELMSQECRDEVVLIDSSCLLETLETYLRKHRFCTDCKNKVLRAYNILIGELDCSKEKGYCAALYEGLRCCPHERHIHVCCETDFIAHLLGRAEPEFAGGRRERHAKTIDIAQEEVLTCLGIHLYERLHRIWQKLRAEEQTWQMLFYLGVDALRKSFEMTVEKVQGISRLEQLCEEFSEEERVRELKQEKKRQKRKNRRKNKCVCDIPTPLQTADEKEVSQEKETDFIENSSCKACGSTEDGNTCVEVIVTNENTSCTCPSSGNLLGSPKIKKGK

SEQ ID NO: 39110 - protein, 174 aa, Homo sapiens
MSSAAADHWAWLLVLSFVFGCNVLRILLPSFSSFMSRVLQKDAEQESQMRAEIQDMKQELSTVNMMDEFARYARLERKINKMTDKLKTHVKARTAQLAKIKWVISVAFYVLQAALMISLIWKYYSVPVAVVPSKWITPLDRLVAFPTRVAGGVGITCWILVCNKVVAIVLHPFS

SEQ ID NO: 39111 - protein, 140 aa, Homo sapiens
MSRVLQKDAEQESQMRAEIQDMKQELSTVNMMDEFARYARLERKINKMTDKLKTHVKARTAQLAKIKWVISVAFYVLQAALMISLIWKYYSVPVAVVPSKWITPLDRLVAFPTRVAGGVGITCWILVCNKVVAIVLHPFS

SEQ ID NO: 39112 - protein, 524 aa, Homo sapiens
MHSLDEPLDLKLSITKLRAAREKRERTLGVVRPRALHRELGLVDDSPTPGSPGSPPSGFLLNSKFPEKVEGRFSAAPLVDLSLSPPSGLDSPNGSSSLSPERQGNGDLPPVPSASDFQPLRYLDGVPSSFQFFLPLGSGGALHLPASSFLTPPKDKCLSPDLPLPKQLVCRWAKCNQLFELLQDLVDHVNDYHVKPEKDAGYCCHWEGCARHGRGFNARYKMLIHIRTHTNEKPHRCPTCSKSFSRLENLKIHNRSHTGEKPYVCPYEGCNKRYSNSSDRFKHTRTHYVDKPYYCKMPGCHKRYTDPSSLRKHIKAHGHFVSHEQQELLQLRPPPKPPLPAPDGGPYVSGAQIIIPNPAALFGGPGLPGLPLPLAPGPLDLSALACGNGGGSGGGGGMGPGLPGPVLPLNLAKNPLLPSPFGAGGLGLPVVSLLAGAAGGKAEGEKGRGSVPTRALGMEGHKTPLERTESSCSRPSPDGLPLLPGTVLDLSTGVNSAASSPEALAPGWVVIPPGSVLLKPAVVN

SEQ ID NO: 39113 - protein, 106 aa, Homo sapiens
GQPKANPTVTLFPPSSEELQANKATLVCLISDFYPGAVTVAWKADGSPVKAGVETTKPSKQSNNKYAASSYLSLTPEQWKSHRSYSCQVTHEGSTVEKTVAPTECS

SEQ ID NO: 39114 - protein, 131 aa, Homo sapiens
MFSDNSHCPDCGQQWFPSLELGHWLYQTELVENECYQVFLDRINRADYCPECYPDNPANRSLVLPWSFPLEWAPQNLTRWTFEKACHPFLLGPPLVRKRIHDSRVAGFNPALQLILTRTDKTLNKKLGQNK

SEQ ID NO: 39115 - protein, 106 aa, Homo sapiens
GQPKAAPSVTLFPPSSEELQANKATLVCLISDFYPGAVTVAWKADSSPVKAGVETTTPSKQSNNKYAASSYLSLTPEQWKSHRSYSCQVTHEGSTVEKTVAPTECS

SEQ ID NO: 39116 - protein, 106 aa, Homo sapiens
GQPKAAPSVTLFPPSSEELQANKATLVCLISDFYPGAVTVAWKADSSPVKAGVETTTPSKQSNNKYAASSYLSLTPEQWKSHKSYSCQVTHEGSTVEKTVAPTECS

SEQ ID NO: 39117 - protein, 106 aa, Homo sapiens
GQPKAAPSVTLFPPSSEELQANKATLVCLISDFYPGAVKVAWKADGSPVNTGVETTTPSKQSNNKYAASSYLSLTPEQWKSHRSYSCQVTHEGSTVEKTVAPAECS

SEQ ID NO: 39118 - protein, 106 aa, Homo sapiens
GQPKAAPSVTLFPPSSEELQANKATLVCLVSDFNPGAVTVAWKADGSPVKVGVETTKPSKQSNNKYAASSYLSLTPEQWKSHRSYSCRVTHEGSTVEKTVAPAECS

SEQ ID NO: 39119 - protein, 213 aa, Homo sapiens
MRPGTGQGGLEAPGEPGPNLRQRWPLLLLGLAVVTHGLLRPTAASQSRALGPGAPGGSSRSSLRSRWGRFLLQRGSWTGPRCWPRGFQSKHNSVTHVFGSGTQLTVLSQPKATPSVTLFPPSSEELQANKATLVCLMNDFYPGILTVTWKADGTPITQGVEMTTPSKQSNNKYAASSYLSLTPEQWRSRRSYSCQVMHEGSTVEKTVAPAECS

SEQ ID NO: 39120 - protein, 84 aa, Homo sapiens
MRPGTGQGGLEAPGEPGPNLRQRWPLLLLGLAVVTHGLLRPTAASQSRALGPGAPGGSSRSSLRSRWGRSAQGHPLGHSVPAVL

SEQ ID NO: 39121 - protein, 218 aa, Homo sapiens
MTSEFFAAQLRAQISDDTTHPISYYKPEFYTPVDGGTAHLSVVAEDGSAVSATSTINLYFGSKVRSPVSEILFNDEMDDFSSPNITNEFGVPPSPANFIQPGKQPLSSMCPTIMVGQDGQPPSHADHTPMPQAIIYNLWFGYDVKRAVEEPRLHNQLLPNVTTVERNIDQAVTAALETRHHHTQIASTFIAVVQAIVRTAGGWAAASDSRKGGEPAGY

SEQ ID NO: 39122 - protein, 336 aa, Homo sapiens
MPPPAPGARLRLLAAAALAGLAVISRGLLSQSLEFNSPADNYTVCEGDNATLSCFIDEHVTRVAWLNRSNILYAGNDRWTSDPRVRLLINTPEEFSILITEVGLGDEGLYTCSFQTRHQPYTTQVYLIVHVPARIVNISSPVTVNEGGNVNLLCLAVGRPEPTVTWRQLRDGFTSEGEILEISDIQRGQAGEYECVTHNGVNSAPDSRRVLVTVNYPPTITDVTSARTALGRAALLRCEAMAVPPADFQWYKDDRLLSSGTAEGLKVQTERTRSMLLFANVSARHYGNYTCRAANRLGASSASMRLLRPGSLENSAPRPPGLLALLSALGWLWWRM

SEQ ID NO: 39123 - protein, 414 aa, Homo sapiens
MSKKISGGSVVEMQGDEMTRIIWELIKEKLIFPYVELDLHSYDLGIENRDATNDQVTKDAAEAIKKHNVGVKCATITPDEKRVEEFKLKQMWKSPNGTIRNILGGTVFREAIICKNIPRLVSGWVKPIIIGRHAYGDQYRATDFVVPGPGKVEITYTPSDGTQKVTYLVHNFEEGGGVAMGMYNQDKSIEDFAHSSFQMALSKGWPLYLSTKNTILKKYDGRFKDIFQEIYDKQYKSQFEAQKIWYEHRLIDDMVAQAMKSEGGFIWACKNYDGDVQSDSVAQGYGSLGMMTSVLVCPDGKTVEAEAAHGTVTRHYRMYQKGQETSTNPIASIFAWTRGLAHRAKLDNNKELAFFANALEEVSIETIEAGFMTKDLAACIKGLPNVQRSDYLNTFEFMDKLGENLKIKLAQAKL

SEQ ID NO: 39124 - protein, 167 aa, Homo sapiens
MSEWMKKGPLEWQDYIYKEVRVTASEKNEYKGWVLTTDPVSANIVLVNFLEDGSMSVTGIMGHAVQTVETMNEGDHRVREKLMHLFTSGDCKAYSPEDLEERKNSLKKWLEKNHIPITEQGDAPRTLCVAGVLTIDPPYGPENCSSSNEIILSRVQDLIEGHLTASQ

SEQ ID NO: 39125 - protein, 497 aa, Homo sapiens
MDPLGAPSQFVDVDTLPSWGDSCQDELNSSDTTAEIFQEDTVRSPFLYNKDVNGKVVLWKGDVALLNCTAIVNTSNESLTDKNPVSESIFMLAGPDLKEDLQKLKGCRTGEAKLTKGFNLAARFIIHTVGPKYKSRYRTAAESSLYSCYRNVLQLAKEQSMSSVGFCVINSAKRGYPLEDATHIALRTVRRFLEIHGETIEKVVFAVSDLEEGTYQKLLPLYFPRSLKEENRSLPYLPADIGNAEGEPVVPERQIRISEKPGAPEDNQEEEDEGLGVDLSFIGSHAFARMEGDIDKQRKLILQGQLSEAALQKQHQRNYNRWLCQARSEDLSDIASLKALYQTGVDNCGRTVMVVVGRNIPVTLIDMDKALLYFIHVMDHIAVKEYVLVYFHTLTSEYNHLDSDFLKKLYDVVDVKYKRNLKAVYFVHPTFRSKVSTWFFTTFSVSGLKDKIHHVDSLHQLFSAISPEQIDFPPFVLEYDARENGPYYTSYPPSPDL

SEQ ID NO: 39126 - protein, 496 aa, Homo sapiens
MDPLGAPSQFVDVDTLPSWGDSCQDELNSSDTTAEIFQEDTVRSPFLYNKDVNGKVVLWKGDVALLNCTAIVNTSNESLTDKNPVSESIFMLAGPDLKEDLQKLKGCRTGEAKLTKGFNLAARFIIHTVGPKYKSRYRTAAESSLYSCYRNVLQLAKEQSMSSVGFCVINSAKRGYPLEDATHIALRTVRRFLEIHGETIEKVVFAVSDLEEGTYQKLLPLYFPRSLKEENRSLPYLPADIGNAEGEPVVPERQIRISEKPGAPEDNQEEEDEGLGVDLSFIGSHAFARMEGDIDKQRKLILQGQLSEAALQKQHQRNYNRWLCQARSEDLSDIASLKALYQTGVDNCGRTVMVVVGRNIPVTLIDMDKALLYFIHVMDHIAVKEYVLVYFHTLTSEYNHLDSDFLKKLYDVVDVKYKRNLKAVYFVHPTFRSKVSTWFFTTFSVSGLKDKIHHVDSLHQLFSAISPEQIDFPPFVLEYDARVRSTRSSPSPGMVY

SEQ ID NO: 39127 - protein, 209 aa, Homo sapiens
MNPSMKQKQEEIKENIKNSSVPRRTLKMIQPSASGSLVGRENELSAGLSKRKHRNDHLTSTTSSPGVIVPESSENKNLGGVTQESFDLMIKENPSSQYWKEVAEKRRKALYEALKENEKLHKEIEQKDNEIARLKKENKELAEVAEHVQYMAELIERLNGEPLDNFESLDNQEFDSEEETVEDSLVEDSEIGTCAEGTVSSSTDAKPCI

SEQ ID NO: 39128 - protein, 469 aa, Homo sapiens
MAFPAGFGWAAATAAYQVEGGWDADGKGPCVWDTFTHQGGERVFKNQTGDVACGSYTLWEEDLKCIKQLGLTHYRFSLSWSRLLPDGTTGFINQKGIDYYNKIIDDLLKNGVTPIVTLYHFDLPQTLEDQGGWLSEAIIESFDKYAQFCFSTFGDRVKQWITINEANVLSVMSYDLGMFPPGIPHFGTGGYQAAHNLIKAHARSWHSYDSLFRKKQKGMVSLSLFAVWLEPADPNSVSDQEAAKRAITFHLDLFAKPIFIDGDYPEVVKSQIASMSQKQGYPSSRLPEFTEEEKKMIKGTADFFAVQYYTTRLIKYQENKKGELGILQDAEIEFFPDPSWKNVDWIYVVPWGVCKLLKYIKDTYNNPVIYITENGFPQSDPAPLDDTQRWEYFRQTFQELFKAIQLDKVNLQVYCAWSLLDNFEWNQGYSSRFGLFHVDFEDPARPRVPYTSAKEYAKIIRNNGLEAHL

SEQ ID NO: 39129 - protein, 162 aa, Homo sapiens
MAFPAGFGWAAATAAYQVEGGWDADGKGPCVWDTFTHQGGERVFKNQTGDVACGSYTLWEEDLKCIKQLGLTHYRFSLSWSRLLPDGTTGFINQKAIQLDKVNLQVYCAWSLLDNFEWNQGYSSRFGLFHVDFEDPARPRVPYTSAKEYAKIIRNNGLEAHL

SEQ ID NO: 39130 - protein, 331 aa, Homo sapiens
MWLWEDQGGLLGPFSFLLLVLLLVTRSPVNACLLTGSLFVLLRVFSFEPVPSCRALQVLKPRDRISAIAHRGGSHDAPENTLAAIRQAAKNGATGVELDIEFTSDGIPVLMHDNTVDRTTDGTGRLCDLTFEQIRKLNPAANHRLRNDFPDEKIPTLREAVAECLNHNLTIFFDVKGHAHKATEALKKMYMEFPQLYNNSVVCSFLPEVIYKMRQTDRDVITALTHRPWSLSHTGDGKPRYDTFWKHFIFVMMDILLDWSMHNILWYLCGISAFLMQKDFVSPAYLKKWSAKGIQVVGWTVNTFDEKSYYESHLGSSYITDSMVEDCEPHF

SEQ ID NO: 39131 - protein, 340 aa, Homo sapiens [sequence omitted]

SEQ ID NO: 39132 - protein, 332 aa, Homo sapiens
MSELDQLRQEAEQLKNQIRDARKACADATLSQITNNIDPVGRIQMRTRRTLRGHLAKIYAMHWGTDSRLLVSASQDGKLIIWDSYTTNKVHAIPLRSSWVMTCAYAPSGNYVACGGLDNICSIYNLKTREGNVRVSRELAGHTGYLSCCRFLDDNQIVTSSGDTTCALWDIETGQQTTTFTGHTGDVMSLSLAPDTRLFVSGACDASAKLWDVREGMCRQTFTGHESDINAICFFPNGNAFATGSDDATCRLFDLRADQELMTYSHDNIICGITSVSFSKSGRLLLAGYDDFNCNVWDALKADRAGVLAGHDNRVSCLGVTDDGMAVASVLG

SEQ ID NO: 39133 - protein, 1532 aa, Homo sapiens
MGHSKQIRILLLNEMEKLEKTLFRLEQGYELQFRLGPTLQGKAVTVYTNYPFPGETFNREKFRSLDWENPTEREDDSDKYCKLNLQQSGSFQYYFLQGNEKSGGGYIVVDPILRVGADNHVLPLDCVTLQTFLAKCLGPFDEWESRLRVAKESGYNMIHFTPLQTLGLSRSCYSLANQLELNPDFSRPNRKYTWNDVGQLVEKLKKEWNVICITDVVYNHTAANSKWIQEHPECAYNLVNSPHLKPAWVLDRALWRFSCDVAEGKYKEKGIPALIENDHHMNSIRKIIWEDIFPKLKLWEFFQVDVNKAVEQFRRLLTQENRRVTKSDPNQHLTIIQDPEYRRFGCTVDMNIALTTFIPHDKGPAAIEECCNWFHKRMEELNSEKHRLINYHQEQAVNCLLGNVFYERLAGHGPKLGPVTRKHPLVTRYFTFPFEEIDFSMEESMIHLPNKACFLMAHNGWVMGDDPLRNFAEPGSEVYLRRELICWGDSVKLRYGNKPEDCPYLWAHMKKYTEITATYFQGVRLDNCHSTPLHVAEYMLDAARNLQPNLYVVAELFTGSEDLDNVFVTRLGISSLIREAMSAYNSHEEGRLVYRYGGEPVGSFVQPCLRPLMPAIAHALFMDITHDNECPIVHRSAYDALPSTTIVSMACCASGSTRGYDELVPHQISVVSEERFYTKWNPEALPSNTGEVNFQSGIIAARCAISKLHQELGAKGFIQVYVDQVDEDIVAVTRHSPSIHQSVVAVSRTAFRNPKTSFYSKEVPQMCIPGKIEEVVLEARTIERNTKPYRKDENSINGTPDITVEIREHIQLNESKIVKQAGVATKGPNEYIQEIEFENLSPGSVIIFRVSLDPHAQVAVGILRNHLTQFSPHFKSGSLAVDNADPILKIPFASLASRLTLAELNQILYRCESEEKEDGGGCYDIPNWSALKYAGLQGLMSVLAEIRPKNDLGHPFCNNLRSGDWMIDYVSNRLISRSGTIAEVGKWLQAMFFYLKQIPRYLIPCYFDAILIGAYTTLLDTAWKQMSSFVQNGSTFVKHLSLGSVQLCGVGKFPSLPILSPALMDVPYRLNEITKEKEQCCVSLAAGLPHFSSGIFRCWGRDTFIALRGILLITGRYVEARNIILAFAGTLRHGLIPNLLGEGIYARYNCRDAVWWWLQCIQDYCKMVPNGLDILKCPVSRMYPTDDSAPLPAGTLDQPLFEVIQEAMQKHMQGIQFRERNAGPQIDRNMKDEGFNITAGVDEETGFVYGGNRFNCGTWMDKMGESDRARNRGIPATPRDGSAVEIVGLSKSAVRWLLELSKKNIFPYHEVTVKRHGKAIKVSYDEWNRKIQDNFEKLFHVSEDPSDLNEKHPNLVHKRGIYKDSYGASSPWCDYQLRPNFTIAMVVAPELFTTEKAWKALEIAEKKLLGPLGMKTLDPDDMVYCGIYDNALDNDNYNLAKGFNYHQGPEWLWPIGYFLRAKLYFSRLMGPETTAKTIVLVKNVLSRHYVHLERSPWKGLPELTNENAQYCPFSCETQAWSIATILETLYDL

SEQ ID NO: 39134 - protein, 1515 aa, Homo sapiens
MSLLTCAFYLGYELQFRLGPTLQGKAVTVYTNYPFPGETFNREKFRSLDWENPTEREDDSDKYCKLNLQQSGSFQYYFLQGNEKSGGGYIVVDPILRVGADNHVLPLDCVTLQTFLAKCLGPFDEWESRLRVAKESGYNMIHFTPLQTLGLSRSCYSLANQLELNPDFSRPNRKYTWNDVGQLVEKLKKEWNVICITDVVYNHTAANSKWIQEHPECAYNLVNSPHLKPAWVLDRALWRFSCDVAEGKYKEKGIPALIENDHHMNSIRKIIWEDIFPKLKLWEFFQVDVNKAVEQFRRLLTQENRRVTKSDPNQHLTIIQDPEYRRFGCTVDMNIALTTFIPHDKGPAAIEECCNWFHKRMEELNSEKHRLINYHQEQAVNCLLGNVFYERLAGHGPKLGPVTRKHPLVTRYFTFPFEEIDFSMEESMIHLPNKACFLMAHNGWVMGDDPLRNFAEPGSEVYLRRELICWGDSVKLRYGNKPEDCPYLWAHMKKYTEITATYFQGVRLDNCHSTPLHVAEYMLDAARNLQPNLYVVAELFTGSEDLDNVFVTRLGISSLIREAMSAYNSHEEGRLVYRYGGEPVGSFVQPCLRPLMPAIAHALFMDITHDNECPIVHRSAYDALPSTTIVSMACCASGSTRGYDELVPHQISVVSEERFYTKWNPEALPSNTGEVNFQSGIIAARCAISKLHQELGAKGFIQVYVDQVDEDIVAVTRHSPSIHQSVVAVSRTAFRNPKTSFYSKEVPQMCIPGKIEEVVLEARTIERNTKPYRKDENSINGTPDITVEIREHIQLNESKIVKQAGVATKGPNEYIQEIEFENLSPGSVIIFRVSLDPHAQVAVGILRNHLTQFSPHFKSGSLAVDNADPILKIPFASLASRLTLAELNQILYRCESEEKEDGGGCYDIPNWSALKYAGLQGLMSVLAEIRPKNDLGHPFCNNLRSGDWMIDYVSNRLISRSGTIAEVGKWLQAMFFYLKQIPRYLIPCYFDAILIGAYTTLLDTAWKQMSSFVQNGSTFVKHLSLGSVQLCGVGKFPSLPILSPALMDVPYRLNEITKEKEQCCVSLAAGLPHFSSGIFRCWGRDTFIALRGILLITGRYVEARNIILAFAGTLRHGLIPNLLGEGIYARYNCRDAVWWWLQCIQDYCKMVPNGLDILKCPVSRMYPTDDSAPLPAGTLDQPLFEVIQEAMQKHMQGIQFRERNAGPQIDRNMKDEGFNITAGVDEETGFVYGGNRFNCGTWMDKMGESDRARNRGIPATPRDGSAVEIVGLSKSAVRWLLELSKKNIFPYHEVTVKRHGKAIKVSYDEWNRKIQDNFEKLFHVSEDPSDLNEKHPNLVHKRGIYKDSYGASSPWCDYQLRPNFTIAMVVAPELFTTEKAWKALEIAEKKLLGPLGMKTLDPDDMVYCGIYDNALDNDNYNLAKGFNYHQGPEWLWPIGYFLRAKLYFSRLMGPETTAKTIVLVKNVLSRHYVHLERSPWKGLPELTNENAQYCPFSCETQAWSIATILETLYDL

SEQ ID NO: 39135 - protein, 1516 aa, Homo sapiens
MAPILSINLFIGYELQFRLGPTLQGKAVTVYTNYPFPGETFNREKFRSLDWENPTEREDDSDKYCKLNLQQSGSFQYYFLQGNEKSGGGYIVVDPILRVGADNHVLPLDCVTLQTFLAKCLGPFDEWESRLRVAKESGYNMIHFTPLQTLGLSRSCYSLANQLELNPDFSRPNRKYTWNDVGQLVEKLKKEWNVICITDVVYNHTAANSKWIQEHPECAYNLVNSPHLKPAWVLDRALWRFSCDVAEGKYKEKGIPALIENDHHMNSIRKIIWEDIFPKLKLWEFFQVDVNKAVEQFRRLLTQENRRVTKSDPNQHLTIIQDPEYRRFGCTVDMNIALTTFIPHDKGPAAIEECCNWFHKRMEELNSEKHRLINYHQEQAVNCLLGNVFYERLAGHGPKLGPVTRKHPLVTRYFTFPFEEIDFSMEESMIHLPNKACFLMAHNGWVMGDDPLRNFAEPGSEVYLRRELICWGDSVKLRYGNKPEDCPYLWAHMKKYTEITATYFQGVRLDNCHSTPLHVAEYMLDAARNLQPNLYVVAELFTGSEDLDNVFVTRLGISSLIREAMSAYNSHEEGRLVYRYGGEPVGSFVQPCLRPLMPAIAHALFMDITHDNECPIVHRSAYDALPSTTIVSMACCASGSTRGYDELVPHQISVVSEERFYTKWNPEALPSNTGEVNFQSGIIAARCAISKLHQELGAKGFIQVYVDQVDEDIVAVTRHSPSIHQSVVAVSRTAFRNPKTSFYSKEVPQMCIPGKIEEVVLEARTIERNTKPYRKDENSINGTPDITVEIREHIQLNESKIVKQAGVATKGPNEYIQEIEFENLSPGSVIIFRVSLDPHAQVAVGILRNHLTQFSPHFKSGSLAVDNADPILKIPFASLASRLTLAELNQILYRCESEEKEDGGGCYDIPNWSALKYAGLQGLMSVLAEIRPKNDLGHPFCNNLRSGDWMIDYVSNRLISRSGTIAEVGKWLQAMFFYLKQIPRYLIPCYFDAILIGAYTTLLDTAWKQMSSFVQNGSTFVKHLSLGSVQLCGVGKFPSLPILSPALMDVPYRLNEITKEKEQCCVSLAAGLPHFSSGIFRCWGRDTFIALRGILLITGRYVEARNIILAFAGTLRHGLIPNLLGEGIYARYNCRDAVWWWLQCIQDYCKMVPNGLDILKCPVSRMYPTDDSAPLPAGTLDQPLFEVIQEAMQKHMQGIQFRERNAGPQIDRNMKDEGFNITAGVDEETGFVYGGNRFNCGTWMDKMGESDRARNRGIPATPRDGSAVEIVGLSKSAVRWLLELSKKNIFPYHEVTVKRHGKAIKVSYDEWNRKIQDNFEKLFHVSEDPSDLNEKHPNLVHKRGIYKDSYGASSPWCDYQLRPNFTIAMVVAPELFTTEKAWKALEIAEKKLLGPLGMKTLDPDDMVYCGIYDNALDNDNYNLAKGFNYHQGPEWLWPIGYFLRAKLYFSRLMGPETTAKTIVLVKNVLSRHYVHLERSPWKGLPELTNENAQYCPFSCETQAWSIATILETLYDL

SEQ ID NO: 39136 - protein, 364 aa, Homo sapiens
MLRFLPDLAFSFLLILALGQAVQFQEYVFLQFLGLDKAPSPQKFQPVPYILKKIFQDREAAATTGVSRDLCYVKELGVRGNVLRFLPDQGFFLYPKKISQASSCLQKLLYFNLSAIKEREQLTLAQLGLDLGPNSYYNLGPELELALFLVQEPHVWGQTTPKPGKMFVLRSVPWPQGAVHFNLLDVAKDWNDNPRKNFGLFLEILVKEDRDSGVNFQPEDTCARLRCSLHASLLVVTLNPDQCHPSRKRRAAIPVPKLSCKNLCHRHQLFINFRDLGWHKWIIAPKGFMANYCHGECPFSLTISLNSSNYAFMQALMHAVDPEIPQAVCIPTKLSPISMLYQDNNDNVILRHYEDMVVDECGCG

SEQ ID NO: 39137 - protein, 478 aa, Homo sapiens
MSTNGDDHQVKDSLEQLRCHFTWELSIDDDEMPDLENRVLDQIEFLDTKYSVGIHNLLAYVKHLKGQNEEALKSLKEAENLMQEEHDNQANVRSLVTWGNFAWMYYHMGRLAEAQTYLDKVENICKKLSNPFRYRMECPEIDCEEGWALLKCGGKNYERAKACFEKVLEVDPENPESSAGYAISAYRLDGFKLATKNHKPFSLLPLRQAVRLNPDNGYIKVLLALKLQDEGQEAEGEKYIEEALANMSSQTYVFRYAAKFYRRKGSVDKALELLKKALQETPTSVLLHHQIGLCYKAQMIQIKEATKGQPRGQNREKLDKMIRSAIFHFESAVEKKPTFEVAHLDLARMYIEAGNHRKAEENFQKLLCMKPVVEETMQDIHFHYGRFQEFQKKSDVNAIIHYLKAIKIEQASLTRDKSINSLKKLVLRKLRRKALDLESLSLLGFVYKLEGNMNEALEYYERALRLAADFENSVRQGP

SEQ ID NO: 39138 - protein, 447 aa, Homo sapiens
MPDLENRVLDQIEFLDTKYSVGIHNLLAYVKHLKGQNEEALKSLKEAENLMQEEHDNQANVRSLVTWGNFAWMYYHMGRLAEAQTYLDKVENICKKLSNPFRYRMECPEIDCEEGWALLKCGGKNYERAKACFEKVLEVDPENPESSAGYAISAYRLDGFKLATKNHKPFSLLPLRQAVRLNPDNGYIKVLLALKLQDEGQEAEGEKYIEEALANMSSQTYVFRYAAKFYRRKGSVDKALELLKKALQETPTSVLLHHQIGLCYKAQMIQIKEATKGQPRGQNREKLDKMIRSAIFHFESAVEKKPTFEVAHLDLARMYIEAGNHRKAEENFQKLLCMKPVVEETMQDIHFHYGRFQEFQKKSDVNAIIHYLKAIKIEQASLTRDKSINSLKKLVLRKLRRKALDLESLSLLGFVYKLEGNMNEALEYYERALRLAADFENSVRQGP

SEQ ID NO: 39139 - protein, 390 aa, Homo sapiens
MLPGVGVFGTSLTARVIIPLLKDEGFAVKALWGRTQEEAEELAKEMSVPFYTSRIDEVLLHQDVDLVCINLPPPLTRQIAVKTLGIGKNVICDRTATPLDAFRMTSAAHYYPKLMSIMGNVLRFLPAFVRMKQLIEEGYVGEPLVCEVQVHGGSLLGKKYNWSCDDLMGGGGLHSVGTYIIDLLTFLTGQKAVKVHGLLKTFVKQTDHIKGIRQITSDDFCTFQMVLEGGVCCTVTLNFNVPGEFKQDVTVVGSAGRLLAVGTDLYGQRNSAPEQELLVQDATPVSNSLLPEKAFSDIPSPYLRGTIKMMQAVRQAFQDQDDRRTWDGRPLTMAATFDDCLYALCVVDTIKRSSQTGEWQNIAIMTEEPELSPAYLISEAMRRSRMSLYC

SEQ ID NO: 39140 - protein, 287 aa, Homo sapiens
MTSAAHYYPKLMSIMGNVLRFLPAFVRMKQLIEEGYVGEPLVCEVQVHGGSLLGKKYNWSCDDLMGGGGLHSVGTYIIDLLTFLTGQKAVKVHGLLKTFVKQTDHIKGIRQITSDDFCTFQMVLEGGVCCTVTLNFNVPGEFKQDVTVVGSAGRLLAVGTDLYGQRNSAPEQELLVQDATPVSNSLLPEKAFSDIPSPYLRGTIKMMQAVRQAFQDQDDRRTWDGRPLTMAATFDDCLYALCVVDTIKRSSQTGEWQNIAIMTEEPELSPAYLISEAMRRSRMSLYC

SEQ ID NO: 39141 - protein, 136 aa, Homo sapiens
MGDSRRDVLHEPAIALLSSPQTQSRLQIDAFIARRCWGSQWDITGYIHQQDFPTAVFIGFSNEFNICIPHPFTEWLQCVRKYSQSWGVRKGQRHIRYGMCSERTHHLSRTYSSLLEREEKLAFYGVLTMCQIWCET

SEQ ID NO: 39142 - protein, 69 aa, Homo sapiens
MSSKVAINSDIGQALWAVEQLQMEAGIDQVKMAADLLKFCTEQAKNDPFLVGIPAATNSFKEKKPYAIL

SEQ ID NO: 39143 - protein, 307 aa, Homo sapiens
MGGFQRGKYGTMAEGRSEDNLSATPPALRIILVGKTGCGKSATGNSILGQPVFESKLRAQSVTRTCQVKTGTWNGRKVLVVDTPSIFESQADTQELYKNIGDCYLLSAPGPHVLLLVIQLGRFTAQDTVAIRKVKEVFGTGAMRHVVILFTHKEDLGGQALDDYVANTDNCSLKDLVRECERRYCAFNNWGSVEEQRQQQAELLAVIERLGREREGSFHSNDLFLDAQLLQRTGAGACQEDYRQYQAKVEWQVEKHKQELRENESNWAYKALLRVKHLMLLHYEIFVFLLLCSILFFIIFLFIFHYI

SEQ ID NO: 39144 - protein, 347 aa, Homo sapiens
MQDSPIVVCTLLCTHKYVYHSGEDVHSFHEITMNNDLTVLRIINLVRYKTSFSTGRSEDNLSATPPALRIILVGKTGCGKSATGNSILGQPVFESKLRAQSVTRTCQVKTGTWNGRKVLVVDTPSIFESQADTQELYKNIGDCYLLSAPGPHVLLLVIQLGRFTAQDTVAIRKVKEVFGTGAMRHVVILFTHKEDLGGQALDDYVANTDNCSLKDLVRECERRYCAFNNWGSVEEQRQQQAELLAVIERLGREREGSFHSNDLFLDAQLLQRTGAGACQEDYRQYQAKVEWQVEKHKQELRENESNWAYKALLRVKHLMLLHYEIFVFLLLCSILFFIIFLFIFHYI

SEQ ID NO: 39145 - protein, 465 aa, Homo sapiens
MFLATLYFALPLLDLLLSAEVSGGDRLDCVKASDQCLKEQSCSTKYRTLRQCVAGKETNFSLASGLEAKDECRSAMEALKQKSLYNCRCKRGMKKEKNCLRIYWSMYQSLQGNDLLEDSPYEPVNSRLSDIFRVVPFISDVFQQVEHIPKGNNCLDAAKACNLDDICKKYRSAYITPCTTSVSNDVCNRRKCHKALRQFFDKVPAKHSYGMLFCSCRDIACTERRRQTIVPVCSYEEREKPNCLNLQDSCKTNYICRSRLADFFTNCQPESRSVSSCLKENYADCLLAYSGLIGTVMTPNYIDSSSLSVAPWCDCSNSGNDLEECLKFLNFFKDNTCLKNAIQAFGNGSDVTVWQPAFPVQTTTATTTTALRVKNKPLGPAGSENEIPTHVLPPCANLQAQKLKSNVSGNTHLCISNGNYEKEGLGASSHITTKSMAAPPSCGLSPLLVLVVTALSTLLSLTETS

SEQ ID NO: 39146 - protein, 460 aa, Homo sapiens
MFLATLYFALPLLDLLLSAEVSGGDRLDCVKASDQCLKEQSCSTKYRTLRQCVAGKETNFSLASGLEAKDECRSAMEALKQKSLYNCRCKRGMKKEKNCLRIYWSMYQSLQGNDLLEDSPYEPVNSRLSDIFRVVPFISVEHIPKGNNCLDAAKACNLDDICKKYRSAYITPCTTSVSNDVCNRRKCHKALRQFFDKVPAKHSYGMLFCSCRDIACTERRRQTIVPVCSYEEREKPNCLNLQDSCKTNYICRSRLADFFTNCQPESRSVSSCLKENYADCLLAYSGLIGTVMTPNYIDSSSLSVAPWCDCSNSGNDLEECLKFLNFFKDNTCLKNAIQAFGNGSDVTVWQPAFPVQTTTATTTTALRVKNKPLGPAGSENEIPTHVLPPCANLQAQKLKSNVSGNTHLCISNGNYEKEGLGASSHITTKSMAAPPSCGLSPLLVLVVTALSTLLSLTETS

SEQ ID NO: 39147 - protein, 75 aa, Homo sapiens
MKEGMSNNSTTSISQARKAVEQLKMEACMDRVKVSQAAADLLAYCEAHVREDPLIIPVPASENPFREKKFFCTIL

SEQ ID NO: 39148 - protein, 445 aa, Homo sapiens
MNEEYDVIVLGTGLTECILSGIMSVNGKKVLHMDRNPYYGGESASITPLEDLYKRFKIPGSPPESMGRGRDWNVDLIPKFLMANGQLVKMLLYTEVTRYLDFKVTEGSFVYKGGKIYKVPSTEAEALASSLMGLFEKRRFRKFLVYVANFDEKDPRTFEGIDPKKTTMRDVYKKFDLGQDVIDFTGHALALYRTDDYLDQPCYETINRIKLYSESLARYGKSPYLYPLYGLGELPQGFARLSAIYGGTYMLNKPIEEIIVQNGKVIGVKSEGEIARCKQLICDPSYVKDRVEKVGQVIRVICILSHPIKNTNDANSCQIIIPQNQVNRKSDIYVCMISFAHNVAAQGKYIAIVSTTVETKEPEKEIRPALELLEPIEQKFVSISDLLVPKDLGTESQIFISRTYDATTHFETTCDDIKNIYKRMTGSEFDFEEMKRKKNDIYGED

SEQ ID NO: 39149 - protein, 400 aa, Homo sapiens
MNEEYDVIVLGTGLTECILSGIMSVNGKKVLHMDRNPYYGGESASITPLEDLYKRFKIPGSPPESMGRGRDWNVDLIPKFLMANGLMGLFEKRRFRKFLVYVANFDEKDPRTFEGIDPKKTTMRDVYKKFDLGQDVIDFTGHALALYRTDDYLDQPCYETINRIKLYSESLARYGKSPYLYPLYGLGELPQGFARLSAIYGGTYMLNKPIEEIIVQNGKVIGVKSEGEIARCKQLICDPSYVKDRVEKVGQVIRVICILSHPIKNTNDANSCQIIIPQNQVNRKSDIYVCMISFAHNVAAQGKYIAIVSTTVETKEPEKEIRPALELLEPIEQKFVSISDLLVPKDLGTESQIFISRTYDATTHFETTCDDIKNIYKRMTGSEFDFEEMKRKKNDIYGED

SEQ ID NO: 39150 - protein, 245 aa, Homo sapiens
MNNKFDALKDDDSGDHDQNEENSTQKDGEKEKTERDKNQSSSKRKAVVPGPAEHPLQYNYTFWYSRRTPGRPTSSQSYEQNIKQIGTFASVEQFWRFYSHMVRPGDLTGHSDFHLFKEGIKPMWEDDANKNGGKWIIRLRKGLASRCWENLILAMLGEQFMVGEEICGAVVSVRFQEDIISIWNKTASDQATTARIRDTLRRVLNLPPNTIMEYKTHTDSIKMPGRLGPQRLLFQNLWKPRLNVP

SEQ ID NO: 39151 - protein, 234 aa, Homo sapiens
MNNKFDALKDDDSGDHDQNEENSTQKDGEKEKTERDKNQSSSKRKAVVPGPAEHPLQYNYTFWYSRRTPGRPTSSQSYEQNIKQIGTFASVEQFWRFYSHMVRPGDLTGHSDFHLFKEGIKPMWEDDANKNGGKWIIRLRKGLASRCWENLILAMLGEQFMVGEEICGAVVSVRFQEDIISIWNKTASDQATTARIRDTLRRVLNLPPNTIMEYKTHTDSIKDNSSFRNTKITL

SEQ ID NO: 39152 - protein, 144 aa, Homo sapiens
MRKIDLCLSSEGSEVILATSSDEKHPPENIIDGNPETFWTTTGMFPQEFIICFHKHVRIERLVIQSYFVQTLKIEKSTSKEPVDFEQWIEKDLVHTEGQLQNEEIVAHDGSATYLRFIIVSAFDHFASVHSVSAEGTVVSNLSS

SEQ ID NO: 39153 - protein, 298 aa, Homo sapiens
MEGMDVDLDPELMQKFSCLGTTDKDVLISEFQRLLGFQLNPAGCAFFLDMTNWNLQAAIGAYYDFESPNISVPSMSFVEDVTIGEGESIPPDTQFVKTWRIQNSGAEAWPPGVCLKYVGGDQFGHVNMVMVRSLEPQEIADVSVQMCSPSRAGMYQGQWRMCTATGLYYGDVIWVILSVEVGGLLGVTQQLSSFETEFNTQPHRKVEGNFNPFASPQKNRQSDENNLKDPGGSEFDSISKNTWAPAPDTWAPAPDQTEQDQNRLSQNSVNLSPSSHANNLSVVTYSKGLHGPYPFGQS

SEQ ID NO: 39154 - protein, 232 aa, Homo sapiens
MEGMDVDLDPELMQKFSCLGTTDKDVLISEFQRLLGFQLNPAGCAFFLDMTNWNLQAAIGAYYDFESPNISVPSMSFVEDVTIGEGESIPPDTQFVKTWRIQNSDVIWVILSVEVGGLLGVTQQLSSFETEFNTQPHRKVEGNFNPFASPQKNRQSDENNLKDPGGSEFDSISKNTWAPAPDTWAPAPDQTEQDQNRLSQNSVNLSPSSHANNLSVVTYSKGLHGPYPFGQS

SEQ ID NO: 39155 - protein, 258 aa, Homo sapiens
MIPPADSLLKYDTPVLVSRNTEKRSPKARLLKVSPQQPGPSGSAPQPPKTKLPSTPCVPDPTKQAEEILNAILPPREWVEDTQLWIQQVSSTPSTRMDVVHLQEQLDLKLQQRQARETGICPVRRELYSQCFDELIREVTINCAERGLLLLRVRDEIRMTIAAYQTLYESSVAFGMRKALQAEQGKSDMERKIAELETEKRDLERQVNEQKAKCEATEKRESERRQVEEKKHNEEIQFLKRTNQQLKAQLEGIIAPKK

SEQ ID NO: 39156 - protein, 132 aa, Homo sapiens
MPYYPQDELIREVTINCAERGLLLLRVRDEIRMTIAAYQTLYESSVAFGMRKALQAEQGKSDMERKIAELETEKRDLERQVNEQKAKCEATEKRESERRQVEEKKHNEEIQFLKRTNQQLKAQLEGIIAPKK

SEQ ID NO: 39157 - protein, 554 aa, Homo sapiens
MMLSRAKPAVGRGVQHTDKRKKKGRKIPKLEELLSKRDFTGAITLLEFKRHVGEEEEDTNLWIGYCAFHLGDYKRALEEYENATKEENCNSEVWVNLACTYFFLGMYKQAEAAGFKASKSRLQNRLLFHLAHKFNDEKKLMSFHQNLQDVTEDQLSLASIHYMRSHYQEAIDIYKRILLDNREYLALNVYVALCYYKLDYYDVSQEVLAVYLQQIPDSTIALNLKACNHFRLYNGRAAEAELKSLMDNASSSFEFAKELIRHNLVVFRGGEGALQVLPPLVDVIPEARLNLVIYYLRQDDVQEAYNLIKDLEPTTPQEYILKGVVNAALGQEMGSRDHMKIAQQFFQLVGGSASECDTIPGRQCMASCFFLLKQFDDVLIYLNSFKSYFYNDDIFNFNYAQAKAATGNTSEGEEAFLLIQSEKMKNDYIYLSWLARCYIMNKKPRLAWELYLKMETSGESFSLLQLIANDCYKMGQFYYSAKAFDVLERLDPNPEYWEGKRGACVGIFQMIIAGREPKETLREVLHLLRSTGNTQVEYMIRIMKKWAKENRVSI

SEQ ID NO: 39158 - protein, 487 aa, Homo sapiens
MMLSRAKPAVGRGVQHTDKRKKKGRKIPKLEELLSKRDFTGAITLLEFKRHVGEEEEDTNLWIGYCAFHLGDYKRALEEYENATKEENCNSEVWVNLACTYFFLGMYKQAEAAGFKASKSRLQNRLLFHLAHKFNDEKKLMSFHQNLQDVTEDQLSLASIHYMRSHYQEAIDIYKRILLDNREYLALNVYVALCYYKLDYYDVSQEVLAVYLQQIPDSTIALNLKACNHFRLYNGRAAEAELKSLMDNASSSFEFAKELIRHNLVVFRGGEGALQVLPPLVDVIPEARLNLVIYYLRQDDVQEAYNLIKDLEPTTPQEYILKGVVNAALGQEMGSRDHMKIAQQFFQLVGGSASECDTIPGRQCMASCFFLLKQFDDVLIYLNSFKSYFYNDDIFNFNYAQAKAATGNTSEGEEAFLLIQSEKMKNDYIYLSWLARCYIMNKKPRLAWELYLKMETSGESFSLLQLIANDCYKRDPSRSAPFTEKHR

SEQ ID NO: 39159 - protein, 523 aa, Homo sapiens
MMLSRAKPAVGRGVQHTDKRKKKGRKIPKLEELLSKRDFTGAITLLEEYENATKEENCNSEVWVNLACTYFFLGMYKQAEAAGFKASKSRLQNRLLFHLAHKFNDEKKLMSFHQNLQDVTEDQLSLASIHYMRSHYQEAIDIYKRILLDNREYLALNVYVALCYYKLDYYDVSQEVLAVYLQQIPDSTIALNLKACNHFRLYNGRAAEAELKSLMDNASSSFEFAKELIRHNLVVFRGGEGALQVLPPLVDVIPEARLNLVIYYLRQDDVQEAYNLIKDLEPTTPQEYILKGVVNAALGQEMGSRDHMKIAQQFFQLVGGSASECDTIPGRQCMASCFFLLKQFDDVLIYLNSFKSYFYNDDIFNFNYAQAKAATGNTSEGEEAFLLIQSEKMKNDYIYLSWLARCYIMNKKPRLAWELYLKMETSGESFSLLQLIANDCYKMGQFYYSAKAFDVLERLDPNPEYWEGKRGACVGIFQMIIAGREPKETLREVLHLLRSTGNTQVEYMIRIMKKWAKENRVSI

SEQ ID NO: 39160 - protein, 451 aa, Homo sapiens
MKTKLNIYNMQFLLFVFLVWDPARLVLANIQEDEAKNNITIFTRILDRLLDGYDNRLRPGLGDSITEVFTNIYVTSFGPVSDTDMEYTIDVFFRQKWKDERLKFKGPMNILRLNNLMASKIWTPDTFFHNGKKSVAHNMTMPNKLLRIQDDGTLLYTMRLTVQAECPMHLEDFPMDAHSCPLKFGSYAYTTSEVTYIWTYNASDSVQVAPDGSRLNQYDLLGQSIGKETIKSSTGEYTVMTAHFHLKRKIGYFVIQTYLPCIMTVILSQVSFWLNRESVPARTVFGVTTVLTMTTLSISARNSLPKVAYATAMDWFIAVCYAFVFSALIEFATVNYFTKRGWAWDGKSVVNDKKKEKASVMIQNNAYAVAVANYAPNLSKDPVLSTISKSATTPEPNKKPENKPAEAKKTFNSVSKIDRMSRIVFPVLFGTFNLVYWATYLNREPVLGVSP

SEQ ID NO: 39161 - protein, 456 aa, Homo sapiens
MRLKITLPSLREFLTDFWMVTIIGLDQDWEEYTIDVFFRQKWKDERLKFKGPMNILRLNNLMASKIWTPDTFFHNGKKSVAHNMTMPNKLLRIQDDGTLLYTMRLTVQAECPMHLEDFPMDAHSCPLKFGSYAYTTSEVTYIWTYNASDSVQVAPDGSRLNQYDLLGQSIGKETIKSSTGEYTVMTAHFHLKRKIGYFVIQTYLPCIMTVILSQVSFWLNRESVPARTVFGVTTVLTMTTLSISARNSLPKVAYATAMDWFIAVCYAFVFSALIEFATVNYFTKRGWAWDGKSVVNDKSPSIKAEGITLTYNSVKAILQGAKLIWSKYIAFSWPSLFQEKTLEYLEKWMDCLTFKQSSKKEKASVMIQNNAYAVAVANYAPNLSKDPVLSTISKSATTPEPNKKPENKPAEAKKTFNSVSKIDRMSRIVFPVLFGTFNLVYWATYLNREPVLGVSP

SEQ ID NO: 39162 - protein, 708 aa, Homo sapiens
MNPTETKAIPVSQQMEGPHLPNKKKHKKQAVKTEPEKKSQSTKLSVVHEKKSQEGKPKEHTEPKSLPKQASDTGSNDAHNKKAVSRSAEQQPSEKSTEPKTKPQDMISAGGESVAGITAISGKPGDKKKEKKSLTPAVPVESKPDKPSGKSGMDAALDDLIDTLGGPEETEEENTTYTGPEVSDPMSSTYIEELGKREVTIPPKYRELLAKKEGITGPPADSSKPIGPDDAIDALSSDFTCGSPTAAGKKTEKEESTEVLKAQSAGTVRSAAPPQEKKRKVEKDTMSDQALEALSASLGTRQAEPELDLRSIKEVDEAKAKEEKLEKCGEDDETIPSEYRLKPATDKDGKPLLPEPEEKPKPRSESELIDELSEDFDRSECKEKPSKPTEKTEESKAAAPAPVSEAVCRTSMCSIQSAPPEPATLKGTVPDDAVEALADSLGKKEADPEDGKPVMDKVKEKAKEEDREKLGEKEETIPPDYRLEEVKDKDGKPLLPKESKEQLPPMSEDFLLDALSEDFSGPQNASSLKFEDAKLAAAISEVVSQTPASTTQAGAPPRDTSQSDKDLDDALDKLSDSLGQRQPDPDENKPMEDKVKEKAKAEHRDKLGERDDTIPPEYRHLLDDNGQDKPVKPPTKKSEDSKKPADDQDPIDALSGDLDSCPSTTETSQNTAKDKCKKAASSSKAPKNGGKAKDSAKTTEETSKPKDD

SEQ ID NO: 39163 - protein, 695 aa, Homo sapiens
MNPTETKAIPVSQQMEGPHLPNKKKHKKQAVKTEPEKKSQSTKLSVVHEKKSQEGKPKEHTEPKSLPKQASDTGSNDAHNKKAVSRSAEQQPSEKSTEPKTKPQDMISAGGESVAGITAISGKPGDKKKEKKSLTPAVPVESKPDKPSGKSGMDAALDDLIDTLGGPEETEEENTTYTGPEVSDPMSSTYIEELGKREVTIPPKYRELLAKPIGPDDAIDALSSDFTCGSPTAAGKKTEKEESTEVLKAQSAGTVRSAAPPQEKKRKVEKDTMSDQALEALSASLGTRQAEPELDLRSIKEVDEAKAKEEKLEKCGEDDETIPSEYRLKPATDKDGKPLLPEPEEKPKPRSESELIDELSEDFDRSECKEKPSKPTEKTEESKAAAPAPVSEAVCRTSMCSIQSAPPEPATLKGTVPDDAVEALADSLGKKEADPEDGKPVMDKVKEKAKEEDREKLGEKEETIPPDYRLEEVKDKDGKPLLPKESKEQLPPMSEDFLLDALSEDFSGPQNASSLKFEDAKLAAAISEVVSQTPASTTQAGAPPRDTSQSDKDLDDALDKLSDSLGQRQPDPDENKPMEDKVKEKAKAEHRDKLGERDDTIPPEYRHLLDDNGQDKPVKPPTKKSEDSKKPADDQDPIDALSGDLDSCPSTTETSQNTAKDKCKKAASSSKAPKNGGKAKDSAKTTEETSKPKDD

SEQ ID NO: 39164 - protein, 590 aa, Homo sapiens
MISAGGESVAGITAISGKPGDKKKEKKSLTPAVPVESKPDKPSGKSGMDAALDDLIDTLGGPEETEEENTTYTGPEVSDPMSSTYIEELGKREVTIPPKYRELLAKPIGPDDAIDALSSDFTCGSPTAAGKKTEKEESTEVLKAQSAGTVRSAAPPQEKKRKVEKDTMSDQALEALSASLGTRQAEPELDLRSIKEVDEAKAKEEKLEKCGEDDETIPSEYRLKPATDKDGKPLLPEPEEKPKPRSESELIDELSEDFDRSECKEKPSKPTEKTEESKAAAPAPVSEAVCRTSMCSIQSAPPEPATLKGTVPDDAVEALADSLGKKEADPEDGKPVMDKVKEKAKEEDREKLGEKEETIPPDYRLEEVKDKDGKPLLPKESKEQLPPMSEDFLLDALSEDFSGPQNASSLKFEDAKLAAAISEVVSQTPASTTQAGAPPRDTSQSDKDLDDALDKLSDSLGQRQPDPDENKPMEDKVKEKAKAEHRDKLGERDDTIPPEYRHLLDDNGQDKPVKPPTKKSEDSKKPADDQDPIDALSGDLDSCPSTTETSQNTAKDKCKKAASSSKAPKNGGKAKDSAKTTEETSKPKDD

SEQ ID NO: 39165 - protein, 667 aa, Homo sapiens
MNPTETKAVKTEPEKKSQSTKPKSLPKQASDTGSNDAHNKKAVSRSAEQQPSEKSTEPKTKPQDMISAGGESVAGITAISGKPGDKKKEKKSLTPAVPVESKPDKPSGKSGMDAALDDLIDTLGGPEETEEENTTYTGPEVSDPMSSTYIEELGKREVTIPPKYRELLAKKEGITGPPADSSKPIGPDDAIDALSSDFTCGSPTAAGKKTEKEESTEVLKAQSAGTVRSAAPPQEKKRKVEKDTMSDQALEALSASLGTRQAEPELDLRSIKEVDEAKAKEEKLEKCGEDDETIPSEYRLKPATDKDGKPLLPEPEEKPKPRSESELIDELSEDFDRSECKEKPSKPTEKTEESKAAAPAPVSEAVCRTSMCSIQSAPPEPATLKGTVPDDAVEALADSLGKKEADPEDGKPVMDKVKEKAKEEDREKLGEKEETIPPDYRLEEVKDKDGKPLLPKESKEQLPPMSEDFLLDALSEDFSGPQNASSLKFEDAKLAAAISEVVSQTPASTTQAGAPPRDTSQSDKDLDDALDKLSDSLGQRQPDPDENKPMEDKVKEKAKAEHRDKLGERDDTIPPEYRHLLDDNGQDKPVKPPTKKSEDSKKPADDQDPIDALSGDLDSCPSTTETSQNTAKDKCKKAASSSKAPKNGGKAKDSAKTTEETSKPKDD

SEQ ID NO: 39166 - protein, 756 aa, Homo sapiens
MSQPGQKPAASPRPRRAAAARRTHEHVSEKTSESPSKPGEKKGSDEKKAASLGSSQSSRTYAGGTASATKVSASSGATSKSSSMNPTETKAVKTEPEKKSQSTKLSVVHEKKSQEGKPKEHTEPKSLPKQASDTGSNDAHNKKAVSRSAEQQPSEKSTEPKTKPQDMISAGGESVAGITAISGKPGDKKKEKKSLTPAVPVESKPDKPSGKSGMDAALDDLIDTLGGPEETEEENTTYTGPEVSDPMSSTYIEELGKREVTIPPKYRELLAKPIGPDDAIDALSSDFTCGSPTAAGKKTEKEESTEVLKAQSAGTVRSAAPPQEKKRKVEKDTMSDQALEALSASLGTRQAEPELDLRSIKEVDEAKAKEEKLEKCGEDDETIPSEYRLKPATDKDGKPLLPEPEEKPKPRSESELIDELSEDFDRSECKEKPSKPTEKTEESKAAAPAPVSEAVCRTSMCSIQSAPPEPATLKGTVPDDAVEALADSLGKKEADPEDGKPVMDKVKEKAKEEDREKLGEKEETIPPDYRLEEVKDKDGKPLLPKESKEQLPPMSEDFLLDALSEDFSGPQNASSLKFEDAKLAAAISEVVSQTPASTTQAGAPPRDTSQSDKDLDDALDKLSDSLGQRQPDPDENKPMEDKVKEKAKAEHRDKLGERDDTIPPEYRHLLDDNGQDKPVKPPTKKSEDSKKPADDQDPIDALSGDLDSCPSTTETSQNTAKDKCKKAASSSKAPKNGGKAKDSAKTTEETSKPKDD

SEQ ID NO: 39167 - protein, 791 aa, Homo sapiens
MSQPGQKPAASPRPRRAAAARRTHEHVSEKTSESPSKPGEKKGSDEKKAASLGSSQSSRTYAGGTASATKVSASSGATSKSSSMNPTETKAIPVSQQMEGPHLPNKKKHKKQAVKTEPEKKSQSTKLSVVHEKKSQEGKPKEHTEPKSLPKQASDTGSNDAHNKKAVSRSAEQQPSEKSTEPKTKPQDMISAGGESVAGITAISGKPGDKKKEKKSLTPAVPVESKPDKPSGKSGMDAALDDLIDTLGGPEETEEENTTYTGPEVSDPMSSTYIEELGKREVTIPPKYRELLAKKEGITGPPADSSKPIGPDDAIDALSSDFTCGSPTAAGKKTEKEESTEVLKAQSAGTVRSAAPPQEKKRKVEKDTMSDQALEALSASLGTRQAEPELDLRSIKEVDEAKAKEEKLEKCGEDDETIPSEYRLKPATDKDGKPLLPEPEEKPKPRSESELIDELSEDFDRSECKEKPSKPTEKTEESKAAAPAPVSEAVCRTSMCSIQSAPPEPATLKGTVPDDAVEALADSLGKKEADPEDGKPVMDKVKEKAKEEDREKLGEKEETIPPDYRLEEVKDKDGKPLLPKESKEQLPPMSEDFLLDALSEDFSGPQNASSLKFEDAKLAAAISEVVSQTPASTTQAGAPPRDTSQSDKDLDDALDKLSDSLGQRQPDPDENKPMEDKVKEKAKAEHRDKLGERDDTIPPEYRHLLDDNGQDKPVKPPTKKSEDSKKPADDQDPIDALSGDLDSCPSTTETSQNTAKDKCKKAASSSKAPKNGGKAKDSAKTTEETSKPKDD

SEQ ID NO: 39168 - protein, 772 aa, Homo sapiens
MSQPGQKPAASPRPRRAAAARRTHEHVSEKTSESPSKPGEKKGSDEKKAASLGSSQSSRTYAGGTASATKVSASSGATSKSSSMNPTETKAIPVSQQMEGPHLPNKKKHKKQAVKTEPEKKSQSTKPKSLPKQASDTGSNDAHNKKAVSRSAEQQPSEKSTEPKTKPQDMISAGGESVAGITAISGKPGDKKKEKKSLTPAVPVESKPDKPSGKSGMDAALDDLIDTLGGPEETEEENTTYTGPEVSDPMSSTYIEELGKREVTIPPKYRELLAKKEGITGPPADSSKPIGPDDAIDALSSDFTCGSPTAAGKKTEKEESTEVLKAQSAGTVRSAAPPQEKKRKVEKDTMSDQALEALSASLGTRQAEPELDLRSIKEVDEAKAKEEKLEKCGEDDETIPSEYRLKPATDKDGKPLLPEPEEKPKPRSESELIDELSEDFDRSECKEKPSKPTEKTEESKAAAPAPVSEAVCRTSMCSIQSAPPEPATLKGTVPDDAVEALADSLGKKEADPEDGKPVMDKVKEKAKEEDREKLGEKEETIPPDYRLEEVKDKDGKPLLPKESKEQLPPMSEDFLLDALSEDFSGPQNASSLKFEDAKLAAAISEVVSQTPASTTQAGAPPRDTSQSDKDLDDALDKLSDSLGQRQPDPDENKPMEDKVKEKAKAEHRDKLGERDDTIPPEYRHLLDDNGQDKPVKPPTKKSEDSKKPADDQDPIDALSGDLDSCPSTTETSQNTAKDKCKKAASSSKAPKNGGKAKDSAKTTEETSKPKDD

SEQ ID NO: 39169 - protein, 686 aa, Homo sapiens
MNPTETKAVKTEPEKKSQSTKLSVVHEKKSQEGKPKEHTEPKSLPKQASDTGSNDAHNKKAVSRSAEQQPSEKSTEPKTKPQDMISAGGESVAGITAISGKPGDKKKEKKSLTPAVPVESKPDKPSGKSGMDAALDDLIDTLGGPEETEEENTTYTGPEVSDPMSSTYIEELGKREVTIPPKYRELLAKKEGITGPPADSSKPIGPDDAIDALSSDFTCGSPTAAGKKTEKEESTEVLKAQSAGTVRSAAPPQEKKRKVEKDTMSDQALEALSASLGTRQAEPELDLRSIKEVDEAKAKEEKLEKCGEDDETIPSEYRLKPATDKDGKPLLPEPEEKPKPRSESELIDELSEDFDRSECKEKPSKPTEKTEESKAAAPAPVSEAVCRTSMCSIQSAPPEPATLKGTVPDDAVEALADSLGKKEADPEDGKPVMDKVKEKAKEEDREKLGEKEETIPPDYRLEEVKDKDGKPLLPKESKEQLPPMSEDFLLDALSEDFSGPQNASSLKFEDAKLAAAISEVVSQTPASTTQAGAPPRDTSQSDKDLDDALDKLSDSLGQRQPDPDENKPMEDKVKEKAKAEHRDKLGERDDTIPPEYRHLLDDNGQDKPVKPPTKKSEDSKKPADDQDPIDALSGDLDSCPSTTETSQNTAKDKCKKAASSSKAPKNGGKAKDSAKTTEETSKPKDD

SEQ ID NO: 39170 - protein, 750 aa, Homo sapiens
MSQPGQKPAASPRPRRAAAARRTHEHVSEKTSESPSKPGEKKGSDEKKAASLGSSQSSRTYAGGTASATKVSASSGATSKSSSMNPTETKAVKTEPEKKSQSTKPKSLPKQASDTGSNDAHNKKAVSRSAEQQPSEKSTEPKTKPQDMISAGGESVAGITAISGKPGDKKKEKKSLTPAVPVESKPDKPSGKSGMDAALDDLIDTLGGPEETEEENTTYTGPEVSDPMSSTYIEELGKREVTIPPKYRELLAKKEGITGPPADSSKPIGPDDAIDALSSDFTCGSPTAAGKKTEKEESTEVLKAQSAGTVRSAAPPQEKKRKVEKDTMSDQALEALSASLGTRQAEPELDLRSIKEVDEAKAKEEKLEKCGEDDETIPSEYRLKPATDKDGKPLLPEPEEKPKPRSESELIDELSEDFDRSECKEKPSKPTEKTEESKAAAPAPVSEAVCRTSMCSIQSAPPEPATLKGTVPDDAVEALADSLGKKEADPEDGKPVMDKVKEKAKEEDREKLGEKEETIPPDYRLEEVKDKDGKPLLPKESKEQLPPMSEDFLLDALSEDFSGPQNASSLKFEDAKLAAAISEVVSQTPASTTQAGAPPRDTSQSDKDLDDALDKLSDSLGQRQPDPDENKPMEDKVKEKAKAEHRDKLGERDDTIPPEYRHLLDDNGQDKPVKPPTKKSEDSKKPADDQDPIDALSGDLDSCPSTTETSQNTAKDKCKKAASSSKAPKNGGKAKDSAKTTEETSKPKDD

SEQ ID NO: 39171 - protein, 769 aa, Homo sapiens
MSQPGQKPAASPRPRRAAAARRTHEHVSEKTSESPSKPGEKKGSDEKKAASLGSSQSSRTYAGGTASATKVSASSGATSKSSSMNPTETKAVKTEPEKKSQSTKLSVVHEKKSQEGKPKEHTEPKSLPKQASDTGSNDAHNKKAVSRSAEQQPSEKSTEPKTKPQDMISAGGESVAGITAISGKPGDKKKEKKSLTPAVPVESKPDKPSGKSGMDAALDDLIDTLGGPEETEEENTTYTGPEVSDPMSSTYIEELGKREVTIPPKYRELLAKKEGITGPPADSSKPIGPDDAIDALSSDFTCGSPTAAGKKTEKEESTEVLKAQSAGTVRSAAPPQEKKRKVEKDTMSDQALEALSASLGTRQAEPELDLRSIKEVDEAKAKEEKLEKCGEDDETIPSEYRLKPATDKDGKPLLPEPEEKPKPRSESELIDELSEDFDRSECKEKPSKPTEKTEESKAAAPAPVSEAVCRTSMCSIQSAPPEPATLKGTVPDDAVEALADSLGKKEADPEDGKPVMDKVKEKAKEEDREKLGEKEETIPPDYRLEEVKDKDGKPLLPKESKEQLPPMSEDFLLDALSEDFSGPQNASSLKFEDAKLAAAISEVVSQTPASTTQAGAPPRDTSQSDKDLDDALDKLSDSLGQRQPDPDENKPMEDKVKEKAKAEHRDKLGERDDTIPPEYRHLLDDNGQDKPVKPPTKKSEDSKKPADDQDPIDALSGDLDSCPSTTETSQNTAKDKCKKAASSSKAPKNGGKAKDSAKTTEETSKPKDD

SEQ ID NO: 39172 - protein, 277 aa, Homo sapiens
MAPLRFSANLSWLFPELSGLPARVRAAGSSGFEAVEVAWPYAETPEALARAAREAGLRLVLINTPPGDQEKGEMGLGAVPGRQAAFREGLEQAVRYAKALGCPRIHLMAGRVPQGADRIAVKAEMEAVFLENLRHAAGVLAQEDLVGLLEPINTRITDPQYFLDTPQQAAAILQKVGRPNLQLQMDIFHWQIMDGNLTGNIREFLPIVGHVQVAQVPGRGEPSSPGELNFPYLFQLLEDEGYKGFVGCEYQPRGDTVEGLSWLRSYWDRRGHPEAGQ

SEQ ID NO: 39173 - protein, 174 aa, Homo sapiens
MGLGAVPGRQAAFREGLEQAVRYAKALGCPRIHLMAGRVPQGADRIAVKAEMEAVFLENLRHAAGVLAQEDLVGLLEPINTRITDPQYFLDTPQQAAAILQKVGRPNLQLQMDIFHWQIMDGNLTGNIREFLPIVGHVQVAQVPGRGEPSSPGELNFPYLFQLLEDEGYKGFVG

SEQ ID NO: 39174 - protein, 247 aa, Homo sapiens
MAPLRFSANLSWLFPELSGLPARVRAAGSSGFEAVEVAWPYAETPEALARAAREAGLRLVLINTPPGDQEKGEMGLGAVPGRQAAFREGLEQAVRYAKALGCPRIHLMAGRVPQGADRIAVKAEMEAVFLENLRHAAGVLAQEDLVGLLEPINTRITDPQYFLDTPQQAAAILQKVGRPNLQLQMDIFHWQIMDGNLTGNIREFLPIVGHVQVAQVPGRGEPSSPGELNFPYLFQLLEDEGYKGFVG

SEQ ID NO: 39175 - protein, 204 aa, Homo sapiens
MGLGAVPGRQAAFREGLEQAVRYAKALGCPRIHLMAGRVPQGADRIAVKAEMEAVFLENLRHAAGVLAQEDLVGLLEPINTRITDPQYFLDTPQQAAAILQKVGRPNLQLQMDIFHWQIMDGNLTGNIREFLPIVGHVQVAQVPGRGEPSSPGELNFPYLFQLLEDEGYKGFVGCEYQPRGDTVEGLSWLRSYWDRRGHPEAGQ

SEQ ID NO: 39176 - protein, 429 aa, Homo sapiens
MTAALAVVTTSGLEDGVPRSRGEGTGEVVLERGPGAAYHMFVVMEDLVEKLKLLRYEEEFLRKSNLKAPSRHYFALPTNPGEQFYMFCTLAAWLINKAGRPFEQPQEYDDPNATISNILSELRSFGRTADFPPSKLKSGYGEHVCYVLDCFAEEALKYIGFTWKRPIYPVEELEEESVAEDDAELTLNKVDEEFVEEETDNEENFIDLNVLKAQTYHLDMNETAKQEDILESTTDAAEWSLEVERVLPQLKVTIRTDNKDWRIHVDQMHQHRSGIESALKETKGFLDKLHNEITRTLEKISSREKYINNQLENLVQEYRAAQAQLSEAKERYQQGNGGVTERTRLLSEVMEELEKVKQEMEEKGSSMTDGAPLVKIKQSLTKLKQETVEMDIRIGIVEHTLLQSKLKEKSNMTRNMHATVIPEPATGFY

SEQ ID NO: 39177 - protein, 1599 aa, Homo sapiens
MNKAPQSTGPPPAPSPGLPQPAFPPGQTAPVVFSTPQATQMNTPSQPRQHFYPSRAQPPSSAASRVQSAAPARPGPAAHVYPAGSQVMMIPSQISYPASQGAYYIPGQGRSTYVVPTQQYPVQPGAPGFYPGASPTEFGTYAGAYYPAQGVQQFPTGVAPTPVLMNQPPQIAPKRERKTIRIRDPNQGGKDITEEIMSGARTASTPTPPQTGGGLEPQANGETPQVAVIVRPDDRSQGAIIADRPGLPGPEHSPSESQPSSPSPTPSPSPVLEPGSEPNLAVLSIPGDTMTTIQMSVEESTPISRETGEPYRLSPEPTPLAEPILEVEVTLSKPVPESEFSSSPLQAPTPLASHTVEIHEPNGMVPSEDLEPEVESSPELAPPPACPSESPVPIAPTAQPEELLNGAPSPPAVDLSPVSEPEEQAKEVTASMAPPTIPSATPATAPSATSPAQEEEMEEEEEEEEGEAGEAGEAESEKGGEELLPPESTPIPANLSQNLEAAAATQVAVSVPKRRRKIKELNKKEAVGDLLDAFKEANPAVPEVENQPPAGSNPGPESEGSGVPPRPEEADETWDSKEDKIHNAENIQPGEQKYEYKSDQWKPLNLEEKKRYDREFLLGFQFIFASMQKPEGLPHISDVVLDKANKTPLRPLDPTRLQGINCGPDFTPSFANLGRTTLSTRGPPRGGPGGELPRGPAGLGPRRSQQGPRKEPRKIIATVLMTEDIKLNKAEKAWKPSSKRTAADKDRGEEDADGSKTQDLFRRVRSILNKLTPQMFQQLMKQVTQLAIDTEERLKGVIDLIFEKAISEPNFSVAYANMCRCLMALKVPTTEKPTVTVNFRKLLLNRCQKEFEKDKDDDEVFEKKQKEMDEAATAEERGRLKEELEEARDIARRRSLGNIKFIGELFKLKMLTEAIMHDCVVKLLKNHDEESLECLCRLLTTIGKDLDFEKAKPRMDQYFNQMEKIIKEKKTSSRIRFMLQDVLDLRGSNWVPRRGDQGPKTIDQIHKEAEMEEHREHIKVQQLMAKGSDKRRGGPPGPPISRGLPLVDDGGWNTVPISKGSRPIDTSRLTKITKPGSIDSNNQLFAPGGRLSWGKGSSGGSGAKPSDAASEAARPATSTLNRFSALQQAVPTESTDNRRVVQRSSLSRERGEKAGDRGDRLERSERGGDRGDRLDRARTPATKRSFSKEVEERSRERPSQPEGLRKAASLTEDRDRGRDAVKREAALPPVSPLKAALSEEELEKKSKAIIEEYLHLNDMKEAVQCVQELASPSLLFIFVRHGVESTLERSAIAREHMGQLLHQLLCAGHLSTAQYYQGLYEILELAEDMEIDIPHVWLYLAELVTPILQEGGVPMGELFREITKPLRPLGKAASLLLEILGLLCKSMGPKKVGTLWREAGLSWKEFLPEGQDIGAFVAEQKVEYTLGEESEAPGQRALPSEELNRQLEKLLKEGSSNQRVFDWIEANLSEQQIVSNTLVRALMTAVCYSAIIFETPLRVDVAVLKARAKLLQKYLCDEQKELQALYALQALVVTLEQPPNLLRMFFDALYDEDVVKEDAFYSWESSKDPAEQQGKGVALKSVTAFFKWLREAEEESDHN

SEQ ID NO: 39178 - protein, 1559 aa, Homo sapiens
MNTPSQPRQHFYPSRAQPPSSAASRVQSAAPARPGPAAHVYPAGSQVMMIPSQISYPASQGAYYIPGQGRSTYVVPTQQYPVQPGAPGFYPGASPTEFGTYAGAYYPAQGVQQFPTGVAPTPVLMNQPPQIAPKRERKTIRIRDPNQGGKDITEEIMSGARTASTPTPPQTGGGLEPQANGETPQVAVIVRPDDRSQGAIIADRPGLPGPEHSPSESQPSSPSPTPSPSPVLEPGSEPNLAVLSIPGDTMTTIQMSVEESTPISRETGEPYRLSPEPTPLAEPILEVEVTLSKPVPESEFSSSPLQAPTPLASHTVEIHEPNGMVPSEDLEPEVESSPELAPPPACPSESPVPIAPTAQPEELLNGAPSPPAVDLSPVSEPEEQAKEVTASMAPPTIPSATPATAPSATSPAQEEEMEEEEEEEEGEAGEAGEAESEKGGEELLPPESTPIPANLSQNLEAAAATQVAVSVPKRRRKIKELNKKEAVGDLLDAFKEANPAVPEVENQPPAGSNPGPESEGSGVPPRPEEADETWDSKEDKIHNAENIQPGEQKYEYKSDQWKPLNLEEKKRYDREFLLGFQFIFASMQKPEGLPHISDVVLDKANKTPLRPLDPTRLQGINCGPDFTPSFANLGRTTLSTRGPPRGGPGGELPRGPAGLGPRRSQQGPRKEPRKIIATVLMTEDIKLNKAEKAWKPSSKRTAADKDRGEEDADGSKTQDLFRRVRSILNKLTPQMFQQLMKQVTQLAIDTEERLKGVIDLIFEKAISEPNFSVAYANMCRCLMALKVPTTEKPTVTVNFRKLLLNRCQKEFEKDKDDDEVFEKKQKEMDEAATAEERGRLKEELEEARDIARRRSLGNIKFIGELFKLKMLTEAIMHDCVVKLLKNHDEESLECLCRLLTTIGKDLDFEKAKPRMDQYFNQMEKIIKEKKTSSRIRFMLQDVLDLRGSNWVPRRGDQGPKTIDQIHKEAEMEEHREHIKVQQLMAKGSDKRRGGPPGPPISRGLPLVDDGGWNTVPISKGSRPIDTSRLTKITKPGSIDSNNQLFAPGGRLSWGKGSSGGSGAKPSDAASEAARPATSTLNRFSALQQAVPTESTDNRRVVQRSSLSRERGEKAGDRGDRLERSERGGDRGDRLDRARTPATKRSFSKEVEERSRERPSQPEGLRKAASLTEDRDRGRDAVKREAALPPVSPLKAALSEEELEKKSKAIIEEYLHLNDMKEAVQCVQELASPSLLFIFVRHGVESTLERSAIAREHMGQLLHQLLCAGHLSTAQYYQGLYEILELAEDMEIDIPHVWLYLAELVTPILQEGGVPMGELFREITKPLRPLGKAASLLLEILGLLCKSMGPKKVGTLWREAGLSWKEFLPEGQDIGAFVAEQKVEYTLGEESEAPGQRALPSEELNRQLEKLLKEGSSNQRVFDWIEANLSEQQIVSNTLVRALMTAVCYSAIIFETPLRVDVAVLKARAKLLQKYLCDEQKELQALYALQALVVTLEQPPNLLRMFFDALYDEDVVKEDAFYSWESSKDPAEQQGKGVALKSVTAFFKWLREAEEESDHN

SEQ ID NO: 39179 - protein, 1512 aa, Homo sapiens
MMIPSQISYPASQGAYYIPGQGRSTYVVPTQQYPVQPGAPGFYPGASPTEFGTYAGAYYPAQGVQQFPTGVAPTPVLMNQPPQIAPKRERKTIRIRDPNQGGKDITEEIMSGARTASTPTPPQTGGGLEPQANGETPQVAVIVRPDDRSQGAIIADRPGLPGPEHSPSESQPSSPSPTPSPSPVLEPGSEPNLAVLSIPGDTMTTIQMSVEESTPISRETGEPYRLSPEPTPLAEPILEVEVTLSKPVPESEFSSSPLQAPTPLASHTVEIHEPNGMVPSEDLEPEVESSPELAPPPACPSESPVPIAPTAQPEELLNGAPSPPAVDLSPVSEPEEQAKEVTASMAPPTIPSATPATAPSATSPAQEEEMEEEEEEEEGEAGEAGEAESEKGGEELLPPESTPIPANLSQNLEAAAATQVAVSVPKRRRKIKELNKKEAVGDLLDAFKEANPAVPEVENQPPAGSNPGPESEGSGVPPRPEEADETWDSKEDKIHNAENIQPGEQKYEYKSDQWKPLNLEEKKRYDREFLLGFQFIFASMQKPEGLPHISDVVLDKANKTPLRPLDPTRLQGINCGPDFTPSFANLGRTTLSTRGPPRGGPGGELPRGPAGLGPRRSQQGPRKEPRKIIATVLMTEDIKLNKAEKAWKPSSKRTAADKDRGEEDADGSKTQDLFRRVRSILNKLTPQMFQQLMKQVTQLAIDTEERLKGVIDLIFEKAISEPNFSVAYANMCRCLMALKVPTTEKPTVTVNFRKLLLNRCQKEFEKDKDDDEVFEKKQKEMDEAATAEERGRLKEELEEARDIARRRSLGNIKFIGELFKLKMLTEAIMHDCVVKLLKNHDEESLECLCRLLTTIGKDLDFEKAKPRMDQYFNQMEKIIKEKKTSSRIRFMLQDVLDLRGSNWVPRRGDQGPKTIDQIHKEAEMEEHREHIKVQQLMAKGSDKRRGGPPGPPISRGLPLVDDGGWNTVPISKGSRPIDTSRLTKITKPGSIDSNNQLFAPGGRLSWGKGSSGGSGAKPSDAASEAARPATSTLNRFSALQQAVPTESTDNRRVVQRSSLSRERGEKAGDRGDRLERSERGGDRGDRLDRARTPATKRSFSKEVEERSRERPSQPEGLRKAASLTEDRDRGRDAVKREAALPPVSPLKAALSEEELEKKSKAIIEEYLHLNDMKEAVQCVQELASPSLLFIFVRHGVESTLERSAIAREHMGQLLHQLLCAGHLSTAQYYQGLYEILELAEDMEIDIPHVWLYLAELVTPILQEGGVPMGELFREITKPLRPLGKAASLLLEILGLLCKSMGPKKVGTLWREAGLSWKEFLPEGQDIGAFVAEQKVEYTLGEESEAPGQRALPSEELNRQLEKLLKEGSSNQRVFDWIEANLSEQQIVSNTLVRALMTAVCYSAIIFETPLRVDVAVLKARAKLLQKYLCDEQKELQALYALQALVVTLEQPPNLLRMFFDALYDEDVVKEDAFYSWESSKDPAEQQGKGVALKSVTAFFKWLREAEEESDHN

SEQ ID NO: 39180 - protein, 1435 aa, Homo sapiens
MNQPPQIAPKRERKTIRIRDPNQGGKDITEEIMSGARTASTPTPPQTGGGLEPQANGETPQVAVIVRPDDRSQGAIIADRPGLPGPEHSPSESQPSSPSPTPSPSPVLEPGSEPNLAVLSIPGDTMTTIQMSVEESTPISRETGEPYRLSPEPTPLAEPILEVEVTLSKPVPESEFSSSPLQAPTPLASHTVEIHEPNGMVPSEDLEPEVESSPELAPPPACPSESPVPIAPTAQPEELLNGAPSPPAVDLSPVSEPEEQAKEVTASMAPPTIPSATPATAPSATSPAQEEEMEEEEEEEEGEAGEAGEAESEKGGEELLPPESTPIPANLSQNLEAAAATQVAVSVPKRRRKIKELNKKEAVGDLLDAFKEANPAVPEVENQPPAGSNPGPESEGSGVPPRPEEADETWDSKEDKIHNAENIQPGEQKYEYKSDQWKPLNLEEKKRYDREFLLGFQFIFASMQKPEGLPHISDVVLDKANKTPLRPLDPTRLQGINCGPDFTPSFANLGRTTLSTRGPPRGGPGGELPRGPAGLGPRRSQQGPRKEPRKIIATVLMTEDIKLNKAEKAWKPSSKRTAADKDRGEEDADGSKTQDLFRRVRSILNKLTPQMFQQLMKQVTQLAIDTEERLKGVIDLIFEKAISEPNFSVAYANMCRCLMALKVPTTEKPTVTVNFRKLLLNRCQKEFEKDKDDDEVFEKKQKEMDEAATAEERGRLKEELEEARDIARRRSLGNIKFIGELFKLKMLTEAIMHDCVVKLLKNHDEESLECLCRLLTTIGKDLDFEKAKPRMDQYFNQMEKIIKEKKTSSRIRFMLQDVLDLRGSNWVPRRGDQGPKTIDQIHKEAEMEEHREHIKVQQLMAKGSDKRRGGPPGPPISRGLPLVDDGGWNTVPISKGSRPIDTSRLTKITKPGSIDSNNQLFAPGGRLSWGKGSSGGSGAKPSDAASEAARPATSTLNRFSALQQAVPTESTDNRRVVQRSSLSRERGEKAGDRGDRLERSERGGDRGDRLDRARTPATKRSFSKEVEERSRERPSQPEGLRKAASLTEDRDRGRDAVKREAALPPVSPLKAALSEEELEKKSKAIIEEYLHLNDMKEAVQCVQELASPSLLFIFVRHGVESTLERSAIAREHMGQLLHQLLCAGHLSTAQYYQGLYEILELAEDMEIDIPHVWLYLAELVTPILQEGGVPMGELFREITKPLRPLGKAASLLLEILGLLCKSMGPKKVGTLWREAGLSWKEFLPEGQDIGAFVAEQKVEYTLGEESEAPGQRALPSEELNRQLEKLLKEGSSNQRVFDWIEANLSEQQIVSNTLVRALMTAVCYSAIIFETPLRVDVAVLKARAKLLQKYLCDEQKELQALYALQALVVTLEQPPNLLRMFFDALYDEDVVKEDAFYSWESSKDPAEQQGKGVALKSVTAFFKWLREAEEESDHN

SEQ ID NO: 39181 - protein, 1403 aa, Homo sapiens
MSGARTASTPTPPQTGGGLEPQANGETPQVAVIVRPDDRSQGAIIADRPGLPGPEHSPSESQPSSPSPTPSPSPVLEPGSEPNLAVLSIPGDTMTTIQMSVEESTPISRETGEPYRLSPEPTPLAEPILEVEVTLSKPVPESEFSSSPLQAPTPLASHTVEIHEPNGMVPSEDLEPEVESSPELAPPPACPSESPVPIAPTAQPEELLNGAPSPPAVDLSPVSEPEEQAKEVTASMAPPTIPSATPATAPSATSPAQEEEMEEEEEEEEGEAGEAGEAESEKGGEELLPPESTPIPANLSQNLEAAAATQVAVSVPKRRRKIKELNKKEAVGDLLDAFKEANPAVPEVENQPPAGSNPGPESEGSGVPPRPEEADETWDSKEDKIHNAENIQPGEQKYEYKSDQWKPLNLEEKKRYDREFLLGFQFIFASMQKPEGLPHISDVVLDKANKTPLRPLDPTRLQGINCGPDFTPSFANLGRTTLSTRGPPRGGPGGELPRGPAGLGPRRSQQGPRKEPRKIIATVLMTEDIKLNKAEKAWKPSSKRTAADKDRGEEDADGSKTQDLFRRVRSILNKLTPQMFQQLMKQVTQLAIDTEERLKGVIDLIFEKAISEPNFSVAYANMCRCLMALKVPTTEKPTVTVNFRKLLLNRCQKEFEKDKDDDEVFEKKQKEMDEAATAEERGRLKEELEEARDIARRRSLGNIKFIGELFKLKMLTEAIMHDCVVKLLKNHDEESLECLCRLLTTIGKDLDFEKAKPRMDQYFNQMEKIIKEKKTSSRIRFMLQDVLDLRGSNWVPRRGDQGPKTIDQIHKEAEMEEHREHIKVQQLMAKGSDKRRGGPPGPPISRGLPLVDDGGWNTVPISKGSRPIDTSRLTKITKPGSIDSNNQLFAPGGRLSWGKGSSGGSGAKPSDAASEAARPATSTLNRFSALQQAVPTESTDNRRVVQRSSLSRERGEKAGDRGDRLERSERGGDRGDRLDRARTPATKRSFSKEVEERSRERPSQPEGLRKAASLTEDRDRGRDAVKREAALPPVSPLKAALSEEELEKKSKAIIEEYLHLNDMKEAVQCVQELASPSLLFIFVRHGVESTLERSAIAREHMGQLLHQLLCAGHLSTAQYYQGLYEILELAEDMEIDIPHVWLYLAELVTPILQEGGVPMGELFREITKPLRPLGKAASLLLEILGLLCKSMGPKKVGTLWREAGLSWKEFLPEGQDIGAFVAEQKVEYTLGEESEAPGQRALPSEELNRQLEKLLKEGSSNQRVFDWIEANLSEQQIVSNTLVRALMTAVCYSAIIFETPLRVDVAVLKARAKLLQKYLCDEQKELQALYALQALVVTLEQPPNLLRMFFDALYDEDVVKEDAFYSWESSKDPAEQQGKGVALKSVTAFFKWLREAEEESDHN

SEQ ID NO: 39182 - protein, 1404 aa, Homo sapiens
MSGARTASTPTPPQTGGGLEPQANGETPQVAVIVRPDDRSQGAIIADRPGLPGPEHSPSESQPSSPSPTPSPSPVLEPGSEPNLAVLSIPGDTMTTIQMSVEESTPISRETGEPYRLSPEPTPLAEPILEVEVTLSKPVPESEFSSSPLQAPTPLASHTVEIHEPNGMVPSEDLEPEVESSPELAPPPACPSESPVPIAPTAQPEELLNGAPSPPAVDLSPVSEPEEQAKEVTASMAPPTIPSATPATAPSATSPAQEEEMEEEEEEEEGEAGEAGEAESEKGGEELLPPESTPIPANLSQNLEAAAATQVAVSVPKRRRKIKELNKKEAVGDLLDAFKEANPAVPEVENQPPAGSNPGPESEGSGVPPRPEEADETWDSKEDKIHNAENIQPGEQKYEYKSDQWKPLNLEEKKRYDREFLLGFQFIFASMQKPEGLPHISDVVLDKANKTPLRPLDPTRLQGINCGPDFTPSFANLGRTTLSTRGPPRGGPGGELPRGPQAGLGPRRSQQGPRKEPRKIIATVLMTEDIKLNKAEKAWKPSSKRTAADKDRGEEDADGSKTQDLFRRVRSILNKLTPQMFQQLMKQVTQLAIDTEERLKGVIDLIFEKAISEPNFSVAYANMCRCLMALKVPTTEKPTVTVNFRKLLLNRCQKEFEKDKDDDEVFEKKQKEMDEAATAEERGRLKEELEEARDIARRRSLGNIKFIGELFKLKMLTEAIMHDCVVKLLKNHDEESLECLCRLLTTIGKDLDFEKAKPRMDQYFNQMEKIIKEKKTSSRIRFMLQDVLDLRGSNWVPRRGDQGPKTIDQIHKEAEMEEHREHIKVQQLMAKGSDKRRGGPPGPPISRGLPLVDDGGWNTVPISKGSRPIDTSRLTKITKPGSIDSNNQLFAPGGRLSWGKGSSGGSGAKPSDAASEAARPATSTLNRFSALQQAVPTESTDNRRVVQRSSLSRERGEKAGDRGDRLERSERGGDRGDRLDRARTPATKRSFSKEVEERSRERPSQPEGLRKAASLTEDRDRGRDAVKREAALPPVSPLKAALSEEELEKKSKAIIEEYLHLNDMKEAVQCVQELASPSLLFIFVRHGVESTLERSAIAREHMGQLLHQLLCAGHLSTAQYYQGLYEILELAEDMEIDIPHVWLYLAELVTPILQEGGVPMGELFREITKPLRPLGKAASLLLEILGLLCKSMGPKKVGTLWREAGLSWKEFLPEGQDIGAFVAEQKVEYTLGEESEAPGQRALPSEELNRQLEKLLKEGSSNQRVFDWIEANLSEQQIVSNTLVRALMTAVCYSAIIFETPLRVDVAVLKARAKLLQKYLCDEQKELQALYALQALVVTLEQPPNLLRMFFDALYDEDVVKEDAFYSWESSKDPAEQQGKGVALKSVTAFFKWLREAEEESDHN

SEQ ID NO: 39183 - protein, 1600 aa, Homo sapiens
MNKAPQSTGPPPAPSPGLPQPAFPPGQTAPVVFSTPQATQMNTPSQPRQHFYPSRAQPPSSAASRVQSAAPARPGPAAHVYPAGSQVMMIPSQISYPASQGAYYIPGQGRSTYVVPTQQYPVQPGAPGFYPGASPTEFGTYAGAYYPAQGVQQFPTGVAPTPVLMNQPPQIAPKRERKTIRIRDPNQGGKDITEEIMSGARTASTPTPPQTGGGLEPQANGETPQVAVIVRPDDRSQGAIIADRPGLPGPEHSPSESQPSSPSPTPSPSPVLEPGSEPNLAVLSIPGDTMTTIQMSVEESTPISRETGEPYRLSPEPTPLAEPILEVEVTLSKPVPESEFSSSPLQAPTPLASHTVEIHEPNGMVPSEDLEPEVESSPELAPPPACPSESPVPIAPTAQPEELLNGAPSPPAVDLSPVSEPEEQAKEVTASMAPPTIPSATPATAPSATSPAQEEEMEEEEEEEEGEAGEAGEAESEKGGEELLPPESTPIPANLSQNLEAAAATQVAVSVPKRRRKIKELNKKEAVGDLLDAFKEANPAVPEVENQPPAGSNPGPESEGSGVPPRPEEADETWDSKEDKIHNAENIQPGEQKYEYKSDQWKPLNLEEKKRYDREFLLGFQFIFASMQKPEGLPHISDVVLDKANKTPLRPLDPTRLQGINCGPDFTPSFANLGRTTLSTRGPPRGGPGGELPRGPQAGLGPRRSQQGPRKEPRKIIATVLMTEDIKLNKAEKAWKPSSKRTAADKDRGEEDADGSKTQDLFRRVRSILNKLTPQMFQQLMKQVTQLAIDTEERLKGVIDLIFEKAISEPNFSVAYANMCRCLMALKVPTTEKPTVTVNFRKLLLNRCQKEFEKDKDDDEVFEKKQKEMDEAATAEERGRLKEELEEARDIARRRSLGNIKFIGELFKLKMLTEAIMHDCVVKLLKNHDEESLECLCRLLTTIGKDLDFEKAKPRMDQYFNQMEKIIKEKKTSSRIRFMLQDVLDLRGSNWVPRRGDQGPKTIDQIHKEAEMEEHREHIKVQQLMAKGSDKRRGGPPGPPISRGLPLVDDGGWNTVPISKGSRPIDTSRLTKITKPGSIDSNNQLFAPGGRLSWGKGSSGGSGAKPSDAASEAARPATSTLNRFSALQQAVPTESTDNRRVVQRSSLSRERGEKAGDRGDRLERSERGGDRGDRLDRARTPATKRSFSKEVEERSRERPSQPEGLRKAASLTEDRDRGRDAVKREAALPPVSPLKAALSEEELEKKSKAIIEEYLHLNDMKEAVQCVQELASPSLLFIFVRHGVESTLERSAIAREHMGQLLHQLLCAGHLSTAQYYQGLYEILELAEDMEIDIPHVWLYLAELVTPILQEGGVPMGELFREITKPLRPLGKAASLLLEILGLLCKSMGPKKVGTLWREAGLSWKEFLPEGQDIGAFVAEQKVEYTLGEESEAPGQRALPSEELNRQLEKLLKEGSSNQRVFDWIEANLSEQQIVSNTLVRALMTAVCYSAIIFETPLRVDVAVLKARAKLLQKYLCDEQKELQALYALQALVVTLEQPPNLLRMFFDALYDEDVVKEDAFYSWESSKDPAEQQGKGVALKSVTAFFKWLREAEEESDHN

SEQ ID NO: 39184 - protein, 1606 aa, Homo sapiens
MNKAPQSTGPPPAPSPGLPQPAFPPGQTAPVVFSTPQATQMNTPSQPRQGGFRSLQHFYPSRAQPPSSAASRVQSAAPARPGPAAHVYPAGSQVMMIPSQISYPASQGAYYIPGQGRSTYVVPTQQYPVQPGAPGFYPGASPTEFGTYAGAYYPAQGVQQFPTGVAPTPVLMNQPPQIAPKRERKTIRIRDPNQGGKDITEEIMSGARTASTPTPPQTGGGLEPQANGETPQVAVIVRPDDRSQGAIIADRPGLPGPEHSPSESQPSSPSPTPSPSPVLEPGSEPNLAVLSIPGDTMTTIQMSVEESTPISRETGEPYRLSPEPTPLAEPILEVEVTLSKPVPESEFSSSPLQAPTPLASHTVEIHEPNGMVPSEDLEPEVESSPELAPPPACPSESPVPIAPTAQPEELLNGAPSPPAVDLSPVSEPEEQAKEVTASMAPPTIPSATPATAPSATSPAQEEEMEEEEEEEEGEAGEAGEAESEKGGEELLPPESTPIPANLSQNLEAAAATQVAVSVPKRRRKIKELNKKEAVGDLLDAFKEANPAVPEVENQPPAGSNPGPESEGSGVPPRPEEADETWDSKEDKIHNAENIQPGEQKYEYKSDQWKPLNLEEKKRYDREFLLGFQFIFASMQKPEGLPHISDVVLDKANKTPLRPLDPTRLQGINCGPDFTPSFANLGRTTLSTRGPPRGGPGGELPRGPAGLGPRRSQQGPRKEPRKIIATVLMTEDIKLNKAEKAWKPSSKRTAADKDRGEEDADGSKTQDLFRRVRSILNKLTPQMFQQLMKQVTQLAIDTEERLKGVIDLIFEKAISEPNFSVAYANMCRCLMALKVPTTEKPTVTVNFRKLLLNRCQKEFEKDKDDDEVFEKKQKEMDEAATAEERGRLKEELEEARDIARRRSLGNIKFIGELFKLKMLTEAIMHDCVVKLLKNHDEESLECLCRLLTTIGKDLDFEKAKPRMDQYFNQMEKIIKEKKTSSRIRFMLQDVLDLRGSNWVPRRGDQGPKTIDQIHKEAEMEEHREHIKVQQLMAKGSDKRRGGPPGPPISRGLPLVDDGGWNTVPISKGSRPIDTSRLTKITKPGSIDSNNQLFAPGGRLSWGKGSSGGSGAKPSDAASEAARPATSTLNRFSALQQAVPTESTDNRRVVQRSSLSRERGEKAGDRGDRLERSERGGDRGDRLDRARTPATKRSFSKEVEERSRERPSQPEGLRKAASLTEDRDRGRDAVKREAALPPVSPLKAALSEEELEKKSKAIIEEYLHLNDMKEAVQCVQELASPSLLFIFVRHGVESTLERSAIAREHMGQLLHQLLCAGHLSTAQYYQGLYEILELAEDMEIDIPHVWLYLAELVTPILQEGGVPMGELFREITKPLRPLGKAASLLLEILGLLCKSMGPKKVGTLWREAGLSWKEFLPEGQDIGAFVAEQKVEYTLGEESEAPGQRALPSEELNRQLEKLLKEGSSNQRVFDWIEANLSEQQIVSNTLVRALMTAVCYSAIIFETPLRVDVAVLKARAKLLQKYLCDEQKELQALYALQALVVTLEQPPNLLRMFFDALYDEDVVKEDAFYSWESSKDPAEQQGKGVALKSVTAFFKWLREAEEESDHN

SEQ ID NO: 39185 - protein, 600 aa, Homo sapiens
MASNHKSSAARPVSRGGVGLTGRPPSGIRPLSGNIRVATAMPPGTARPGSRGCPIGTGGVLSSQIKVAHRPVTQQGLTGMKTGTKGPQRQILDKSYYLGLLRSKISELTTEVNKLQKGIEMYNQENSVYLSYEKRAETLAVEIKELQGQLADYNMLVDKLNTNTEMEEVMNDYNMLKAQNDRETQSLDVIFTERQAKEKQIRSVEEEIEQEKQATDDIIKNMSFENQVKYLEMKTTNEKLLQELDTLQQQLDSQNMKKESLEAEIAHSQVKQEAVLLHEKLYELESHRDQMIAEDKSIGSPMEEREKLLKQIKDDNQEIASMERQLTDTKEKINQFIEEIRQLDMDLEEHQGEMNQKYKELKKREEHMDTFIETFEETKNQELKRKAQIEANIVALLEHCSRNINRIEQISSITNQELKMMQDDLNFKSTEVQKSQSTAQNLTSDIQRLQLDLQKMELLESKMTEEQHSLKSKIKQMTTDLEIYNDLPALKSSGEEKIKKLHQERMILSTHRNAFKKIMEKQNIEYEALKTQLQENETHSQLTNLERKWQHLEQNNFAMKEFIATKSQESDYQPIKKNVTKQIAEYNKTIVDALHSTSGN

SEQ ID NO: 39186 - protein, 372 aa, Homo sapiens
MASNHKSSAARPVSRGGVGLTGRPPSGIRPLSGNIRVATAMPPGTARPGSRGCPIGTGGVLSSQIKVAHRPVTQQGLTGMKTGTKGPQRQILDKSYYLGLLRSKISELTTEVNKLQKGIEMYNQENSVYLSYEKRAETLAVEIKELQGQLADYNMLVDKLNTNTEMEEVMNDYNMLKAQNDRETQSLDVIFTERQAKEKQIRSVEEEIEQEKQATDDIIKNMSFENQVKYLEMKTTNEKLLQELDTLQQQLDSQNMKKESLEAEIAHSQVKQEAVLLHEKLYELESHRDQMIAEDKSIGSPMEEREKLLKQIKDDNQEIASMERQLTDTKEKINQFIEEIRQLDMDLEEHQDPTNYGWKILEKNTGSFKKQV

SEQ ID NO: 39187 - protein, 777 aa, Homo sapiens
MRLKISLLKEPKHQELVSCVGWTTAEELYSCSDDHQIVKWNLLTSETTQIVKLPDDIYPIDFHWFPKSLGVKKQTQAESFVLTSSDGKFHLISKLGRVEKSVEAHCGAVLAGRWNYEGTALVTVGEDGQIKIWSKTGMLRSTLAQQGTPVYSVAWGPDSEKVLYTAGKQLIIKPLQPNAKVLQWKAHDGIILKVDWNSVNDLILSAGEDCKYKVWDSYGRPLYNSQPHEHPITSVAWAPDGELFAVGSFHTLRLCDKTGWSYALEKPNTGSIFNIAWSIDGTQIAGACGNGHVVFAHVVEQHWEWKNFQVTLTKRRAMQVRNVLNDAVDLLEFRDRVIKASLNYAHLVVSTSLQCYVFSTKNWNTPIIFDLKEGTVSLILQAERHFLLVDGSSIYLYSYEGRFISSPKFPGMRTDILNAQTVSLSNDTIAIRDKADEKIIFLFEASTGKPLGDGKFLSHKNEILEIALDQKGLTNDRKIAFIDKNRDLCITSVKRFGKEEQIIKLGTMVHTLAWNDTCNILCGLQDTRFIVWYYPNTVYVDRDILPKTLYERDASEFSKNPHIVSFVGNQVTIRRADGSLVHISITPYPAILHEYVSSSKWEDAVRLCRFVKEQTMWACLAAMAVANRDMTTAEIAYAAIGEIDKVQYINSIKNLPSKESKMAHILLFSGNIQEAEIVLLQAGLVYQAIQININLYNWERALELAVKYKTHVDTVLAYRQKFLETFGKQETNKRYLHYAEGLQIDWEKIKAKIEMEITKEREQSSSSQSSKSIGLKP

SEQ ID NO: 39188 - protein, 640 aa, Homo sapiens
MLRSTLAQQGTPVYSVAWGPDSEKVLYTAGKQLIIKPLQPNAKVLQWKAHDGIILKVDWNSVNDLILSAGEDCKYKVWDSYGRPLYNSQPHEHPITSVAWAPDGELFAVGSFHTLRLCDKTGWSYALEKPNTGSIFNIAWSIDGTQIAGACGNGHVVFAHVVEQHWEWKNFQVTLTKRRAMQVRNVLNDAVDLLEFRDRVIKASLNYAHLVVSTSLQCYVFSTKNWNTPIIFDLKEGTVSLILQAERHFLLVDGSSIYLYSYEGRFISSPKFPGMRTDILNAQTVSLSNDTIAIRDKADEKIIFLFEASTGKPLGDGKFLSHKNEILEIALDQKGLTNDRKIAFIDKNRDLCITSVKRFGKEEQIIKLGTMVHTLAWNDTCNILCGLQDTRFIVWYYPNTVYVDRDILPKTLYERDASEFSKNPHIVSFVGNQVTIRRADGSLVHISITPYPAILHEYVSSSKWEDAVRLCRFVKEQTMWACLAAMAVANRDMTTAEIAYAAIGEIDKVQYINSIKNLPSKESKMAHILLFSGNIQEAEIVLLQAGLVYQAIQININLYNWERALELAVKYKTHVDTVLAYRQKFLETFGKQETNKRYLHYAEGLQIDWEKIKAKIEMEITKEREQSSSSQSSKSIGLKP

SEQ ID NO: 39189 - protein, 1080 aa, Homo sapiens
MHNFEEELTCPICYSIFEDPRVLPCSHTFCRNCLENILQASGNFYIWRPLRIPLKCPNCRSITEIAPTGIESLPVNFALRAIIEKYQQEDHPDIVTCPEHYRQPLNVYCLLDKKLVCGHCLTIGQHHGHPIDDLQSAYLKEKDTPQKLLEQLTDTHWTDLTHLIEKLKEQKSHSEKMIQGDKEAVLQYFKELNDTLEQKKKSFLTALCDVGNLINQEYTPQIERMKEIREQQLELMALTISLQEESPLKFLEKVDDVRQHVQILKQRPLPEVQPVEIYPRVSKILKEEWSRTEIGQIKNVLIPKMKISPKRMSCSWPGLVSCVGWTTAEELYSCSDDHQIVKWNLLTSETTQIVKLPDDIYPIDFHWFPKSLGVKKQTQAESFVLTSSDGKFHLISKLGRVEKSVEAHCGAVLAGRWNYEGTALVTVGEDGQIKIWSKTGMLRSTLAQQGTPVYSVAWGPDSEKVLYTAGKQLIIKPLQPNAKVLQWKAHDGIILKVDWNSVNDLILSAGEDCKYKVWDSYGRPLYNSQPHEHPITSVAWAPDGELFAVGSFHTLRLCDKTGWSYALEKPNTGSIFNIAWSIDGTQIAGACGNGHVVFAHVVEQHWEWKNFQVTLTKRRAMQVRNVLNDAVDLLEFRDRVIKASLNYAHLVVSTSLQCYVFSTKNWNTPIIFDLKEGTVSLILQAERHFLLVDGSSIYLYSYEGRFISSPKFPGMRTDILNAQTVSLSNDTIAIRDKADEKIIFLFEASTGKPLGDGKFLSHKNEILEIALDQKGLTNDRKIAFIDKNRDLCITSVKRFGKEEQIIKLGTMVHTLAWNDTCNILCGLQDTRFIVWYYPNTVYVDRDILPKTLYERDASEFSKNPHIVSFVGNQVTIRRADGSLVHISITPYPAILHEYVSSSKWEDAVRLCRFVKEQTMWACLAAMAVANRDMTTAEIAYAAIGEIDKVQYINSIKNLPSKESKMAHILLFSGNIQEAEIVLLQAGLVYQAIQININLYNWERALELAVKYKTHVDTVLAYRQKFLETFGKQETNKRYLHYAEGLQIDWEKIKAKIEMEITKEREQSSSSQSSKSIGLKP

SEQ ID NO: 39190 - protein, 113 aa, Homo sapiens
MTPGVVHASPPQSQRVPRQAPCEWAIRNIGQKPKEPNCHNCGTHIGLRSKTLRGTPNYLPIRQDTHPPSVIFCLAGVGVPGGTCRPAPCVPRFAALPWATNHPGPGCLSDLRA

SEQ ID NO: 39191 - protein, 473 aa, Homo sapiens [sequence omitted]

SEQ ID NO: 39192 - protein, 473 aa, Homo sapiens
MCSGLLELLLPIWLSWTLGTRGSEPRSVNDPGNMSFVKETVDKLLKGYDIRLRPDFGGPPVCVGMNIDIASIDMVSEVNMDYTLTMYFQQYWRDKRLAYSGIPLNLTLDNRVADQLWVPDTYFLNDKKSFVHGVTVKNRMIRLHPDGTVLYGLRITTTAACMMDLRRYPLDEQNCTLEIESYGYTTDDIEFYWRGGDKAVTGVERIELPQFSIVEHRLVSRNVVFATGAYPRLSLSFRLKRNIGYFILQTYMPSILITILSWVSFWINYDASAARVALGITTVLTMTTINTHLRETLPKIPYVKAIDMYLMGCFVFVFLALLEYAFVNYIFFGRGPQRQKKLAEKTAKAKNDRSKSESNRVDAHGNILLTSLEVHNEMNEVSGGIGDTRNSAISFDNSGIQYRKQSMPREGHGRFLGDRSLPHKKTHLRRRSSQLKIKIPDLTDVNAIDRWSRIVFPFTFSLFNLVYWLYYVN

SEQ ID NO: 39193 - protein, 402 aa, Homo sapiens
MWATYQTEEDYTLTMYFQQYWRDKRLAYSGIPLNLTLDNRVADQLWVPDTYFLNDKKSFVHGVTVKNRMIRLHPDGTVLYGLRITTTAACMMDLRRYPLDEQNCTLEIESYGYTTDDIEFYWRGGDKAVTGVERIELPQFSIVEHRLVSRNVVFATGAYPRLSLSFRLKRNIGYFILQTYMPSILITILSWVSFWINYDASAARVALGITTVLTMTTINTHLRETLPKIPYVKAIDMYLMGCFVFVFLALLEYAFVNYIFFGRGPQRQKKLAEKTAKAKNDRSKSESNRVDAHGNILLTSLEVHNEMNEVSGGIGDTRNSAISFDNSGIQYRKQSMPREGHGRFLGDRSLPHKKTHLRRRSSQLKIKIPDLTDVNAIDRWSRIVFPFTFSLFNLVYWLYYVN

SEQ ID NO: 39194 - protein, 388 aa, Homo sapiens
MYFQQYWRDKRLAYSGIPLNLTLDNRVADQLWVPDTYFLNDKKSFVHGVTVKNRMIRLHPDGTVLYGLRITTTAACMMDLRRYPLDEQNCTLEIESYGYTTDDIEFYWRGGDKAVTGVERIELPQFSIVEHRLVSRNVVFATGAYPRLSLSFRLKRNIGYFILQTYMPSILITILSWVSFWINYDASAARVALGITTVLTMTTINTHLRETLPKIPYVKAIDMYLMGCFVFVFLALLEYAFVNYIFFGRGPQRQKKLAEKTAKAKNDRSKSESNRVDAHGNILLTSLEVHNEMNEVSGGIGDTRNSAISFDNSGIQYRKQSMPREGHGRFLGDRSLPHKKTHLRRRSSQLKIKIPDLTDVNAIDRWSRIVFPFTFSLFNLVYWLYYVN

SEQ ID NO: 39195 - protein, 339 aa, Homo sapiens
MAAEDELQLPRLPELFETGRQLLDEVEVATEPAGSRIVQEKVFKGLDLLEKAAEMLSQLDLFSRNEDLEEIASTDLKYLLVPAFQGALTMKQVNPSKRLDHLQRAREHFINYLTQCHCYHVAEFELPKTMNNSAENHTANSSMAYPSLVAMASQRQAKIQRYKQKKELEHRLSAMKSAVESGQADDERVREYYLLHLQRWIDISLEEIESIDQEIKILRERDSSREASTSNSSRQERPPVKPFILTRNMAQAKVFGAGYPSLPTMTVSDWYEQHRKYGALPDQGIAKAAPEEFRKAAQQQEEQEEKEEEDDEQTLHRAREWDDWKDTHPRGYGNRQNMG

SEQ ID NO: 39196 - protein, 181 aa, Homo sapiens
MKHLVASSILGVFVLTPSLAMMNIRFNHPLYGSFGTQIIHIGAFQGMVSIRDNNIFSEWDGILDYKNALLVAKVFNKMACVLARMDKAVFPSLDDISKALDKQAFKYYPSTRGLTYTVLPSWVKNLAQYGKPIKNMCRDDPTYFAQQQKEGTALAIDSNSCFEIQLLSFMGLFICGETPGL

SEQ ID NO: 39197 - protein, 547 aa, Homo sapiens
MSTASSSSSSSSSQTPHPPSQRMRRSAAGSPPAVAAAGSGNGAGGGGGVGCAPAAGAGRLLQPIRATVPYQLLRGSQHSPTRPPVAAAAASLGSLPGPGAARGPSPSSPTPPAAAAPAEQAPRAKGRPRRSPESHRRSSSPERRSPGSPVCRADKAKSQQVRTSSTIRRTSSLDTITGPYLTGQWPRDPHVHYPSCMKDKATQTPSCWAEEGAEKRSHQRSASWGSADQLKEQIAKLRQQLQRSKQSSRHSKEKDRQSPLHGNHITISHTQATGSRSVPMPLSNISVPKSSVSRVPCNVEGISPELEKVFIKENNGKEEVSKPLDIPDGRRAPLPAHYRSSSTRSIDTQTPSVQERSSSCSSHSPCVSPFCPPESQDGSPCSTEDLLYDRDKDSGSSSPLPKYASSPKPNNSYMFKREPPEGCERVKVFEEMASRQPISAPLFSCPDKNKVNFIPTGSAFCPVKLLGPLLPASDLMLKNSPNSGQSSALATLTVEQLSSRVSFTSLSDDTSTAGSMEASVQQPSQQQQLLQELQGEDHISAQNYVII

SEQ ID NO: 39198 - protein, 250 aa, Homo sapiens
MEKGPVRAPAEKPRGARCSNGFPERDPPRPGPSRPAEKPPRPEAKSAQPADGWKGERPRSEEDNELNLPNLAAAYSSILSSLGENPQRQGLLKTPWRAASAMQFFTKGYQETISDVLNDAIFDEDHDEMVIVKDIDMFSMCEHHLVPFVGKVHIGYLPNKQVLGLSKLARIVEIYSRRLQVQERLTKQIAVAITEALRPAGVGVVVEATHMCMVMRGVQKMNSKTVTSTMLGVFREDPKTREEFLTLIRS

SEQ ID NO: 39199 - protein, 213 aa, Homo sapiens
MEKGPVRAPAEKPRGARCSNGFPERDPPRPGPSRPAEKPPRPEAKSAQPADGWKGERPRSEEDNELNLPNLAAAYSSILSSLGENPQRQGLLKTPWRAASAMQFFTKGYQETISDVLNDAIFDEDHDEMVIVKDIDMFSMCEHHLVPFVGKVHIGYLPNKQVLGLSKLARIVEIYSRRLQVQERLTKQIAVAITEALRPAGVGVVVEATSAEP

SEQ ID NO: 39200 - protein, 209 aa, Homo sapiens
MEKGPVRAPAEKPRGARCSNGFPERDPPRPGPSRPAEKPPRPEAKSAQPADGWKGERPRSEEDNELNLPNLAAAYSSILSSLGENPQRQGLLKTPWRAASAMQFFTKGYQETISDVLNDAIFDEDHDEMVIVKDIDMFSMCEHHLVPFVGKVHIGYLPNKQVLGLSKLARIVEIYSRRLQVQERLTKQIAVAITEALRPAGVGVVVEAT

SEQ ID NO: 39201 - protein, 233 aa, Homo sapiens
MEKGPVRAPAEKPRGARCSNGFPERDPPRPGPSRPAEKPPRPEAKSAQPADGWKGERPRSEEDNELNLPNLAAAYSSILSSLGENPQRQGLLKTPWRAASAMQFFTKGYQETISDVLNDAIFDEDHDEMVIVKDIDMFSMCEHHLVPFVGKVHIGYLPNKQVLGLSKLARIVEIYSRRLQVQERLTKQIAVAITEALRPAGVGVVVEATKSNKYNKGLSPLLSSCHLFVAILK

SEQ ID NO: 39202 - protein, 467 aa, Homo sapiens
MSSPNIWSTGSSVYSTPVFSQKMTVWILLLLSLYPGFTSQKSDDDYEDYASNKTWVLTPKVPEGDVTVILNNLLEGYDNKLRPDIGVKPTLIHTDMYVNSIGPVNAINMEYTIDIFFAQTWYDRRLKFNSTIKVLRLNSNMVGKIWIPDTFFRNSKKADAHWITTPNRMLRIWNDGRVLYTLRLTIDAECQLQLHNFPMDEHSCPLEFSSYGYPREEIVYQWKRSSVEVGDTRSWRLYQFSFVGLRNTTEVVKTTSGDYVVMSVYFDLSRRMGYFTIQTYIPCTLIVVLSWVSFWINKDAVPARTSLGITTVLTMTTLSTIARKSLPKVSYVTAMDLFVSVCFIFVFSALVEYGTLHYFVSNRKPSKDKDKKKKNPAPTIDIRPRSATIQMNNATHLQERDEEYGYECLDGKDCASFFCCFEDCRTGAWRHGRIHIRIAKMDSYARIFFPTAFCLFNLVYWVSYLYL

SEQ ID NO: 39203 - protein, 475 aa, Homo sapiens
MSSPNIWSTGSSVYSTPVFSQKMTVWILLLLSLYPGFTSQKSDDDYEDYASNKTWVLTPKVPEGDVTVILNNLLEGYDNKLRPDIGVKPTLIHTDMYVNSIGPVNAINMEYTIDIFFAQTWYDRRLKFNSTIKVLRLNSNMVGKIWIPDTFFRNSKKADAHWITTPNRMLRIWNDGRVLYTLRLTIDAECQLQLHNFPMDEHSCPLEFSSYGYPREEIVYQWKRSSVEVGDTRSWRLYQFSFVGLRNTTEVVKTTSGDYVVMSVYFDLSRRMGYFTIQTYIPCTLIVVLSWVSFWINKDAVPARTSLGITTVLTMTTLSTIARKSLPKVSYVTAMDLFVSVCFIFVFSALVEYGTLHYFVSNRKPSKDKDKKKKNPLLRMFSFKAPTIDIRPRSATIQMNNATHLQERDEEYGYECLDGKDCASFFCCFEDCRTGAWRHGRIHIRIAKMDSYARIFFPTAFCLFNLVYWVSYLYL

SEQ ID NO: 39204 - protein, 515 aa, Homo sapiens
MSSPNIWSTGSSVYSTPVFSQKMTVWILLLLSLYPGFTSQKSDDDYEDYASNKTWVLTPKVPEGDVTVILNNLLEGYDNKLRPDIGVKPTLIHTDMYVNSIGPVNAINMEYTIDIFFAQTWYDRRLKFNSTIKVLRLNSNMVGKIWIPDTFFRNSKKADAHWITTPNRMLRIWNDGRVLYTLRLTIDAECQLQLHNFPMDEHSCPLEFSSWSRSIAQAGMCSGVISAHYSLRFWGSTDPPTLASRVAGISDGYPREEIVYQWKRSSVEVGDTRSWRLYQFSFVGLRNTTEVVKTTSGDYVVMSVYFDLSRRMGYFTIQTYIPCTLIVVLSWVSFWINKDAVPARTSLGITTVLTMTTLSTIARKSLPKVSYVTAMDLFVSVCFIFVFSALVEYGTLHYFVSNRKPSKDKDKKKKNPLLRMFSFKAPTIDIRPRSATIQMNNATHLQERDEEYGYECLDGKDCASFFCCFEDCRTGAWRHGRIHIRIAKMDSYARIFFPTAFCLFNLVYWVSYLYL

SEQ ID NO: 39205 - protein, 137 aa, Homo sapiens
MRPQQAPVSGKVFIQRDYSSGTRCQFQTKFPAELENRIDRQQFEETVRTLNNLYAEAEKLGGQSYLEGCLACLTAYTIFLCMETHYEKVLKKVSKYIQEQNEKIYAPQGLLLTDPIERGLRVIEITIYEDRGMSSGR

SEQ ID NO: 39206 - protein, 134 aa, Homo sapiens
MRPQQAPVSGKVFIQRDYSSGTRCQFQTKFPAELENRIDRQQFEETVRTLNNLYAEAEKLGGQSYLEGCLACLTAYTIFLCMETHYEKVLKKVSKYIQEQNEKIYAPQGLLLTDPIERGLRVFRLKLPFMKTEA

SEQ ID NO: 39207 - protein, 401 aa, Homo sapiens
MMGLGNGRRSMKSPPLVLAALVACIIVLGFNYWIASSRSVDLQTRIMELEGRVRRAAAERGAVELKKNEFQGELEKQREQLDKIQSSHNFQLESVNKLYQDEKAVLVNNITTGERLIRVLQDQLKTLQRNYGRLQQDVLQFQKNQTNLERKFSYDLSQCINQMKEVKEQCEERIEEVTKKGNEAVASRDLSENNDQRQQLQALSEPQPRLQAAGLPHTEVPQGKGNVLGNSKSQTPAPSSEVVLDSKRQVEKEETNEIQVVNEEPQRDRLPQEPGREQVVEDRPVGGRGFGGAGELGQTPQVQAALSVSQENPEMEGPERDQLVIPDGQEEEQEAAGEGRNQQKLRGEDDYNMDENEAESETDKQAALAGNDRNIDVFNVEDQKRDTINLLDQREKRNHTL

SEQ ID NO: 39208 - protein, 391 aa, Homo sapiens
MKSPPLVLAALVACIIVLGFNYWIASSRSVDLQTRIMELEGRVRRAAAERGAVELKKNEFQGELEKQREQLDKIQSSHNFQLESVNKLYQDEKAVLVNNITTGERLIRVLQDQLKTLQRNYGRLQQDVLQFQKNQTNLERKFSYDLSQCINQMKEVKEQCEERIEEVTKKGNEAVASRDLSENNDQRQQLQALSEPQPRLQAAGLPHTEVPQGKGNVLGNSKSQTPAPSSEVVLDSKRQVEKEETNEIQVVNEEPQRDRLPQEPGREQVVEDRPVGGRGFGGAGELGQTPQVQAALSVSQENPEMEGPERDQLVIPDGQEEEQEAAGEGRNQQKLRGEDDYNMDENEAESETDKQAALAGNDRNIDVFNVEDQKRDTINLLDQREKRNHTL

SEQ ID NO: 39209 - protein, 337 aa, Homo sapiens
MRPTLLWSLLLLLGVFAAAAAAPPDPLSQLPAPQHPKIRLYNAEQVLSWEPVALSNSTRPVVYQVQFKYTDSKWFTADIMSIGVNCTQITATECDFTAASPSAGFPMDFNVTLRLRAELGALHSAWVTMPWFQHYRNVTVGPPENIEVTPGEGSLIIRFSSPFDIADTSTAFFCYYVHYWEKGGIQQVKGPFRSNSISLDNLKPSRVYCLQVQAQLLWNKSNIFRVGHLSNISCYETMADASTELQQVILISVGTFSLLSVLAGACFFLVLKYRGLIKYWFHTPPSIPLQIEEYLKDPTQPILEALDKDSSPKDDVWDSVSIISFPEKEQEDVLQTL

SEQ ID NO: 39210 - protein, 352 aa, Homo sapiens
MTSSLLLAFLLLAPTTVATPRAGGQCPACGGPTLELESQRELLLDLAKRSILDKLHLTQRPTLNRPVSRAALRTALQHLHGVPQGALLEDNREQECEIISFAETGLSTINQTRLDFHFSSDRTAGDREVQQASLMFFVQLPSNTTWTLKVRVLVLGPHNTNLTLATQYLLEVDASGWHQLPLGPEAQAACSQGHLTLELVLEGQVAQSSVILGGAAHRPFVAARVRVGGKHQIHRRGIDCQGGSRMCCRQEFFVDFREIGWHDWIIQPEGYAMNFCIGQCPLHIAGMPGIAASFHTAVLNLLKANTAAGTTGGGSCCVPTARRPLSLLYYDRDSNIVKTDIPDMVVEACGCS

SEQ ID NO: 39211 - protein, 79 aa, Homo sapiens
MKVTGIFLLSALALLSLSGNTGADSLGREAKCYNELNGCTKIYDPVCGTDGNTYPNECVLCFENRKRQTSILIQKSGPC

SEQ ID NO: 39212 - protein, 683 aa, Homo sapiens
MRRCPCRGSLNEAEAGALPAAARMGLEAPRGGRRRQPGQQRPGPGAGAPAGRPEGGGPWARTEGSSLHSEPERAGLGPAPGTESPQAEFWTDGQTEPAAAGLGVETERPKQKTEPDRSSLRTHLEWSWSELETTCLWTETGTDGLWTDPHRSDLQFQPEEASPWTQPGVHGPWTELETHGSQTQPERVKSWADNLWTHQNSSSLQTHPEGACPSKEPSADGSWKELYTDGSRTQQDIEGPWTEPYTDGSQKKQDTEAARKQPGTGGFQIQQDTDGSWTQPSTDGSQTAPGTDCLLGEPEDGPLEEPEPGELLTHLYSHLKCSPLCPVPRLIITPETPEPEAQPVGPPSRVEGGSGGFSSASSFDESEDDVVAGGGGASDPEDRSGSKPWKKLKTVLKYSPFVVSFRKHYPWVQLSGHAGNFQAGEDGRILKRFCQCEQRSLEQLMKDPLRPFVPAYYGMVLQDGQTFNQMEDLLADFEGPSIMDCKMGSRTYLEEELVKARERPRPRKDMYEKMVAVDPGAPTPEEHAQGAVTKPRYMQWRETMSSTSTLGFRIEGIKKADGTCNTNFKKTQALEQVTKVLEDFVDGDHVILQKYVACLEELREALEISPFFKTHEVVGSSLLFVHDHTGLAKVWMIDFGKTVALPDHQTLSHRLPWAEGNREDGYLWGLDNMICLLQGLAQS

SEQ ID NO: 39213 - protein, 693 aa, Homo sapiens
MWPQPYLPPHPMMLEESRQNKLAAAKKKLKEYQQRKSPGIPAGAKTKKKKTDSSPETTTSGGCHSPGDSQYQELAVALESSSVTISQLNENIESLKQQKKQVEHQLEEAKKTNNEIHKAQMERLETINILTLEKADLKTTLYHTKRAARHFEEESKDLAGRLQYSLQRIQELERALCAVSTQQQEEDRSSSCREAVLQRWLQQTIKERALLNAHVTQVTESLKQVQLERDEYAKHIKGERARWQERMWKMSVEARTLKEEKKRDIHRIQELERSLSELKNQMAEPPSLAPPAVTSVVEQLQDEAKHLRQEVEGLEGKLQSQVENNQALSLLSKEQKQRLQEQEEMLREQEAQRVREQERLCEQNERLREQQKTLQEQGERLRKQEQRLRKQEERLRKEEERLQKQEKRLWDQEERLWKKEERLQKQEERLALSQNHKLDKQLAEPQCSFEDLNNEKKSALQLEQQVKELQEKLDEEHLEAASHQNQQLETQLSLVALPGEGDGGQHLDSEEEEAPRPTPNIPEDLESREATSSFMDLPKEKADGTEQVERRELGFVQPSGVTDGMRESFTVYESQGAVPNTRHQEMEDVIRLAQKEEEMKVKLLELQELVLPLVGNHEGHGKFLIAAQNPADEPTPGAPAPQELGAAGEQDVFYEVSLDNNVEPAPGAAREGSPHDNPTVQQIVQLSPVMQDT

SEQ ID NO: 39214 - protein, 221 aa, Homo sapiens
MPLALTLLLLSGLGAPGGWGCLQCDPLVLEALGHLRSALIPSRFQLEQLQARAGAVLMGMEGPFFRDYALNVFVGKVETNQLDLVASFVKNQTQHLMGNSLKDEPLLEELVTLRANVIKEFKKVLISYELKACNPKLCRLLKEEVLDCLHCQRITPKCIHKKYCFVDRQPRVALQYQMDSKYPRNQALLGILISVSLAVFVFVVIVVSACTYRQNRKLLLQ

SEQ ID NO: 39215 - protein, 192 aa, Homo sapiens
MPLALTLLLLSGLGAPGGWGCLQCDPLVLEALGHLRSALIPSRFQLEQLQARAGAVLMGMEGPFFRDYALNVFVGKVETNQLDLVASFVKNQTQHLMGNSLKDEPLLEELVTLRANVIKEFKKVLISYELKACNPAWPCSTRWTANTRGTRRCWASSFLCLWLSLSSWSSWSRLVHTDKTENSCCSRTVVWG

SEQ ID NO: 39216 - protein, 632 aa, Homo sapiens
MAEETQHNKLAAAKKKLKEYWQKNRPRVPAGVNRNRKTNGSIPETATSGGCQPPGDSATGFHREGPTSSATLKDLESPCQERAVVLDSTSVKISRLKNTIKSLKQQKKQVEHQLEEEKKANNERQKAERELEVQIQTLIIQKEELNTDLYHMERSLRYFEEESKDLAVRLQHSLQCKGELESALSAVIATEKKKANQLSSCSKAHTEWELEQSLQDQALLKAQLTQLKESFQQLQLERDECAEHIEGERARWHQRMSKMSQEICTLKKEKQQDMRRVEELERSLSKLKNQMAEPLPPEPPAVPSEVELQHLRKELERVAGELQSQVKNNQHISLLNRRQEERIREQEERLRKQEERLQEQHEKLRQLAKPQSVFEELNNENKSTLQLEQQVKELQEKLGEEHLEAASQQNQQLTAQLSLMALPGEGHGGEHLDSEGEEAPRPMPSVPEDPESREAMSSFMDHLKEKADLSELVKKQELRFIQYWQERCHQKIHHLLSEPGGRAKDAALGGGHHQAGAQGGDEGEAAGAAADGIAAYSNYNNGHRKFLAAAHNSADEPGPGAPAPQELGAADKHGDLREVTLTSSAQGEAREDPLLDKPTAQPIVQDHQEHPGLGSNCCVPLFCWAWLPRRRR

SEQ ID NO: 39217 - protein, 295 aa, Homo sapiens
MAEETQHNKLAAAKKKLKEYWQKNRPRVPAGVNRNRKTNGSIPETATSGGCQPPGDSATGFHREGPTSSATLKDLESPCQERAVVLDSTSVKISRLKNTIKSLICTLKKEKQQDMRRVEELERSLSKLKNQMAEPLPPEPPAVPSEVELQHLRKELERVAGELQSQVKNNQHISLLNRRQEERIREQEERLRKQEERLQEQHEKLRQLAKPQSVFEELNNENKSTLQLEQQVKELQEKLGEVKETETSTPSKKGWEAGSSLLGGEVPGQRQLPAWGLVTTAPRRAVLRLFLASCL

SEQ ID NO: 39218 - protein, 632 aa, Homo sapiens
MAEETQHNKLAAAKKKLKEYWQKNSPRVPAGANRNRKTNGSIPQTATSGGCQPPGDSATGFHREGPTSSATLKDLESPCQERAVVLDSRSVEISQLKNTIKSLKQQKKQVEHQLEEEKKANIKKQKAKRVLEVQIQTLNIQKEELNTDLYHMKRSLRYFEEKSKDLAVRLQHSLQRKGELESVLSDVMATQKKKANQLSSPSKAGTEWKLEQSMREEALLKVQLTQLKESFQQLQLERHEYAEHLKGERARWQQRMRKMSQEICTLKKEKQQDMRRVEKLERSLSKLKNQMAEPLPPEPPAVPSEVELQHLRKELERVAGALQAQVKNNQRISLLNRGQEERIREQEERLRKQEERIQEQHKSLQQLAKPQSVFEEPNNENKSALQLEQQVKELQEKLGEEHLEAASQQNQQLTAQLSLMALPGEGHGGEHLDSEGEEAPQPMPSVPEDLESREAMSSFMDHLEEKADLSELVKKKELCFIHHWRERCHQKTHHLLSEPGGRAKDAALGGGHHQAGAQGGDEGEAAGAAADGIAAYSNYNNGHRKFLAAAHNPADEPGPGAPAPQELGAADKHGDLCEVSLTSSAQGEAREDPLLDKPTAQPIVQDHQEHPGLGSNCCVPFFCWAWLPRRRR

SEQ ID NO: 39219 - protein, 232 aa, Homo sapiens
MALLLCLVCLTAALAHGCLHCHSNFSKKFSFYRHHVNFKSWWVGDIPVSGALLTDWSDDTMKELHLAIPAKITREKLDQVATAVYQMMDQLYQGKMYFPGYFPNELRNIFREQVHLIQNAIIESRIDCQHRCGIFQYETISCNNCTDSHVACFGYNCESSAQWKSAVQGLLNYINNWHKQDTSMRPRSSAFSWPGTHRATPAFLVSPALRCLEPPHLANLTLEDAAECLKQH

SEQ ID NO: 39220 - protein, 214 aa, Homo sapiens
MALLLCLVCLTAALAHGCLHCHSNFSKKFSFYRHHVNFKSWWVGDIPVSGALLTDWSDDTMKELHLAIPAKITREKLDQVATAVYQMMDQLYQGKMYFPGYFPNELRNIFREQVHLIQNAIIESRIDCQHRCGIFQYETISCNNCTDSHVACFGYNCESSAQWKSAVQGLLNYINNWHKQDTSMSLVSPALRCLEPPHLANLTLEDAAECLKQH

SEQ ID NO: 39221 - protein, 157 aa, Homo sapiens
MALLLCLVCLTAALAHGCLHCHSNFSKKFSFYRHHVNFKSWWVGDIPVSGALLTDWSDDTMKELHLAIPAKITREKLDQVATAVYQMMDQLYQGKMYFPGYFPNELRNIFREQVHLIQNAIIERHLAPGSWGGGQLSREGPSLAPEGSMPSPRGDLP

SEQ ID NO: 39222 - protein, 158 aa, Homo sapiens
MALLLCLVCLTAALAHGCLHCHSNFSKKFSFYRHHVNFKSWWVGDIPVSGALLTDWSDDTMKELHLAIPAKITREKLDQVATAVYQMMDQLYQGKMYFPGYFPNELRNIFREQVHLIQNAIIESRIDCQHRCGIFQYETISCNNCTDSHVACFGYNCE

SEQ ID NO: 39223 - protein, 632 aa, Homo sapiens
MAEETQHNKLAAAKKKLKEYWQKNSPRVPAGANRNRKTNGSIPEKATSGGCQPPRDSATGFHREGPTSSATLKDLESPCQERAVVLDSRSVEISQLKNTIKSLKQQKKQVEHQLEEEKKANNKKQKAKRVLEVQIQTLNIQKEELNTDLYHMKRSLRYFEEKSKDLAVRLQHSLQRKGELESVLSNVMATQKKKANQLSSRSKARTEWKLEQSMREEALLKVQLTQFKESFQQVQLERDEYSEHLKGERARWQQRMRKMSQEICTLKKEKQQDMRRVEKLERSLSKLKNQMAEPLPPEPPAVPSEVELQHLRKELERVAGELQAQVKNNQRISLLNQRQEERIREQEERLRKQEERIQEQHKSLQQLAKPQSVFKEPNNENKNALQLEQQVKELQEKLGEEHLEAASQQNQQLTAQLSLMALPGEGHGGEHLDSEGEEAPRPMPSVPEDPESREAMSSFMDHLEEKADLSELVKKKELCFIHHWRERCHQKTHHLLSEPGGRAKDAALGGGHHQAGAQGGDEGEAAGAAADGIAAYSNYNNGHRKFLAAAHNSADEPGPGAPAPQELGAADKHGHLCEVSLTSSAQGEAREDPLLDKPTAQPIVQDHQEHPGLGSNCCVPFLCWAWLPRRRR

SEQ ID NO: 39224 - protein, 632 aa, Homo sapiens
MAEETQHNKLAAAKKKLKEYWQKNSPRVPAGANRNRKTNGSIPQTATSGGCQPPGDSATGFHREGPTSSATLKDLESPCQERAVVLDSRSVEISQLKNTIKSLKQQKKQVEHQLEEEKKANNKKQKAKRVLEVQLQTLNIQKEELNTDLYHMKRSLRYFEEKSKDLAVRLQHSLQRKGELESVLSDVMATQKKKANQLSSPSKAGTEWKLEQSMREEALLKVQLTQLKESFQQVQLERDEYSEHLKGERARWQQRMRKMSQEICTLKKEKQQDMRRVEKLERSLSKLKNQMAEPLPPEPPAVPSEVELQHLRKELERVAGELQAQVKNNQRISLLNQRQEERIREQEERLRKQEERIQEQHKSLQQLAKPQSVFEEPNNENKSTLQLEQQVKELQEKLGEEHLEAASQQNQQLTAQLSLMALPGEGHGGEHLDSEGEEAPQPMPSVPEDPESREAMSSFMDHLEEKADLSELVKKQELRFIQYWQERCHQKIHHLLSEPGGRAKDAALGGGHHQAGAQGGDEGEAAGAAADGIAAYSNYNNGHRKFLAAAHNSADEPGPGAPAPQELGAADKHGDLCEVSLTSSAQGEAREDPLLDKPTAQPIVQDHQEHPGLGSNCCVPFFCWAWLPRRRR

SEQ ID NO: 39225 - protein, 371 aa, Homo sapiens
MGGPVLGHWWHSGGMSLAVPSLPPPGKSSVFLFLQEKKANNKKQKAKRVLEVQLQTLNIQKEELNTDLYHMKRSLRYFEEKSKDLAVRLQHSLQRKGELESVLSDVMATQKKKANQLSSPSKAGTEWKLEQSMREEALLKVQLTQLKESFQQVQLERDEYSEHLKGERARWQQRMRKMSQEICTLKKEKQQDMRRVEKLERSLSKLKNQMAEPLPPEPPAVPSEVELQHLRKELERVAGELQAQVKNNQRISLLNQRQEERIREQEERLRKQEERIQEQHKSLQQLAKPQSVFEEPNNENKSTLQLEQQVKELQEKLGEVKESETSTPSKKGWEAGSSLWGGEVPGQRQLPAWGLVTTAPPRAVLFLASCL

SEQ ID NO: 39226 - protein, 293 aa, Homo sapiens
MAEETQHNKLAAAKKKLKEYWQKNSPRVPAGANRNRKTNGSIPQTATSGGCQPPGDSATGFHREGPTSSATLKDLESPCQERAVVLDSRSVEISQLKNTIKSLICTLKKEKQQDMRRVEKLERSLSKLKNQMAEPLPPEPPAVPSEVELQHLRKELERVAGELQAQVKNNQRISLLNQRQEERIREQEERLRKQEERIQEQHKSLQQLAKPQSVFEEPNNENKSTLQLEQQVKELQEKLGEVKESETSTPSKKGWEAGSSLWGGEVPGQRQLPAWGLVTTAPPRAVLFLASCL

SEQ ID NO: 39227 - protein, 580 aa, Homo sapiens
MAGTVRTACLVVAMLLSLDFPGQAQPPPPPPDATCHQVRSFFQRLQPGLKWVPETPVPGSDLQVCLPKGPTCCSRKMEEKYQLTARLNMEQLLQSASMELKFLIIQNAAVFQEAFEIVVRHAKNYTNAMFKNNYPSLTPQAFEFVGEFFTDVSLYILGSDINVDDMVNELFDSLFPVIYTQLMNPGLPDSALDINECLRGARRDLKVFGNFPKLIMTQVSKSLQVTRIFLQALNLGIEVINTTDHLKFSKDCGRMLTRMWYCSYCQGLMMVKPCGGYCNVVMQGCMAGVVEIDKYWREYILSLEELVNGMYRIYDMENVLLGLFSTIHDSIQYVQKNAGKLTTTIGKLCAHSQQRQYRSAYYPEDLFIDKKVLKVAHVEHEETLSSRRRELIQKLKSFISFYSALPGYICSHSPVAENDTLCWNGQELVERYSQKAARNGMKNQFNLHELKMKGPEPVVSQIIDKLKHINQLLRTMSMPKGRVLDKNLDEEGFESGDCGDDEDECIGGSGDGMIKVKNQLRFLAELAYDLDVDDAPGNSQQATPKDNEISTFHNLGNVHSPLKLLTSMAISVVCFFFLVH

SEQ ID NO: 39228 - protein, 526 aa, Homo sapiens
MAGTVRTACLVVAMLLSLDFPGQAQPPPPPPDATCHQVRSFFQRLQPGLKWVPETPVPEAFEIVVRHAKNYTNAMFKNNYPSLTPQAFEFVGEFFTDVSLYILGSDINVDDMVNELFDSLFPVIYTQLMNPGLPDSALDINECLRGARRDLKVFGNFPKLIMTQVSKSLQVTRIFLQALNLGIEVINTTDHLKFSKDCGRMLTRMWYCSYCQGLMMVKPCGGYCNVVMQGCMAGVVEIDKYWREYILSLEELVNGMYRIYDMENVLLGLFSTIHDSIQYVQKNAGKLTTTIGKLCAHSQQRQYRSAYYPEDLFIDKKVLKVAHVEHEETLSSRRRELIQKLKSFISFYSALPGYICSHSPVAENDTLCWNGQELVERYSQKAARNGMKNQFNLHELKMKGPEPVVSQIIDKLKHINQLLRTMSMPKGRVLDKNLDEEGFESGDCGDDEDECIGGSGDGMIKVKNQLRFLAELAYDLDVDDAPGNSQQATPKDNEISTFHNLGNVHSPLKLLTSMAISVVCFFFLVH

SEQ ID NO: 39229 - protein, 603 aa, Homo sapiens
MAGTVRTACLVVAMLLSLDFPGQAQPPPPPPDATCHQVRSFFQRLQPGLKWVPETPVPGSDLQVCLPKGPTCCSRKMEEKYQLTARLNMEQLLQSASMELKFLIIQNAAVFQEAFEIVVRHAKNYTNAMFKNNYPSLTPQAFEFVGEFFTDVSLYILGSDINVDDMVNELFDSLFPVIYTQLMNPGLPDSALDINECLRGARRDLKVFGNFPKLIMTQVSKSLQVTRIFLQALNLGIEVINTTDHLKFSKDCGRMLTRMWYCSYCQGLMMVKPCGGYCNVVMQGCMAGVVEIDKYWREYILSLEELVNGMYRIYDMENVLLGLFSTIHDSIQYVQKNAGKLTTTETEKKIWHFKYPIFFLCIGLDLQIGKLCAHSQQRQYRSAYYPEDLFIDKKVLKVAHVEHEETLSSRRRELIQKLKSFISFYSALPGYICSHSPVAENDTLCWNGQELVERYSQKAARNGMKNQFNLHELKMKGPEPVVSQIIDKLKHINQLLRTMSMPKGRVLDKNLDEEGFESGDCGDDEDECIGGSGDGMIKVKNQLRFLAELAYDLDVDDAPGNSQQATPKDNEISTFHNLGNVHSPLKLLTSMAISVVCFFFLVH

SEQ ID NO: 39230 - protein, 524 aa, Homo sapiens
MSGKRKRVVLTIKDKLDIIKKLEDGGSSKQLAVIYGIGETTVRDIRKNKEKIITYASSSDSTSLLAKRKSMKPSMYEELDRAMLEWFNQQRAKGNPISGPICAKRAEFFFYALGMDGDFNPSAGWLTRFKQRHSIREINIRNERLNGDETAVEDFCNNFRDFIERENLQPEQIYNADETGLFWKCLPSRISVIKGKCTVPGHKSIEERVTIMCCANATGLHKLKLCVVGKAKKPRSFKSTDTLNLPVSYFSQKGAWMDLSIFRQWFDKIFVPQVREYLRSKGLQEKAVLLLDNSPTHPNENVLRSDDGQIFAKYLPPNVASLIQPSDQGVIATMKRNYRAGLLQNNLEEGNDLKSFWKKLTLLDALYEIAMAWNLVKPVTISRAWKKILPMVEEKESLDFDVEDISVATVAAILQHTKGLENVTTENLEKWLEVDSTEPGYEVLTDSEIIRRAQGQADESSENEEEEIELIPEKHINHAAALQWTENLLDYLEQQGDMILPDRLVIRKLRATIRNKQKMTKSSQ

SEQ ID NO: 39231 - protein, 367 aa, Homo sapiens
MSKRSWWAGSRKPPREMLKLSGSDSSQSMNGLEVAPPGLITNFSLATAEQCGQETPLENMLFASFYLLDFILALVGNTLALWLFIRDHKSGTPANVFLMHLAVADLSCVLVLPTRLVYHFSGNHWPFGEIACRLTGFLFYLNMYASIYFLTCISADRFLAIVHPVKSLKLRRPLYAHLACAFLWVVVAVAMAPLLVSPQTVQTNHTVVCLQLYREKASHHALVSLAVAFTFPFITTVTCYLLIIRSLRQGLRVEKRLKTKAVRMIAIVLAIFLVCFVPYHVNRSVYVLHYRSHGASCATQRILALANRITSCLTSLNGALDPIMYFFVAEKFRHALCNLLCGKRLKGPPPSFEGKTNESSLSAKSEL

SEQ ID NO: 39232 - protein, 339 aa, Homo sapiens
MNGLEVAPPGLITNFSLATAEQCGQETPLENMLFASFYLLDFILALVGNTLALWLFIRDHKSGTPANVFLMHLAVADLSCVLVLPTRLVYHFSGNHWPFGEIACRLTGFLFYLNMYASIYFLTCISADRFLAIVHPVKSLKLRRPLYAHLACAFLWVVVAVAMAPLLVSPQTVQTNHTVVCLQLYREKASHHALVSLAVAFTFPFITTVTCYLLIIRSLRQGLRVEKRLKTKAVRMIAIVLAIFLVCFVPYHVNRSVYVLHYRSHGASCATQRILALANRITSCLTSLNGALDPIMYFFVAEKFRHALCNLLCGKRLKGPPPSFEGKTNESSLSAKSEL

SEQ ID NO: 39233 - protein, 309 aa, Homo sapiens
MNGTYNTCGSSDLTWPPAIKLGFYAYLGVLLVLGLLLNSLALWVFCCRMQQWTETRIYMTNLAVADLCLLCTLPFVLHSLRDTSDTPLCQLSQGIYLTNRYMSISLVTAIAVDRYVAVRHPLRARGLRSPRQAAAVCAVLWVLVIGSLVARWLLGIQEGGFCFRSTRHNFNSMAFPLLGFYLPLAVVVFCSLKVVTALAQRPPTDVGQAEATRKAARMVWANLLVFVVCFLPLHVGLTVRLAVGWNACALLETIRRALYITSKLSDANCCLDAICYYYMAKEFQEASALAVAPSAKAHKSQDSLCVTLA

SEQ ID NO: 39234 - protein, 340 aa, Homo sapiens
MLSGSRAVPTPHRGSEELLKYMLHSPCVSLTMNGTYNTCGSSDLTWPPAIKLGFYAYLGVLLVLGLLLNSLALWVFCCRMQQWTETRIYMTNLAVADLCLLCTLPFVLHSLRDTSDTPLCQLSQGIYLTNRYMSISLVTAIAVDRYVAVRHPLRARGLRSPRQAAAVCAVLWVLVIGSLVARWLLGIQEGGFCFRSTRHNFNSMAFPLLGFYLPLAVVVFCSLKVVTALAQRPPTDVGQAEATRKAARMVWANLLVFVVCFLPLHVGLTVRLAVGWNACALLETIRRALYITSKLSDANCCLDAICYYYMAKEFQEASALAVAPSAKAHKSQDSLCVTLA

SEQ ID NO: 39235 - protein, 375 aa, Homo sapiens
MANASEPGGSGGGEAAALGLKLATLSLLLCVSLAGNVLFALLIVRERSLHRAPYYLLLDLCLADGLRALACLPAVMLAARRAAAAAGAPPGALGCKLLAFLAALFCFHAAFLLLGVGVTRYLAIAHHRFYAERLAGWPCAAMLVCAAWALALAAAFPPVLDGGGDDEDAPCALEQRPDGAPGALGFLLLLAVVVGATHLVYLRLLFFIHDRRKMRPARLVPAVSHDWTFHGPGATGQAAANWTAGFGRGPTPPALVGIRPAGPGRGARRLLVLEEFKTEKRLCKMFYAVTLLFLLLWGPYVVASYLRVLVRPGAVPQAYLTASVWLTFAQAGINPVVCFLFNRELRDCFRAQFPCCQSPRTTQATHPCDLKGIGL

SEQ ID NO: 39236 - protein, 167 aa, Homo sapiens
MEETYTDSLDPEKLLQCPYDKNHQIRACRFPYHLIKCRKNHPDVASKLATCPFNARHQVPRAEISHHISSCDDRSCIEQDVVNQTRSLRQETLAESTWQCPPCDEDWDKDLWEQTSTPFVWGTTHYSDNNSPASNIVTEHKNNLASGMRVPKSLPYVLPWKNNGNAQ

SEQ ID NO: 39237 - protein, 2190 aa, Homo sapiens
MNRAKPTTVRRPSAAAKPSGHPPPGDFIALGSKGQANESKTASTLLKPAPSGLPSERKRDAAAALSSASALTGLTKRPKLSSTPPLSALGRLAEAAVAEKRAISPSIKEPSVVPIEVLPTVLLDEIEAAELEGNDDRIEGVLCGAVKQLKVTRAKPDSTLYLSLMYLAKIKPNIFATEGVIEALCSLLRRDASINFKAKGNSLVSVLACNLLMAAYEEDENWPEIFVKVYIEDSLGERIWVDSPHCKTFVDNIQTAFNTRMPPRSVLLQGEAGRVAGDLGAGSSPHPSLTEEEDSQTELLIAEEKLSPEQEGQLMPRYEELAESVEEYVLDMLRDQLNRRQPIDNVSRNLLRLLTSTCGYKEVRLLAVQKLEMWLQNPKLTRPAQDLLMSVCMNCNTHGSEDMDVISHLIKIRLKPKVLLNHFMLCIRELLSAHKDNLGTTIKLVIFNELSSARNPNNMQVLYTALQHSSELAPKFLAMVFQDLLTNKDDYLRASRALLREIIKQTKHEINFQAFCLGLMQERKEPQYLEMEFKERFVVHITDVLAVSMMLGITAQVKEAGIAWDKGEKRNLEVLRSFQNQIAAIQRDAVWWLHTVVPSISKLAPKDYVHCLHKVLFTEQPETYYKWDNWPPESDRNFFLRLCSEVPILEDTLMRILVIGLSRELPLGPADAMELADHLVKRAAAVQADDVEVLKVGRTQLIDAVLNLCTYHHPENIQLPPGYQPPNLAISTLYWKAWPLLLVVAAFNPENIGLAAWEEYPTLKMLMEMVMTNNYSYPPCTLTDEETRTEMLNRELQTAQREKQEILAFEGHLAAASTKQTITESSSLLLSQLTSLDPQGPPRRPPPHILDQVKSLNQSLRLGHLLCRSRNPDFLLHIIQRQASSQSMPWLADLVQSSEGSLDVLPVQCLCEFLLHDAVDDAASGEEDDEGESKEQKAKKRQRQQKQRQLLGRLQDLLLGPKADEQTTCEVLDYFLRRLGSSQVASRVLAMKGLSLVLSEGSLRDGEEKEPPMEEDVGDTDVLQGYQWLLRDLPRLPLFDSVRSTTALALQQAIHMETDPQTISAYLIYLSQHTPVEEQAQHSDLALDVARLVVERSTIMSHLFSKLSPSAASDAVLSALLSIFSRYVRRMRQSKEGEEVYSWSESQDQVFLRWSSGETATMHILVVHAMVILLTLGPPRADDSEFQALLDIWFPEEKPLPTAFLVDTSEEALLLPDWLKLRMIRSEVLRLVDAALQDLEPQQLLLFVQSFGIPVSSMSKLLQFLDQAVAHDPQTLEQNIMDKNYMAHLVEVQHERGASGGQTFHSLLTASLPPRRDSTEAPKPKSSPEQPIGQGRIRVGTQLRVLGPEDDLAGMFLQIFPLSPDPRWQSSSPRPVALALQQALGQELARVVQGSPEVPGITVRVLQALATLLSSPHGGALVMSMHRSHFLACPLLRQLCQYQRCVPQDTGFSSLFLKVLLQMLQWLDSPGVEGGPLRAQLRMLASQASAGRRLSDVRGGLLRLAEALAFRQDLEVVSSTVRAVIATLRSGEQCSVEPDLISKVLQGLIEVRSPHLEELLTAFFSATADAASPFPACKPVVVVSSLLLQEEEPLAGGKPGADGGSLEAVRLGPSSGLLVDWLEMLDPEVVSSCPDLQLRLLFSRRKGKGQAQVPSFRPYLLTLFTHQSSWPTLHQCIRVLLGKSREQRFDPSASLDFLWACIHVPRIWQGRDQRTPQKRREELVLRVQGPELISLVELILAEAETRSQDGDTAACSLIQARLPLLLSCCCGDDESVRKVTEHLSGCIQQWGDSVLGRRCRDLLLQLYLQRPELRVPVPEVLLHSEGAASSSVCKLDGLIHRFITLLADTSDSRALENRGADASMACRKLAVAHPLLLLRHLPMIAALLHGRTHLNFQEFRQQNHLSCFLHVLGLLELLQPHVFRSEHQGALWDCLLSFIRLLLNYRKSSRHLAAFINKFVQFIHKYITYNAPAAISFLQKHADPLHDLSFDNSDLVMLKSLLAGLSLPSRDDRTDRGLDEEGEEESSAGSLPLVSVSLFTPLTAAEMAPYMKRLSRGQTVEDLLEVLSDIDEMSRRRPEILSFFSTNLQRLMSSAEECCRNLAFSLALRSMQNSPSIAAAFLPTFMYCLGSQDFEVVQTALRNLPEYALLCQEHAAVLLHRAFLVGMYGQMDPSAQISEALRILHMEAVM

SEQ ID NO: 39238 - protein, 97 aa, Homo sapiens
MGWEQETQKSRPWNQVEGRQPGHDPEQDTCSTSPFAMSKSSLRPPKKLMPCASCTAAEPDGFPWLCYSHSWKCCLTESSGHPGRMDVVYPLLYRWGN

SEQ ID NO: 39239 - protein, 232 aa, Homo sapiens
MGPLALPAWLQPRYRKNAYLFIYYLIQFCGHSWIFTNMTVRFFSFGKDSMVDTFYAIGLVMRLCQSVSLLELLHIYVGIESNHLLPRFLQLTERIIILFVVITSQEEVQEKYVVCVLFVFWNLLDMVRYTYSMLSVIGISYAVLTWLSQTLWMPIYPLCVLAEAFAIYQSLPYFESFGTYSTKLPFDLSIYFPYVLKIYLMMLFIGMYFTYSHLYSERRDILGIFPIKKKKM

SEQ ID NO: 39240 - protein, 130 aa, Homo sapiens
MSGRGKQGGKARAKAKSRSSRAGLQFPVGRVHRLLRKGNYSERVGAGAPVYLAAVLEYLTAEILELAGNAARDNKKTRIIPRHLQLAIRNDEELNKLLGRVTIAQGGVLPNIQAVLLPKKTESHHKAKGK

SEQ ID NO: 39241 - protein, 304 aa, Homo sapiens
MSLTVVSMACVGFFLLQGAWPHEGVHRKPSLLAHPGRLVKSEETVILQCWSDVMFEHFLLHREGMFNDTLRLIGEHHDGVSKANFSISRMKQDLAGTYRCYGSVTHSPYQLSAPSDPLDIVIIGLYEKPSLSAQPGPTVLAGENVTLSCSSRSSYDMYHLSREGEAHERRLPAGTKVNGTFQANFPLGPATHGGTYRCFGSFRDSPYEWSKSSDPLLVSVTGNPSNSWPSPTEPSSETGNPRHLHVLIGTSVVKIPFTILLFFLLHRWCSDKKNAAVMDQEPAGNRTVNSEDSDEQDHQEVSYA

SEQ ID NO: 39242 - protein, 1923 aa, Homo sapiens
MGNSYAGQLKSARFEEALHNSIEASLRCSSVVPRPIFSQLYLDPDQHPFSSADVKPKVEDLDKDLVNRYTQNGSLDFSNNLTVNEMEDDEDDEEMSDSNSPPIPYSQKPAPEGSCTTDGFCQAGKDLRLVSLCMEQIDIPAGFLLVGAKSPNLPEHILVCAVDKRFLPDDHGKNALLGFSGNCIGCGERGFRYFTEFSNHINLKLTTQPKKQKHLKYYLVRSSQGVLSKGPLICWKECRSRQSSASCHSIKPSSSVSSTVTPENGTTNGYKSGFTQTDAANGNSSHGGKGSASSSTPAHTGNYSLSPRPSYASGDQATMFISGPPKKRHRGWYPGSPLPQPGLVVPVPTVRPLSRTEPLLSAPVPQTPLTGILQPRPIPAGETVIVPENLLSNSGVRPVILIGYGTLPYFYGNVGDIVVSPLLVNCYKIPQLENKDLEKLGLTGSQFLSVENMILLTIQYLVRLGPDQVPLREEFEQIMLKAMQEFTLRERALQIGAQCVPVSPGQLPWLARLIASVSQDLVHVVVTQNSLAEGISETLRTLSEMRHYQRLPDYVVVICASKIRGNEFCVVVLGQHQSRALAESMLTTSEFLKEISYELITGKVSFLASHFKTTSLGDDLDKLLEKMQQRRGDSVVTPFDGDLNECVSPQEAAAMIPTQNLDLDNETFHIYQPQLTVARKLLSQVCAIADSGSQSLDLGHFSKVDFIIIVPRSEVLVQQTLQRIRQSGVLVDLGLEENGTAHQRAEKYVVRLDNEIQTKFEVFMRRVKQNPYTLFVLVHDNSHVELTSVISGSLSHSEPSHGLADRVINCREVLEAFNLLVLQVSSFPYTLQTQQSRISSSNEVHWIQLDTGEDVGCEEKLYFGLSEYSKSLQWGITSPLLRCDETFEKMVNTLLERYPRLHSMVVRCYLLIQQYSEALMALTTMASLRDHSTPETLSIMDDLISSPGKNKSGRGHMLIIRVPSVQLAMLAKERLQEVRDKLGLQYRFEIILGNPATELSVATHFVARLKSWRGNEPEEWIPRTYQDLDGLPCIVILTGKDPLGETFPRSLKYCDLRLIDSSYLTRTALEQEVGLACCYVSKEVIRGPTVALDLSGKEQERAAVSENDSDELLIDLERPQSNSSAVTGTSGSIMENGVSSSSTADKSQKQSLTPSFQSPATSLGLDEGVSASSAGAGAGETLKQECDSLGPQMASSTTSKPSSSSSGPRTLPWPGQPIRGCRGPQAALPPVVILSKAAYSLLGSQKSGKLPSSSSLLPHADVAWVSSLRPLLNKDMSSEEQSLYYRQWTLARQHHADYSNQLDPASGTRNFHPRRLLLTGPPQVGKTGSYLQFLRILFRMLIRLLEVDVYDEEEINTDHNESSEVSQSEGEPWPDIESFSKMPFDVSVHDPKYSLMSLVYTEKLAGVKQEVIKESKVEEPRKRETVSIMLTKYAAYNTFHHCEQCRQYMDFTSASQMSDSTLHAFTFSSSMLGEEVQLYFIIPKSKESHFVFSKQGKHLESMRLPLVSDKNLNAVKSPIFTPSSGRHEHGLLNLFHAMEGISHLHLLVVKEYEMPLYRKYWPNHIMLVLPGMFNNAGVGAARFLIKELSYHNLELERNRLEELGIKRQCVWPFIVMMDDSCVLWNIHSVQEPSSQPMEVGVSSKNVSLKTVLQHIEATPKIVHYAILGIQKWSSKLTSQSLKAPFSRCHVHDFILLNTDLTQNVQYDFNRYFCEDADFNLRTNSSGLLICRFNNFSLMKKHVQVGGQRDFIIKPKIMVSESLAPILPLQYICAPDSEHTLLAAPAQFLLEKFLQHASYKLFPKAIHNFRSPVLAIDCYLNIGPEVAICYISSRPHSSNVNCEGVFFSGLLLYLCDSFVGADLKKFKFLKGATLCVICQDRSSLRQTIVRLELEDEWQFRLRDEFQTANSSDDKPLYFLTGRHV

SEQ ID NO: 39243 - protein, 1814 aa, Homo sapiens
MGNSYAGQLKSARFEEALHNSIEASLRCSSVVPRPIFSQLYLDPDQHPFSSADVKPKVEDLDKDLVNRYTQNGSLDFSNNLTVNEMEDDEDDEEMSDSNSPPIPYSQKPAPEGSCTTDGFCQAGKDLRLVSLCMEQIDIPAGFLLVGAKSPNLPEHILVCAVDKRFLPDDHGKNALLGFSGNCIGCGERGFRYFTEFSNHINLKLTTQPKKQKHLKYYLVRSSQGVLSKGPLICWKECRSRQSSASCHSIKPSSSVSSTVTPENGTTNGYKSGFTQTDAANGNSSHGGKGSASSSTPAHTGNYSLSPRPSYASGDQATMFISGPPKKRHRGWYPGSPLPQPGLVVPVPTVRPLSRTEPLLSAPVPQTPLTGILQPRPIPAGETVIVPENLLSNSGVRPVILIGYGTLPYFYGNVGDIVVSPLLVNCYKIPQLENKDLEKLGLTGSQFLSVENMILLTIQYLVRLGQHQSRALAESMLTTSEFLKEISYELITGKVSFLASHFKTTSLGDDLDKLLEKMQQRRGDSVVTPFDGDLNECVSPQEAAAMIPTQNLDLDNETFHIYQPQLTVARKLLSQVCAIADSGSQSLDLGHFSKVDFIIIVPRSEVLVQQTLQRIRQSGVLVDLGLEENGTAHQRAEKYVVRLDNEIQTKFEVFMRRVKQNPYTLFVLVHDNSHVELTSVISGSLSHSEPSHGLADRVINCREVLEAFNLLVLQVSSFPYTLQTQQSRISSSNEVHWIQLDTGEDVGCEEKLYFGLSEYSKSLQWGITSPLLRCDETFEKMVNTLLERYPRLHSMVVRCYLLIQQYSEALMALTTMASLRDHSTPETLSIMDDLISSPGKNKSGRGHMLIIRVPSVQLAMLAKERLQEVRDKLGLQYRFEIILGNPATELSVATHFVARLKSWRGNEPEEWIPRTYQDLDGLPCIVILTGKDPLGETFPRSLKYCDLRLIDSSYLTRTALEQEVGLACCYVSKEVIRGPTVALDLSGKEQERAAVSENDSDELLIDLERPQSNSSAVTGTSGSIMENGVSSSSTADKSQKQSLTPSFQSPATSLGLDEGVSASSAGAGAGETLKQECDSLGPQMASSTTSKPSSSSSGPRTLPWPGQPIRGCRGPQAALPPVVILSKAAYSLLGSQKSGKLPSSSSLLPHADVAWVSSLRPLLNKDMSSEEQSLYYRQWTLARQHHADYSNQLDPASGTRNFHPRRLLLTGPPQVGKTGSYLQFLRILFRMLIRLLEVDVYDEEEINTDHNESSEVSQSEGEPWPDIESFSKMPFDVSVHDPKYSLMSLVYTEKLAGVKQEVIKESKVEEPRKRETVSIMLTKYAAYNTFHHCEQCRQYMDFTSASQMSDSTLHAFTFSSSMLGEEVQLYFIIPKSKESHFVFSKQGKHLESMRLPLVSDKNLNAVKSPIFTPSSGRHEHGLLNLFHAMEGISHLHLLVVKEYEMPLYRKYWPNHIMLVLPGMFNNAGVGAARFLIKELSYHNLELERNRLEELGIKRQCVWPFIVMMDDSCVLWNIHSVQEPSSQPMEVGVSSKNVSLKTVLQHIEATPKIVHYAILGIQKWSSKLTSQSLKAPFSRCHVHDFILLNTDLTQNVQYDFNRYFCEDADFNLRTNSSGLLICRFNNFSLMKKHVQVGGQRDFIIKPKIMVSESLAPILPLQYICAPDSEHTLLAAPAQFLLEKFLQHASYKLFPKAIHNFRSPVLAIDCYLNIGPEVAICYISSRPHSSNVNCEGVFFSGLLLYLCDSFVGADLKKFKFLKGATLCVICQDRSSLRQTIVRLELEDEWQFRLRDEFQTANSSDDKPLYFLTGRHV

SEQ ID NO: 39244 - protein, 747 aa, Homo sapiens
MGNSYAGQLKSARFEEALHNSIEASLRCSSVVPRPIFSQLYLDPDQHPFSSADVKPKVEDLDKDLVNRYTQNGSLDFSNNLTVNEMEDDEDDEEMSDSNSPPIPYSQKPAPEGSCTTDGFCQAGKDLRLVSLCMEQIDIPAGFLLVGAKSPNLPEHILVCAVDKRFLPDDHGKNALLGFSGNCIGCGERGFRYFTEFSNHINLKLTTQPKKQKHLKYYLVRSSQGVLSKGPLICWKECRSRQSSASCHSIKPSSSVSSTVTPENGTTNGYKSGFTQTDAANGNSSHGGKGSASSSTPAHTGNYSLSPRPSYASGDQATMFISGPPKKRHRGWYPGSPLPQPGLVVPVPTVRPLSRTEPLLSAPVPQTPLTGILQPRPIPAGETVIVPENLLSNSGVRPVILIGYGTLPYFYGNVGDIVVSPLLVNCYKIPQLENKDLEKLGLTGSQFLSVENMILLTIQYLVRLGPDQVPLREEFEQIMLKAMQEFTLRERALQIGAQCVPVSPGQLPWLARLIASVSQDLVHVVVTQNSLAEGISETLRTLSEMRHYQRLPDYVVVICASKIRGNEFCVVVLGQHQSRALAESMLTTSEFLKEISYELITGKVSFLASHFKTTSLGDDLDKLLEKMQQRRGDSVVTPFDGDLNECVSPQEAAAMIPTQNLDLDNETFHIYQPQLTVARKLLSQVCAIADSGSQSLDLGHFSKVDFIIIVPRSEVLVQQTLQRIRQSGSSPGSHIAFSYVLFISCNL

SEQ ID NO: 39245 - protein, 205 aa, Homo sapiens
MAAAAGGAASRRGAGRPCPFSIEHILSSLPERSLPARAACPPQPAGRQSPAKPEEPGAPEAAPCACCCCCGPRAAPCGPPEAAAGLGARLAWPLRLGPAVPLSLGAPAGGSGALPGAVGPGSQRRTRRHRTIFSEEQLQALEALFVQNQYPDVSTRERLAGRIRLREERVEVWFKNRRAKWRHQKRASASARLLPGVKKSPKGSC

SEQ ID NO: 39246 - protein, 261 aa, Homo sapiens
MQLVILRVTIFLPWCFAVPVPPAADHKGWDFVEGYFHQFFLTKKESPLLTQETQTQLLQQFHRNGTDLLDMQMHALLHQPHCGVPDGSDTSISPGRCKWNKHTLTYRIINYPHDMKPSAVKDSIYNAVSIWSNVTPLIFQQVQNGDADIKVSFWQWAHEDGWPFDGPGGILGHAFLPNSGNPGVVHFDKNEHWSASDTGYNLFLVATHEIGHSLGLQHSGNQSSIMYPTYWYHDPRTFQLSADDIQRIQHLYGEKCSSDIP

SEQ ID NO: 39247 - protein, 950 aa, Homo sapiens
MLSSWQGGPRPRQLLLWLLILAAWETGSGQLHYSVPEEAKHGTFVGRIAQDLGLELAELVPRLFRVASKRHGDLLEVNLQNGILFVNSRIDREELCGRSAECSIHLEVIVDRPLQVFHVEVKVRDINDNPPIFPESKKRIIIAESRPPETRFPLDGASDADIGVNSALTYRLDPNDYFTLDAQNSLEQMSSLSLVLRKTLDREEIQEHSLLLTASDGGKPELTGTVQLLITILDVNDNAPEFYQSVYKVTVLENAFNGTLVIKLNATDPDDGTNGDIVYSFRRPVWPAVVYAFTINPNNGEIRTKGKLDFEEKKLYEISVEAVDKGNIPMAGHCTLLVEVLDVNDNAPEVTITSLSLPIREDTQPSAIIALISVSDRDSGSNGQVTCTLTPHVPFKLVSTYKNYYSLVLDSALDRESVSAYELVVTARDGGSPSLWATASVSVGVADVNDNAPAFAQPEYTVFVKENNPPGCHIFTVSAQDADAQENALVSYSLVERRVGERALSSYVSVHAESGKVYALQPLDHEELELLQFQVSARDSGVPPLGSNVTLQVFVLDENDNAPALLTPGAGSAGGTVSELMPRSVGAGHVVAKVRAVDADSGYNAWLSYELQLAAVGARIPFRVGLYTGEISTTRPLDEVDAPHHRLLVLVKDHGEPALTATATVLLSLVESGQAPQASSRASAGAVGPEAALVDVNVYLIIAICAVSSLLVLTLLLYTALRCSAPPTEGACAPGKPTLVCSSAAGSWSYSQQRRPRVCSGEGPHKTDLMAFSPSLPPCLGSAEGTGQREEDSECLKEPRQPNPDWRYSASLRAGMHSSVHLEEAGILRAGPGGPDQQWPTVSSATPEPEAGEVSPPVGAGVNSNSWTFKYGPGNPKQSGPGELPDKFIIPGSPAIISIRQEPTNSQIDKSDFITFGKKEETKKKKKKKKGNKTQEKKEKGNSTTDNSDQ

SEQ ID NO: 39248 - protein, 807 aa, Homo sapiens
MLSSWQGGPRPRQLLLWLLILAAWETGSGQLHYSVPEEAKHGTFVGRIAQDLGLELAELVPRLFRVASKRHGDLLEVNLQNGILFVNSRIDREELCGRSAECSIHLEVIVDRPLQVFHVEVKVRDINDNPPIFPESKKRIIIAESRPPETRFPLDGASDADIGVNSALTYRLDPNDYFTLDAQNSLEQMSSLSLVLRKTLDREEIQEHSLLLTASDGGKPELTGTVQLLITILDVNDNAPEFYQSVYKVTVLENAFNGTLVIKLNATDPDDGTNGDIVYSFRRPVWPAVVYAFTINPNNGEIRTKGKLDFEEKKLYEISVEAVDKGNIPMAGHCTLLVEVLDVNDNAPEVTITSLSLPIREDTQPSAIIALISVSDRDSGSNGQVTCTLTPHVPFKLVSTYKNYYSLVLDSALDRESVSAYELVVTARDGGSPSLWATASVSVGVADVNDNAPAFAQPEYTVFVKENNPPGCHIFTVSAQDADAQENALVSYSLVERRVGERALSSYVSVHAESGKVYALQPLDHEELELLQFQVSARDSGVPPLGSNVTLQVFVLDENDNAPALLTPGAGSAGGTVSELMPRSVGAGHVVAKVRAVDADSGYNAWLSYELQLAAVGARIPFRVGLYTGEISTTRPLDEVDAPHHRLLVLVKDHGEPALTATATVLLSLVESGQAPQASSRASAGAVGPEAALVDVNVYLIIAICAVSSLLVLTLLLYTALRCSAPPTEGACAPGKPTLVCSSAAGSWSYSQQRRPRVCSGEGPHKTDLMAFSPSLPPCLGSAEGTGQREEDSECLKEVSLYFKKLS

SEQ ID NO: 39249 - protein, 1641 aa, Homo sapiens
MTESSMKKLASTLLDAITDKDPLVQEQVCSALCSLGEARPVETLRACEEYLRQHDKLAHPYRAAVLRAMERVLSSRASELDKDTASTIILLASSEMTKTKDLVWDWQQAASGVLVAVGRQFISKVMEELLRRLHPGTLPHCAVLHTLASLSVANAFGVVPFLPSVLSSLLPVLGVAKQDTVRVAFCSALQRFSEGALEYLANLDRAPDPTVRKDAFATDIFSAYDVLFHQWLQSREAKLRLAVVEALGPMSHLLPSERLEEQLPKLLPGILALYKKHAETFYLSKSLGQILEAAVSVGSRTLETQLDALLAALHSQICVPVESSSPLVMSNQKEVLRCFTVLACSSPDRLLAFLLPRLDTSNERTRVGTLQVVRHVINSAAAQMEDKKPFILSSMRLPLLDTNSKVKRAVVQVISAMAHHGYLEQPGGEAMIEYIVQQCALPPEQEPEKPGPGSKDPKADSVRAISVRTLYLVSTTVDRMSHVLWPYLLQFLTPVRFTGALTPLCRSLVHLAQKRQEAGADAFLIQYDAHASLPSPYAVTGRLLVVSSSPYLGDGRGAAALRLLSVLHPNIHPLLGQHWETTVPLLLGYLDEHTEETLPQEEWEEKLLMFLRDTLAIISDNAWICQLSLELCRQLPCYDEAPQEKNFLYKCIGTTLGAASSKEVVRKHLQELLETARYQEEAEREGLACCFGICAISHLEDTLAQLEDFVRSEVFRKSIGILNIFKDRSENEVEKVKSALILCYGHVAARAPRELVLAKVESDILRNICQHFSTKVLGIKVETKDPALKLCLVQSVCMVSRAICSSTQAGSFHFTRKAELVAQMMEFIRAEPPDSLRTPIRKKAMLTCTYLVSVEPALDEQARADVIHGCLHSIMALLPEPKEEDGGCQKSLYLETLHALEDLLTSLLQRNMTPQGLQIMIEHLSPWIKSPRGHERARALGLSALLLRYFLEHLRVSALVPFHNLGLLIGLFSPRCADLWPATRQEAVDCVYSLLYLQLGYEGFSRDYRDDVAERLLSLKDGLVHPDPAILFHTCHSVGQIIAKRLPPDQLISLLLTMFEALGDPEKNCSRAATVMINCLLQERGGVLQEKVPEIVSVLRSKLQEAQGEHVLPAAQHSVYLLATQHCAAVVSSLLGSPLPLDSHTCMLWRALAVEPRLAAQVLGLLLEKMSRDVPFKESRAFLLGRTPDRVATLLPLSATCALFEVMSTPAAGPAVLELYPQLFVVLLLRVSCTVGVQLPRNLQAQERRGASPALATRNLEPCSSAVDTLRSMLLRSGSEDVVQRMDLEGGWELLRTSAGHEEGATRLARAMAEHAGPRLPLVLKTLACTHSSAYENQRVTTTAFLAELLNSNVANDLMLLDSLLESLAARQKDTCASVRRLVLRGLANLASGCPDKVRTHGPQLLTAMIGGLDDGDNPHSPVALEAMLGLARLVHLVESWDLRSGLLHVAIRIRPFFDSEKMEFRTASIRLFGHLNKVCHGDCEDVFLDQVVGGLAPLLLHLQDPQATVASACRFALRMCGPNLACEELSAAFQKHLQEGRALHFGEFLNTTCKHLMHHFPDLLGRLLTTCLFYFKSSWENVRAAAPLFTGFLVLHSEPRQQPQVDLDQLIAALQILLKDPAPEVRTRAAEALGRLVKLA

SEQ ID NO: 39250 - protein, 1147 aa, Homo sapiens
MTESSMKKLASTLLDAITDKDPLVQEQVCSALCSLGEARPVETLRACEEYLRQHDKLAHPYRAAVLRAMERVLSSRASELDKDTASTIILLASSEMTKTKDLVWDWQQAASGVLVAVGRQFISKVMEELLRRLHPGTLPHCAVLHTLASLSVANAFGVVPFLPSVLSSLLPVLGVAKQDTVRVAFCSALQRFSEGALEYLANLDRAPDPTVRKDAFATDIFSAYDVLFHQWLQSREAKLRLAVVEALGPMSHLLPSERLEEQLPKLLPGILALYKKHAETFYLSKSLGQILEAAVSVGSRTLETQLDALLAALHSQICVPVESSSPLVMSNQKEVLRCFTVLACSSPDRLLAFLLPRLDTSNERTRVGTLQVVRHVINSAAAQMEDKKPFILSSMRLPLLDTNSKVKRAVVQVISAMAHHGYLEQPGGEAMIEYIVQQCALPPEQEPEKPGPGSKDPKADSVRAISVRTLYLVSTTVDRMSHVLWPYLLQFLTPVRFTGALTPLCRSLVHLAQKRQEAGADAFLIQYDAHASLPSPYAVTGRLLVVSSSPYLGDGRGAAALRLLSVLHPNIHPLLGQHWETTVPLLLGYLDEHTEETLPQEEWEEKLLMFLRDTLAIISDNAWICQLSLELCRQLPCYDEAPQEKNFLYKCIGTTLGAASSKEVVRKHLQELLETARYQEEAEREGLACCFGICAISHLEDTLAQLEDFVRSEVFRKSIGILNIFKDRSENEVEKVKSALILCYGHVAARAPRELVLAKVESDILRNICQHFSTKDPALKLCLVQSVCMVSRAICSSTQAGSFHFTRKAELVAQMMEFIRAEPPDSLRTPIRKKAMLTCTYLVSVEPALDEQARADVIHGCLHSIMALLPEPKEEDGGCQKSLYLETLHALEDLLTSLLQRNMTPQGLQIMIEHLSPWIKSPRGHERARALGLSALLLRYFLEHLRVSALVPFHNLGLLIGLFSPRCADLWPATRQEAVDCVYSLLYLQLGYEGFSRDYRDDVAERLLSLKDGLVHPDPAILFHTCHSVGQIIAKRLPPDQLISLLLTMFEALGDPEKNCSRAATVMINCLLQERGGVLQEKVPEIVSVLRSKLQEAQGEHVLPAAQHSVYLLATQHCAAVVSSLLGSPLPLDRYPAQTPGLGVPLE

SEQ ID NO: 39251 - protein, 615 aa, Homo sapiens
MRIIAKRLPPDQLISLLLTMFEALGDPEKNCSRAATVMINCLLQERGGVLQEKVPEIVSVLRSKLQEAQGEHVLPAAQHSVYLLATQHCAAVVSSLLGSPLPLDSHTCMLWRALAVEPRLAAQVLGLLLEKMSRDVPFKESRAFLLGRTPDRVATLLPLSATCALFEVMSTPAAGPAVLELYPQLFVVLLLRVSCTVGVQLPRNLQAQERRGASPALATRNLEPCSSAVDTLRSMLLRSGSEDVVQRMDLEGGWELLRTSAGHEEGATRLARAMAEHAGPRLPLVLKTLACTHSSAYENQRVTTTAFLAELLNSNVANDLMLLDSLLESLAARQKDTCASVRRLVLRGLANLASGCPDKVRTHGPQLLTAMIGGLDDGDNPHSPVALEAMLGLARLVHLVESWDLRSGLLHVAIRIRPFFDSEKMEFRTASIRLFGHLNKVCHGDCEDVFLDQVVGGLAPLLLHLQDPQATVASACRFALRMCGPNLACEELSAAFQKHLQEGRALHFGEFLNTTCKHLMHHFPDLLGRLLTTCLFYFKSSWENVRAAAPLFTGKHHPLPHPHAARQPRLMPPLHRVPGAALGAQAAAAGGPGPAHCGAPDPAEGPGPRGADEGC

SEQ ID NO: 39252 - protein, 422 aa, Homo sapiens
MTESSMKKLASTLLDAITDKDPLVQEQVCSALCSLGEARPVETLRACEEYLRQHDKLAHPYRAAVLRAMERVLSSRASELDKDTASTIILLASSEMTKTKDLVWDWQQAASGVLVAVGRQFISKVMEELLRRLHPGTLPHCAVLHTLASLSVANAFGVVPFLPSVLSSLLPVLGVAKQDTVRVAFCSALQRFSEGALEYLANLDRAPDPTVRKDAFATDIFSAYDVLFHQWLQSREAKLRLAVVEALGPMSHLLPSERLEEQLPKLLPGILALYKKHAETFYLSKSLGQILEAAVSVGSRTLETQLDALLAALHSQICVPVESSSPLVMSNQKEVLRCFTVLACSSPDRLLAFLLPRLDTSNERTRVGTLQVVRHVINSAGSTNTRITLMLPSAVTRLKHEDCPARAAPQPADLTAAPASVA

SEQ ID NO: 39253 - protein, 378 aa, Homo sapiens
MTESSMKKLASTLLDAITDKDPLVQEQVCSALCSLGEARPVETLRACEEYLRQHDKLAHPYRAAVLRAMERVLSSRASELDKDTASTIILLASSEMTKTKDLVWDWQQAASGVLVAVGRQFISKVMEELLRRLHPGTLPHCAVLHTLASLSVANAFGVVPFLPSVLSSLLPVLGVAKQDTVRVAFCSALQRFSEGALEYLANLDRAPDPTVRKDAFATDIFSAYDVLFHQWLQSREAKLRLAVVEALGPMSHLLPSERLEEQLPKLLPGILALYKKHAETFYLSKSLGQILEAAVSVGSRTLETQLDALLAALHSQVGGGRQGAGPGSAHPSVGSCWTRGAESKLGWMAQPRGAEDWAFPEGHSGDFLAMWRCSCPAQ

SEQ ID NO: 39254 - protein, 340 aa, Homo sapiens
MERVLSSRASELDKDTASTIILLASSEMTKTKDLVWDWQQAASGVLVAVGRQFISKVMEELLRRLHPGTLPHCAVLHTLASLSVANAFGVVPFLPSVLSSLLPVLGVAKQDTVRVAFCSALQRFSEGALEYLANLDRAPDPTVRKDAFATDIFSAYDVLFHQWLQSREAKLRLAVVEALGPMSHLLPSERLEEQLPKLLPGILALYKKHAETFYLSKSLGQILEAAVSVGSRTLETQLDALLAALHSQICVPVESSSPLVMSNQKEVLRCFTVLACSSPDRLLAFLLPRLDTSNERTRVGTLQVVRHVINSAGECLHASLAATPGHVQDGAGPGRLCPSK

SEQ ID NO: 39255 - protein, 610 aa, Homo sapiens
MTESSMKKLASTLLDAITDKDPLVQEQVCSALCSLGEARPVETLRACEEYLRQHDKLAHPYRAAVLRAMERVLSSRASELDKDTASTIILLASSEMTKTKDLVWDWQQAASGVLVAVGRQFISKVMEELLRRLHPGTLPHCAVLHTLASLSVANAFGVVPFLPSVLSSLLPVLGVAKQDTVRVAFCSALQRFSEGALEYLANLDRAPDPTVRKDAFATDIFSAYDVLFHQWLQSREAKLRLAVVEALGPMSHLLPSERLEEQLPKLLPGILALYKKHAETFYLSKSLGQILEAAVSVGSRTLETQLDALLAALHSQICVPVESSSPLVMSNQKEVLRCFTVLACSSPDRLLAFLLPRLDTSNERTRVGTLQVVRHVINSAAAQMEDKKPFILSSMRLPLLDTNSKVKRAVVQVISAMAHHGYLEQPGGEAMIEYIVQQCALPPEQEPEKPGPGSKDPKADSVRAISVRTLYLVSTTVDRMSHVLWPYLLQFLTPVRFTGALTPLCRSLVHLAQKRQEAGADAFLIQYDAHASLPSPYAVTGRLLVVSSSPYLGDGRGAAALRLLSVLHPNIHPLLGQHWETTVPLLLGYLDGEARVRMGCIALWGGQVSE

SEQ ID NO: 39256 - protein, 1030 aa, Homo sapiens
MAAAAAVEAAAPMGALWGLVHDFVVGQQEGPADQVAADVKSGNYTVLQVVEALGSSLENPEPRTRARAIQLLSQVLLHCHTLLLEKEVVHLILFYENRLKDHHLVIPSVLQGLKALSLCVALPPGLAVSVLKAIFQEVHVQSLPQVDRHTVYNIITNFMRTREEELKSLGADFTFGFIQVMDGEKDPRNLLVAFRIVHDLISRDYSLGPFVEELFEVTSCYFPIDFTPPPNDPHGIQREDLILSLRAVLASTPRFAEFLLPLLIEKVDSEVLSAKLDSLQTLNACCAVYGQKELKDFLPSLWASIRREVFQTASERVEAEGLAALHSLTACLSRSVLRADAEDLLDSFLSNILQDCRHHLCEPDMKLVWPSAKLLQAAAGASARACDSVTSNVLPLLLEQFHKHSQSSQRRTILEMLLGFLKLQQKWSYEDKDQRPLNGFKDQLCSLVFMALTDPSTQLQLVGIRTLTVLGAQPDLLSYEDLELAVGHLYRLSFLKEDSQSCRVAALEASGTLAALYPVAFSSHLVPKLAEELRVGESNLTNGDEPTQCSRHLCCLQALSAVSTHPSIVKETLPLLLQHLWQVNRGNMVAQSSDVIAVCQSLRQMAEKCQQDPESCWYFHQTAIPCLLALAVQASMPEKEPSVLRKVLLEDEVLAAMVSVIGTATTHLSPELAAQSVTHIVPLFLDGNVSFLPENSFPSRFQPFQDGSSGQRRLIALLMAFVCSLPRNVEIPQLNQLMRELLELSCCHSCPFSSTAAAKCFAGLLNKHPAGQQLDEFLQLAVDKVEAGLGSGPCRSQAFTLLLWVTKALVLRYHPLSSCLTARLMGLLSDPELGPAAADGFSLLMSDCTDVLTRAGHAEVRIMFRQRFFTDNVPALVQGFHAAPQDVKPNYLKGLSHVLNRLPKPVLLPELPTLLSLLLEALSCPDCVVQLSTLSCLQPLLLEAPQVMSLHVDTLVTKFLNLSSSPSMAVRIAALQCMHALTRLPTPVLLPYKPQVIRALAKPLDDKKRLVRKEAVSARGEWFLLGSPGS

SEQ ID NO: 39257 - protein, 318 aa, Homo sapiens
MAAAAAVEAAAPMGALWGLVHDFVVGQQEGPADQVAADVKSGNYTVLQVVEALGSSLENPEPRTRARAIQLLSQVLLHCHTLLLEKEVVHLILFYENRLKDHHLVIPSVLQGLKALSLCVALPPGLAVSVLKAIFQEVHVQSLPQVDRHTVYNIITNFMRTREEELKSLGADFTFGFIQVMDGEKDPRNLLVAFRIVHDLISRDYSLGPFVEELFEVTSCYFPIDFTPPPNDPHGIQREDLILSLRAVLASTPRFAEFLLPLLIEKVDSEVLSAKLDSLQTLNACCAVYGQKELKDFLPSLWASIRRETAGTTCVNRT

SEQ ID NO: 39258 - protein, 40 aa, Homo sapiens
MAAAAAVEAAAPMGALWGLVHDFVVGQQEGPADQVAAGPL

SEQ ID NO: 39259 - protein, 932 aa, Homo sapiens
MAAAAAVEAAAPMGALWGLVHDFVVGQQEGPADQVAADVKSGNYTVLQVVEALGSSLENPEPRTRARAIQLLSQVLLHCHTLLLEKEVVHLILFYENRLKDHHLVIPSVLQGLKALSLCVALPPGLAVSVLKAIFQEVHVQSLPQVDRHTVYNIITNFMRTREEELKSLGADFTFGFIQVMDGEKDPRNLLVAFRIVHDLISRDYSLGPFVEELFEVTSCYFPIDFTPPPNDPHGIQREDLILSLRAVLASTPRFAEFLLPLLIEKVDSEVLSAKLDSLQTLNACCAVYGQKELKDFLPSLWASIRRESSQRRTILEMLLGFLKLQQKWSYEDKDQRPLNGFKDQLCSLVFMALTDPSTQLQLVGIRTLTVLGAQPDLLSYEDLELAVGHLYRLSFLKEDSQSCRVAALEASGTLAALYPVAFSSHLVPKLAEELRVGESNLTNGDEPTQCSRHLCCLQALSAVSTHPSIVKETLPLLLQHLWQVNRGNMVAQSSDVIAVCQSLRQMAEKCQQDPESCWYFHQTAIPCLLALAVQASMPEKEPSVLRKVLLEDEVLAAMVSVIGTATTHLSPELAAQSVTHIVPLFLDGNVSFLPENSFPSRFQPFQDGSSGQRRLIALLMAFVCSLPRNVEIPQLNQLMRELLELSCCHSCPFSSTAAAKCFAGLLNKHPAGQQLDEFLQLAVDKVEAGLGSGPCRSQAFTLLLWVTKALVLRYHPLSSCLTARLMGLLSDPELGPAAADGFSLLMSDCTDVLTRAGHAEVRIMFRQRFFTDNVPALVQGFHAAPQDVKPNYLKGLSHVLNRLPKPVLLPELPTLLSLLLEALSCPDCVVQLSTLSCLQPLLLEAPQVMSLHVDTLVTKFLNLSSSPSMAVRIAALQCMHALTRLPTPVLLPYKPQVIRALAKPLDDKKRLVRKEAVSARGEWFLLGSPGS

SEQ ID NO: 39260 - protein, 1051 aa, Homo sapiens
MRGEPVSSHRPYPLPRSLVRVMAAAAAVEAAAPMGALWGLVHDFVVGQQEGPADQVAADVKSGNYTVLQVVEALGSSLENPEPRTRARAIQLLSQVLLHCHTLLLEKEVVHLILFYENRLKDHHLVIPSVLQGLKALSLCVALPPGLAVSVLKAIFQEVHVQSLPQVDRHTVYNIITNFMRTREEELKSLGADFTFGFIQVMDGEKDPRNLLVAFRIVHDLISRDYSLGPFVEELFEVTSCYFPIDFTPPPNDPHGIQREDLILSLRAVLASTPRFAEFLLPLLIEKVDSEVLSAKLDSLQTLNACCAVYGQKELKDFLPSLWASIRREVFQTASERVEAEGLAALHSLTACLSRSVLRADAEDLLDSFLSNILQDCRHHLCEPDMKLVWPSAKLLQAAAGASARACDSVTSNVLPLLLEQFHKHSQSSQRRTILEMLLGFLKLQQKWSYEDKDQRPLNGFKDQLCSLVFMALTDPSTQLQLVGIRTLTVLGAQPDLLSYEDLELAVGHLYRLSFLKEDSQSCRVAALEASGTLAALYPVAFSSHLVPKLAEELRVGESNLTNGDEPTQCSRHLCCLQALSAVSTHPSIVKETLPLLLQHLWQVNRGNMVAQSSDVIAVCQSLRQMAEKCQQDPESCWYFHQTAIPCLLALAVQASMPEKEPSVLRKVLLEDEVLAAMVSVIGTATTHLSPELAAQSVTHIVPLFLDGNVSFLPENSFPSRFQPFQDGSSGQRRLIALLMAFVCSLPRNVEIPQLNQLMRELLELSCCHSCPFSSTAAAKCFAGLLNKHPAGQQLDEFLQLAVDKVEAGLGSGPCRSQAFTLLLWVTKALVLRYHPLSSCLTARLMGLLSDPELGPAAADGFSLLMSDCTDVLTRAGHAEVRIMFRQRFFTDNVPALVQGFHAAPQDVKPNYLKGLSHVLNRLPKPVLLPELPTLLSLLLEALSCPDCVVQLSTLSCLQPLLLEAPQVMSLHVDTLVTKFLNLSSSPSMAVRIAALQCMHALTRLPTPVLLPYKPQVIRALAKPLDDKKRLVRKEAVSARGEWFLLGSPGS

SEQ ID NO: 39261 - protein, 987 aa, Homo sapiens
MAAAAAVEAAAPMGALWGLVHDFVVGQQEGPADQVAADVKSGNYTVLQVVEALGSSLENPEPRTRARAIQLLSQVLLHCHTLLLEKEVVHLILFYENRLKDHHLVIPSVLQGLKALSLCVALPPGLAVSVLKAIFQEVHVQSLPQVDRHTVYNIITNFMRTREEGPFVEELFEVTSCYFPIDFTPPPNDPHGIQREDLILSLRAVLASTPRFAEFLLPLLIEKVDSEVLSAKLDSLQTLNACCAVYGQKELKDFLPSLWASIRREVFQTASERVEAEGLAALHSLTACLSRSVLRADAEDLLDSFLSNILQDCRHHLCEPDMKLVWPSAKLLQAAAGASARACDSVTSNVLPLLLEQFHKHSQSSQRRTILEMLLGFLKLQQKWSYEDKDQRPLNGFKDQLCSLVFMALTDPSTQLQLVGIRTLTVLGAQPDLLSYEDLELAVGHLYRLSFLKEDSQSCRVAALEASGTLAALYPVAFSSHLVPKLAEELRVGESNLTNGDEPTQCSRHLCCLQALSAVSTHPSIVKETLPLLLQHLWQVNRGNMVAQSSDVIAVCQSLRQMAEKCQQDPESCWYFHQTAIPCLLALAVQASMPEKEPSVLRKVLLEDEVLAAMVSVIGTATTHLSPELAAQSVTHIVPLFLDGNVSFLPENSFPSRFQPFQDGSSGQRRLIALLMAFVCSLPRNVEIPQLNQLMRELLELSCCHSCPFSSTAAAKCFAGLLNKHPAGQQLDEFLQLAVDKVEAGLGSGPCRSQAFTLLLWVTKALVLRYHPLSSCLTARLMGLLSDPELGPAAADGFSLLMSDCTDVLTRAGHAEVRIMFRQRFFTDNVPALVQGFHAAPQDVKPNYLKGLSHVLNRLPKPVLLPELPTLLSLLLEALSCPDCVVQLSTLSCLQPLLLEAPQVMSLHVDTLVTKFLNLSSSPSMAVRIAALQCMHALTRLPTPVLLPYKPQVIRALAKPLDDKKRLVRKEAVSARGEWFLLGSPGS

SEQ ID NO: 39262 - protein, 1198 aa, Homo sapiens
MDEETRHSLECIQANQIFPRKQLIREDENLQVPFLELHGESTEFVGRAEDAIIALSNYRLHIKFKESLVNVPLQLIESVECRDIFQLHLTCKDCKVIRCQFSTFEQCQEWLKRLNNAIRPPAKIEDLFSFAYHAWCMEVYASEKEQHGDLCRPGEHVTSRFKNEVERMGFDMNNAWRISNINEKYKLCGSYPQELIVPAWITDKELESVSSFRSWKRIPAVIYRHQSNGAVIARCGQPEVSWWGWRNADDEHLVQSVAKACASDSRSSGSKLSTRNTSRDFPNGGDLSDVEFDSSLSNASGAESLAIQPQKLLILDARSYAAAVANRAKGGGCECPEYYPNCEVVFMGMANIHSIRRSFQSLRLLCTQMPDPGNWLSALESTKWLHHLSVLLKSALLVVHAVDQDQRPVLVHCSDGWDRTPQIVALAKLLLDPYYRTIEGFQVLVEMEWLDFGHKFADRCGHGENSDDLNERCPVFLQWLDCVHQLQRQFPCSFEFNEAFLVKLVQHTYSCLFGTFLCNNAKERGEKHTQERTCSVWSLLRAGNKAFKNLLYSSQSEAVLYPVCHVRNLMLWSAVYLPCPSPTTPVDDSCAPYPAPGTSPDDPPLSRLPKTRSYDNLTTACDNTVPLASRRCSDPSLNEKWQEHRRSLELSSLAGPGEDPLSADSLGKPTRVPGGAELSVAAGVAEGQMENILQEATKEESGVEEPAHRAGIEIQEGKEDPLLEKESRRKTPEASAIGLHQDPELGDAALRSHLDMSWPLFSQGISEQQSGLSVLLSSLQVPPRGEDSLEVPVEQFRIEEIAEGREEAVLPIPVDAKVGYGTSQSCSLLPSQVPFETRGPNVDSSTDMLVEDKVKSVSGPQGHHRSCLVNSGKDRLPQTMEPSPSETSLVERPQVGSVVHRTSLGSTLSLTRSPCALPLAECKEGLVCNGAPETENRASEQPPGLSTLQMYPTPNGHCANGEAGRSKDSLSRQLSAMSCSSAHLHSRNLHHKWLHSHSGRPSATSSPDQPSRSHLDDDGMSVYTDTIQQRLRQIESGHQQEVETLKKQVQELKSRLESQYLTSSLHFNGDFGDEVTSIPDSESNLDQNCLSRCSTEIFSEASWEQVDKQDTEMTRWLPDHLAAHCYACDSAFWLASRKHHCRNCGNVFCSSCCNQKVPVPSQQLFEPSRVCKSCYSSLHPTSSSIDLELDKPIAATSN

SEQ ID NO: 39263 - protein, 1170 aa, Homo sapiens
MDEETRHSLECIQANQIFPRKQLIREDENLQVPFLELHGESTEFVGRAEDAIIALSNYRLHIKFKESLVNVPLQLIESVECRDIFQLHLTCKDCKVIRCQFSTFEQCQEWLKRLNNAIRPPAKIEDLFSFAYHAWCMEVYASEKEQHGDLCRPGEHVTSRFKNEVERMGFDMNNAWRISNINEKYKLCGSYPQELIVPAWITDKELESVSSFRSWKRIPAVIYRHQSNGAVIARCGQPEVSWWGWRNADDEHLVQSVAKACASDSRSSGSKLSTRNTSRDFPNGGDLSDVEFDSSLSNASGAESLAIQPQKLLILDARSYAAAVANRAKGGGCECPEYYPNCEVVFMGMANIHSIRRSFQSLRLLCTQMPDPGNWLSALESTKWLHHLSVLLKSALLVVHAVDQDQRPVLVHCSDGWDRTPQIVALAKLLLDPYYRTIEGFQVLVEMEWLDFGHKFADRCGHGENSDDLNERCPVFLQWLDCVHQLQRQFPCSFEFNEAFLVKLVQHTYSCLFGTFLCNNAKERGEKHTQERTCSVWSLLRAGNKAFKNLLYSSQSEAVLYPVCHVRNLMLWSAVYLPCPSPTTPVDDSCAPYPAPGTSPDDPPLSRLPKTRSYDNLTTACDNTVPLASRRCSDPSLNEKWQEHRRSLELSSLAGPGEDPLSADSLGKPTRVPGGAELSVAAGVAEGQMENILQEATKEESGVEEPAHRAGIEIQEGKEDPLLEKESRRKTPEASAIGLHQDPELGDAALRSHLDMSWPLFSQGISEQQSGLSVLLSSLQVPPRGEDSLEVPVEQFRIEEIAEGREEAVLPIPVDAKVGYGTSQSCSLLPSQVPFETRGPNVDSSTDMLVEDKVKSVSGPQGHHRSCLVNSGKDRLPQTMEPSPSETSLVERPQVGSVVHRTSLGSTLSLTRSPCALPLAECKEGLVCNGAPETENRASEQPPGLSTLQMYPTPNGHCANGEAGRSKDSLSRQLSAMSCSSAHLHSRNLHHKWLHSHSGRPSATSSPDQPSRSHLDDDGMSVYTDTIQQRLRQIESGHQQEVETLKKQVQELKSRLESQYLTSSLHFNGDFGDEVMTRWLPDHLAAHCYACDSAFWLASRKHHCRDTDRVDQTWNCGNVFCSSCCNQKVPVPSQQLFEPSRVCKSCYSSLHPTSSSIDLELDKPIAATSN

SEQ ID NO: 39264 - protein, 1161 aa, Homo sapiens
MDEETRHSLECIQANQIFPRKQLIREDENLQVPFLELHGESTEFVGRAEDAIIALSNYRLHIKFKESLVNVPLQLIESVECRDIFQLHLTCKDCKVIRCQFSTFEQCQEWLKRLNNAIRPPAKIEDLFSFAYHAWCMEVYASEKEQHGDLCRPGEHVTSRFKNEVERMGFDMNNAWRISNINEKYKLCGSYPQELIVPAWITDKELESVSSFRSWKRIPAVIYRHQSNGAVIARCGQPEVSWWGWRNADDEHLVQSVAKACASDSRSSGSKLSTRNTSRDFPNGGDLSDVEFDSSLSNASGAESLAIQPQKLLILDARSYAAAVANRAKGGGCECPEYYPNCEVVFMGMANIHSIRRSFQSLRLLCTQMPDPGNWLSALESTKWLHHLSVLLKSALLVVHAVDQDQRPVLVHCSDGWDRTPQIVALAKLLLDPYYRTIEGFQVLVEMEWLDFGHKFADRCGHGENSDDLNERCPVFLQWLDCVHQLQRQFPCSFEFNEAFLVKLVQHTYSCLFGTFLCNNAKERGEKHTQERTCSVWSLLRAGNKAFKNLLYSSQSEAVLYPVCHVRNLMLWSAVYLPCPSPTTPVDDSCAPYPAPGTSPDDPPLSRLPKTRSYDNLTTACDNTVPLASRRCSDPSLNEKWQEHRRSLELSSLAGPGEDPLSADSLGKPTRVPGGAELSVAAGVAEGQMENILQEATKEESGVEEPAHRAGIEIQEGKEDPLLEKESRRKTPEASAIGLHQDPELGDAALRSHLDMSWPLFSQGISEQQSGLSVLLSSLQVPPRGEDSLEVPVEQFRIEEIAEGREEAVLPIPVDAKVGYGTSQSCSLLPSQVPFETRGPNVDSSTDMLVEDKVKSVSGPQGHHRSCLVNSGKDRLPQTMEPSPSETSLVERPQVGSVVHRTSLGSTLSLTRSPCALPLAECKEGLVCNGAPETENRASEQPPGLSTLQMYPTPNGHCANGEAGRSKDSLSRQLSAMSCSSAHLHSRNLHHKWLHSHSGRPSATSSPDQPSRSHLDDDGMSVYTDTIQQRLRQIESGHQQEVETLKKQVQELKSRLESQYLTSSLHFNGDFGDEVMTRWLPDHLAAHCYACDSAFWLASRKHHCRNCGNVFCSSCCNQKVPVPSQQLFEPSRVCKSCYSSLHPTSSSIDLELDKPIAATSN

SEQ ID NO: 39265 - protein, 95 aa, Homo sapiens
MPSSHIVLKEETRMLGLMYAIWMNLNSFGLAIIGILLIACEIILFLTKDETIQWPHVPSNRGSKANLILKELQLLVRSTWWFHRETAQRTCLYLA

SEQ ID NO: 39266 - protein, 544 aa, Homo sapiens
MATAPGPAGIAMGSVGSLLERQDFSPEELRAALAGSRGSRQPDGLLRKGLGQREFLSYLHLPKKDSKSTKNTKRAPRNEPADYATLYYREHSRAGDFSKTSLPERGRFDKCRIRPSVFKPTAGNGKGFLSMQSLASHKGQKLWRSNGSLHTLACHPPLSPGPRASQARAQLLHALSLDEGGPEPEPSLSDSSSGGSFGRSPGTGPSPFSSSLGHLNHLGGSLDRASQGPKEAGPPAVLSCLPEPPPPYEFSCSSAEEMGAVLPETCEELKRGLGDEDGSNPFTQVLEERQRLWLAELKRLYVERLHEVTQKAERSERNLQLQLFMAQQEQRRLRKELRAQQGLAPEPRAPGTLPEADPSARPEEEARWEVCQKTAEISLLKQQLREAQAELAQKLAEIFSLKTQLRGSRAQAQAQDAELVRLREAVRSLQEQAPREEAPGSCETDDCKSRGLLGEAGGSEARDSAEQLRAELLQERLRGQEQALRFEQERRTWQEEKERVLRYQREIQGGYMDMYRRNQALEQELRALREPPTPWSPRLESSKI

SEQ ID NO: 39267 - protein, 487 aa, Homo sapiens
MAAALPRTLGELQLYRILQKANLLSYFDAFIQQGGDDVQQLCEAGEEEFLEIMALVGMASKPLHVRRLQKALRDWVTNPGLFNQPLTSLPVSSIPIYKLPEGSPTWLGISCSSYERSSNAREPHLKIPKCAATTCVQSLGQGKSDVVGSLALQSVGESRLWQGHHATESEHSLSPADLGSPASPKESSEALDAAAALSVAECVERMAPTLPKSDLNEVKELLKTNKKLAKMIGHIFEMNDDDPHKEEEIRKYSAIYGRFDSKRKDGKHLTLHELTVNEAAAQLCVKDNALLTRRDELFALARQISREVTYKYTYRTTKSKCGERDELSPKRIKVEDGFPDFQDSVQTLFQQARAKSEELAALSSQQPEKVMAKQMEFLCNQAGYERLQHAERRLSAGLYRQSSEEHSPNGLTSDNSDGQGERPLNLRMPNLQNRQPHHFVVDGELSRLYPSEAKSHSSESLGILKDYPHSAFTLEKKVIKTEPEDSR

SEQ ID NO: 39268 - protein, 458 aa, Homo sapiens
MAAALPRTLGELQLYRILQKANLLSYFDAFIQQGGDDVQQLCEAGEEEFLEIMALVGMASKPLHVRRLQKALRDWVTNPGLFNQPLTSLPVSSIPIYKLPEGSPTWLGISCSSYERSSNAREPHLKIPKCAATTCVQSLGQGKSDVVGSLALQSVGESRLWQGHHATESEHSLSPADLGSPASPKESSEALDAAAALSVAECVERMAPTLPKSDLNEVKELLKTNKKLAKMIGHIFEMNDDDPHKEEEIRKYSAIYGRFDSKRKDGKHLTLHELTVNEAAAQLCVKDNALLTRRDELFALARQISREVTYKYTYRTTKSKCGERDELSPKRIKVEQQPEKVMAKQMEFLCNQAGYERLQHAERRLSAGLYRQSSEEHSPNGLTSDNSDGQGERPLNLRMPNLQNRQPHHFVVDGELSRLYPSEAKSHSSESLGILKDYPHSAFTLEKKVIKTEPEDSR

SEQ ID NO: 39269 - protein, 1877 aa, Homo sapiens
MLGSSVKSVQPEVELSSGGGDEGADEPRGAGRKAAAADGRGMLPKRAKAPGGGGGMAKASAAELKVFKSGSVDSRVPGGPPASNLRKQKSLTNLSFLTDSEKKLQLYEPEWSDDMAKAPKGLGKVGSKGREAPLMSKTLSKSEHSLFQAKGSPAGGAKTPLAPLAPNLGKPSRIPRGPYAEVKPLSKAPEAAVSEDGKSDDELLSSKAKAQKSSGPVPSAKGQEERAFLKVDPELVVTVLGDLEQLLFSQMLDPESQRKRTVQNVLDLRQNLEETMSSLRGSQVTHSSLEMTCYDSDDANPRSVSSLSNRSSPLSWRYGQSSPRLQAGDAPSVGGSCRSEGTPAWYMHGERAHYSHTMPMRSPSKLSHISRLELVESLDSDEVDLKSGYMSDSDLMGKTMTEDDDITTGWDESSSISSGLSDASDNLSSEEFNASSSLNSLPSTPTASRRNSTIVLRTDSEKRSLAESGLSWFSESEEKAPKKLEYDSGSLKMEPGTSKWRRERPESCDDSSKGGELKKPISLGHPGSLKKGKTPPVAVTSPITHTAQSALKVAGKPEGKATDKGKLAVKNTGLQRSSSDAGRDRLSDAKKPPSGIARPSTSGSFGYKKPPPATGTATVMQTGGSATLSKIQKSSGIPVKPVNGRKTSLDVSNSAEPGFLAPGARSNIQYRSLPRPAKSSSMSVTGGRGGPRPVSSSIDPSLLSTKQGGLTPSRLKEPTKVASGRTTPAPVNQTDREKEKAKAKAVALDSDNISLKSIGSPESTPKNQASHPTATKLAELPPTPLRATAKSFVKPPSLANLDKVNSNSLDLPSSSDTTHASKVPDLHATSSASGGPLPSCFTPSPAPILNINSASFSQGLELMSGFSVPKETRMYPKLSGLHRSMESLQMPMSLPSAFPSSTPVPTPPAPPAAPTEEETEELTWSGSPRAGQLDSNQRDRNTLPKKGLRYQLQSQEETKERRHSHTIGGLPESDDQSELPSPPALPMSLSAKGQLTNIVSPTAATTPRITRSNSIPTHEAAFELYSGSQMGSTLSLAERPKGMIRSGSFRDPTDDVHGSVLSLASSASSTYSSAEERMQSEQIRKLRRELESSQEKVATLTSQLSANANLVAAFEQSLVNMTSRLRHLAETAEEKDTELLDLRETIDFLKKKNSEAQAVIQGALNASETTPKELRIKRQNSSDSISSLNSITSHSSIGSSKDADAKKKKKKSWVYELRSSFNKAFSIKKGPKSASSYSDIEEIATPDSSAPSSPKLQHGSTETASPSIKSSTSSSVGTDVTEGPAHPAPHTRLFHANEEEEPEKKEVSELRSELWEKEMKLTDIRLEALNSAHQLDQLRETMHNMQLEVDLLKAENDRLKVAPGPSSGSTPGQVPGSSALSSPRRSLGLALTHSFGPSLADTDLSPMDGISTCGPKEEVTLRVVVRMPPQHIIKGDLKQQEFFLGCSKVSGKVDWKMLDEAVFQVFKDYISKMDPASTLGLSTESIHGYSISHVKRVLDAEPPEMPPCRRGVNNISVSLKGLKEKCVDSLVFETLIPKPMMQHYISLLLKHRRLVLSGPSGTGKTYLTNRLAEYLVERSGREVTEGIVSTFNMHQQSCKDLQLYLSNLANQIDRETGIGDVPLVILLDDLSEAGSISELVNGALTCKYHKCPYIIGTTNQPVKMTPNHGLHLSFRMLTFSNNVEPANGFLVRYLRRKLVESDSDINANKEELLRVLDWVPKLWYHLHTFLEKHSTSDFLIGPCFFLSCPIGIEDFRTWFIDLWNNSIIPYLQEGAKDGIKVHGQKAAWEDPVEWVRDTLPWPSAQQDQSKLYHLPPPTVGPHSIASPPEDRTVKDSTPSSLDSDPLMAMLLKLQEAANYIESPDRETILDPNLQATL

SEQ ID NO: 39270 - protein, 1869 aa, Homo sapiens
MLGSSVKSVQPEVELSSGGGDEGADEPRGAGRKAAAADGRGMLPKRAKAPGGGGGMAKASAAELKVFKSGSVDSRVPGGPPASNLRKQKSLTNLSFLTDSEKKLQLYEPEWSDDMAKAPKGLGKVGSKGREAPLMSKTLSKSEHSLFQAKGSPAGGAKTPLAPLAPNLGKPSRIPRGPYAEVKPLSKAPEAAVSEDGKSDDELLSSKAKAQKSSGPVPSAKGQEERAFLKVDPELVVTVLGDLEQLLFSQMLDPESQRKRTVQNVLDLRQNLEETMSSLRGSQVTHSSLEMTCYDSDDANPRSVSSLSNRSSPLSWRYGQSSPRLQAGDAPSVGGSCRSEGTPAWYMHGERAHYSHTMPMRSPSKLSHISRLELVESLDSDEVDLKSGYMSDSDLMGKTMTEDDDITTGWDESSSISSGLSDASDNLSSEEFNASSSLNSLPSTPTASRRNSTIVLRTDSEKRSLAESGLSWFSESEEKAPKKLEYDSGSLKMEPGTSKWRRERPESCDDSSKGGELKKPISLGHPGSLKKGKTPPVAVTSPITHTAQSALKVAGKPEGKATDKGKLAVKNTGLQRSSSDAGRDRLSDAKKPPSGIARPSTSGSFGYKKPPPATGTATVMQTGGSATLSKIQKSSGIPVKPVNGRKTSLDVSNSAEPGFLAPGARSNIQYRSLPRPAKSSSMSVTGGRGGPRPVSSSIDPSLLSTKQGGLTPSRLKEPTKVASGRTTPAPVNQTDREKEKAKAKAVALDSDNISLKSIGSPESTPKNQASHPTATKLAELPPTPLRATAKSFVKPPSLANLDKVNSNSLDLPSSSDTTHASKVPDLHATSSASGGPLPSCFTPSPAPILNINSASFSQGLELMSGFSVPKETRMYPKLSGLHRSMESLQMPMSLPSAFPSSTPVPTPPAPPAAPTEEETEELTWSGSPRAGQLDSNQRDRNTLPKKGLRYQLQSQEETKERRHSHTIGGLPESDDQSELPSPPALPMSLSAKGQLTNIVSPTAATTPRITRSNSIPTHEAAFELYSGSQMGSTLSLAERPKGMIRSGSFRDPTDDVHGSVLSLASSASSTYSSQIRKLRRELESSQEKVATLTSQLSANANLVAAFEQSLVNMTSRLRHLAETAEEKDTELLDLRETIDFLKKKNSEAQAVIQGALNASETTPKELRIKRQNSSDSISSLNSITSHSSIGSSKDADAKKKKKKSWVYELRSSFNKAFSIKKGPKSASSYSDIEEIATPDSSAPSSPKLQHGSTETASPSIKSSTSSSVGTDVTEGPAHPAPHTRLFHANEEEEPEKKEVSELRSELWEKEMKLTDIRLEALNSAHQLDQLRETMHNMQLEVDLLKAENDRLKVAPGPSSGSTPGQVPGSSALSSPRRSLGLALTHSFGPSLADTDLSPMDGISTCGPKEEVTLRVVVRMPPQHIIKGDLKQQEFFLGCSKVSGKVDWKMLDEAVFQVFKDYISKMDPASTLGLSTESIHGYSISHVKRVLDAEPPEMPPCRRGVNNISVSLKGLKEKCVDSLVFETLIPKPMMQHYISLLLKHRRLVLSGPSGTGKTYLTNRLAEYLVERSGREVTEGIVSTFNMHQQSCKDLQLYLSNLANQIDRETGIGDVPLVILLDDLSEAGSISELVNGALTCKYHKCPYIIGTTNQPVKMTPNHGLHLSFRMLTFSNNVEPANGFLVRYLRRKLVESDSDINANKEELLRVLDWVPKLWYHLHTFLEKHSTSDFLIGPCFFLSCPIGIEDFRTWFIDLWNNSIIPYLQEGAKDGIKVHGQKAAWEDPVEWVRDTLPWPSAQQDQSKLYHLPPPTVGPHSIASPPEDRTVKDSTPSSLDSDPLMAMLLKLQEAANYIESPDRETILDPNLQATL

SEQ ID NO: 39271 - protein, 1874 aa, Homo sapiens
MLGSSVKSVQPEVELSSGGGDEGADEPRGAGRKAAAADGRGMLPKRAKAPGGGGGMAKASAAELKVFKSGSVDSRVPGGPPASNLRKQKSLTNLSFLTDSEKKLQLYEPEWSDDMAKAPKGLGKVGSKGREAPLMSKTLSKSEHSLFQAKGSPAGGAKTPLAPLAPNLGKPSRIPRGPYAEVKPLSKAPEAAVSEDGKSDDELLSSKAKAQKSSGPVPSAKGQEERAFLKVDPELVVTVLGDLEQLLFSQMLDPESQRKRTVQNVLDLRQNLEETMSSLRGSQVTHSSLEMTCYDSDDANPRSVSSLSNRSSPLSWRYGQSSPRLQAGDAPSVGGSCRSEGTPAWYMHGERAHYSHTMPMRSPSKLSHISRLELVESLDSDEVDLKSGYMSDSDLMGKTMTEDDDITTGWDESSSISSGLSDASDNLSSEEFNASSSLNSLPSTPTASRRNSTIVLRTDSEKRSLAESGLSWFSESEEKAPKKLEYDSGSLKMEPGTSKWRRERPESCDDSSKGGELKKPISLGHPGSLKKGKTPPVAVTSPITHTAQSALKVAGKPEGKATDKGKLAVKNTGLQRSSSDAGRDRLSDAKKPPSGIARPSTSGSFGYKKPPPATGTATVMQTGGSATLSKIQKSSGIPVKPVNGRKTSLDVSNSAEPGFLAPGARSNIQYRSLPRPAKSSSMSVTGGRGGPRPVSSSIDPSLLSTKQGGLTPSRLKEPTKVASGRTTPAPVNQTDREKEKAKAKAVALDSDNISLKSIGSPESTPKNQASHPTATKLAELPPTPLRATAKSFVKPPSLANLDKVNSNSLDLPSSSDTTHASKVPDLHATSSASGGPLPSCFTPSPAPILNINSASFSQGLELMSGFSVPKETRMYPKLSGLHRSMESLQMPMSLPSAFPSSTPVPTPPAPPAAPTEEETEELTWSGSPRAGQLDSNQRDRNTLPKKGLRYQLQSQEETKERRHSHTIGGLPESDDQSELPSPPALPMSLSAKGQLTNIVSPTAATTPRITRSNSIPTHEAAFELYSGSQMGSTLSLAERPKGMIRSGSFRDPTDDVHGSVLSLASSASSTYSSAEERMQSEQIRKLRRELESSQEKVATLTSQLSANANLVAAFEQSLVNMTSRLRHLAETAEEKDTELLDLRETIDFLKKKNSEAQAVIQGALNASETTPKELRIKRQNSSDSISSLNSITSHSSIGSSKDADAKKKKKKSWLRSSFNKAFSIKKGPKSASSYSDIEEIATPDSSAPSSPKLQHGSTETASPSIKSSTSSSVGTDVTEGPAHPAPHTRLFHANEEEEPEKKEVSELRSELWEKEMKLTDIRLEALNSAHQLDQLRETMHNMQLEVDLLKAENDRLKVAPGPSSGSTPGQVPGSSALSSPRRSLGLALTHSFGPSLADTDLSPMDGISTCGPKEEVTLRVVVRMPPQHIIKGDLKQQEFFLGCSKVSGKVDWKMLDEAVFQVFKDYISKMDPASTLGLSTESIHGYSISHVKRVLDAEPPEMPPCRRGVNNISVSLKGLKEKCVDSLVFETLIPKPMMQHYISLLLKHRRLVLSGPSGTGKTYLTNRLAEYLVERSGREVTEGIVSTFNMHQQSCKDLQLYLSNLANQIDRETGIGDVPLVILLDDLSEAGSISELVNGALTCKYHKCPYIIGTTNQPVKMTPNHGLHLSFRMLTFSNNVEPANGFLVRYLRRKLVESDSDINANKEELLRVLDWVPKLWYHLHTFLEKHSTSDFLIGPCFFLSCPIGIEDFRTWFIDLWNNSIIPYLQEGAKDGIKVHGQKAAWEDPVEWVRDTLPWPSAQQDQSKLYHLPPPTVGPHSIASPPEDRTVKDSTPSSLDSDPLMAMLLKLQEAANYIESPDRETILDPNLQATL

SEQ ID NO: 39272 - protein, 1817 aa, Homo sapiens
MLGSSVKSVQPEVELSSGGGDEGADEPRGAGRKAAAADGRGMLPKRAKAPGGGGGMAKASAAELKVFKSGSVDSRVPGGPPASNLRKQKSLTNLSFLTDSEKKLQLYEPEWSDDMAKAPKGLGKVGSKGREAPLMSKTLSKSEHSLFQAKGSPAGGAKTPLAPLAPNLGKPSRIPRGPYAEVKPLSKAPEAAVSEDGKSDDELLSSKAKAQKSSGPVPSAKGQEERAFLKVDPELVVTVLGDLEQLLFSQMLDPESQRKRTVQNVLDLRQNLEETMSSLRGSQVTHSSLEMTCYDSDDANPRSVSSLSNRSSPLSWRYGQSSPRLQAGDAPSVGGSCRSEGTPAWYMHGERAHYSHTMPMRSPSKLSHISRLELVESLDSDEVDLKSGYMSDSDLMGKTMTEDDDITTGWDESSSISSGLSDASDNLSSEEFNASSSLNSLPSTPTASRRNSTIVLRTDSEKRSLAESGLSWFSESEEKAPKKLEYDSGSLKMEPGTSKWRRERPESCDDSSKGGELKKPISLGHPGSLKKGKTPPVAVTSPITHTAQSALKVAGKPEGKATDKGKLAVKNTGLQRSSSDAGRDRLSDAKKPPSGIARPSTSGSFGYKKPPPATGTATVMQTGGSATLSKIQKSSGIPVKPVNGRKTSLDVSNSAEPGFLAPGARSNIQYRSLPRPAKSSSMSVTGGRGGPRPVSSSIDPSLLSTKQGGLTPSRLKEPTKVASGRTTPAPVNQTDREKEKAKAKAVALDSDNISLKSIGSPESTPKNQASHPTATKLAELPPTPLRATAKSFVKPPSLANLDKVNSNSLDLPSSSDTTHASKVPDLHATSSASGGPLPSCFTPSPAPILNINSASFSQGLELMSGFSVPKETRMYPKLSGLHRSMESLQMPMSLPSAFPSSTPVPTPPAPPAAPTEEETEELTWSGSPRAGQLDSNQRDRNTLPKKGLRYQLQSQEETKERRHSHTIGGLPESDDQSELPSPPALPMSLSAKGQLTNIVHGSVLSLASSASSTYSSAEERMQSEQIRKLRRELESSQEKVATLTSQLSANANLVAAFEQSLVNMTSRLRHLAETAEEKDTELLDLRETIDFLKKKNSEAQAVIQGALNASETTPKELRIKRQNSSDSISSLNSITSHSSIGSSKDADAKKKKKKSWLRSSFNKAFSIKKGPKSASSYSDIEEIATPDSSAPSSPKLQHGSTETASPSIKSSTSSSVGTDVTEGPAHPAPHTRLFHANEEEEPEKKEVSELRSELWEKEMKLTDIRLEALNSAHQLDQLRETMHNMQLEVDLLKAENDRLKVAPGPSSGSTPGQVPGSSALSSPRRSLGLALTHSFGPSLADTDLSPMDGISTCGPKEEVTLRVVVRMPPQHIIKGDLKQQEFFLGCSKVSGKVDWKMLDEAVFQVFKDYISKMDPASTLGLSTESIHGYSISHVKRVLDAEPPEMPPCRRGVNNISVSLKGLKEKCVDSLVFETLIPKPMMQHYISLLLKHRRLVLSGPSGTGKTYLTNRLAEYLVERSGREVTEGIVSTFNMHQQSCKDLQLYLSNLANQIDRETGIGDVPLVILLDDLSEAGSISELVNGALTCKYHKCPYIIGTTNQPVKMTPNHGLHLSFRMLTFSNNVEPANGFLVRYLRRKLVESDSDINANKEELLRVLDWVPKLWYHLHTFLEKHSTSDFLIGPCFFLSCPIGIEDFRTWFIDLWNNSIIPYLQEGAKDGIKVHGQKAAWEDPVEWVRDTLPWPSAQQDQSKLYHLPPPTVGPHSIASPPEDRTVKDSTPSSLDSDPLMAMLLKLQEAANYIESPDRETILDPNLQATL

SEQ ID NO: 39273 - protein, 1483 aa, Homo sapiens
MLHLPLPRSGRTVNFPRSWDESSSISSGLSDASDNLSSEEFNASSSLNSLPSTPTASRRNSTIVLRTDSEKRSLAESGLSWFSESEEKAPKKLEYDSGSLKMEPGTSKWRRERPESCDDSSKGGELKKPISLGHPGSLKKGKTPPVAVTSPITHTAQSALKVAGKPEGKATDKGKLAVKNTGLQRSSSDAGRDRLSDAKKPPSGIARPSTSGSFGYKKPPPATGTATVMQTGGSATLSKIQKSSGIPVKPVNGRKTSLDVSNSAEPGFLAPGARSNIQYRSLPRPAKSSSMSVTGGRGGPRPVSSSIDPSLLSTKQGGLTPSRLKEPTKVASGRTTPAPVNQTDREKEKAKAKAVALDSDNISLKSIGSPESTPKNQASHPTATKLAELPPTPLRATAKSFVKPPSLANLDKVNSNSLDLPSSSDTTHASKVPDLHATSSASGGPLPSCFTPSPAPILNINSASFSQGLELMSGFSVPKETRMYPKLSGLHRSMESLQMPMSLPSAFPSSTPVPTPPAPPAAPTEEETEELTWSGSPRAGQLDSNQRDRNTLPKKGLRYQLQSQEETKERRHSHTIGGLPESDDQSELPSPPALPMSLSAKGQLTNIVSPTAATTPRITRSNSIPTHEAAFELYSGSQMGSTLSLAERPKGMIRSGSFRDPTDDVHGSVLSLASSASSTYSSAEERMQSEQIRKLRRELESSQEKVATLTSQLSANANLVAAFEQSLVNMTSRLRHLAETAEEKDTELLDLRETIDFLKKKNSEAQAVIQGALNASETTPKELRIKRQNSSDSISSLNSITSHSSIGSSKDADAKKKKKKSWLRSSFNKAFSIKKGPKSASSYSDIEEIATPDSSAPSSPKLQHGSTETASPSIKSSTSSSVGTDVTEGPAHPAPHTRLFHANEEEEPEKKEVSELRSELWEKEMKLTDIRLEALNSAHQLDQLRETMHNMQLEVDLLKAENDRLKVAPGPSSGSTPGQVPGSSALSSPRRSLGLALTHSFGPSLADTDLSPMDGISTCGPKEEVTLRVVVRMPPQHIIKGDLKQQEFFLGCSKVSGKVDWKMLDEAVFQVFKDYISKMDPASTLGLSTESIHGYSISHVKRVLDAEPPEMPPCRRGVNNISVSLKGLKEKCVDSLVFETLIPKPMMQHYISLLLKHRRLVLSGPSGTGKTYLTNRLAEYLVERSGREVTEGIVSTFNMHQQSCKDLQLYLSNLANQIDRETGIGDVPLVILLDDLSEAGSISELVNGALTCKYHKCPYIIGTTNQPVKMTPNHGLHLSFRMLTFSNNVEPANGFLVRYLRRKLVESDSDINANKEELLRVLDWVPKLWYHLHTFLEKHSTSDFLIGPCFFLSCPIGIEDFRTWFIDLWNNSIIPYLQEGAKDGIKVHGQKAAWEDPVEWVRDTLPWPSAQQDQSKLYHLPPPTVGPHSIASPPEDRTVKDSTPSSLDSDPLMAMLLKLQEAANYIESPDRETILDPNLQATL

SEQ ID NO: 39274 - protein, 1190 aa, Homo sapiens
MLGSSVKSVQPEVELSSGGGDEGADEPRGAGRKAAAADGRGMLPKRAKAPGGGGGMAKASAAELKVFKSGSVDSRVPGGPPASNLRKQKSLTNLSFLTDSEKKLQLYEPEWSDDMAKAPKGLGKVGSKGREAPLMSKTLSKSEHSLFQAKGSPAGGAKTPLAPLAPNLGKPSRIPRGPYAEVKPLSKAPEAAVSEDGKSDDELLSSKAKAQKSSGPVPSAKGQEERAFLKVDPELVVTVLGDLEQLLFSQMLDPESQRKRTVQNVLDLRQNLEETMSSLRGSQVTHSSLEMTCYDSDDANPRSVSSLSNRSSPLSWRYGQSSPRLQAGDAPSVGGSCRSEGTPAWYMHGERAHYSHTMPMRSPSKLSHISRLELVESLDSDEVDLKSGYMSDSDLMGKTMTEDDDITTGWDESSSISSGLSDASDNLSSEEFNASSSLNSLPSTPTASRRNSTIVLRTDSEKRSLAESGLSWFSESEEKAPKKLEYDSGSLKMEPGTSKWRRERPESCDDSSKGGELKKPISLGHPGSLKKGKTPPVAVTSPITHTAQSALKVAGKPEGKATDKGKLAVKNTGLQRSSSDAGRDRLSDAKKPPSGIARPSTSGSFGYKKPPPATGTATVMQTGGSATLSKIQKSSGIPVKPVNGRKTSLDVSNSAEPGFLAPGARSNIQYRSLPRPAKSSSMSVTGGRGGPRPVSSSIDPSLLSTKQGGLTPSRLKEPTKVASGRTTPAPVNQTDREKEKAKAKAVALDSDNISLKSIGSPESTPKNQASHPTATKLAELPPTPLRATAKSFVKPPSLANLDKVNSNSLDLPSSSDTTHASKVPDLHATSSASGGPLPSCFTPSPAPILNINSASFSQGLELMSGFSVPKETRMYPKLSGLHRSMESLQMPMSLPSAFPSSTPVPTPPAPPAAPTEEETEELTWSGSPRAGQLDSNQRDRNTLPKKGLRYQLQSQEETKERRHSHTIGGLPESDDQSELPSPPALPMSLSAKGQLTNIVSPTAATTPRITRSNSIPTHEAAFELYSGSQMGSTLSLAERPKGMIRSGSFRDPTDDVHGSVLSLASSASSTYSSQIRKLRRELESSQEKVATLTSQLSANANLVAAFEQSLVNMTSRLRHLAETAEEKDTELLDLRETIDFLKKKNSEAQAVIQGALNASETTPKGRTSSHRLRGNREQESKSITDFYLGP

SEQ ID NO: 39275 - protein, 1809 aa, Homo sapiens
MLGSSVKSVQPEVELSSGGGDEGADEPRGAGRKAAAADGRGMLPKRAKAPGGGGGMAKASAAELKVFKSGSVDSRVPGGPPASNLRKQKSLTNLSFLTDSEKKLQLYEPEWSDDMAKAPKGLGKVGSKGREAPLMSKTLSKSEHSLFQAKGSPAGGAKTPLAPLAPNLGKPSRIPRGPYAEVKPLSKAPEAAVSEDGKSDDELLSSKAKAQKSSGPVPSAKGQEERAFLKVDPELVVTVLGDLEQLLFSQMLDPESQRKRTVQNVLDLRQNLEETMSSLRGSQVTHSSLEMTCYDSDDANPRSVSSLSNRSSPLSWRYGQSSPRLQAGDAPSVGGSCRSEGTPAWYMHGERAHYSHTMPMRSPSKLSHISRLELVESLDSDEVDLKSGYMSDSDLMGKTMTEDDDITTGWDESSSISSGLSDASDNLSSEEFNASSSLNSLPSTPTASRRNSTIVLRTDSEKRSLAESGLSWFSESEEKAPKKLEYDSGSLKMEPGTSKWRRERPESCDDSSKGGELKKPISLGHPGSLKKGKTPPVAVTSPITHTAQSALKVAGKPEGKATDKGKLAVKNTGLQRSSSDAGRDRLSDAKKPPSGIARPSTSGSFGYKKPPPATGTATVMQTGGSATLSKIQKSSGIPVKPVNGRKTSLDVSNSAEPGFLAPGARSNIQYRSLPRPAKSSSMSVTGGRGGPRPVSSSIDPSLLSTKQGGLTPSRLKEPTKVASGRTTPAPVNQTDREKEKAKAKAVALDSDNISLKSIGSPESTPKNQASHPTATKLAELPPTPLRATAKSFVKPPSLANLDKVNSNSLDLPSSSDTTHASKVPDLHATSSASGGPLPSCFTPSPAPILNINSASFSQGLELMSGFSVPKETRMYPKLSGLHRSMESLQMPMSLPSAFPSSTPVPTPPAPPAAPTEEETEELTWSGSPRAGQLDSNQRDRNTLPKKGLRYQLQSQEETKERRHSHTIGGLPESDDQSELPSPPALPMSLSAKGQLTNIVHGSVLSLASSASSTYSSQIRKLRRELESSQEKVATLTSQLSANANLVAAFEQSLVNMTSRLRHLAETAEEKDTELLDLRETIDFLKKKNSEAQAVIQGALNASETTPKELRIKRQNSSDSISSLNSITSHSSIGSSKDADAKKKKKKSWLRSSFNKAFSIKKGPKSASSYSDIEEIATPDSSAPSSPKLQHGSTETASPSIKSSTSSSVGTDVTEGPAHPAPHTRLFHANEEEEPEKKEVSELRSELWEKEMKLTDIRLEALNSAHQLDQLRETMHNMQLEVDLLKAENDRLKVAPGPSSGSTPGQVPGSSALSSPRRSLGLALTHSFGPSLADTDLSPMDGISTCGPKEEVTLRVVVRMPPQHIIKGDLKQQEFFLGCSKVSGKVDWKMLDEAVFQVFKDYISKMDPASTLGLSTESIHGYSISHVKRVLDAEPPEMPPCRRGVNNISVSLKGLKEKCVDSLVFETLIPKPMMQHYISLLLKHRRLVLSGPSGTGKTYLTNRLAEYLVERSGREVTEGIVSTFNMHQQSCKDLQLYLSNLANQIDRETGIGDVPLVILLDDLSEAGSISELVNGALTCKYHKCPYIIGTTNQPVKMTPNHGLHLSFRMLTFSNNVEPANGFLVRYLRRKLVESDSDINANKEELLRVLDWVPKLWYHLHTFLEKHSTSDFLIGPCFFLSCPIGIEDFRTWFIDLWNNSIIPYLQEGAKDGIKVHGQKAAWEDPVEWVRDTLPWPSAQQDQSKLYHLPPPTVGPHSIASPPEDRTVKDSTPSSLDSDPLMAMLLKLQEAANYIESPDRETILDPNLQATL

SEQ ID NO: 39276 - protein, 322 aa, Homo sapiens
MPVTVTRTTITTTTTSSSGLGSPMIVGSPRALTQPLGLLRLLQLVSTCVAFSLVASVGAWTGSMGNWSMFTWCFCFSVTLIILIVELCGLQARFPLSWRNFPITFACYAALFCLSASIIYPTTYVQFLSHGRSRDHAIAATFFSCIACVAYATEVAWTRARPGEITGYMATVPGLLKVLETFVACIIFAFISDPNLYQHQPALEWCVAVYAICFILAAIAILLNLGECTNVLPIPFPSFLSGLALLSVLLYATALVLWPLYQFDEKYGGQPRRSRDVSCSRSHAYYVCAWDRRLAVAILTAINLLAYVADLVHSAHLVFVKV

SEQ ID NO: 39277 - protein, 242 aa, Homo sapiens
MTEVVPSSALSEVSLRLLCHDDIDTVKHLCGDWFPIEYPDSWYRDITSNKKFFSLAATYRGAIVGMIVAEIKNRTKIHKEDGDILASNFSVDTQVAYILSLGVVKEFRKHGIGSLLLESLKDHISTTAQDHCKAIYLHVLTTNNTAINFYENRDFKQHHYLPYYYSIRGVLKDGFTYVLYINGGHPPWTILDYIQHLGSALASLSPCSIPHRVYRQAHSLLCSFLPWSGISSKSGIEYSRTM

SEQ ID NO: 39278 - protein, 249 aa, Homo sapiens
MFPRRRTERRLGDTGTRKKIAYRKAVPGGRKCGASLSWEKSSREYPDSWYRDITSNKKFFSLAATYRGAIVGMIVAEIKNRTKIHKEDGDILASNFSVDTQVAYILSLGVVKEFRKHGIGSLLLESLKDHISTTAQDHCKAIYLHVLTTNNTAINFYENRDFKQHHYLPYYYSIRGVLKDGFTYVLYINGGHPPWTILDYIQHLGSALASLSPCSIPHRVYRQAHSLLCSFLPWSGISSKSGIEYSRTM

SEQ ID NO: 39279 - protein, 177 aa, Homo sapiens
MIVAEIKNRTKIHKEDGDILASNFSVDTQVAYILSLGVVKEFRKHGIGSLLLESLKDHISTTAQDHCKAIYLHVLTTNNTAINFYENRDFKQHHYLPYYYSIRGVLKDGFTYVLYINGGHPPWTILDYIQHLGSALASLSPCSIPHRVYRQAHSLLCSFLPWSGISSKSGIEYSRTM

SEQ ID NO: 39280 - protein, 179 aa, Homo sapiens
MTEVVPSSALSEVSLRLLCHDDIDTVKHLCGDWFPIEYPDSWYRDITSNKKFFSLAATYRGAIVGMIVAEIKNRTKIHKEDGDILASNFSVDTQVAYILSLGVVKEFRKHGIESTARPTACSAASCHGRASLPRVASSTAGPCDVGWAAATRPHPSAARRARLPVHLTPSVFCKELPAI

SEQ ID NO: 39281 - protein, 190 aa, Homo sapiens
MTEVVPSSALSEVSLRLLCHDDIDTVKHLCGDWFPIEYPDSWYRDITSNKKFFSLAATYRGAIVGMIVAEIKNRTKIHKEDGDILASNFSVDTQVAYILSLGVVKEFRKHGIEPHGLHPAPGLCTSQPEPLLHSAQSLPPGPQPALQLPAMVGHLFQEWHRVQPDHVMSAGQPPPGPTLRPPAEPAFLSI

SEQ ID NO: 39282 - protein, 319 aa, Homo sapiens
MAPQRRAATKAPEGNGAAERRNRSSTKKDRAPREVQRLWQRPWLRTAGLGAGFVLTALLLWSSLGADDGVAEVLARRGEVVAGRFIEVPCSEDYDSHRRFEGCTPRKCGRGVTDVVITREEAERIRSVAEKGLSLGGSDGGASILDLHSGALSVGKHFVNLYRYFGDKIQNIFSEEDFRLYREVRQKVQLTIAEAFGISASSLHLTKPTFFSRINSTEARTAHDEYWHAHVDKVTYGSFDYTSLLYLSNYLEDFGGGRFMFMEEGANKTVEPRAGRVSFFTSGSENLHRVEKVHWGTRYAITIAFSCNPDHGIEDPAFP

SEQ ID NO: 39283 - protein, 331 aa, Homo sapiens
MAPQRRAATKAPEGNGAAERRNRSSTKKDRAPREVQRLWQRPWLRTAGLGAGFVLTALLLWSSLGADDGVAEVLARRGEVVAGRFIEVPCSEDYDSHRRFEGCTPRKCGRGVTDVVITREEAERIRSVAEKGLSLGGSDGGASILDLHSGALSVGKHFVNLYRYFGDKIQNIFSEEDFRLYREVRQKVQLTIAEAFGISASSLHLTKPTFFSRINSTEARTAHDEYWHAHVDKVTYGSFDYTSLLYLSNYLEDFGGGRFMFMEEGANKTVEPRAGCFCFRMMSCGFQEVNGPRASEAAGAKAGVRCPPGTHHPPERGETHAILEAESIAYC

SEQ ID NO: 39284 - protein, 324 aa, Homo sapiens
MESPNRTTIQEFIFSAFPYSWVKSVVCFVPLLFIYAFIVVGNLVIITVVQLNTHLHTPMYTFISALSFLEIWYTTATIPKMLSSLLSERSISFNGCLLQMYFFHSTGICEVCLLTVMAFDHYLAICSPLHYPSIMTPKLCTQLTLSCCVCGFITPLPEIAWISTLPFCGSNHLEHIFCDFLPVLRLACTDTRAIVMIQVVDVIHAVEIITAVMLIFMSYDGIVAVILRIHSAGGRRTAFSTCVSHFIVFSLFFGSVTLMYLRFSATYSLFWDIAIALAFAVLSPFFNPIIYSLRNKEIKEAIKKHIGQAKIFFSVRPGTSSKIF

SEQ ID NO: 39285 - protein, 312 aa, Homo sapiens
MERVNETVVREVIFLGFSSLARLQQLLFVIFLLLYLFTLGTNAIIISTIVLDRALHIPMYFFLAILSCSEICYTFIIVPKMLVDLLSQKKTISFLGCAIQMFSFLFLGCSHSFLLAVMGYDRYIAICNPLRYSVLMGHGVCMGLVAAACACGFTVAQIITSLVFHLPFYSSNQLHHFFCDIAPVLKLASHHNHFSQIVIFMLCTLVLAIPLLLILVSYVHILSAILQFPSTLGRCKAFSTCVSHLIIVTVHYGCASFIYLRPQSNYSSSQDALISVSYTIITPLFNPMIYSLRNKEFKSALCKIVRRTISLL

SEQ ID NO: 39286 - protein, 305 aa, Homo sapiens
MQRSNHTVTEFILLGFTTDPGMQLGLFVVFLGVYSLTVVGNSTLIVLICNDSCLHTPMYFFTGNLSFLDLWYSSVYTPKILVTCISEDKSISFAGCLCQFFFSAGLAYSECYLLAAVAYDRYVAISKPLLYAQAMSIKLCALLVAVSYCGGFINSSIITKKTFSFNFCRENIIDDFFCDLLPLVELACGEKGGYKIMMYFLLASNVICPAVLILASYLFIITSVLRISSSKGYLKAFSTCSSHLTSVTLYYGSILYIYALPRSSYSFDMDKIVSTFYTVVFPMLNLMIYSLRNKDVKEALKKLLP

SEQ ID NO: 39287 - protein, 314 aa, Homo sapiens
MKRQNQSCVVEFILLGFSNFPELQVQLFGVFLVIYVVTLMGNAIITVIISLNQSLHVPMYLFLLNLSVVEVSFSAVITPEMLVVLSTEKTMISFVGCFAQMYFILLFGGTECFLLGAMAYDRFAAICHPLNYPVIMNRGVFMKLVIFSWISGIMVATVQTTWVFSFPFCGPNEINHLFCETPPVLELVCADTFLFEIYAFTGTILIVMVPFLLILLSYIRVLFAILKMPSTTGRQKAFSTCASHLTSVTLFYGTANMTYLQPKSGYSPETKKLISLAYTLLTPLLNPLIYSLRNSEMKRTLIKLWRRKVILHTF

SEQ ID NO: 39288 - protein, 1012 aa, Homo sapiens
MMAQSNMFTVADVLSQDELRKKLYQTFKDRGILDTLKTQLRNQLIHELMHPVLSGELQPRSISVEGSSLLIGASNSLVADHLQRCGYEYSLSVFFPESGLAKEKVFTMQDLLQLIKINPTSSLYKSLVSGSDKENQKGFLMHFLKELAEYHQAKESCNMETQTSSTFNRDSLAEKLQLIDDQFADAYPQRIKFESLEIKLNEYKREIEEQLRAEMCQKLKFFKDTEIAKIKMEAKKKYEKELTMFQNDFEKACQAKSEALVLREKSTLERIHKHQEIETKEIYAQRQLLLKDMDLLRGREAELKQRVEAFELNQKLQEEKHKSITEALRRQEQNIKSFEETYDRKLKNELLKYQLELKDDYIIRTNRLIEDERKNKEKAVHLQEELIAINSKKEELNQSVNRVKELELELESVKAQSLAITKQNHMLNEKVKEMSDYSLLKEEKLELLAQNKLLKQQLEESRNENLRLLNRLAQPAPELAVFQKELRKAEKAIVVEHEEFESCRQALHKQLQDEIEHSAQLKAQILGYKASVKSLTTQVADLKLQLKQTQTALENEVYCNPKQSVIDRSVNGLINGNVVPCNGEISGDFLNNPFKQENVLARMVASRITNYPTAWVEGSSPDSDLEFVANTKARVKELQQEAERLEKAFRSYHRRVIKNSAKSPLAAKSPPSLHLLEAFKNITSSSPERHIFGEDRVVSEQPQVGTLEERNDVVEALTGSAASRLRGGTSSRRLSSTPLPKAKRSLESEMYLEGLGRSHIASPSPCPDRMPLPSPTESRHSLSIPPVSSPPEQKVGLYRRQTELQDKSEFSDVDKLAFKDNEEFESSFESAGNMPRQLEMGGLSPAGDMSHVDAAAAAVPLSYQHPSVDQKQIEEQKEEEKIREQQVKERRQREERRQSNLQEVLERERRELEKLYQERKMIEESLKIKIKKELEMENELEMSNQEIKDKSAHSENPLEKYMKIIQQEQDQESADKSSKKMVQEGSLVDTLQSSDKVESLTGFSHEELDDSW

SEQ ID NO: 39289 - protein, 367 aa, Homo sapiens
MMAQSNMFTVADVLSQDELRKKLYQTFKDRGILDTLKTQLRNQLIHELMHPVLSGELQPRSISVEGSSLLIGASNSLVADHLQRCGYEYSLSVFFPESGLAKEKVFTMQDLLQLIKINPTSSLYKSLVSGSDKENQKGFLMHFLKELAEYHQAKESCNMETQTSSTFNRDSLAEKLQLIDDQFADAYPQRIKFESLEIKLNEYKREIEEQLRAEMCQKLKFFKDTEIAKIKMEAKKKYEKELTMFQNDFEKACQAKSEALVLREKSTLERIHKHQEIETKEIYAQRQLLLKDMDLLRGREAELKQRVEAFELNQKLQEEKHKSITEALRRQEQNIKSFEETYDRKLKNELLNFHRLHGVCLALGILI

SEQ ID NO: 39290 - protein, 972 aa, Homo sapiens
MMAQSNMFTVADVLSQDELRKKLYQTFKDRGILDTLKTQLRNQLIHELMHPVLSGELQPRSISVEGSSLLIGASNSLVADHLQRCGYEYSLSVFFPESGLAKEKVFTMQDLLQLIKINPTSSLYKSLVSGSDKENQKGFLMHFLKELAEYHQAKESCNMETQTSSTFNRDSLAEKLQLIDDQFADAYPQRIKFESLEIKLNEYKREIEEQLRAEMCQKLKFFKDTEIAKIKMEAKKKYEKELTMFQNDFEKACQAKSEALVLREKSTLERIHKHQEIETKEIYAQRQLLLKDMDLLRGREAELKQRVEAFELYQLELKDDYIIRTNRLIEDERKNKEKAVHLQEELIAINSKKEELNQSVNRVKELELELESVKAQSLAITKQNHMLNEKVKEMSDYSLLKEEKLELLAQNKLLKQQLEESRNENLRLLNRLAQPAPELAVFQKELRKAEKAIVVEHEEFESCRQALHKQLQDEIEHSAQLKAQILGYKASVKSLTTQVADLKLQLKQTQTALENEVYCNPKQSVIDRSVNGLINGNVVPCNGEISGDFLNNPFKQENVLARMVASRITNYPTAWVEGSSPDSDLEFVANTKARVKELQQEAERLEKAFRSYHRRVIKNSAKSPLAAKSPPSLHLLEAFKNITSSSPERHIFGEDRVVSEQPQVGTLEERNDVVEALTGSAASRLRGGTSSRRLSSTPLPKAKRSLESEMYLEGLGRSHIASPSPCPDRMPLPSPTESRHSLSIPPVSSPPEQKVGLYRRQTELQDKSEFSDVDKLAFKDNEEFESSFESAGNMPRQLEMGGLSPAGDMSHVDAAAAAVPLSYQHPSVDQKQIEEQKEEEKIREQQVKERRQREERRQSNLQEVLERERRELEKLYQERKMIEESLKIKIKKELEMENELEMSNQEIKDKSAHSENPLEKYMKIIQQEQDQESADKSSKKMVQEGSLVDTLQSSDKVESLTGFSHEELDDSW

SEQ ID NO: 39291 - protein, 337 aa, Homo sapiens
MEGKNQTNISEFLLLGFSSWQQQQVLLFALFLCLYLTGLFGNLLILLAIGSDHCLHTPMYFFLANLSLVDLCLPSATVPKMLLNIQTQTQTISYPGCLAQMYFCMMFANMDNFLLTVMAYDRYVAICHPLHYSTIMALRLCASLVAAPWVIAILNPLLHTLMMAHLHFCSDNVIHHFFCDINSLLPLSCSDTSLNQLSVLATVGLIFVVPSVCILVSYILIVSAVMKVPSAQGKLKAFSTCGSHLALVILFYGAITGVYMSPLSNHSTEKDSAASVIFMVVAPVLNPFIYSLRNNELKGTLKKTLSRPGAVAHACNPSTLGGRGGWIMRSGDRDHPG

SEQ ID NO: 39292 - protein, 160 aa, Homo sapiens
MKTSVLLAITAMCSDDWLLVRMKIRPFDKNTDIRIGDIHLRDNCPVTRLLSFNYAFSYPVTSCGIKKIMFQTNDDAILSEISYKPRLHTTYEFPVVCFVKRLKFPSVMHFGMSGFDAHTLKEIPQKTKGQESPTPTQSKTWTLNFNSVNKEQLSKKSLYQ

SEQ ID NO: 39293 - protein, 325 aa, Homo sapiens
MKTFSSFLQIGRNMHQGNQTTITEFILLGFFKQDEHQNLLFVLFLGMYLVTVIGNGLIIVAISLDTYLHTPMYLFLANLSFADISSISNSVPKMLVNIQTKSQSISYESCITQMYFSIVFVVIDNLLLGTMAYDHFVAICHPLNYTILMRPRFGILLTVISWFLSNIIALTHTLLLIQLLFCNHNTLPHFFCDLAPLLKLSCSDTLINELVLFIVGLSVIIFPFTLSFFSYVCIIRAVLRVSSTQGKWKAFSTCGSHLTVVLLFYGTIVGVYFFPSSTHPEDTDKIGAVLFTVVTPMINPFIYSLRNKDMKGALRKLINRKISSL

SEQ ID NO: 39294 - protein, 276 aa, Homo sapiens
MRRKNLTEVTEFVFLGFSRFHKHHITLFVVFLILYTLTVAGNAIIMTIICIDRHLHTPMYFFLSMLASSKTVYTLFIIPQMLSSFVTQTQPISLAGCTTQTFFFVTLAINNCFLLTVMGYDHYMAICNPLRYRVITSKKVCVQLVCGAFSIGLAMAAVQVTSIFTLPFCHTVVGHFFCDILPVMKLSCINTTINEIINFVVRLFVILVPMGLVFISYVLIISTVLKIASAEGWKKTFATCAFHLTVVIVHYGCASIAYLMPKSENSIEQDLLLSVT

SEQ ID NO: 39295 - protein, 388 aa, Homo sapiens
MLAAFISRVLRRVAQKSARRVLVASRNSSNDATFEIKKCDLYLLEEGPPVTTVLTRAEGLKYYRMMLTVRRMELKADQLYKQKFIRGFCHLCDGQEACCVGLEAGINPSDHVITSYRAHGVCYTRGLSVRSILAELTGRRGGCAKGKGGSMHMYTKNFYGGNGIVGAQGPLGAGIALACKYKGNDEICLTLYGDGAANQGQIAEAFNMAALWKLPCVFICENNLYGMGTSTERAAASPDYYKRGNFIPGLKVDGMDVLCVREATKFAANYCRSGKGPILMELQTYRYHGHSMSDPGVSYRTREEIQEVRSKRDPIIILQDRMVNSKLATVEELKEIGAEVRKEIDDAAQFATTDPEPHLEELGHHIYSSDSSFEVRGANPWIKFKSVS

SEQ ID NO: 39296 - protein, 879 aa, Homo sapiens
MKEEAFLRRRFSLCPPSSTPQKVDPRKLTRNLLLSGDNELYPLSPGKDMEPNGPSLPRDEGPPTPSSATKVPPAEYRLCNGSDKECVSPTARVTKKETLKAQKENYRQEKKRATRQLLSALTDPSVVIMADSLKIRGTLKSWTKLWCVLKPGVLLIYKTPKVGQWVGTVLLHCCELIERPSKKDGFCFKLFHPLDQSVWAVKGPKGESVGSITQPLPSSYLIFRAASESDGRCWLDALELALRCSSLLRLGTCKPGRDGEPGTSPDASPSSLCGLPASATVHPDQDLFPLNGSSLENDAFSDKSERENPEESDTETQDHSRKTESGSDQSETPGAPVRRGTTYVEQVQEELGELGEASQVETVSEENKSLMWTLLKQLRPGMDLSRVVLPTFVLEPRSFLNKLSDYYYHADLLSRAAVEEDAYSRMKLVLRWYLSGFYKKPKGIKKPYNPILGETFRCCWFHPQTDSRTFYIAEQVSHHPPVSAFHVSNRKDGFCISGSITAKSRFYGNSLSALLDGKATLTFLNRAEDYTLTMPYAHCKGILYGTMTLELGGKVTIECAKNNFQAQLEFKLKPFFGGSTSINQISGKITSGEEVLASLSGHWDRDVFIKEEGSGSSALFWTPSGEVRRQRLRQHTVPLEEQTELESERLWQHVTRAISKGDQHRATQEKFALEEAQRQRARERQESLMPWKPQLFHLDPITQEWHYRYEDHSPWDPLKDIAQFEQDGILRTLQQEAVARQTTFLGSPGPRHERSGPDQRLRKASDQPSGHSQATESSGSTPESCPELSDEEQDGDFVPGGESPCPRCRKEARRLQALHEAILSIREAQQELHRHLSAMLSSTARAAQAPTPGLLQSPRSWFLLCVFLACQLFINHILK

SEQ ID NO: 39297 - protein, 811 aa, Homo sapiens
MKEEAFLRRRFSLCPPSSTPQKVDPRKLTRNLLLSGDNELYPLSPGKDMEPNGPSLPRDEGPPTPSSATKVPPAEYRLCNGSDKECVSPTARVTKKETLKAQKENYRQEKKRATRQLLSALTDPSVVIMADSLKGPKGESVGSITQPLPSSYLIFRAASESDGRCWLDALELALRCSSLLRLGTCKPGRDGEPGTSPDASPSSLCGLPASATVHPDQDLFPLNGSSLENDAFSDKSERENPEESDTETQDHSRKTESGSDQSETPGAPVRRGTTYVEQVQEELGELGEASQVETVSEENKSLMWTLLKQLRPGMDLSRVVLPTFVLEPRSFLNKLSDYYYHADLLSRAAVEEDAYSRMKLVLRWYLSGFYKKPKGIKKPYNPILGETFRCCWFHPQTDSRTFYIAEQVSHHPPVSAFHVSNRKDGFCISGSITAKSRFYGNSLSALLDGKATLTFLNRAEDYTLTMPYAHCKGILYGTMTLELGGKVTIECAKNNFQAQLEFKLKPFFGGSTSINQISGKITSGEEVLASLSGHWDRDVFIKEEGSGSSALFWTPSGEVRRQRLRQHTVPLEEQTELESERLWQHVTRAISKGDQHRATQEKFALEEAQRQRARERQESLMPWKPQLFHLDPITQEWHYRYEDHSPWDPLKDIAQFEQDGILRTLQQEAVARQTTFLGSPGPRHERSGPDQRLRKASDQPSGHSQATESSGSTPESCPELSDEEQDGDFVPGGESPCPRCRKEARRLQALHEAILSIREAQQELHRHLSAMLSSTARAAQAPTPGLLQSPRSWFLLCVFLACQLFINHILK

SEQ ID NO: 39298 - protein, 790 aa, Homo sapiens
MEPNGPSLPRDEGPPTPSSATKVPPAEYRLCNGSDKECVSPTARVTKKETLKAQKENYRQEKKRATRQLLSALTDPSVVIMADSLKIRGTLKSWTKLWCVLKPGVLLIYKTPKGPKGESVGSITQPLPSSYLIFRAASESDGRCWLDALELALRCSSLLRLGTCKPGRDGEPGTSPDASPSSLCGLPASATVHPDQDLFPLNGSSLENDAFSDKSERENPEESDTETQDHSRKTESGSDQSETPGAPVRRGTTYVEQVQEELGELGEASQVETVSEENKSLMWTLLKQLRPGMDLSRVVLPTFVLEPRSFLNKLSDYYYHADLLSRAAVEEDAYSRMKLVLRWYLSGFYKKPKGIKKPYNPILGETFRCCWFHPQTDSRTFYIAEQVSHHPPVSAFHVSNRKDGFCISGSITAKSRFYGNSLSALLDGKATLTFLNRAEDYTLTMPYAHCKGILYGTMTLELGGKVTIECAKNNFQAQLEFKLKPFFGGSTSINQISGKITSGEEVLASLSGHWDRDVFIKEEGSGSSALFWTPSGEVRRQRLRQHTVPLEEQTELESERLWQHVTRAISKGDQHRATQEKFALEEAQRQRARERQESLMPWKPQLFHLDPITQEWHYRYEDHSPWDPLKDIAQFEQDGILRTLQQEAVARQTTFLGSPGPRHERSGPDQRLRKASDQPSGHSQATESSGSTPESCPELSDEEQDGDFVPGGESPCPRCRKEARRLQALHEAILSIREAQQELHRHLSAMLSSTARAAQAPTPGLLQSPRSWFLLCVFLACQLFINHILK

SEQ ID NO: 39299 - protein, 321 aa, Homo sapiens
MSLQKLMEPEAGTNRTAVAEFILLGLVQTEEMQPVVFVLLLFAYLVTTGGNLSILAAVLVEPKLHAPMYFFLGNLSVLDVGCITVTVPAMLGRLLSHKSTISYDACLSQLFFFHLLAGMDCFLLTAMAYDRLLAICQPLTYSTRMSQTVQRMLVAASWACAFTNALTHTVAMSTLNFCGPNEVNHFYCDLPQLFQLSCSSTQLNELLLFVAAAFMAVAPLVFISVSYAHVVAAVLQIRSAEGRKKAFSTCGSHLTVVGIFYGTGVFSYMRLGSVESSDKDKGVGVFMTVINPMLNPLIYSLRNTDVQGALCQLLVGKRSLT

SEQ ID NO: 39300 - protein, 326 aa, Homo sapiens
MCPLTLQVTGLMNVSEPNSSFAFVNEFILQGFSCEWTIQIFLFSLFTTTYALTITGNGAIAFVLWCDRRLHTPMYMFLGNFSFLEIWYVSSTVPKMLVNFLSEKKNISFAGCFLQFYFFFSLGTSECLLLTVMAFDQYLAICRPLLYPNIMTGHLYAKLVILCWVCGFLWFLIPIVLISQMPFCGPNIIDHVVCDPGPRFALDCVSAPRIQLFCYTLSSLVIFGNFLFIIGSYTLVLKAMLGMPSSTGRHKAFSTCGSHLAVVSLCYSSLMVMYVSPGLGHSTGMQKIETLFYAMVTPLFNPLIYSLQNKEIKAALRKVLGSSNII

SEQ ID NO: 39301 - protein, 320 aa, Homo sapiens
MSFLNGTSLTPASFILNGIPGLEDVHLWISFPLCTMYSIAITGNFGLMYLIYCDEALHRPMYVFLALLSFTDVLMCTSTLPNTLFILWFNLKEIDFKACLAQMFFVHTFTGMESGVLMLMALDHCVAICFPLRYATILTNSVIAKAGFLTFLRGVMLVIPSTFLTKRLPYCKGNVIPHTYCDHMSVAKISCGNVRVNAIYGLIVALLIGGFDILCITISYTMILQAVVSLSSADARQKAFSTCTAHFCAIVLTYVPAFFTFFTHHFGGHTIPLHIHIIMANLYLLMPPTMNPIVYGVKTRQVRESVIRFFLKGKDNSHNF

SEQ ID NO: 39302 - protein, 372 aa, Homo sapiens
MEPAPSAGAELQPPLFANASDAYPSACPSAGANASGPPGARSASSLALAIAITALYSAVCAVGLLGNVLVMFGIVRYTKMKTATNIYIFNLALADALATSTLPFQSAKYLMETWPFGELLCKAVLSIDYYNMFTSIFTLTMMSVDRYIAVCHPVKALDFRTPAKAKLINICIWVLASGVGVPIMVMAVTRPRDGAVVCMLQFPSPSWYWDTVTKICVFLFAFVVPILIITVCYGLMLLRLRSVRLLSGSKEKDRSLRRITRMVLVVVGAFVVCWAPIHIFVIVWTLVDIDRRDPLVVAALHLCIALGYANSSLNPVLYAFLDENFKRCFRQLCRKPCGRPDPSSFSRAREATARERVTACTPSDGPGGGAAA

SEQ ID NO: 39303 - protein, 314 aa, Homo sapiens
MTLGSLGNSSSSVSATFLLSGIPGLERMHIWISIPLCFMYLVSIPGNCTILFIIKTERSLHEPMYLFLSMLALIDLGLSLCTLPTVLGIFWVGAREISHDACFAQLFFIHCFSFLESSVLLSMAFDRFVAICHPLHYVSILTNTVIGRIGLVSLGRSVALIFPLPFMLKRFPYCGSPVLSHSYCLHQEVMKLACADMKANSIYGMFVIVSTVGIDSLLILFSYALILRTVLSIASRAERFKALNTCVSHICAVLLFYTPMIGLSVIHRFGKQAPHLVQVVMGFMYLLFPPVMNPIVYSVKTKQIRDRVTHAFCY

SEQ ID NO: 39304 - protein, 505 aa, Homo sapiens
MAALPGTVPRMMRPAPGQNYPRTGFPLEVSTPLGQGRVNQLGGVFINGRPLPNHIRHKIVEMAHHGIRPCVISRQLRVSHGCVSKILCRYQETGSIRPGAIGGSKPRQVATPDVEKKIEEYKRENPGMFSWEIRDRLLKDGHCDRSTVPSGLVSSISRVLRIKFGKKEEEDEADKKEDDGEKKAKHSIDGILGDKGNRLDEGSDVESEPDLPLKRKQRRSRTTFTAEQLEELEKAFERTHYPDIYTREELAQRTKLTEARVQVWFSNRRARWRKQAGANQLAAFNHLLPGGFPPTGMPTLPPYQLPDSTYPTTTISQDGGSTVHRPQPLPPSTMHQGGLAAAAAAADTSSAYGARHSFSSYSDSFMNPAAPSNHMNPVSNGLSPQVMSILGNPSAVPPQPQADFSISPLHGGLDSATSISASCSQRADSIKPGDSLPTSQAYCPPTYSTTGYSVDPVAGYQYGQYGQTAVDYLAKNVSLSTQRRMKLGEHSAVLGLLPVETGQAY

SEQ ID NO: 39305 - protein, 520 aa, Homo sapiens
MAALPGTVPRMMRPAPGQNYPRTGFPLEVSTPLGQGRVNQLGGVFINGRPLPNHIRHKIVEMAHHGIRPCVISRQLRVSHGCVSKILCRYQETGSIRPGAIGGSKPRQVATPDVEKKIEEYKRENPGMFSWEIRDRLLKDGHCDRSTVPSGLVSSISRVLRIKFGKKEEEDEADKKEDDGEKKAKHSIDGILGDKGNRLDEGSDVESEPDLPLKRKQRRSRTTFTAEQLEELEKAFERTHYPDIYTREELAQRTKLTEARVQVWFSNRRARWRKQAGANQLAAFNHLLPGGFPPTGMPTLPPYQLPDSTYPTTTISQDGGSTVHRPQPLPPSTMHQGGLAAAAAAADTSSAYGARHSFSSYSDSFMNPAAPSNHMNPVSNGLSPQVMSILGNPSAVPPQPQADFSISPLHGGLDSATSISASCSQRADSIKPGDSLPTSQAYCPPTYSTTGYSVDPVAGYQYGQYGQSECLVPWASPVPIPSPTPRASCLFMESYKVVSGWGMSISQMEKLKSSQMEQFT

SEQ ID NO: 39306 - protein, 518 aa, Homo sapiens
MAALPGTVPRMMRPAPGQNYPRTGFPLEVSTPLGQGRVNQLGGVFINGRPLPNHIRHKIVEMAHHGIRPCVISRQLRVSHGCVSKILCRYQETGSIRPGAIGGSKPRQVATPDVEKKIEEYKRENPGMFSWEIRDRLLKDGHCDRSTVPSVSSISRVLRIKFGKKEEEDEADKKEDDGEKKAKHSIDGILGDKGNRLDEGSDVESEPDLPLKRKQRRSRTTFTAEQLEELEKAFERTHYPDIYTREELAQRTKLTEARVQVWFSNRRARWRKQAGANQLAAFNHLLPGGFPPTGMPTLPPYQLPDSTYPTTTISQDGGSTVHRPQPLPPSTMHQGGLAAAAAAADTSSAYGARHSFSSYSDSFMNPAAPSNHMNPVSNGLSPQVMSILGNPSAVPPQPQADFSISPLHGGLDSATSISASCSQRADSIKPGDSLPTSQAYCPPTYSTTGYSVDPVAGYQYGQYGQSECLVPWASPVPIPSPTPRASCLFMESYKVVSGWGMSISQMEKLKSSQMEQFT

SEQ ID NO: 39307 - protein, 318 aa, Homo sapiens
MCSGNQTSQNQTASTDFTLTGLFAESKHAALLYTVTFLLFLMALTGNALLILLIHSEPRLHTPMYFFISQLALMDLMYLCVTVPKMLVGQVTGDDTISPSGCGIQMFFHLTLAGAEVFLLAAMAYDRYAAVCRPLHYPLLMNQRVCQLLVSACWVLGMVDGLLLTPITMSFPFCQSRKILSFFCETPALLKLSCSDVSLYKMLTYLCCILMLLTPIMVISSSYTLILHLIHRMNSAAGRRKALATCSSHMIIVLLLFGASFYTYMLRSSYHTAEQDMMVSAFYTIFTPVLNPLIYSLRNKDVTRALRSMMQSRMNQEK

SEQ ID NO: 39308 - protein, 312 aa, Homo sapiens
MENYNQTSTDFILLGLFPPSRIDLFFFILIVFIFLMALIGNLSMILLIFLDTHLHTPMYFLLSQLSLIDLNYISTIVPKMASDFLHGNKSISFTGCGIQSFFFLALGGAEALLLASMAYDRYIAICFPLHYLIRMSKRVCVLMITGSWIIGSINACAHTVYVLHIPYCRSRAINHFFCDVPAMVTLACMDTWVYEGTVFLSATIFLVFPFIGISCSYGQVLFAVYHMKSAEGRKKAYLTCSTHLTVVTFYYAPFVYTYLRPRSLRSPTEDKVLAVFYTILTPMLNPIIYSLRNKEVMGALTRVSQRICSVKM

SEQ ID NO: 39309 - protein, 354 aa, Homo sapiens
MGRLVAVGLLGIALALLGERLLALRNRLKASREVESVDLPHCHLIKGIEAGSEDIDILPNGLAFFSVGLKFPGLHSFAPDKPGGILMMDLKEEKPRARELRISRGFDLASFNPHGISTFIDNDDTVYLFVVNHPEFKNTVEIFKFEEAENSLLHLKTVKHELLPSVNDITAVGPAHFYATNDHYFSDPFLKYLETYLNLHWANVVYYSPNEVKVVAEGFDSANGINISPDDKYIYVADILAHEIHVLEKHTNMNLTQLKVLELDTLVDNLSIDPSSGDIWVGCHPNGQKLFVYDPNNPPSSEVLRIQNILSEKPTVTTVYANNGSVLQGSSVASVYDGKLLIGTLYHRALYCEL

SEQ ID NO: 39310 - protein, 354 aa, Homo sapiens
MGAWVGCGLAGDRAGFLGERLLALRNRLKASREVESVDLPHCHLIKGIEAGSEDIDILPNGLAFFSVGLKFPGLHSFAPDKPGGILMMDLKEEKPRARELRISRGFDLASFNPHGISTFIDNDDTVYLFVVNHPEFKNTVEIFKFEEAENSLLHLKTVKHELLPSVNDITAVGPAHFYATNDHYFSDPFLKYLETYLNLHWANVVYYSPNEVKVVAEGFDSANGINISPDDKYIYVADILAHEIHVLEKHTNMNLTQLKVLELDTLVDNLSIDPSSGDIWVGCHPNGQKLFVYDPNNPPSSEVLRIQNILSEKPTVTTVYANNGSVLQGSSVASVYDGKLLIGTLYHRALYCEL

SEQ ID NO: 39311 - protein, 342 aa, Homo sapiens
MGRLVAVGLLGIALALLGERLLALRNRLKASREVESVDLPHCHLIKGIEAGSEDIDILPNGLAFFSVGLKFPGLHSFAPDKPGGILMMDLKEEKPRARELRISRGFDLASFNPHGISTFIDNEFKNTVEIFKFEEAENSLLHLKTVKHELLPSVNDITAVGPAHFYATNDHYFSDPFLKYLETYLNLHWANVVYYSPNEVKVVAEGFDSANGINISPDDKYIYVADILAHEIHVLEKHTNMNLTQLKVLELDTLVDNLSIDPSSGDIWVGCHPNGQKLFVYDPNNPPSSEVLRIQNILSEKPTVTTVYANNGSVLQGSSVASVYDGKLLIGTLYHRALYCEL

SEQ ID NO: 39312 - protein, 440 aa, Homo sapiens
MGQSQSGGHGPGGGKKDDKDKKKKYEPPVPTRVGKKKKKTKGPDAASKLPLVTPHTQCRLKLLKLERIKDYLLMEEEFIRNQEQMKPLEEKQEEERSKVDDLRGTPMSVGTLEEIIDDNHAIVSTSVGSEHYVSILSFVDKDLLEPGCSVLLNHKVHAVIGVLMDDTDPLVTVMKVEKAPQETYADIGGLDNQIQEIKESVELPLTHPEYYEEMGIKPPKGVILYGPPGTGKTLLAKAVANQTSATFLRVVGSELIQKYLGDGPKLVRELFRVAEEHAPSIVFIDEIDAIGTKRYDSNSGGEREIQRTMLELLNQLDGFDSRGDVKVIMATNRIETLDPALIRPGRIDRKIEFPLPDEKTKKRIFQIHTSRMTLADDVTLDDLIMAKDDLSGADIKAICTEAGLMALRERRMKVTNEDFKKSKENVLYKKQEGTPEGLYL

SEQ ID NO: 39313 - protein, 367 aa, Homo sapiens
MEEEFIRNQEQMKPLEEKQEEERSKVDDLRGTPMSVGTLEEIIDDNHAIVSTSVGSEHYVSILSFVDKDLLEPGCSVLLNHKVHAVIGVLMDDTDPLVTVMKVEKAPQETYADIGGLDNQIQEIKESVELPLTHPEYYEEMGIKPPKGVILYGPPGTGKTLLAKAVANQTSATFLRVVGSELIQKYLGDGPKLVRELFRVAEEHAPSIVFIDEIDAIGTKRYDSNSGGEREIQRTMLELLNQLDGFDSRGDVKVIMATNRIETLDPALIRPGRIDRKIEFPLPDEKTKKRIFQIHTSRMTLADDVTLDDLIMAKDDLSGADIKAICTEAGLMALRERRMKVTNEDFKKSKENVLYKKQEGTPEGLYL

SEQ ID NO: 39314 - protein, 103 aa, Homo sapiens
MGSRCAKLNTGQSPGHSPGHSTGHGRGHESSMKKLMACVSQDNFSLSSAGEEEEEEEEEGEEEEKEELPVQGKLLLLEPERQEEGQKDNAEAQQSPEPKQTPS

SEQ ID NO: 39315 - protein, 553 aa, Homo sapiens
MKWCWGPVLLIAGATVLMEGLQAAQRACGQRGPGPPKPQEGNTVPGEWPWQASVRRQGAHICSGSLVADTWVLTAAHCFEKAAATELNSWSVVLGSLQREGLSPGAEEVGVAALQLPRAYNHYSQGSDLALLQLAHPTTHTPLCLPQPAHRFPFGASCWATGWDQDTSDAPGTLRNLRLRLISRPTCNCIYNQLHQRHLSNPARPGMLCGGPQPGVQGPCQGDSGGPVLCLEPDGHWVQAGIISFASSCAQEDAPVLLTNTAAHSSWLQARVQGAAFLAQSPETPEMSDEDSCVACGSLRTAGPQAGAPSPWPWEARLMHQGQLACGGALVSEEAVLTAAHCFIGRQAPEEWSVGLGTRPEEWGLKQLILHGAYTHPEGGYDMALLLLAQPVTLGASLRPLCLPYPDHHLPDGERGWVLGRARPGAGISSLQTVPVTLLGPRACSRLHAAPGGDGSPILPGMVCTSAVGELPSCEGLSGAPLVHEVRGTWFLAGLHSFGDACQGPARPAVFTALPAYEDWVSSLDWQVYFAEEPEPEAEPGSCLANISQPTSC

SEQ ID NO: 39316 - protein, 1227 aa, Homo sapiens
MGDTSEDASIHRLEGTDLDCQVGGLICKSKSAASEQHVFKAPAPRPSLLGLDLLASLKRREREEKDDGEDKKKSKVSSYKDWEESKDDQKDAEEEGGDQAGQNIRKDRHYRSARVETPSHPGGVSEEFWERSRQRERERREHGVYASSKEEKDWKKEKSRDRDYDRKRDRDERDRSRHSSRSERDGGSERSSRRNEPESPRHRPKDAATPSRSTWEEEDSGYGSSRRSQWESPSPTPSYRDSERSHRLSTRDRDRSVRGKYSDDTPLPTPSYKYNEWADDRRHLGSTPRLSRGRGRREEGEEGISFDTEEERQQWEDDQRQADRDWYMMDEGYDEFHNPLAYSSEDYVRRREQHLHKQKQKRISAQRRQINEDNERWETNRMLTSGVVHRLEVDEDFEEDNAAKVHLMVHNLVPPFLDGRIVFTKQPEPVIPVKDATSDLAIIARKGSQTVRKHREQKERKKAQHKHWELAGTKLGDIMGVKKEEEPDKAVTEDGKVDYRTEQKFADHMKRKSEASSEFAKKKSILEQRQYLPIFAVQQELLTIIRDNSIVIVVGETGSGKTTQLTQYLHEDGYTDYGMIGCTQPRRVAAMSVAKRVSEEMGGNLGEEVGYAIRFEDCTSENTLIKYMTDGILLRESLREADLDHYSAIIMDEAHERSLNTDVLFGLLREVVARRSDLKLIVTSATMDAEKFAAFFGNVPIFHIPGRTFPVDILFSKTPQEDYVEAAVKQSLQVHLSGAPGDILIFMPGQEDIEVTSDQIVEHLEELENAPALAVLPIYSQLPSDLQAKIFQKAPDGVRKCIVATNIAETSLTVDGIMFVIDSGYCKLKVFNPRIGMDALQIYPISQANANQRSGRAGRTGPGQCFRLYTQSAYKNELLTTTVPEIQRTNLANVVLLLKSLGVQDLLQFHFMDPPPEDNMLNSMYQLWILGALDNTGGLTSTGRLMVEFPLDPALSKMLIVSCDMGCSSEILLIVSMLSVPAIFYRPKGREEESDQIREKFAVPESDHLTYLNVYLQWKNNNYSTIWCNDHFIHAKAMRKVREVRAQLKDIMVQQRMSLASCGTDWDIVRKCICAAYFHQAAKLKGIGEYVNIRTGMPCHLHPTSSLFGMGYTPDYIVYHELVMTTKEYMQCVTAVDGEWLAELGPMFYSVKQAGKSRQENRRRAKEEASAMEEEMALAEEQLRARRQEQEKRSPLGSVRSTKIYTPGRKEQGEPMTPRRTPARFGL

SEQ ID NO: 39317 - protein, 539 aa, Homo sapiens
MGDTSEDASIHRLEGTDLDCQVGGLICKSKSAASEQHVFKAPAPRPSLLGLDLLASLKRREREEKDDGEDKKKSKVSSYKDWEESKDDQKDAEEEGGDQAKIFQKAPDGVRKCIVATNIAETSLTVDGIMFVIDSGYCKLKVFNPRIGMDALQIYPISQANANQRSGRAGRTGPGQCFRLYTQSAYKNELLTTTVPEIQRTNLANVVLLLKSLGVQDLLQFHFMDPPPEDNMLNSMYQLWILGALDNTGGLTSTGRLMVEFPLDPALSKMLIVSCDMGCSSEILLIVSMLSVPAIFYRPKGREEESDQIREKFAVPESDHLTYLNVYLQWKNNNYSTIWCNDHFIHAKAMRKVREVRAQLKDIMVQQRMSLASCGTDWDIVRKCICAAYFHQAAKLKGIGEYVNIRTGMPCHLHPTSSLFGMGYTPDYIVYHELVMTTKEYMQCVTAVDGEWLAELGPMFYSVKQAGKSRQENRRRAKEEASAMEEEMALAEEQLRARRQEQEKRSPLGSVRSTKIYTPGRKEQGEPMTPRRTPARFGL

SEQ ID NO: 39318 - protein, 248 aa, Homo sapiens
MSYDRAITVFSPDGHLFQVEYAQEAVKKGSTAVGVRGRDIVVLGVEKKSVAKLQDERTVRKICALDDNVCMAFAGLTADARIVINRARVECQSHRLTVEDPVTVEYITRYIASLKQRYTQSNGRRPFGISALIVGFDFDGTPRLYQTDPSGTYHAWKANAIGRGAKSVREFLEKNYTDEAIETDDLTIKLVIKALLEVVQSGGKNIELAVMRRDQSLKILNPEEIEKYVAEIEKEKEENEKKKQKKAS

SEQ ID NO: 39319 - protein, 178 aa, Homo sapiens
MAFAGLTADARIVINRARVECQSHRLTVEDPVTVEYITRYIASLKQRYTQSNGRRPFGISALIVGFDFDGTPRLYQTDPSGTYHAWKANAIGRGAKSVREFLEKNYTDEAIETDDLTIKLVIKALLEVVQSGGKNIELAVMRRDQSLKILNPEEIEKYVAEIEKEKEENEKKKQKKAS

SEQ ID NO: 39320 - protein, 149 aa, Homo sapiens
MSYDRAITVFSPDGHLFQVEYAQEAVKKGSTAVGVRGRDIVVLGVEKKSVAKLQDERTVRKICALDDNVCMAFAGLTADARIVINRARVECQSHRLTVEDPVTVEYITRYIASLKQVGACPLACSPLAAGQSRLRHGGSCHVTSGESEN

SEQ ID NO: 39321 - protein, 311 aa, Homo sapiens
MARPQPCGPPHARCGSPSLPERPLQVKVVGLFSCPNFQIAKSAAENLKNNHPSKFEDPILVPLQEFAWHQYLQEKKRELKNETWEYSSSVISFVNGQFLGDALDLQKWAHEVWDIVDIKPSALYDALTEDFSAKFLRDTKHDFVFLDICIDSSPIGRLIFELYCDVCPKTCKNFQVLCTGKAGFSQRGIRLHYKNSIFHRIVQNGWIQGGDIVYGKGDNGESIYGPTFEDENFSVPHNKRGVLGMANKGRHSNGSQFYITLQATPYLDRKFVAFGQLIEGTEVLKQLELVPTQNERPIHMCRITDSGDPYA

SEQ ID NO: 39322 - protein, 337 aa, Homo sapiens
MARPQPCGPPHARCGSPSLPERPLQVKVVGLFSCPNFQIAKSAAENLKNNHPSKFEDPILVPLQEFAWHQYLQEKKRELKNETWEYSSSVISFVNGQFLGDALDLQKWAHEVWDIVDIKPSALYDALTEDFSAKFLRDTKHDFVFLDICIDSSPIGRLIFELYCDVCPKTCKNFQVLCTGKAGFSQRGIRLHYKNSIFHRIVQNGWIQGGDIVYGKGDNGESIYGPTFEELYGSLKRSVKRQKESRGVGKIEKYRDENFSVPHNKRGVLGMANKGRHSNGSQFYITLQATPYLDRKFVAFGQLIEGTEVLKQLELVPTQNERPIHMCRITDSGDPYA

SEQ ID NO: 39323 - protein, 279 aa, Homo sapiens
MARPQPCGPPHARCGSPSLPERPLQVKVVGLFSCPNFQIAKSAAEELKNETWEYSSSVISFVNGQFLGDALDLQKWAHEVWDIVDIKPSALYDALTEDFSAKFLRDTKHDFVFLDICIDSSPIGRLIFELYCDVCPKTCKNFQVLCTGKAGFSQRGIRLHYKNSIFHRIVQNGWIQGGDIVYGKGDNGESIYGPTFEDENFSVPHNKRGVLGMANKGRHSNGSQFYITLQATPYLDRKFVAFGQLIEGTEVLKQLELVPTQNERPIHMCRITDSGDPYA

SEQ ID NO: 39324 - protein, 136 aa, Homo sapiens
MILNWKLLGILVLCLHTRGISGSEGHPSHPPAEDREEAGSPTLPQGPPVPGDPWPGAPPLFEDPPPTRPSRPWRDLPETGVWLPEPPRTDPPQPPRPDDPWPAGPQPPENPWPPAPEVDNRPQEEPDLDPPREEYR

SEQ ID NO: 39325 - protein, 118 aa, Homo sapiens
MTDTAEAVPKFEEMFASRFTENDKEYQEYLKRPPESPPIVEEWNSRAGGNQRNRGNRLQDNRQFRGRDNRWGWPSDNRSNQWHGRSWGNNYPQHRQEPYYPQQYGHYGYNQRPPYGYY

SEQ ID NO: 39326 - protein, 1312 aa, Homo sapiens
MSRIEKMSILGVRSFGIEDKDKQIITFFSPLTILVGPNGAGKTTIIECLKYICTGDFPPGTKGNTFVHDPKVAQETDVRAQIRLQFRDVNGELIAVQRSMVCTQKSKKTEFKTLEGVITRTKHGEKVSLSSKCAEIDREMISSLGVSKAVLNNVIFCHQEDSNWPLSEGKALKQKFDEIFSATRYIKALETLRQVRQTQGQKVKEYQMELKYLKQYKEKACEIRDQITSKEAQLTSSKEIVKSYENELDPLKNRLKEIEHNLSKIMKLDNEIKALDSRKKQMEKDNSELEEKMEKVFQGTDEQLNDLYHNHQRTVREKERKLVDCHRELEKLNKESRLLNQEKSELLVEQGRLQLQADRHQEHIRARDSLIQSLATQLELDGFERGPFSERQIKNFHKLVRERQEGEAKTANQLMNDFAEKETLKQKQIDEIRDKKTGLGRIIELKSEILSKKQNELKNVKYELQQLEGSSDRILELDQELIKAERELSKAEKNSNVETLKMEVISLQNEKADLDRTLRKLDQEMEQLNHHTTTRTQMEMLTKDKADKDEQIRKIKSRHSDELTSLLGYFPNKKQLEDWLHSKSKEINQTRDRLAKLNKELASSEQNKNHINNELKRKEEQLSSYEDKLFDVCGSQDFESDLDRLKEEIEKSSKQRAMLAGATAVYSQFITQLTDENQSCCPVCQRVFQTEAELQEVISDLQSKLRLAPDKLKSTESELKKKEKRRDEMLGLVPMRQSIIDLKEKEIPELRNKLQNVNRDIQRLKNDIEEQETLLGTIMPEEESAKVCLTDVTIMERFQMELKDVERKIAQQAAKLQGIDLDRTVQQVNQEKQEKQHKLDTVSSKIELNRKLIQDQQEQIQHLKSTTNELKSEKLQISTNLQRRQQLEEQTVELSTEVQSLYREIKDAKEQVSPLETTLEKFQQEKEELINKKNTSNKIAQDKLNDIKEKVKNIHGYMKDIENYIQDGKDDYKKQKETELNKVIAQLSECEKHKEKINEDMRLMRQDIDTQKIQERWLQDNLTLRKRNEELKEVEEERKQHLKEMGQMQVLQMKSEHQKLEENIDNIKRNHNLALGRQKGYEEEIIHFKKELREPQFRDAEEKYREMMIVMRTTELVNKDLDIYYKTLDQAIMKFHSMKMEEINKIIRDLWRSTYRGQDIEYIEIRSDADENVSASDKRRNYNYRVVMLKGDTALDMRGRCSAGQKVLASLIIRLALAETFCLNCGIIALDEPTTNLDRENIESLAHALVEIIKSRSQQRNFQLLVITHDEDFVELLGRSEYVEKFYRIKKNIDQCSEIVKCSVSSLGFNVH

SEQ ID NO: 39327 - protein, 1318 aa, Homo sapiens
MLIFSVRDMFAKMSILGVRSFGIEDKDKQIITFFSPLTILVGPNGAGKTTIIECLKYICTGDFPPGTKGNTFVHDPKVAQETDVRAQIRLQFRDVNGELIAVQRSMVCTQKSKKTEFKTLEGVITRTKHGEKVSLSSKCAEIDREMISSLGVSKAVLNNVIFCHQEDSNWPLSEGKALKQKFDEIFSATRYIKALETLRQVRQTQGQKVKEYQMELKYLKQYKEKACEIRDQITSKEAQLTSSKEIVKSYENELDPLKNRLKEIEHNLSKIMKLDNEIKALDSRKKQMEKDNSELEEKMEKVFQGTDEQLNDLYHNHQRTVREKERKLVDCHRELEKLNKESRLLNQEKSELLVEQGRLQLQADRHQEHIRARDSLIQSLATQLELDGFERGPFSERQIKNFHKLVRERQEGEAKTANQLMNDFAEKETLKQKQIDEIRDKKTGLGRIIELKSEILSKKQNELKNVKYELQQLEGSSDRILELDQELIKAERELSKAEKNSNVETLKMEVISLQNEKADLDRTLRKLDQEMEQLNHHTTTRTQMEMLTKDKADKDEQIRKIKSRHSDELTSLLGYFPNKKQLEDWLHSKSKEINQTRDRLAKLNKELASSEQNKNHINNELKRKEEQLSSYEDKLFDVCGSQDFESDLDRLKEEIEKSSKQRAMLAGATAVYSQFITQLTDENQSCCPVCQRVFQTEAELQEVISDLQSKLRLAPDKLKSTESELKKKEKRRDEMLGLVPMRQSIIDLKEKEIPELRNKLQNVNRDIQRLKNDIEEQETLLGTIMPEEESAKVCLTDVTIMERFQMELKDVERKIAQQAAKLQGIDLDRTVQQVNQEKQEKQHKLDTVSSKIELNRKLIQDQQEQIQHLKSTTNELKSEKLQISTNLQRRQQLEEQTVELSTEVQSLYREIKDAKEQVSPLETTLEKFQQEKEELINKKNTSNKIAQDKLNDIKEKVKNIHGYMKDIENYIQDGKDDYKKQKETELNKVIAQLSECEKHKEKINEDMRLMRQDIDTQKIQERWLQDNLTLRKRNEELKEVEEERKQHLKEMGQMQVLQMKSEHQKLEENIDNIKRNHNLALGRQKGYEEEIIHFKKELREPQFRDAEEKYREMMIVMRTTELVNKDLDIYYKTLDQAIMKFHSMKMEEINKIIRDLWRSTYRGQDIEYIEIRSDADENVSASDKRRNYNYRVVMLKGDTALDMRGRCSAGQKVLASLIIRLALAETFCLNCGIIALDEPTTNLDRENIESLAHALVEIIKSRSQQRNFQLLVITHDEDFVELLGRSEYVEKFYRIKKNIDQCSEIVKCSVSSLGFNVH

SEQ ID NO: 39328 - protein, 1173 aa, Homo sapiens
MISSLGVSKAVLNNVIFCHQEDSNWPLSEGKALKQKFDEIFSATRYIKALETLRQVRQTQGQKVKEYQMELKYLKQYKEKACEIRDQITSKEAQLTSSKEIVKSYENELDPLKNRLKEIEHNLSKIMKLDNEIKALDSRKKQMEKDNSELEEKMEKVFQGTDEQLNDLYHNHQRTVREKERKLVDCHRELEKLNKESRLLNQEKSELLVEQGRLQLQADRHQEHIRARDSLIQSLATQLELDGFERGPFSERQIKNFHKLVRERQEGEAKTANQLMNDFAEKETLKQKQIDEIRDKKTGLGRIIELKSEILSKKQNELKNVKYELQQLEGSSDRILELDQELIKAERELSKAEKNSNVETLKMEVISLQNEKADLDRTLRKLDQEMEQLNHHTTTRTQMEMLTKDKADKDEQIRKIKSRHSDELTSLLGYFPNKKQLEDWLHSKSKEINQTRDRLAKLNKELASSEQNKNHINNELKRKEEQLSSYEDKLFDVCGSQDFESDLDRLKEEIEKSSKQRAMLAGATAVYSQFITQLTDENQSCCPVCQRVFQTEAELQEVISDLQSKLRLAPDKLKSTESELKKKEKRRDEMLGLVPMRQSIIDLKEKEIPELRNKLQNVNRDIQRLKNDIEEQETLLGTIMPEEESAKVCLTDVTIMERFQMELKDVERKIAQQAAKLQGIDLDRTVQQVNQEKQEKQHKLDTVSSKIELNRKLIQDQQEQIQHLKSTTNELKSEKLQISTNLQRRQQLEEQTVELSTEVQSLYREIKDAKEQVSPLETTLEKFQQEKEELINKKNTSNKIAQDKLNDIKEKVKNIHGYMKDIENYIQDGKDDYKKQKETELNKVIAQLSECEKHKEKINEDMRLMRQDIDTQKIQERWLQDNLTLRKRNEELKEVEEERKQHLKEMGQMQVLQMKSEHQKLEENIDNIKRNHNLALGRQKGYEEEIIHFKKELREPQFRDAEEKYREMMIVMRTTELVNKDLDIYYKTLDQAIMKFHSMKMEEINKIIRDLWRSTYRGQDIEYIEIRSDADENVSASDKRRNYNYRVVMLKGDTALDMRGRCSAGQKVLASLIIRLALAETFCLNCGIIALDEPTTNLDRENIESLAHALVEIIKSRSQQRNFQLLVITHDEDFVELLGRSEYVEKFYRIKKNIDQCSEIVKCSVSSLGFNVH

SEQ ID NO: 39329 - protein, 1227 aa, Homo sapiens
MVLAAAMSQDADPSGPEQPDRVACSVPGARASPAPSGPRGMQQPPPPPQPPPPPQAGLPQIIQNAAKLLDKNPFSVSNPNPLLPSPASLQLAQLQAQLTLHRLKLAQTAVTNNTAAATVLNQVLSKVAMSQPLFNQLRHPSVITGPHGHAGVPQHAAAIPSTRFPSNAIAFSPPSQTRGPGPSMNLPNQPPSAMVMHPFTGVMPQTPGQPAVILGIGKTGPAPATAGFYEYGKASSGQTYGPETDGQPGFLPSSASTSGSVTYEGHYSHTGQDGQAAFSKDFYGPNSQGSHVASGFPAEQAGGLKSEVGPLLQGTNSQWESPHGFSGQSKPDLTAGPMWPPPHNQPYELYDPEEPTSDRTPPSFGGRLNNSKQGFIGAGRRAKEDQALLSVRPLQAHELNDFHGVAPLHLPHICSICDKKVFDLKDWELHVKGKLHAQKCLVFSENAGIRCILGSAEGTLCASPNSTAVYNPAGNEDYASNLGTSYVPIPARSFTQSSPTFPLASVGTTFAQRKGAGRVVHICNLPEGSCTENDVINLGLPFGKVTNYILMKSTNQAFLEMAYTEAAQAMVQYYQEKSAVINGEKLLIRMSKRYKELQLKKPGKAVAAIIQDIHSQRERDMFREADRYGPERPRSRSPVSRSLSPRSHTPSFTSCSSSHSPPGPSRADWGNGRDSWEHSPYARREEERDPAPWRDNGDDKRDRMDPWAHDRKHHPRQLDKAELDERPEGGRPHREKYPRSGSPNLPHSVSSYKSREDGYYRKEPKAKWDKYLKQQQDAPGRSRRKDEARLRESRHPHPDDSGKEDGLGPKVTRAPEGAKAKQNEKNKTKRTDRDQEGADDRKENTMAENEAGKEEQEGMEESPQSVGRQEKEAEFSDPENTRTKKEQDWESESEAEGESWYPTNMEELVTVDEVGEEEDFIVEPDIPELEEIVPIDQKDKICPETCLCVTTTLDLDLAQDFPKEGVKAVGNGAAEISLKSPRELPSASTSCPSDMDVEMPGLNLDAERKPAESETGLSLEDSDCYEKEAKGVESSDVHPAPTVQQMSSPKPAEERARQPSPFVDDCKTRGTPEDGACEGSPLEEKASPPIETDLQNQACQEVLTPENSRYVEMKSLEVRSPEYTEVELKQPLSLPSWEPEDVFSELSIPLGVEFVVPRTGFYCKLCGLFYTSEETAKMSHCRSAVHYRNLQKYLSQLAEEGLKETEGADSPRPEDSGIVPRFERKKL

SEQ ID NO: 39330 - protein, 219 aa, Homo sapiens
MASAGDTQAGPRDAADQNFDYMFKLLLIGNSSVGKTSFLFRYADDSFTPAFVSTVGIDFKVKTVYRHDKRIKLQIWDTAGQERYRTITTAYYRGAMGFLLMYDIANQESFAAVQDWATQIKTYSWDNAQVILVGNKCDLEDERVVPAEDGRRLADDLGFEFFEASAKENINVKQVFERLVDVICEKMNESLEPSSSSGSNGKGPAVGDAPAPQPSSCSC

SEQ ID NO: 39331 - protein, 244 aa, Homo sapiens
MDPGAALQRRAGGGGGLGAGSPALSGGQGRRRKQPPRPADFKLQVIIIGSRGVGKTSLMERFTDDTFCEACKSTVGVDFKIKTVELRGKKIRLQIWDTAGQERFNSITSAYYRSAKGIILVYDITKKETFDDLPKWMKMIDKYASEDAELLLVGNKLDCETDREITRQQGEKFAQQITGMRFCEASAKDNFNVDEIFLKLVDDILKKMPLDILRNELSNSILSLQPEPEIPPELPPPRPHVRCC

SEQ ID NO: 39332 - protein, 496 aa, Homo sapiens
MVEADHPGKLFIGGLNRETNEKMLKAVFGKHGPISEVLLIKDRTSKSRGFAFITFENPADAKNAAKDMNGKSLHGKAIKVEQAKKPSFQSGGRRRPPASSRNRSPSGSLRSARGSRGGTRGWLPSQEGHLDDGGYTPDLKMSYSRGLIPVKRGPSSRSGGPPPKKSAPSAVARSNSWMGSQGPMSQRRENYGVPPRRATISSWRNDRMSTRHDGYATNDGNHPSCQETRDYAPPSRGYAYRDNGHSNRDEHSSRGYRNHRSSRETRDYAPPSRGHAYRDYGHSRRDESYSRGYRNRRSSRETREYAPPSRGHGYRDYGHSRRHESYSRGYRNHPSSRETRDYAPPHRDYAYRDYGHSSWDEHSSRGYSYHDGYGEALGRDHSEHLSGSSYRDALQRYGTSHGAPPARGPRMSYGGSTCHAYSNTRDRYGRSWESYSSCGDFHYCDREHVCRKDQRNPPSLGRVLPDPREAYGSSSYVASIVDGGESRSEKGDSSRY

SEQ ID NO: 39333 - protein, 56 aa, Homo sapiens [sequence omitted]

SEQ ID NO: 39334 - protein, 67 aa, Homo sapiens
MGHQQLYWSHPRKFGQGSRSCRVCSNRHGLIRKYGLNMCRQCFRQYAKDIGFIKKDLSCLPWHCLWR

SEQ ID NO: 39335 - protein, 482 aa, Homo sapiens
MAQTQGTRRKVCYYYDGDVGNYYYGQGHPMKPHRIRMTHNLLLNYGLYRKMEIYRPHKANAEEMTKYHSDDYIKFLRSIRPDNMSEYSKQMQRFNVGEDCPVFDGLFEFCQLSTGGSVASAVKLNKQQTDIAVNWAGGLHHAKKSEASGFCYVNDIVLAILELLKYHQRVLYIDIDIHHGDGVEEAFYTTDRVMTVSFHKYGEYFPGTGDLRDIGAGKGKYYAVNYPLRDGIDDESYEAIFKPVMSKVMEMFQPSAVVLQCGSDSLSGDRLGCFNLTIKGHAKCVEFVKSFNLPMLMLGGGGYTIRNVARCWTYETAVALDTEIPNELPYNDYFEYFGPDFKLHISPSNMTNQNTNEYLEKIKQRLFENLRMLPHAPGVQMQAIPEDAIPEESGDEDEDDPDKRISICSSDKRIACEEEFSDSEEEGEGGRKNSSNFKKAKRVKTEDEKEKDPEEKKEVTEEEKTKEEKPEAKGVKEEVKLA

SEQ ID NO: 39336 - protein, 669 aa, Homo sapiens
MALGLQRARSTTELRKEKSRDAARSRRSQETEVLYQLAHTLPFARGVSAHLDKASIMRLTISYLRMHRLCAAGEWNQVGAGGEPLDACYLKALEGFVMVLTAEGDMAYLSENVSKHLGLSQLELIGHSIFDFIHPCDQEELQDALTPQQTLSRRKVEAPTERCFSLRMKSTLTSRGRTLNLKAATWKVLNCSGHMRAYKPPAQTSPAGSPDSEPPLQCLVLICEAIPHPGSLEPPLGRGAFLSRHSLDMKFTYCDDRIAEVAGYSPDDLIGCSAYEYIHALDSDAVSKSIHTLLSKGQAVTGQYRFLARSGGYLWTQTQATVVSGGRGPQSESIVCVHFLISQVEETGVVLSLEQTEQHSRRPIQRGAPSQKDTPNPGDSLDTPGPRILAFLHPPSLSEAALAADPRRFCSPDLRRLLGPILDGASVAATPSTPLATRHPQSPLSADLPDELPVGTENVHRLFTSGKDTEAVETDLDIAQDADALDLEMLAPYISMDDDFQLNASEQLPRAYHRPLGAVPRPRARSFHGLSPPALEPSLLPRWGSDPRLSCSSPSRGDPSASSPMAGARKRTLAQSSEDEDEGVELLGVRPPKRSPSPEHENFLLFPLSLSFLLTGGPAPGSLQDPSTPLLNLNEPLGLGPSLLSPYSDEDTTQPGGPFQPRAGSAQAD

SEQ ID NO: 39337 - protein, 667 aa, Homo sapiens
MDWQDHRSTTELRKEKSRDAARSRRSQETEVLYQLAHTLPFARGVSAHLDKASIMRLTISYLRMHRLCAAGEWNQVGAGGEPLDACYLKALEGFVMVLTAEGDMAYLSENVSKHLGLSQLELIGHSIFDFIHPCDQEELQDALTPQQTLSRRKVEAPTERCFSLRMKSTLTSRGRTLNLKAATWKVLNCSGHMRAYKPPAQTSPAGSPDSEPPLQCLVLICEAIPHPGSLEPPLGRGAFLSRHSLDMKFTYCDDRIAEVAGYSPDDLIGCSAYEYIHALDSDAVSKSIHTLLSKGQAVTGQYRFLARSGGYLWTQTQATVVSGGRGPQSESIVCVHFLISQVEETGVVLSLEQTEQHSRRPIQRGAPSQKDTPNPGDSLDTPGPRILAFLHPPSLSEAALAADPRRFCSPDLRRLLGPILDGASVAATPSTPLATRHPQSPLSADLPDELPVGTENVHRLFTSGKDTEAVETDLDIAQDADALDLEMLAPYISMDDDFQLNASEQLPRAYHRPLGAVPRPRARSFHGLSPPALEPSLLPRWGSDPRLSCSSPSRGDPSASSPMAGARKRTLAQSSEDEDEGVELLGVRPPKRSPSPEHENFLLFPLSLSFLLTGGPAPGSLQDPSTPLLNLNEPLGLGPSLLSPYSDEDTTQPGGPFQPRAGSAQAD

SEQ ID NO: 39338 - protein, 632 aa, Homo sapiens
MALGLQRARSTTELRKEKSRDAARSRRSQETEVLYQLAHTLPFARGVSAHLDKASIMRLTISYLRMHRLCAAGEWNQVGAGGEPLDACYLKALEGFVMVLTAEGDMAYLSENVSKHLGLSQLELIGHSIFDFIHPCDQEELQDALTPQQTLSRRKVEAPTERCFSLRMKSTLTSRGRTLNLKAATWKVLNCSGHMRAYKPPAQTSPAGSPDSEPPLQCLVLICEAIPHPGSLEPPLGRGAFLSRHSLDMKFTYCDDRIAEVAGYSPDDLIGCSAYEYIHALDSDAVSKSIHTLLSKGQAVTGQYRFLARSGGYLWTQTQATVVSGGRGPQSESIVCVHFLISQVEETGVVLSLEQTEQHSRRPIQRGAPSQKDTPNPGDSLDTPGPRILAFLHPPSLSEAALAADPRRFCSPDLRRLLGPILDGASVAATPSTPLATRHPQSPLSADLPDELPVGTENVHRLFTSGKDTEAVETDLDIAQDADALDLEMLAPYISMDDDFQLNASEQLPRAYHRPLGAVPRPRARSFHGLSPPALEPSLLPRWGSDPRLSCSSPSRGDPSASSPMAGARKRTLAQSSEDEDEGVELLGVRPPKRSPSPEHENFLLFPLSLVCWGINGILWPSLPSWLKPTVL

SEQ ID NO: 39339 - protein, 363 aa, Homo sapiens
MALGLQRARSTTELRKEKSRDAARSRRSQETEVLYQLAHTLPFARGVSAHLDKASIMRLTISYLRMHRLCAAGEWNQVGAGGEPLDACYLKALEGFVMVLTAEGDMAYLSENVSKHLGLSQLELIGHSIFDFIHPCDQEELQDALTPQQTLSRRKVEAPTERCFSLRMKSTLTSRGRTLNLKAATWKVLNCSGHMRAYKPPAQTSPAGSPDSEPPLQCLVLICEAIPHPGSLEPPLGRGAFLSRHSLDMKFTYCDDRIAEVAGYSPDDLIGCSAYEYIHALDSDAVSKSIHTCMYPISPGAKPAATWPPADTRTPQLPIPQDALPPHLNTSSLLPKPQGTVSFLAPSYPVPRSFSPHLPPWWP

SEQ ID NO: 39340 - protein, 613 aa, Homo sapiens
MRLTISYLRMHRLCAAGEWNQVGAGGEPLDACYLKALEGFVMVLTAEGDMAYLSENVSKHLGLSQLELIGHSIFDFIHPCDQEELQDALTPQQTLSRRKVEAPTERCFSLRMKSTLTSRGRTLNLKAATWKVLNCSGHMRAYKPPAQTSPAGSPDSEPPLQCLVLICEAIPHPGSLEPPLGRGAFLSRHSLDMKFTYCDDRIAEVAGYSPDDLIGCSAYEYIHALDSDAVSKSIHTLLSKGQAVTGQYRFLARSGGYLWTQTQATVVSGGRGPQSESIVCVHFLISQVEETGVVLSLEQTEQHSRRPIQRGAPSQKDTPNPGDSLDTPGPRILAFLHPPSLSEAALAADPRRFCSPDLRRLLGPILDGASVAATPSTPLATRHPQSPLSADLPDELPVGTENVHRLFTSGKDTEAVETDLDIAQDADALDLEMLAPYISMDDDFQLNASEQLPRAYHRPLGAVPRPRARSFHGLSPPALEPSLLPRWGSDPRLSCSSPSRGDPSASSPMAGARKRTLAQSSEDEDEGVELLGVRPPKRSPSPEHENFLLFPLSLSFLLTGGPAPGSLQDPSTPLLNLNEPLGLGPSLLSPYSDEDTTQPGGPFQPRAGSAQAD

SEQ ID NO: 39341 - protein, 583 aa, Homo sapiens
MRPAAGAARRPRCCTSWLTRCPSPAASAPTWTRPLSCASPSATCACTASAPQEELQDALTPQQTLSRRKVEAPTERCFSLRMKSTLTSRGRTLNLKAATWKVLNCSGHMRAYKPPAQTSPAGSPDSEPPLQCLVLICEAIPHPGSLEPPLGRGAFLSRHSLDMKFTYCDDRIAEVAGYSPDDLIGCSAYEYIHALDSDAVSKSIHTLLSKGQAVTGQYRFLARSGGYLWTQTQATVVSGGRGPQSESIVCVHFLISQVEETGVVLSLEQTEQHSRRPIQRGAPSQKDTPNPGDSLDTPGPRILAFLHPPSLSEAALAADPRRFCSPDLRRLLGPILDGASVAATPSTPLATRHPQSPLSADLPDELPVGTENVHRLFTSGKDTEAVETDLDIAQDADALDLEMLAPYISMDDDFQLNASEQLPRAYHRPLGAVPRPRARSFHGLSPPALEPSLLPRWGSDPRLSCSSPSRGDPSASSPMAGARKRTLAQSSEDEDEGVELLGVRPPKRSPSPEHENFLLFPLSLSFLLTGGPAPGSLQDPSTPLLNLNEPLGLGPSLLSPYSDEDTTQPGGPFQPRAGSAQAD

SEQ ID NO: 39342 - protein, 600 aa, Homo sapiens
MRPAAGAARRPRCCTSWLTRCPSPAASAPTWTRPLSCASPSATCACTASAPQLELIGHSIFDFIHPCDQEELQDALTPQQTLSRRKVEAPTERCFSLRMKSTLTSRGRTLNLKAATWKVLNCSGHMRAYKPPAQTSPAGSPDSEPPLQCLVLICEAIPHPGSLEPPLGRGAFLSRHSLDMKFTYCDDRIAEVAGYSPDDLIGCSAYEYIHALDSDAVSKSIHTLLSKGQAVTGQYRFLARSGGYLWTQTQATVVSGGRGPQSESIVCVHFLISQVEETGVVLSLEQTEQHSRRPIQRGAPSQKDTPNPGDSLDTPGPRILAFLHPPSLSEAALAADPRRFCSPDLRRLLGPILDGASVAATPSTPLATRHPQSPLSADLPDELPVGTENVHRLFTSGKDTEAVETDLDIAQDADALDLEMLAPYISMDDDFQLNASEQLPRAYHRPLGAVPRPRARSFHGLSPPALEPSLLPRWGSDPRLSCSSPSRGDPSASSPMAGARKRTLAQSSEDEDEGVELLGVRPPKRSPSPEHENFLLFPLSLSFLLTGGPAPGSLQDPSTPLLNLNEPLGLGPSLLSPYSDEDTTQPGGPFQPRAGSAQAD

SEQ ID NO: 39343 - protein, 205 aa, Homo sapiens
MTERRVPFSLLRGPSWDPFRDWYPHSRLFDQAFGLPRLPEEWSQWLGGSSWPGYVRPLPPAAIESPAVAAPAYSRALSRQLSSGVSEIRHTADRWRVSLDVNHFAPDELTVKTKDGVVEITGKHEERQDEHGYISRCFTRKYTLPPGVDPTQVSSSLSPEGTLTVEAPMPKLATQSNEITIPVTFESRAQLGGPEAAKSDETAAK

SEQ ID NO: 39344 - protein, 510 aa, Homo sapiens
MDEKTKKAEEMALSLTRAVAGGDEQVAMKCAIWLAEQRVPLSVQLKPEVSPTQDIRLWVSVEDAQMHTVTIWLTVRPDMTVASLKDMVFLDYGFPPVLQQWVIGQRLARDQETLHSHGVRQNGDSAYLYLLSARNTSLNPQELQRERQLRMLEDLGFKDLTLQPRGPLEPGPPKPGVPQEPGRGQPDAVPEPPPVGWQCPGCTFINKPTRPGCEMCCRARPEAYQVPASYQPDEEERARLAGEEEALRQYQQRKQQQQEGNYLQHVQLDQRSLVLNTEPAECPVCYSVLAPGEAVVLRECLHTFCRECLQGTIRNSQEAEVSCPFIDNTYSCSGKLLEREIKALLTPEDYQRFLDLGISIAENRSAFSYHCKTPDCKGWCFFEDDVNEFTCPVCFHVNCLLCKAIHEQMNCKEYQEDLALRAQNDVAARQTTEMLKVMLQQGEAMRCPQCQIVVQKKDGCDWIRCTVCHTEICWVTKGPRWGPGGPGDTSGGCRCRVNGIPCHPSCQNCH

SEQ ID NO: 39345 - protein, 468 aa, Homo sapiens
MGTATPDGREDQERLWVSVEDAQMHTVTIWLTVRPDMTVASLKDMVFLDYGFPPVLQQWVIGQRLARDQETLHSHGVRQNGDSAYLYLLSARNTSLNPQELQRERQLRMLEDLGFKDLTLQPRGPLEPGPPKPGVPQEPGRGQPDAVPEPPPVGWQCPGCTFINKPTRPGCEMCCRARPEAYQVPASYQPDEEERARLAGEEEALRQYQQRKQQQQEGNYLQHVQLDQRSLVLNTEPAECPVCYSVLAPGEAVVLRECLHTFCRECLQGTIRNSQEAEVSCPFIDNTYSCSGKLLEREIKALLTPEDYQRFLDLGISIAENRSAFSYHCKTPDCKGWCFFEDDVNEFTCPVCFHVNCLLCKAIHEQMNCKEYQEDLALRAQNDVAARQTTEMLKVMLQQGEAMRCPQCQIVVQKKDGCDWIRCTVCHTEICWVTKGPRWGPGGPGDTSGGCRCRVNGIPCHPSCQNCH

SEQ ID NO: 39346 - protein, 230 aa, Homo sapiens
MGTATPDGREDQERLWVSVEDAQMHTVTIWLTVRPDMTVASLKDMVFLDYGFPPVLQQWVIGQRLARDQETLHSHGVRQNGDSAYLYLLSARNTSLNPQELQRERQLRMLEDLGFKDLTLQPRGPLEPGPPKPGVPQEPGRGQPDAVPEPPPVGWQCPGCTFINKPTRPGCEMCCRARPEAYQVPASYQPDEEERARLAGEEEALRQYQQGVPAGHHPQQPGGGGLLPLH

SEQ ID NO: 39347 - protein, 353 aa, Homo sapiens
MSTLLLNLDFGEPPPKKALEGNAKHRNFVKKRRLLERRGFLSKKNQPPSKAPKLHSEPSKKGETPTVDGTWKTPSFPKKKTAASSNGSGQPLDKKAAVSWLTPAPSKKADSVAAKVDLLGEFQSALPKINSHPTRSQKKSSQKKSSKKNHPQKNAPQNSTQAHSENKCSGASQKLPRKMVAIDCEMVGTGPKGHVSSLARCSIVNYNGDVLYDEYILPPCHIVDYRTRWSGIRKQHMVNATPFKIARGQILKILTGKIVVGHAIHNDFKALQYFHPKSLTRDTSHIPPLNRKADCPENATMSLKHLTKKLLNRDIQVGKSGHSSVEDAQATMELYKLVEVEWEEHLARNPPTD

SEQ ID NO: 39348 - protein, 330 aa, Homo sapiens
MTTSLLLHPRWPESLMYVYEDSAAESGIGGGGGGGGGGTGGAGGGCSGASPGKAPSMDGLGSSCPASHCRDLLPHPVLGRPPAPLGAPQGAVYTDIPAPEAARQCAPPPAPPTSSSATLGYGYPFGGSYYGCRLSHNVNLQQKPCAYHPGDKYPEPSGALPGDDLSSRAKEFAFYPSFASSYQAMPGYLDVSVVPGISGHPEPRHDALIPVEGYQHWALSNGWDSQVYCSKEQSQSAHLWKSPFPDVVPLQPEVSSYRRGRKKRVPYTKVQLKELEKEYAASKFITKEKRRRISATTNLSERQVTIWFQNRRVKEKKVVSKSKAPHLHST

SEQ ID NO: 39349 - protein, 155 aa, Homo sapiens
MTPGKTSLVSLLLLLSLEAIVKAGITIPRNPGCPNSEDKNFPRTVMVNLNIHNRNTNTNPKRSSDYYNRSTSPWNLHRNEDPERYPSVIWEAKCRHLGCINADGNVDYHMNSVPIQQEILVLRREPPHCPNSFRLEKILVSVGCTCVTPIVHHVA

SEQ ID NO: 39350 - protein, 376 aa, Homo sapiens
MNYEFEREIGFINSQPSLAECLTSFPPVADTFQSSSIKTSTLSHSTLIPPPFEQTIPSLNPGSHPRHGAGGRPKPSPAGSRGSPVPAGALQPPEYPWMKEKKAAKKTALLPAAAAAATAAATGPACLSHKESLEIADGSGGGSRRLRTAYTNTQLLELEKEFHFNKYLCRPRRVEIAALLDLTERQVKVWFQNRRMKHKRQTQCKENQNSEGKCKSLEDSEKVEEDEEEKTLFEQALSVSGALLEREGYTFQQNALSQQQAPNGHNGDSQSFPVSPLTSNEKNLKHFQHQSPTVPNCLSTMGQNCGAGLNNDSPEALEVPSLQDFSVFSTDSCLQLSDAVSPSLPGSLDSPVDISADSLDFFTDTLTTIDLQHLNY

SEQ ID NO: 39351 - protein, 342 aa, Homo sapiens
MTCPRNVTPNSYAEPLAAPGGGERYSRSAGMYMQSGSDFNCGVMRGCGLAPSLSKRDEGSSPSLALNTYPSYLSQLDSWGDPKAAYRLEQPVGRPLSSCSYPPSVKEENVCCMYSAEKRAKSGPEAALYSHPLPESCLGEHEVPVPSYYRASPSYSALDKTPHCSGANDFEAPFEQRASLNPRAEHLESPQLGGKVSFPETPKSDSQTPSPNEIKTEQSLAGPKGSPSESEKERAKAADSSPDTSDNEAKEEIKAENTTGNWLTAKSGRKKRCPYTKHQTLELEKEFLFNMYLTRERRLEISKTINLTDRQVKIWFQNRRMKLKKMNRENRIRELTSNFNFT

SEQ ID NO: 39352 - protein, 243 aa, Homo sapiens
MSSYFVNSLFSKYKTGESLRPNYYDCGFAQDLGGRPTVVYGPSSGGSFQHPSQIQEFYHGPSSLSTAPYQQNPCAVACHGDPGNFYGYDPLQRQSLFGAQDPDLVQYADCKLAAASGLGEEAEGSEQSPSPTQLFPWMRPQAAAGRRRGRQTYSRYQTLELEKEFLFNPYLTRKRRIEVSHALGLTERQVKIWFQNRRMKWKKENNKDKFPSSKCEQEELEKQKLERAPEAADEGDAQKGDKK

SEQ ID NO: 39353 - protein, 636 aa, Homo sapiens
MRGGRGAPFWLWPLPKLALLPLLWVLFQRTRPQGSAGPLQCYGVGPLGDLNCSWEPLGDLGAPSELHLQSQKYRSNKTQTVAVAAGRSWVAIPREQLTMSDKLLVWGTKAGQPLWPPVFVNLETQMKPNAPRLGPDVDFSEDDPLEATVHWAPPTWPSHKVLICQFHYRRCQEAAWTLLEPELKTIPLTPVEIQDLELATGYKVYGRCRMEKEEDLWGEWSPILSFQTPPSAPKDVWVSGNLCGTPGGEEPLLLWKAPGPCVQVSYKVWFWVGGRELSPEGITCCCSLIPSGAEWARVSAVNATSWEPLTNLSLVCLDSASAPRSVAVSSIAGSTELLVTWQPGPGEPLEHVVDWARDGDPLEKLNWVRLPPGNLSALLPGNFTVGVPYRITVTAVSASGLASASSVWGFREELAPLVGPTLWRLQDAPPGTPAIAWGEVPRHQLRGHLTHYTLCAQSGTSPSVCMNVSGNTQSVTLPDLPWGPCELWVTASTIAGQGPPGPILRLHLPDNTLRWKVLPGILFLWGLFLLGCGLSLATSGRCYHLRHKVLPRWVWEKVPDPANSSSGQPHMEQVPEAQPLGDLPILEVEEMEPPPVMESSQPAQATAPLDSGYEKHFLPTPEELGLLGPPRPQVLA

SEQ ID NO: 39354 - protein, 163 aa, Homo sapiens
MTVKTLHGPAMVKYLLLSILGLAFLSEAAARKIPKVGHTFFQKPESCPPVPGGSMKLDIGIINENQRVSMSRNIESRSTSPWNYTVTWDPNRYPSEVVQAQCRNLGCINAQGKEDISMNSVPIQQETLVVRRKHQGCSVSFQLEKVLVTVGCTCVTPVIHHVQ

SEQ ID NO: 39355 - protein, 369 aa, Homo sapiens
MLKPSLPFTSLLFLQLPLLGVGLNTTILTPNGNEDTTADFFLTTMPTDSLSVSTLPLPEVQCFVFNVEYMNCTWNSSSEPQPTNLTLHYWYKNSDNDKVQKCSHYLFSEEITSGCQLQKKEIHLYQTFVVQLQDPREPRRQATQMLKLQNLVIPWAPENLTLHKLSESQLELNWNNRFLNHCLEHLVQYRTDWDHSWTEQSVDYRHKFSLPSVDGQKRYTFRVRSRFNPLCGSAQHWSEWSHPIHWGSNTSKENPFLFALEAVVISVGSMGLIISLLCVYFWLERTMPRIPTLKNLEDLVTEYHGNFSAWSGVSKGLAESLQPDYSERLCLVSEIPPKGGALGEGPGASPCNQHSPYWAPPCYTLKPET

SEQ ID NO: 39356 - protein, 179 aa, Homo sapiens
MGMKTPQLEQSVDYRHKFSLPSVDGQKRYTFRVRSRFNPLCGSAQHWSEWSHPIHWGSNTSKENPFLFALEAVVISVGSMGLIISLLCVYFWLERTMPRIPTLKNLEDLVTEYHGNFSAWSGVSKGLAESLQPDYSERLCLVSEIPPKGGALGEGPGASPCNQHSPYWAPPCYTLKPET

SEQ ID NO: 39357 - protein, 169 aa, Homo sapiens
MRGTPGDADGGGRAVYQSMCKPITGTINDLNQQVWTLQGQNLVAVPRSDSVTPVTVAVITCKYPEALEQGRGDPIYLGIQNPEMCLYCEKVGEQPTLQLKEQKIMDLYGQPEPVKPFLFYRAKTGRTSTLESVAFPDWFIASSKRDQPIILTSELGKSYNTAFELNIND

SEQ ID NO: 39358 - protein, 134 aa, Homo sapiens
MRGTPGDADGGGRAVYQSITVAVITCKYPEALEQGRGDPIYLGIQNPEMCLYCEKVGEQPTLQLKEQKIMDLYGQPEPVKPFLFYRAKTGRTSTLESVAFPDWFIASSKRDQPIILTSELGKSYNTAFELNIND

SEQ ID NO: 39359 - protein, 411 aa, Homo sapiens
MSPARLRPRLHFCLVLLLLLVVPAAWGCGPGRVVGSRRRPPRKLVPLAYKQFSPNVPEKTLGASGRYEGKIARSSERFKELTPNYNPDIIFKDEENTGADRLMTQRCKDRLNSLAISVMNQWPGVKLRVTEGWDEDGHHSEESLHYEGRAVDITTSDRDRNKYGLLARLAVEAGFDWVYYESKAHVHCSVKSEHSAAAKTGGCFPAGAQVRLESGARVALSAVRPGDRVLAMGEDGSPTFSDVLIFLDREPHRLRAFQVIETQDPPRRLALTPAHLLFTADNHTEPAARFRATFASHVQPGQYVLVAGVPGLQPARVAAVSTHVALGAYAPLTKHGTLVVEDVVASCFAAVADHHLAQLAFWPLRLFHSLAWGSWTPGEGVHWYPQLLYRLGRLLLEEGSFHPLGMSGAGS

SEQ ID NO: 39360 - protein, 917 aa, Homo sapiens
MIASHLLAYFFTELNHDQVQKVDQYLYHMRLSDETLLEISKRFRKEMEKGLGATTHPTAAVKMLPTFVRSTPDGTEHGEFLALDLGGTNFRVLWVKVTDNGLQKVEMENQIYAIPEDIMRGSGTQLFDHIAECLANFMDKLQIKDKKLPLGFTFSFPCHQTKLDESFLVSWTKGFKSSGVEGRDVVALIRKAIQRRGDFDIDIVAVVNDTVGTMMTCGYDDHNCEIGLIVGTGSNACYMEEMRHIDMVEGDEGRMCINMEWGAFGDDGSLNDIRTEFDQEIDMGSLNPGKQLFEKMISGMYMGELVRLILVKMAKEELLFGGKLSPELLNTGRFETKDISDIEGEKDGIRKAREVLMRLGLDPTQEDCVATHRICQIVSTRSASLCAATLAAVLQRIKENKGEERLRSTIGVDGSVYKKHPHFAKRLHKTVRRLVPGCDVRFLRSEDGSGKGAAMVTAVAYRLADQHRARQKTLEHLQLSHDQLLEVKRRMKVEMERGLSKETHASAPVKMLPTYVCATPDGTEKGDFLALDLGGTNFRVLLVRVRNGKWGGVEMHNKIYAIPQEVMHGTGDELFDHIVQCIADFLEYMGMKGVSLPLGFTFSFPCQQNSLDESILLKWTKGFKASGCEGEDVVTLLKEAIHRREEFDLDVVAVVNDTVGTMMTCGFEDPHCEVGLIVGTGSNACYMEEMRNVELVEGEEGRMCVNMEWGAFGDNGCLDDFRTEFDVAVDELSLNPGKQRFEKMISGMYLGEIVRNILIDFTKRGLLFRGRISERLKTRGIFETKFLSQIESDCLALLQVRAILQHLGLESTCDDSIIVKEVCTVVARRAAQLCGAGMAAVVDRIRENRGLDALKVTVGVDGTLYKLHPHFAKVMHETVKDLAPKCDVSFLQSEDGSGKGAALITAVACRIREAGQR

SEQ ID NO: 39361 - protein, 212 aa, Homo sapiens
MNSFSTSAFGPVAFSLGLLLVLPAAFPAPVPPGEDSKDVAAPHRQPLTSSERIDKQIRYILDGISALRKETCNKSNMCESSKEALAENNLNLPKMAEKDGCFQSGFNEETCLVKIITGLLEFEVYLEYLQNRFESSEEQARAVQMSTKVLIQFLQKKAKNLDAITTPDPTTNASLLTKLQAQNQWLQDMTTHLILRSFKEFLQSSLRALRQM

SEQ ID NO: 39362 - protein, 788 aa, Homo sapiens
MGIELLCLFFLFLGRNDHVQGGCALGGAETCEDCLLIGPQCAWCAQENFTHPSGVGERCDTPANLLAKGCQLNFIENPVSQVEILKNKPLSVGRQKNSSDIVQIAPQSLILKLRPGGAQTLQVHVRQTEDYPVDLYYLMDLSASMDDDLNTIKELGSRLSKEMSKLTSNFRLGFGSFVEKPVSPFVKTTPEEIANPCSSIPYFCLPTFGFKHILPLTNDAERFNEIVKNQKISANIDTPEGGFDAIMQAAVCKEKIGWRNDSLHLLVFVSDADSHFGMDSKLAGIVIPNDGLCHLDSKNEYSMSTVLEYPTIGQLIDKLVQNNVLLIFAVTQEQVHLYENYAKLIPGATVGLLQKDSGNILQLIISAYEELRSEVELEVLGDTEGLNLSFTAICNNGTLFQHQKKCSHMKVGDTASFSVTVNIPHCERRSRHIIIKPVGLGDALELLVSPECNCDCQKEVEVNSSKCHHGNGSFQCGVCACHPGHMGPRCECGEDMLSTDSCKEAPDHPSCSGRGDCYCGQCICHLSPYGNIYGPYCQCDNFSCVRHKGLLCGGNGDCDCGECVCRSGWTGEYCNCTTSTDSCVSEDGVLCSGRGDCVCGKCVCTNPGASGPTCERCPTCGDPCNSKRSCIECHLSAAGQAREECVDKCKLAGATISEEEDFSKDGSVSCSLQGENECLITFLITTDNEGKTIIHSINEKDCPKPPNIPMIMLGVSLAILLIGVVLLCIWKLLVSFHDRKEVAKFEAERSKAKWQTGTNPLYRGSTSTFKNVTYKHREKQKVDLSTDC

SEQ ID NO: 39363 - protein, 681 aa, Homo sapiens
MGIELLCLFFLFLGRNDHVQGGCALGGAETCEDCLLIGPQCAWCAQENFTHPSGVGERCDTPANLLAKGCQLNFIENPVSQVEILKNKPLSVGRQKNSSDIVQIAPQSLILKLRPGGAQTLQVHVRQTEDYPVDLYYLMDLSASMDDDLNTIKELGSRLSKEMSKLTSNFRLGFGSFVEKPVSPFVKTTPEEIANPCSSIPYFCLPTFGFKHILPLTNDAERFNEIVKNQKISANIDTPEGGFDAIMQAAVCKEKIGWRNDSLHLLVFVSDADSHFGMDSKLAGIVIPNDGLCHLDSKNEYSMSTVLEYPTIGQLIDKLVQNNVLLIFAVTQEQVHLYENYAKLIPGATVGLLQKDSGNILQLIISAYEELRSEVELEVLGDTEGLNLSFTAICNNGTLFQHQKKCSHMKVGDTASFSVTVNIPHCERRSRHIIIKPVGLGDALELLVSPECNCDCQKEVEVNSSKCHHGNGSFQCGVCACHPGHMGPRCECGEDMLSTDSCKEAPDHPSCSGRGDCYCGQCICHLSPYGNIYGPYCQCDNFSCVRHKGLLCGDFSKDGSVSCSLQGENECLITFLITTDNEGKTIIHSINEKDCPKPPNIPMIMLGVSLAILLIGVVLLCIWKLLVSFHDRKEVAKFEAERSKAKWQTGTNPLYRGSTSTFKNVTYKHREKQKVDLSTDC

SEQ ID NO: 39364 - protein, 51 aa, Homo sapiens
MSGPLSPVCSCPQLPFMLSPCHMHHHPGHVALSQTVSPASLLTQGLGLPQH

SEQ ID NO: 39365 - protein, 564 aa, Homo sapiens
MASTSTTIRSHSSSRRGFSANSARLPGVSRSGFSSVSVSRSRGSGGLGGACGGAGFGSRSLYGLGGSKRISIGGGSCAISGGYGSRAGGSYGFGGAGSGFGFGGGAGIGFGLGGGAGLAGGFGGPGFPVCPPGGIQEVTVNQSLLTPLNLQIDPTIQRVRAEEREQIKTLNNKFASFIDKVRFLEQQNKVLETKWTLLQEQGTKTVRQNLEPLFEQYINNLRRQLDSIVGERGRLDSELRGMQDLVEDFKNKYEDEINKRTAAENEFVTLKKDVDAAYMNKVELQAKADTLTDEINFLRALYDAELSQMQTHISDTSVVLSMDNNRNLDLDSIIAEVKAQYEEIAQRSRAEAESWYQTKYEELQVTAGRHGDDLRNTKQEIAEINRMIQRLRSEIDHVKKQCANLQAAIADAEQRGEMALKDAKNKLEGLEDALQKAKQDLARLLKEYQELMNVKLALDVEIATYRKLLEGEECRLNGEGVGQVNISVVQSTVSSGYGGASGVGSGLGLGGGSSYSYGSGLGVGGGFSSSSGRAIGGGLSSVGGGSSTIKYTTTSSSSRKSYKH

SEQ ID NO: 39366 - protein, 1806 aa, Homo sapiens
MATRVEVGSITPLTAVPGLGEMGKEETLTRTYFLQAGEASGAPPARILEAKSPLRSPARLLPLPRLAPKPFSKEQDVKSPVPSLRPSSTGPSPSGGLSEEPAAKDLDNRMPGLVGQEVGSGEGPRTSSPLFNKAVFLRPSSSTMILFETTKSGPALGKAVSEGAEEAKLGVSGSRPEVAAKPALPTQKPAGTLPRSAPLSQDTKPPVPQEEAGQDHPPSKASSVEDTARPLVEPRPRLKRRPVSAIFTESIQPQKPGPGAAATVGKVPPTPPEKTWVRKPRPLSMDLTARFENKEALLRKVADEGSGPTAGDMAGLERPRAASKLDRDCLVKAEAPLHDPDLDFLEVAKKIRERKEKMLSKPEMGSPRALVGGSSGVTPSNDQSPWEEKAKLDPEPEKAAESPSPRLGRGLELAEVKSRVADGEAAAGGEWASRRSVRKCISLFREDSTLALAVGSESPLATPASPSAAPEPEKGVVSVQERIRGWTAESSEAKPEVRRRTFQARPLSADLTKLFSSSASSNEVKYEKSAELSGEFPKEPREKQKEGHSLDGACIPRSPWKPGTLRDKSRQTEQKVSSNQDPDSCRGGSSVEAPCPSDVTPEDDRSFQTVWATVFEHHVERHTVADQSGRCLSTTPPGDMAHARVSEPRPRPEMGSWLGRDPPDMTKLKKENSRGFDNPETEKLGPTTLLNGELRPYHTPLRDKYPLSENHNNNTFLKHLENPPTSQRIEPRYDIVHAVGERVHSEAISPAPEEKAVTLRSLRSWLSLKDRQLSQEVTPADLECGLEGQAGSVQRASLIWEARGMPEASGPKFGGNCPFPKWTGGAVVSSHKATVAVSEEHCAPGATSVRAIKAAIWESQHEGPEGARSKPGVGARGPPQGCPLDPLSRATNGPSDSQARTHPDAFAVQKGPFIVAAREGDPGPAQVPQPAVRMRKAGAMDQRMDRWRRRTLPPNVKFDTFSSLVPEDSPHVGHRRTDYVSPTASALRKPQLSHYRVETQEVNPGASRDQTSPAVKQGSPVEPKATFFAVTYQIPNTQKAKGVVLSGAESLLEHSRKITPPSSPHSLTSTLVSLGHEEALEMAGSKNWMKGREHENASILKTLKPTDRPSSLGAWSLDPFNGRIIDVDALWSHRGSEDGPRPQSNWKESANKMSPSGGAPQTTPTLRSRPKDLPVRRKTDVISDTFPGKIRDGYRSSVLDIDALMAEYQELSLKVPGEAQERRSPTVEPSTLPRERPVQLGGVEQRRRSLKEMPDTGGLWKPASSAEINHSFTPGLGKQLAETLETAMGTKSSPPFWALPPSAPSERYPGGSPIPADPRKKTGFAEDDRKAFASKHHVAKCQNYLAESKPSGREDPGSGVRVSPKSPPTDQKKGTPRKSTGRGEEDSVAQWGDHPRDCGRVPLDIKRAYSEKGPPANIREGLSIMHEARERRREQPKGRPSLTGENLEAKMGPCWWESGTGDSHKVLPRDLEKEDAPQEKERPLQQVSPVASVPWRSHSFCKDRRSGPFVDQLKQCFSRQPTEPKDTDTLVHEAGSQYGTWTEQCQSGESLATESPDSSATSTRKQPPSSRLSSLSSQTEPTSAGDQYDCSRDQRSTSVDHSSTDLESTDGMEGPPPPDACPEKRVDDFSFIDQTSVLDSSALKTRVQLSKRSRRRAPISHSLRRSRFSESESRSPLEDETDNTWMFKDSTEEKSPRKEESDEEETASKAERTPVSHPQRMPAFPGMDPAVLKAQLHKRPEVDSPGETPSWAPQPKSPKSPFQPGVLGSRVLPSSMDKDERSDEPSPQWLKELKSKKRQSLYENQV

SEQ ID NO: 39367 - protein, 313 aa, Homo sapiens
MEYYYCPSLLKLLRYLWDQLKQCFSRQPTEPKDTDTLVHEAGSQYGTWTEQCQSGESLATESPDSSATSTRKQPPSSRLSSLSSQTEPTSAGDQYDCSRDQRSTSVDHSSTDLESTDGMEGPPPPDACPEKRVDDFSFIDQTSVLDSSALKTRVQLSKRSRRRAPISHSLRRSRFSESESRSPLEDETDNTWMFKDSTEEKSPRKEESDEEETASKAERTPVSHPQRMPAFPGMDPAVLKAQLHKRPEVDSPGETPSWAPQPKSPKSPFQPGVLGSRVLPSSMDKDERSDEPSPQWLKELKSKKRQSLYENQV

SEQ ID NO: 39368 - protein, 177 aa, Homo sapiens
MGCCGCSRGCGSGCGGCGSSCGGCGSGCGGCGSGRGGCGSGCGGCSSSCGGCGSRCYVPVCCCKPVCSWVPACSCTSCGSCGGSKGGCGSCGGSKGGCGSCGGSKGGCGSCGCSQSSCCKPCCCSSGCGSSCCQSSCCKPCCCQSSCCVPVCCQSSCCKPCCCQSNCCVPVCCQCKI

SEQ ID NO: 39369 - protein, 185 aa, Homo sapiens
MVNSCCGSVCSDQGCGQDLCQETCCCPSCCQTTCCRTTCYRPSYSVSCCCRPQCCQSVCCQPTCCRPSCCVSSCCKPQCCQSVCCQPTCCHPSCCISSCCRPSCCVSSCCKPQCCQSVCCQPNCCRPSCSISSCCRPSCCESSCCRPCCCLRPVCGRVSCHTTCYRPACVISTCPRPVCCASSCC

SEQ ID NO: 39370 - protein, 382 aa, Homo sapiens
MLRWTVHLEGGPRRVNHAAVAVGHRVYSFGGYCSGEDYETLRQIDVHIFNAVSLRWTKLPPVKSAIRGQAPVVPYMRYGHSTVLIDDTVLLWGGRNDTEGACNVLYAFDVNTHKWFTPRVSGTVPGARDGHSACVLGKIMYIFGGYEQQADCFSNDIHKLDTSTMTWTLICTKGSPARWRDFHSATMLGSHMYVFGGRADRFGPFHSNNEIYCNRIRVFDTRTEAWLDCPPTPVLPEGRRSHSAFGYNGELYIFGGYNARLNRHFHDLWKFNPVSFTWKKIEPKGKGPCPRRRQCCCIVGDKIVLFGGTSPSPEEGLGDEFDLIDHSDLHILDFSPSLKTLCKLAVIQYNLDQSCLPHDIRWELNAMTTNSNISRPIVSSHG

SEQ ID NO: 39371 - protein, 201 aa, Homo sapiens
MVNSCCGSVCSDQGCGLENCCRPSCCQTTCCRTTCCRPSCCVSSCCRPQCCQSVCCQPTCCRPSCCQTTCCRTTCCRPSCCVSSCCRPQCCQSVCCQPTCCRPSCCQTTCCRTTCCRPSCCVSSCCRPQCCQSVCCQPTCCRPSCCISSSCCPSCCESSCCRPCCCLRPVCGRVSCHTTCYRPTCVISTCPRPLCCASSCC

SEQ ID NO: 39372 - protein, 129 aa, Homo sapiens
MGCCGCSGGCGSGCGGCGSGCGGCGSSCCVPICCCKPVCCCVPACSCTSCGSCGGSKGCCGSCGGSKGGCGSCGGSKGGCGSCGCSQCSCCKPCYCSSGCGSSCCQSSCCKPCCSQASCCVPICCQCKI

SEQ ID NO: 39373 - protein, 624 aa, Homo sapiens
MQPDPRPSGAGACCRFLPLQSQCPEGAGDAVMYASTECKAEVTPSQHGNRTFSYTLEDHTKQAFGIMNELRLSQQLCDVTLQVKYQDAPAAQFMAHKVVLASSSPVFKAMFTNGLREQGMEVVSIEGIHPKVMERLIEFAYTASISMGEKCVLHVMNGAVMYQIDSVVRACSDFLVQQLDPSNAIGIANFAEQIGCVELHQRAREYIYMHFGEVAKQEEFFNLSHCQLVTLISRDDLNVRCESEVFHACINWVKYDCEQRRFYVQALLRAVRCHSLTPNFLQMQLQKCEILQSDSRCKDYLVKIFEELTLHKPTQVMPCRAPKVGRLIYTAGGYFRQSLSYLEAYNPSDGTWLRLADLQVPRSGLAGCVVGGLLYAVGGRNNSPDGNTDSSALDCYNPMTNQWSPCAPMSVPRNRIGVGVIDGHIYAVGGSHGCIHHNSVERYEPERDEWHLVAPMLTRRIGVGVAVLNRLLYAVGGFDGTNRLNSAECYYPERNEWRMITAMNTIRSGAGVCVLHNCIYAAGGYDGQDQLNSVERYDVETETWTFVAPMKHRRSALGITVHQGRIYVLGGYDGHTFLDSVECYDPDTDTWSEVTRMTSGRSGVGVAVTMEPCRKQIDQQNCTC

SEQ ID NO: 39374 - protein, 1030 aa, Homo sapiens
MRENYETLVSVGTAELLPLSAFLSPSEPGRAVGGGSHADEGQEPAGCGDPQGGQPRHSLHLTALVQLVKEIPEFLFGEVKGAMDSPESESRGASLDGERASPEAAAAREPCPLRGLLSCLPDGPTSQPHLATTPTDSSCSSGPTGDGVQGSPLPIKTADKPWPTRKEGPGALGGEPSPPTHSPSRRKSHRGQERGTSEAGISPGNSPLQGLINCLKEILVPGPRHPETSPSFLPPLPSLGTSRLTRADLGPGSPPWAVKTEAVSGDCPLQGLLHCLKELPEAQDRHPSPSGVGNRRLQENPGAWKRGSGGPGYLLTPPPHPDLGAGGLLSVKMENSWVQSPPGPASCQPGRQPLSPSATGDTRGVPQPSWGPEAQAASASSSPLEALEACLKGIPPNGSSPSQLPPTSCSQNPQPGDSRSQKPELQPHRSHSEEATREPVLPLGLQSCVRDGPSRPLAPRGTPTSFSSSSSTDWDLDFGSPVGNQGQHPGKGSPPGSSPLQGLENCLKEIPVPVLRPAWPCSSAADRGPRRAEPRNWTADKEGLRAEACESARLGQGRGEAPTRSLHLVSPQVFTSSCVPACHQRGFKDPGATRPGVWRWLPEGSAPKPSPLHCLESALRGILPVRPLRFACVGGPSPSPSPGSSSSFSGSEGEDPRPEPDLWKPLPQERDRLPSCKPPVPLSPCPGGTPAGSSGGSPGEDPRRTEPRYCSGLGAGTAQDPCPVSQLEKRPRVSEASRGLELGHGRPRVAAKTHERLLPQGPPELPSESPPPELPPPEAAPPVLPASSLQPPCHCGKPLQQELHSLGAALAEKLDRLATALAGLAQEVATMRTQVNRLGRRPQGPGPMGQASWMWTLPRGPRWAHGPGHRHLPYWRQKGPTRPKPKILRGQGESCRAGDLQGLSRGTARRARPLPPDAPPAEPPGLHCSSSQQLLSSTPSCHAAPPAHPLLAHTGGHQSPLPPLVPAALPLQGASPPAASADADVPTSGVAPDGIPERPKEPSSLLGGVQRALQEELWGGEHRDPRWGAH

SEQ ID NO: 39375 - protein, 1029 aa, Homo sapiens
MRENYETLVSVGTAELLPLSAFLSPSEPGRAVGGGSHADEGQEPAGCGDPQGGQPRHSLHLTALVQLVKEIPEFLFGEVKGAMDSPESESRGASLDGERASPEAAAREPCPLRGLLSCLPDGPTSQPHLATTPTDSSCSSGPTGDGVQGSPLPIKTADKPWPTRKEGPGALGGEPSPPTHSPSRRKSHRGQERGTSEAGISPGNSPLQGLINCLKEILVPGPRHPETSPSFLPPLPSLGTSRLTRADLGPGSPPWAVKTEAVSGDCPLQGLLHCLKELPEAQDRHPSPSGVGNRRLQENPGAWKRGSGGPGYLLTPPPHPDLGAGGLLSVKMENSWVQSPPGPASCQPGRQPLSPSATGDTRGVPQPSWGPEAQAASASSSPLEALEACLKGIPPNGSSPSQLPPTSCSQNPQPGDSRSQKPELQPHRSHSEEATREPVLPLGLQSCVRDGPSRPLAPRGTPTSFSSSSSTDWDLDFGSPVGNQGQHPGKGSPPGSSPLQGLENCLKEIPVPVLRPAWPCSSAADRGPRRAEPRNWTADKEGLRAEACESARLGQGRGEAPTRSLHLVSPQVFTSSCVPACHQRGFKDPGATRPGVWRWLPEGSAPKPSPLHCLESALRGILPVRPLRFACVGGPSPSPSPGSSSSFSGSEGEDPRPEPDLWKPLPQERDRLPSCKPPVPLSPCPGGTPAGSSGGSPGEDPRRTEPRYCSGLGAGTAQDPCPVSQLEKRPRVSEASRGLELGHGRPRVAAKTHERLLPQGPPELPSESPPPELPPPEAAPPVLPASSLQPPCHCGKPLQQELHSLGAALAEKLDRLATALAGLAQEVATMRTQVNRLGRRPQGPGPMGQASWMWTLPRGPRWAHGPGHRHLPYWRQKGPTRPKPKILRGQGESCRAGDLQGLSRGTARRARPLPPDAPPAEPPGLHCSSSQQLLSSTPSCHAAPPAHPLLAHTGGHQSPLPPLVPAALPLQGASPPAASADADVPTSGVAPDGIPERPKEPSSLLGGVQRALQEELWGGEHRDPRWGAH

SEQ ID NO: 39376 - protein, 969 aa, Homo sapiens
MRENYETLVSVGTAELLPLSAFLSPSEPGRAVGGGSHADEGQEPAGCGDPQGGQPRHSLHLTALVQLVKEIPEFLFGEVKGAMDSPESESRGASLDGERASPEAAAAREPCPLRGLLSCLPDGPTSQPHLATTPTDSSCSSGPTGDGVQGSPLPIKTADKPWPTRKEGPGALGGEPSPPTHSPSRRKSHRGQERGTSEAGISPGNSPLQGLINCLKEILVPGPRHPETSPSFLPPLPSLGTSRLTRADLGPGSPPWAVKTEAVSGDCPLQGLLHCLKELPEAQDRHPSPSGVGNRRLQENPGAWKRGSGGPGYLLTPPPHPDLGAGGLLSVKMENSWVQSPPGPASCQPGRQPLSPSATGDTRGVPQPSWGPEAQAASASSSPLEALEACLKGIPPNGSSPSQLPPTSCSQNPQPGDSRSQKPELQPHRSHSEEATREPVLPLGLQSCVRDGPSRPLAPRGTPTSFSSSSSTDWDLDFGSPVGNQGQHPGKGSPPGSSPLQGLENCLKEIPVPVLRPAWPCSSAADRGPRRAEPRNWTADKEGSAPKPSPLHCLESALRGILPVRPLRFACVGGPSPSPSPGSSSSFSGSEGEDPRPEPDLWKPLPQERDRLPSCKPPVPLSPCPGGTPAGSSGGSPGEDPRRTEPRYCSGLGAGTAQDPCPVSQLEKRPRVSEASRGLELGHGRPRVAAKTHERLLPQGPPELPSESPPPELPPPEAAPPVLPASSLQPPCHCGKPLQQELHSLGAALAEKLDRLATALAGLAQEVATMRTQVNRLGRRPQGPGPMGQASWMWTLPRGPRWAHGPGHRHLPYWRQKGPTRPKPKILRGQGESCRAGDLQGLSRGTARRARPLPPDAPPAEPPGLHCSSSQQLLSSTPSCHAAPPAHPLLAHTGGHQSPLPPLVPAALPLQGASPPAASADADVPTSGVAPDGIPERPKEPSSLLGGVQRALQEELWGGEHRDPRWGAH

SEQ ID NO: 39377 - protein, 167 aa, Homo sapiens
MDKLTIISGCLFLAADIFAIASIANPDWINTGESAGALTVGLVRQCQTIHGRDRTCIPPRLPPEWVTTLFFIIMGIISLTVTCGLLVASHWRREATKYARWIAFTGMILFCMAALIFPIGFYINEVGGQPYKLPNNTVVGSSYVLFVLSIFFTIVGLLFAGKVCLPG

SEQ ID NO: 39378 - protein, 38 aa, Homo sapiens
MDKLTIISGCLFLAADIFAIASIANPDWINTGESAVSP

SEQ ID NO: 39379 - protein, 592 aa, Homo sapiens
MPSRTGPKMEGSGGRVRLKAHYGGDIFITSVDAATTFEELCEEVRDMCRLHQQHPLTLKWVDSEGDPCTVSSQMELEEAFRLARQCRDEGLIIHVFPSTPEQPGLPCPGEDKSIYRRGARRWRKLYRANGHLFQAKRFNRRAYCGQCSERIWGLARQGYRCINCKLLVHKRCHGLVPLTCRKHMDSVMPSQEPPVDDKNEDADLPSEETDGIAYISSSRKHDSIKDDSEDLKPVIDGMDGIKISQGLGLQDFDLIRVIGRGSYAKVLLVRLKKNDQIYAMKVVKKELVHDDEDIDWVQTEKHVFEQASSNPFLVGLHSCFQTTSRLFLVIEYVNGGDLMFHMQRQRKLPEEHARFYAAEICIALNFLHERGIIYRDLKLDNVLLDADGHIKLTDYGMCKEGLGPGDTTSTFCGTPNYIAPEILRGEEYGFSVDWWALGVLMFEMMAGRSPFDIITDNPDMNTEDYLFQVILEKPIRIPRFLSVKASHVLKGFLNKDPKERLGCRPQTGFSDIKSHAFFRSIDWDLLEKKQALPPFQPQITDDYGLDNFDTQFTSEPVQLTPDDEDAIKRIDQSEFEGFEYINPLLLSTEESV

SEQ ID NO: 39380 - protein, 409 aa, Homo sapiens
MDSVMPSQEPPVDDKNEDADLPSEETDGIAYISSSRKHDSIKDDSEDLKPVIDGMDGIKISQGLGLQDFDLIRVIGRGSYAKVLLVRLKKNDQIYAMKVVKKELVHDDEDIDWVQTEKHVFEQASSNPFLVGLHSCFQTTSRLFLVIEYVNGGDLMFHMQRQRKLPEEHARFYAAEICIALNFLHERGIIYRDLKLDNVLLDADGHIKLTDYGMCKEGLGPGDTTSTFCGTPNYIAPEILRGEEYGFSVDWWALGVLMFEMMAGRSPFDIITDNPDMNTEDYLFQVILEKPIRIPRFLSVKASHVLKGFLNKDPKERLGCRPQTGFSDIKSHAFFRSIDWDLLEKKQALPPFQPQITDDYGLDNFDTQFTSEPVQLTPDDEDAIKRIDQSEFEGFEYINPLLLSTEESV

SEQ ID NO: 39381 - protein, 488 aa, Homo sapiens
MLTPRTDESIYRRGARRWRKLYRANGHLFQAKRFNRRAYCGQCSERIWGLARQGYRCINCKLLVHKRCHGLVPLTCRKHMDSVMPSQEPPVDDKNEDADLPSEETDGIAYISSSRKHDSIKDDSEDLKPVIDGMDGIKISQGLGLQDFDLIRVIGRGSYAKVLLVRLKKNDQIYAMKVVKKELVHDDEDIDWVQTEKHVFEQASSNPFLVGLHSCFQTTSRLFLVIEYVNGGDLMFHMQRQRKLPEEHARFYAAEICIALNFLHERGIIYRDLKLDNVLLDADGHIKLTDYGMCKEGLGPGDTTSTFCGTPNYIAPEILRGEEYGFSVDWWALGVLMFEMMAGRSPFDIITDNPDMNTEDYLFQVILEKPIRIPRFLSVKASHVLKGFLNKDPKERLGCRPQTGFSDIKSHAFFRSIDWDLLEKKQALPPFQPQITDDYGLDNFDTQFTSEPVQLTPDDEDAIKRIDQSEFEGFEYINPLLLSTEESV

SEQ ID NO: 39382 - protein, 159 aa, Homo sapiens
MTHCCSPCCQPTCCRTTCWKPTTVTTCSSTPCCQPSCCVSSCCQPCCRPTCCQNTCCQPICVTSCCQPSCCSTPCCQPTCCGQTSCGSSCGQSSSCAPVYCRRTCYHPTTVCLPGCLNQSCGSNCCQPCCRPACCETTCCRTTCFQPTCVSSCCQPSCC

SEQ ID NO: 39383 - protein, 63 aa, Homo sapiens
MLCDNFPGAVFPGCYWGSYGYPLGYSVGCGYGSTYSPVGYGFGYGYNGCGAFGYRRYSPFALY

SEQ ID NO: 39384 - protein, 288 aa, Homo sapiens
MGCCGCSGGCGSGCGGCGSGCGGCGSGCGGCGSGCGGCGSGCGGCGSSCCVPICCCKPVCCCVPACSCSSCGSCGGSKGGYGSCGGSKGGCVSCGGSKGGCGSCGGSKGGCGSCGGSKGGCGSCGGSKGGCVSCGGSKGGCGSCGGSKGGCVSCGGSKGGCGSCGGSKGGCGSCGGSKGGCGSCGGSKGGCGSCGCSQCSCCKPCCCSSGCGSSCCQSSCCKPCCSSSGCGSSCCQSSCCKPYCCQSSCCKPCCSSSGCGSSCCQSSCCNPCCSQSSCCVPVCCQCKI

SEQ ID NO: 39385 - protein, 389 aa, Homo sapiens
MYGRPQAEMEQEAGELSRWQAAHQAAQDNENSAPILNMSSSSGSSGVHTSWNQGLPSIQHFPHSAEMLGSPLVSVEAPGQNVNEGGPQFSMPLPERGMSYCPQATLTPSRMIYCQRMSPPQQEMTIFSGPQLMPVGEPNIPRVARPFGGNLRMPPNGLPVSASTGIPIMSHTGNPPVPYPGLSTVPSDETLLGPTVPSTEAQAVLPSMAQMLPPQDAHDLGMPPAESQSLLVLGSQDSLVSQPDSQEGPFLPEQPGPAPQTVEKNSRPQEGTGRRGSSEARPYCCNYENCGKAYTKRSHLVSHQRKHTGERPYSCNWESCSWSFFRSDELRRHMRVHTRYRPYKCDQCSREFMRSDHLKQHQKTHRPGPSDPQANNNNGEQDSPPAAGP

SEQ ID NO: 39386 - protein, 345 aa, Homo sapiens
MLMFDPVPVKQEAMDPVSVSYPSNYMESMKPNKYGVIYSTPLPEKFFQTPEGLSHGIQMEPVDLTVNKRSSPPSAGNSPSSLKFPSSHRRASPGLSMPSSSPPIKKYSPPSPGVQPFGVPLSMPPVMAAALSRHGIRSPGILPVIQPVVVQPVPFMYTSHLQQPLMVSLSEEMENSSSSMQVPVIESYEKPISQKKIKIEPGIEPQRTDYYPEEMSPPLMNSVSPPQALLQENHPSVIVQPGKRPLPVESPDTQRKRRIHRCDYDGCNKVYTKSSHLKAHRRTHTGEKPYKCTWEGCTWKFARSDELTRHFRKHTGIKPFQCPDCDRSFSRSDHLALHRKRHMLV

SEQ ID NO: 39387 - protein, 232 aa, Homo sapiens
MLMFDPVPVKQEAMDPVSVSYPSNYMESMKPNKYGVIYSTPLPEKFFQTPEGLSHGIQMEPVDLTVNKRSSPPSAGNSPSSLKFPSSHRRASPGLSMPSSSPPIKKYSPPSPGVQPFGVPLSMPPVMAAALSRHGIRSPGILPVIQPVVVQPVPFMYTSHLQQPLMVSLSEEMENSSSSMQVPVIESYEKPISQKKIKIEPGIEPQRTDYYPEEMSPPLMNSVSPPQALLQE

SEQ ID NO: 39388 - protein, 355 aa, Homo sapiens
MALSEPILPSFSTFASPCRERGLQERWPRAEPESGGTDDDLNSVLDFILSMGLDGLGAEAAPEPPPPPPPPAFYYPEPGAPPPYSAPAGGLVSELLRPELDAPLGPALHGRFLLAPPGRLVKAEPPEADGGGGYGCAPGLTRGPRGLKREGAPGPAASCMRGPGGRPPPPPDTPPLSPDGPARLPAPGPRASFPPPFGGPGFGAPGPGLHYAPPAPPAFGLFDDAAAAAAALGLAPPAARGLLTPPASPLELLEAKPKRGRRSWPRKRTATHTCSYAGCGKTYTKSSHLKAHLRTHTGEKPYHCNWDGCGWKFARSDELTRHYRKHTGHRPFQCHLCDRAFSRSDHLALHMKRHM

SEQ ID NO: 39389 - protein, 562 aa, Homo sapiens
MDLPEGPVGGPTAEMYLRERPEEARLGMPVSLEEQILNSTFEACDPQRTGTVAVAQVLAYLEAVTGQGPQDARLQTLANSLDPNGEGPKATVDLDTFLVVMRDWIAACQLHGGLELEEETAFQGALTSRQLPSGCPEAEEPANLESFGGEDPRPELQATADLLSSLEDLELSNRRLVGENAKLQRSMETAEEGSARLGEEILALRKQLHSTQQALQFAKAMDEELEDLKTLARSLEEQNRSLLAQARQAEKEQQHLVAEMETLQEENGKLLAERDGVKKRSQELAMEKDTLKRQLFECEHLICQRDTILSERTRDVESLAQTLEEYRVTTQELRLEISRLEEQLSQTYEGPDELPEGAQLRRVGWTELLPPSLGLEIEAIRQKQEVATADLSNPLCGVWQWEEVIHETSEETEFPSEAPAGGQRNFQGEPAHPEEGRKEPSMWLTRREEEEDAESQVTADLPVPLGAPRPGDIPENPPERPARRELQQALVPVMKKLVPVRRRAWGQLCLPPQRLRVTRHPLIPAPVLGLLLLLLLSVLLLGPSPPPTWPHLQLCYLQPPPV

SEQ ID NO: 39390 - protein, 600 aa, Homo sapiens
MVLILGRRLNREDLGVRDSPATKRKVFEMDPKSLTGHEFFDFSSGSSHAENILQIFNEFRDSRLFTDVIICVEGKEFPCHRAVLSACSSYFRAMFCNDHRESREMLVEINGILAEAMECFLQYVYTGKVKITTENVQYLFETSSLFQISVLRDACAKFLEEQLDPCNCLGIQRFADTHSLKTLFTKCKNFALQTFEDVSQHEEFLELDKDELIDYICSDELVIGKEEMVFEAVMRWVYRAVDLRRPLLHELLTHVRLPLLHPNYFVQTVEVDQLIQNSPECYQLLHEARRYHILGNEMMSPRTRPRRSTGYSEVIVVVGGCERVGGFNLPYTECYDPVTGEWKSLAKLPEFTKSEYAVCALRNDILVSGGRINSRDVWIYNSQLNIWIRVASLNKGRWRHKMAVLLGKVYVVGGYDGQNRLSSVECYDSFSNRWTEVAPLKEAVSSPAVTSCVGKLFVIGGGPDDNTCSDKVQSYDPETNSWLLRAAIPIAKRCITAVSLNNLIYVAGGLTKAIYCYDPVEDYWMHVQNTFSRQENCGMSVCNGKIYILGGRRENGEATDTILCYDPATSIITGVAAMPRPVSYHGCVTIHRYNEKCFKL

SEQ ID NO: 39391 - protein, 537 aa, Homo sapiens
MVLILGRRLNREDLGVRDSPATKRKVFEMDPKSLTGHEFFDFSSGSSHAENILQIFNEFRDSRLFTDVIICVEGKEFPCHRAVLSACSSYFRAMFCNDHRESREMLVEINGILAEAMECFLQYVYTGKVKITTENVQYLFETSSLFQISVLRDACAKFLEEQLDPCNCLGIQRFADTHSLKTLFTKCKNFALQTFEDVSQHEEFLELDKDELIDYICSDELVIGKEEMVFEAVMRWVYRAVDLRRPLLHELLTHVRLPLLHPNYFVQTVEVDQLIQNSPECYQLLHEARRYHILGNEMMSPRTRPRRSTGYSEVIVVVGGCERVGGFNLPYTECYDPVTGEWKSLAKLPEFTKSEYAVCALRNDILVSGGRINSRDVWIYNSQLNIWIRVASLNKGRWRHKMAVLLGKVYVVGGYDGQNRLSSVECYDSFSNRWTEVAPLKEAVSSPAVTSCVGKLFVIGGGPDDNTCSDKVQSYDPETNSWLLRAAIPIAKRCITAVSLNNLIYVAGGLTKAIYCYDPVEDYWMHVQNTFSRQVIT

SEQ ID NO: 39392 - protein, 644 aa, Homo sapiens
MKLITILFLCSRLLLSLTQESQSEEIDCNDKDLFKAVDAALKKYNSQNQSNNQFVLYRITEATKTVGSDTFYSFKYEIKEGDCPVQSGKTWQDCEYKDAAKAATGECTATVGKRSSTKFSVATQTCQITPAEGPVVTAQYDCLGCVHPISTQSPDLEPILRHGIQYFNNNTQHSSLFMLNEVKRAQRQVVAGLNFRITYSIVQTNCSKENFLFLTPDCKSLWNGDTGECTDNAYIDIQLRIASFSQNCDIYPGKDFVQPPTKICVGCPRDIPTNSPELEETLTHTITKLNAENNATFYFKIDNVKKARVQVVAGKKYFIDFVARETTCSKESNEELTESCETKKLGQSLDCNAEVYVVPWEKKIYPTVNCQPLGMISLMKRPPGFSPFRSSRIGEIKEETTVSPPHTSMAPAQDEERDSGKEQGHTRRHDWGHEKQRKHNLGHGHKHERDQGHGHQRGHGLGHGHEQQHGLGHGHKFKLDDDLEHQGGHVLDHGHKHKHGHGHGKHKNKGKKNGKHNGWKTEHLASSSEDSTTPSAQTQEKTEGPTPIPSLAKPGVTVTFSDFQDSDLIATMMPPISPAPIQSDDDWIPDIQIDPNGLSFNPISDFPDTTSPKCPGRPWKSVSEINPTTQMKESYYFDLTDGLS

SEQ ID NO: 39393 - protein, 427 aa, Homo sapiens
MKLITILFLCSRLLLSLTQESQSEEIDCNDKDLFKAVDAALKKYNSQNQSNNQFVLYRITEATKTVGSDTFYSFKYEIKEGDCPVQSGKTWQDCEYKDAAKAATGECTATVGKRSSTKFSVATQTCQITPAEGPVVTAQYDCLGCVHPISTQSPDLEPILRHGIQYFNNNTQHSSLFMLNEVKRAQRQVVAGLNFRITYSIVQTNCSKENFLFLTPDCKSLWNGDTGECTDNAYIDIQLRIASFSQNCDIYPGKDFVQPPTKICVGCPRDIPTNSPELEETLTHTITKLNAENNATFYFKIDNVKKARVQVVAGKKYFIDFVARETTCSKESNEELTESCETKKLGQSLDCNAEVYVVPWEKKIYPTVNCQPLGMISLMKRPPGFSPFRSSRIGEIKEETTSHLRSCEYKGRPPKAGAEPASEREVS

SEQ ID NO: 39394 - protein, 391 aa, Homo sapiens
MKLITILFLCSRLLLSLTQESQSEEIDCNDKDLFKAVDAALKKYNSQNQSNNQFVLYRITEATKTVGSDTFYSFKYEIKEGDCPVQSGKTWQDCEYKDAAKAATGECTATVGKRSSTKFSVATQTCQITPAEGPVVTAQYDCLGCVHPISTQSPDLEPILRHGIQYFNNNTQHSSLFMLNEVKRAQRQDTGECTDNAYIDIQLRIASFSQNCDIYPGKDFVQPPTKICVGCPRDIPTNSPELEETLTHTITKLNAENNATFYFKIDNVKKARVQVVAGKKYFIDFVARETTCSKESNEELTESCETKKLGQSLDCNAEVYVVPWEKKIYPTVNCQPLGMISLMKRPPGFSPFRSSRIGEIKEETTSHLRSCEYKGRPPKAGAEPASEREVS

SEQ ID NO: 39395 - protein, 458 aa, Homo sapiens
MITKTHKVDLGLPEKKKKKKVVKEPETRYSVLNNDDYFADVSPLRATSPSKSVAHGQAPEMPLVKKKKKKKKGVSTLCEEHVEPETTLPARRTEKSPSLRKQVFGHLEFLSGEKKNKKSPLAMSHASGVKTSPDPRQGEEETRVGKKLKKHKKEKKGAQDPTAFSVQDPWFCEAREARDVGDTCSVGKKDEEQAALGQKRKRKSPREHNGKVKKKKKIHQEGDALPGHSKPSRSMESSPRKGSKKKPVKVEAPEYIPISDDPKASAKKKMKSKKKVEQPVIEEPALKRKKKKKRKESGVAGDPWKEETDTDLEVVLEKKGNMDEAHIDQVRRKALQEEIDRESGKTEASETRKWTGTQFGQWDTAGFENEDQKLKFLRLMGGFKNLSPSFSRPASTIARPNMALGKKAADSLQQNLQRDYDRAMSWKYSRGAGLGFSTAPNKIFYIDRNASKSVKLED

SEQ ID NO: 39396 - protein, 129 aa, Homo sapiens
MILSNTTAVTPFLTKLWQETVQQGGNMSGLARRSPRSSDGKLEALYVLMVLGFFGFFTLGIMLSYIRSKKLEHSNDPFNVYIESDAWQEKDKAYVQARVLESYRSCYVVENHLAIEQPNTHLPETKPSP

SEQ ID NO: 39397 - protein, 513 aa, Homo sapiens
MTLLPGDNSDYDYSALSCTSDASFHPAFLPQRQAIKGAFYRRAQRLRPQDEPRQGCQPEDRRRRIIINVGGIKYSLPWTTLDEFPLTRLGQLKACTNFDDILNVCDDYDVTCNEFFFDRNPGAFGTILTFLRAGKLRLLREMCALSFQEELLYWGIAEDHLDGCCKRRYLQKIEEFAEMVEREEEDDALDSEGRDSEGPAEGEGRLGRCMRRLRDMVERPHSGLPGKVFACLSVLFVTVTAVNLSVSTLPSLREEEEQGHCSQMCHNVFIVESVCVGWFSLEFLLRLIQAPSKFAFLRSPLTLIDLVAILPYYITLLVDGAAAGRRKPGAGNSYLDKVGLVLRVLRALRILYVMRLARHSLGLQTLGLTARRCTREFGLLLLFLCVAIALFAPLLYVIENEMADSPEFTSIPACYWWAVITMTTVGYGDMVPRSTPGQVVALSSILSGILLMAFPVTSIFHTFSRSYLELKQEQERVMFRRAQFLIKTKSQLSVSQDSDILFGSASSDTRDNN

SEQ ID NO: 39398 - protein, 275 aa, Homo sapiens
MTLLPGDNSDYDYSALSCTSDASFHPAFLPQRQAIKGAFYRRAQRLRPQDEPRQGCQPEDRRRRIIINVGGIKYSLPWTTLDEFPLTRLGQLKACTNFDDILNVCDDYDVTCNEFFFDRNPGAFGTILTFLRAGKLRLLREMCALSFQEELLYWGIAEDHLDGCCKRRYLQKIEEFAEMVEREEEDDALDSEGRDSEGPAEGEGRLGRCMRRLRDMVERPHSGLPGKVFACLSVLFVTVTAVNLSVSTLPSLREEEEQVRAHAPRGNAPPRGKGL

SEQ ID NO: 39399 - protein, 422 aa, Homo sapiens
MAKQLQARRLDGIDYNPWVEFVKLASEHDVVNLGQGFPDFPPPDFAVEAFQHAVSGDFMLNQYTKTFGYPPLTKILASFFGELLGQEIDPLRNVLVTVGGYGALFTAFQALVDEGDEVIIIEPFFDCYEPMTMMAGGRPVFVSLKPGPIQNGELGSSSNWQLDPMELAGKFTSRTKALVLNTPNNPLGKVFSREELELVASLCQQHDVVCITDEVYQWMVYDGHQHISIASLPGMWERTLTIGSAGKTFSATGWKVGWVLGPDHIMKHLRTVHQNSVFHCPTQSQAAVAESFEREQLLFRQPSSYFVQFPQAMQRCRDHMIRSLQSVGLKPIIPQGSYFLITDISDFKRKMPDLPGAVDEPYDRRFVKWMIKNKGLVAIPVSIFYSVPHQKHFDHYIRFCFVKDEATLQAMDEKLRKWKVEL

SEQ ID NO: 39400 - protein, 372 aa, Homo sapiens
MAKQLQARRLDGIDYNPWVEFVKLASEHDVVNLGQGFPDFPPPDFAVEAFQHAVSGDFMLNQYTKTFVIIIEPFFDCYEPMTMMAGGRPVFVSLKPGPIQNGELGSSSNWQLDPMELAGKFTSRTKALVLNTPNNPLGKVFSREELELVASLCQQHDVVCITDEVYQWMVYDGHQHISIASLPGMWERTLTIGSAGKTFSATGWKVGWVLGPDHIMKHLRTVHQNSVFHCPTQSQAAVAESFEREQLLFRQPSSYFVQFPQAMQRCRDHMIRSLQSVGLKPIIPQGSYFLITDISDFKRKMPDLPGAVDEPYDRRFVKWMIKNKGLVAIPVSIFYSVPHQKHFDHYIRFCFVKDEATLQAMDEKLRKWKVEL

SEQ ID NO: 39401 - protein, 250 aa, Homo sapiens
MAKQLQARRLDGIDYNPWVEFVKLASEHDVVNLGQGFPDFPPPDFAVEAFQHAVSGDFMLNQYTKTFGYPPLTKILASFFGELLGQEIDPLRNVLVTVGGYGALFTAFQALVDEGDEVIIIEPFFDCYEPMTMMAGGRPVFVSLKPGPIQNGELGSSSNWQLDPMELAGKFTSRTKALVLNTPNNPLGKVFSREELELVASLCQQHDVVCITDEVYQWMVYDGHQHISIVSAAVLFGLGQPASLACGNGP

SEQ ID NO: 39402 - protein, 832 aa, Homo sapiens
MSEAGGAGPGGCGAGAGAGAGPGALPPQPAALPPAPPQGSPCAAAAGGSGACGPATAVAAAGTAEGPGGGGSARIAVKKAQLRSAPRAKKLEKLGVYSACKAEESCKCNGWKNPNPSPTPPRADLQQIIVSLTESCRSCSHALAAHVSHLENVSEEEMNRLLGIVLDVEYLFTCVHKEEDADTKQVYFYLFKLLRKSILQRGKPVVEGSLEKKPPFEKPSIEQGVNNFVQYKFSHLPAKERQTIVELAKMFLNRINYWHLEAPSQRRLRSPNDDISGYKENYTRWLCYCNVPQFCDSLPRYETTQVFGRTLLRSVFTVMRRQLLEQARQEKDKLPLEKRTLILTHFPKFLSMLEEEVYSQNSPIWDQDFLSASSRTSQLGIQTVINPPPVAGTISYNSTSSSLEQPNAGSSSPACKASSGLEANPGEKRKMTDSHVLEEAKKPRVMGDIPMELINEVMSTITDPAAMLGPETNFLSAHSARDEAARLEERRGVIEFHVVGNSLNQKPNKKILMWLVGLQNVFSHQLPRMPKEYITRLVFDPKHKTLALIKDGRVIGGICFRMFPSQGFTEIVFCAVTSNEQVKGYGTHLMNHLKEYHIKHDILNFLTYADEYAIGYFKKQGFSKEIKIPKTKYVGYIKDYEGATLMGCELNPRIPYTEFSVIIKKQKEIIKKLIERKQAQIRKVYPGLSCFKDGVRQIPIESIPGIRETGWKPSGKEKSKEPRDPDQLYSTLKSILQQVKSHQSAWPFMEPVKRTEAPGYYEVIRFPMDLKTMSERLKNRYYVSKKLFMADLQRVFTNCKEYNPPESEYYKCANILEKFFFSKIKEAGLIDK

SEQ ID NO: 39403 - protein, 888 aa, Homo sapiens
MAGAAAESGRELWTFAGSRDPSAPRLAYGYGPGSLRELRAREFSRLAGTVYLDHAGATLFSQSQLESFTSDLMENTYGNPHSQNISSKLTHDTVEQVRYRILAHFHTTAEDYTVIFTAGSTAALKLVAEAFPWVSQGPESSGSRFCYLTDSHTSVVGMRNVTMAINVISTPVRPEDLWSAEERSASASNPDCQLPHLFCYPAQSNFSGVRYPLSWIEEVKSGRLHPVSTPGKWFVLLDAASYVSTSPLDLSAHQADFVPISFYKIFGFPTGLGALLVHNRAAPLLRKTYFGGGTASAYLAGEDFYIPRQSVAQRFEDGTISFLDVIALKHGFDTLERLTGGMENIKQHTFTLAQYTYVALSSLQYPNGAPVVRIYSDSEFSSPEVQGPIINFNVLDDKGNIIGYSQVDKMASLYNIHLRTGCFCNTGACQRHLGISNEMVRKHFQAGHVCGDNMDLIDGQPTGSVRISFGYMSTLDDVQAFLRFIIDTRLHSSGDWPVPQAHADTGETGAPSADSQADVIPAVMGRRSLSPQEDALTGSRVWNNSSTVNAVPVAPPVCDVARTQPTPSEKAAGVLEGALGPHVVTNLYLYPIKSCAAFEVTRWPVGNQGLLYDRSWMVVNHNGVCLSQKQEPRLCLIQPFIDLRQRIMVIKAKGMEPIEVPLEENSERTQIRQSRVCADRVSTYDCGEKISSWLSTFFGRPCHLIKQSSNSQRNAKKKHGKDQLPGTMATLSLVNEAQYLLINTSSILELHRQLNTSDENGKEELFSLKDLSLRFRANIIINGKRAFEEEKWDEISIGSLRFQVLGPCHRCQMICIDQQTGQRNQHVFQKLSESRETKVNFGMYLMHASLDLSSPCFLSVGSQVLPVLKENVEGHDLPASEKHQDVTS

SEQ ID NO: 39404 - protein, 447 aa, Homo sapiens
MENKKKDKDKSDDRMARPSGRSGHNTRGTGSSSSGVLMVGPNFRVGKKIGCGNFGELRLGKNLYTNEYVAIKLEPMKSRAPQLHLEYRFYKQLGSGDGIPQVYYFGPCGKYNAMVLELLGPSLEDLFDLCDRTFSLKTVLMIAIQLISRMEYVHSKNLIYRDVKPENFLIGRPGNKTQQVIHIIDFGLAKEYIDPETKKHIPYREHKSLTGTARYMSINTHLGKEQSRRDDLEALGHMFMYFLRGSLPWQGLKADTLKERYQKIGDTKRATPIEVLCENFPEMATYLRYVRRLDFFEKPDYDYLRKLFTDLFDRKGYMFDYEYDWIGKQLPTPVGAVQQDPALSSNREAHQHRDKMQQSKNQSADHRAAWDSQQANPHHLRAHLAADRHGGSVQVVSSTNGELNTDDPTAGRSNAPITAPTEVEVMDETKCCCFFKRRKRKTIQRHK

SEQ ID NO: 39405 - protein, 455 aa, Homo sapiens
MENKKKDKDKSDDRMARPSGRSGHNTRGTGSSSSGVLMVGPNFRVGKKIGCGNFGELRLGKNLYTNEYVAIKLEPMKSRAPQLHLEYRFYKQLGSGDGIPQVYYFGPCGKYNAMVLELLGPSLEDLFDLCDRTFSLKTVLMIAIQLISRMEYVHSKNLIYRDVKPENFLIGRPGNKTQQVIHIIDFGLAKEYIDPETKKHIPYREHKSLTGTARYMSINTHLGKEQSRRDDLEALGHMFMYFLRGSLPWQGLKADTLKERYQKIGDTKRATPIEVLCENFPEMATYLRYVRRLDFFEKPDYDYLRKLFTDLFDRKGYMFDYEYDWIGKQLPTPVGAVQQDPALSSNREAHQHRDKMQQSKNQSADHRAAWDSQQANPHHLRAHLAADRHGGSVQVVSSTNGELNTDDPTAGRSNAPITAPTEVEVMDETNCQKVLNMWCCCFFKRRKRKTIQRHK

SEQ ID NO: 39406 - protein, 423 aa, Homo sapiens
MENKKKDKDKSDDRMARPSGRSGHNTRGTGSSSSGVLMVGPNFRVGKKIGCGNFGELRLGKNLYTNEYVAIKLEPMKSRAPQLHLEYRFYKQLGSGDGIPQVYYFGPCGKYNAMVLELLGPSLEDLFDLCDRTFSLKTVLMIAIQLISRMEYVHSKNLIYRDVKPENFLIGRPGNKTQQVIHIIDFGLAKEYIDPETKKHIPYREHKSLTGTARYMSINTHLGKEQSRRDDLEALGHMFMYFLRGSLPWQGLKADTLKERYQKIGDTKRATPIEVLCENFPEMATYLRYVRRLDFFEKPDYDYLRKLFTDLFDRKGYMFDYEYDWIGKQLPTPVGAVQQDPALSSNREAHQHRDKMQQSKNQVVSSTNGELNTDDPTAGRSNAPITAPTEVEVMDETNCQKVLNMWCCCFFKRRKRKTIQRHK

SEQ ID NO: 39407 - protein, 424 aa, Homo sapiens
MENKKKDKDKSDDRMARPSGRSGHNTRGTGSSSSGVLMVGPNFRVGKKIGCGNFGELRLGKNLYTNEYVAIKLEPMKSRAPQLHLEYRFYKQLGSGDGIPQVYYFGPCGKYNAMVLELLGPSLEDLFDLCDRTFSLKTVLMIAIQLISRMEYVHSKNLIYRDVKPENFLIGRPGNKTQQVIHIIDFGLAKEYIDPETKKHIPYREHKSLTGTARYMSINTHLGKEQSRRDDLEALGHMFMYFLRGSLPWQGLKADTLKERYQKIGDTKRATPIEVLCENFPEEMATYLRYVRRLDFFEKPDYDYLRKLFTDLFDRKGYMFDYEYDWIGKQLPTPVGAVQQDPALSSNREAHQHRDKMQQSKNQVVSSTNGELNTDDPTAGRSNAPITAPTEVEVMDETNCQKVLNMWCCCFFKRRKRKTIQRHK

SEQ ID NO: 39408 - protein, 348 aa, Homo sapiens
MKSRAPQLHLEYRFYKQLGSGDGIPQVYYFGPCGKYNAMVLELLGPSLEDLFDLCDRTFSLKTVLMIAIQLISRMEYVHSKNLIYRDVKPENFLIGRPGNKTQQVIHIIDFGLAKEYIDPETKKHIPYREHKSLTGTARYMSINTHLGKEQSRRDDLEALGHMFMYFLRGSLPWQGLKADTLKERYQKIGDTKRATPIEVLCENFPEMATYLRYVRRLDFFEKPDYDYLRKLFTDLFDRKGYMFDYEYDWIGKQLPTPVGAVQQDPALSSNREAHQHRDKMQQSKNQVVSSTNGELNTDDPTAGRSNAPITAPTEVEVMDETNCQKVLNMWCCCFFKRRKRKTIQRHK

SEQ ID NO: 39409 - protein, 311 aa, Homo sapiens
MVLELLGPSLEDLFDLCDRTFSLKTVLMIAIQLISRMEYVHSKNLIYRDVKPENFLIGRPGNKTQQVIHIIDFGLAKEYIDPETKKHIPYREHKSLTGTARYMSINTHLGKEQSRRDDLEALGHMFMYFLRGSLPWQGLKADTLKERYQKIGDTKRATPIEVLCENFPEEMATYLRYVRRLDFFEKPDYDYLRKLFTDLFDRKGYMFDYEYDWIGKQLPTPVGAVQQDPALSSNREAHQHRDKMQQSKNQVVSSTNGELNTDDPTAGRSNAPITAPTEVEVMDETNCQKVLNMWCCCFFKRRKRKTIQRHK

SEQ ID NO: 39410 - protein, 267 aa, Homo sapiens
MSLRVLGSGTWPSAPKMFLLLTALQVLAIAMTQSQEDENKIIGGHTCTRSSQPWQAALLAGPRRRFLCGGALLSGQWVITAAHCGRPILQVALGKHNLRRWEATQQVLRVVRQVTHPNYNSRTHDNDLMLLQLQQPARIGRAVRPIEVTQACASPGTSCRVSGWGTISSPIARYPASLQCVNINISPDEVCQKAYPRTITPGMVCAGVPQGGKDSCQGDSGGPLVCRGQLQGLVSWGMERCALPGYPGVYTNLCKYRSWIEETMRDK

SEQ ID NO: 39411 - protein, 426 aa, Homo sapiens
MARRTEPPDGGWGWVVVLSAFFQSALVFGVLRSFGVFFVEFVAAFEEQAARVSWIASIGIAVQQFGSPVGSALSTKFGPRPVVMTGGILAALGMLLASFATSLTHLYLSIGLLSGSGWALTFAPTLACLSCYFSRRRSLATGLALTGVGLSSFTFAPFFQWLLSHYAWRGSLLLVSALSLHLVACGALLRPPSLAEDPAVGGPRAQLTSLLHHGPFLRYTVALTLINTGYFIPYLHLVAHLQDLDWDPLPAAFLLSVVAISDLVGRVVSGWLGDAVPGPVTRLLMLWTTLTGVSLALFPVAQAPTALVALAVAYGFTSGALAPLAFSVLPELIGTRRIYCGLGLLQMIESIGGLLGPPLSGYLRDVTGNYTASFVVAGAFLLSGSGILLTLPHFFCFSTTTSGPQDLVTEALDTKVPLPKEGLEED

SEQ ID NO: 39412 - protein, 293 aa, Homo sapiens
MATARPPWMWVLCALITALLLGVTEHVLANNDVSCDHPSNTVPSGSNQDLGAGAGEDARSDDSSSRIINGSDCDMHTQPWQAALLLRPNQLYCGAVLVHPQWLLTAAHCRKKVFRVRLGHYSLSPVYESGQQMFQGVKSIPHPGYSHPGHSNDLMLIKLNRRIRPTKDVRPINVSSHCPSAGTKCLVSGWGTTKSPQVHFPKVLQCLNISVLSQKRCEDAYPRQIDDTMFCAGDKAGRDSCQGDSGGPVVCNGSLQGLVSWGDYPCARPNRPGVYTNLCKFTKWIQETIQANS

SEQ ID NO: 39413 - protein, 499 aa, Homo sapiens
MVDRGPLLTSAIIFYLAIGAAIFEVLEEPHWKEAKKNYYTQKLHLLKEFPCLGQEGLDKILEVVSDAAGQGVAITGNQTFNNWNWPNAMIFAATVITTIGYGNVAPKTPAGRLFCVFYGLFGVPLCLTWISALGKFFGGRAKRLGQFLTKRGVSLRKAQITCTVIFIVWGVLVHLVIPPFVFMVTEGWNYIEGLYYSFITISTIGFGDFVAGVNPSANYHALYRYFVELWIYLGLAWLSLFVNWKVSMFVEVHKAIKKRRRRRKESFESSPHSRKALQVKGSTASKDVNIFSFLSKKEETYNDLIKQIGKKAMKTSGGGETGPGPGLGPQGGGLPALPPSLVPLVVYSKNRVPTLEEVSQTLRSKGHVSRSPDEEAVARAPEDSSPAPEVFMNQLDRISEECEPWDAQDYHPLIFQDASITFVNTEAGLSDEETSKSSLEDNLAGEESPQQGAEAKAPLNMGEFPSSSESTFTSTESELSVPYEQLMNEYNKANSPKGT

SEQ ID NO: 39414 - protein, 207 aa, Homo sapiens
MENEDGYMTLSFKNRCKSKQKSKDFSLYPQYYCLLLIFGCIVILIFIMTGIDLKFWHKKMDFSQNVNVSSLSGHNYLCPNDWLLNEGKCYWFSTSFKTWKESQRDCTQLQAHLLVIQNLDELEFIQNSLKPGHFGWIGLYVTFQGNLWMWIDEHFLVPELFSVIGPTDDRSCAVITGNWVYSEDCSSTFKGICQRDAILTHNGTSGV

SEQ ID NO: 39415 - protein, 579 aa, Homo sapiens
MSSCRYNGGVMRPLSNLSASRRNLHEMDSEAQPLQPPASVGGGGGASSPSAAAAAAAAVSSSAPEIVVSKPEHNNSNNLALYGTGGGGSTGGGGGGGGSGHGSSSGTKSSKKKNQNIGYKLGHRRALFEKRKRLSDYALIFGMFGIVVMVIETELSWGAYDKASLYSLALKCLISLSTIILLGLIIVYHAREIQLFMVDNGADDWRIAMTYERIFFICLEILVCAIHPIPGNYTFTWTARLAFSYAPSTTTADVDIILSIPMFLRLYLIARVMLLHSKLFTDASSRSIGALNKINFNTRFVMKTLMTICPGTVLLVFSISLWIIAAWTVRACERYHDQQDVTSNFLGAMWLISITFLSIGYGDMVPNTYCGKGVCLLTGIMGAGCTALVVAVVARKLELTKAEKHVHNFMMDTQLTKRVKNAAANVLRETWLIYKNTKLVKKIDHAKVRKHQRKFLQAIHQLRSVKMEQRKLNDQANTLVDLAKTQNIMYDMISDLNERSEDFEKRIVTLETKLETLIGSIHALPGLISQTIRQQQRDFIEAQMESYDKHVTYNAERSRSSSRRRRSSSTAPPTSSESS

SEQ ID NO: 39416 - protein, 231 aa, Homo sapiens
MWLISITFLSIGYGDMVPNTYCGKGVCLLTGIMGAGCTALVVAVVARKLELTKAEKHVHNFMMDTQLTKRVKNAAANVLRETWLIYKNTKLVKKIDHAKVRKHQRKFLQAIHQLRSVKMEQRKLNDQANTLVDLAKTQNIMYDMISDLNERSEDFEKRIVTLETKLETLIGSIHALPGLISQTIRQQQRDFIEAQMESYDKHVTYNAERSRSSSRRRRSSSTAPPTSSESS

SEQ ID NO: 39417 - protein, 260 aa, Homo sapiens
MSDPITLNVGGKLYTTSLATLTSFPDSMLGAMFSGKMPTKRDSQGNCFIDRDGKVFRYILNFLRTSHLDLPEDFQEMGLLRREADFYQVQPLIEALQEKEVELSKAEKNAMLNITLNQRVQTVHFTVREAPQIYSLSSSSMEVFNANIFSTSCLFLKLLGSKLFYCSNGNLSSITSHLQDPNHLTLDWVANVEGLPEEEYTKQNLKRLWVVPANKQINSFQVFVEEVLKIALSDGFCIDSSHPHALDFMNNKIIRLIRYR

SEQ ID NO: 39418 - protein, 272 aa, Homo sapiens
MSSQELVTLNVGGKIFTTRFSTIKQFPASRLARMLDGRDQEFKMVGGQIFVDRDGDLFSFILDFLRTHQLLLPTEFSDYLRLQREALFYELRSLVDLLNPYLLQPRPALVEVHFLSRNTQAFFRVFGSCSKTIEMLTGRITVFTEQPSAPTWNGNFFPPQMTLLPLPPQRPSYHDLVFQCGSDSTTDNQTGVRYVSIKPDNRKLANGTNVLGLLIDTLLKEGFHLVSTRTVSSEDKTECYSFERIKSPEVLITNETPKPETIIIPEQSQIKK

SEQ ID NO: 39419 - protein, 229 aa, Homo sapiens
MSSQELVTLNVGGKIFTTRFSTIKQFPASRLARMLDGRDQEFKMVGGQIFVDRDGDLFSFILDFLRTHQLLLPTEFSDYLRLQREALFYELRSLVDLLNPYLLQPRPALVEVHFLSRNTQAFFRVFGSCSKTIEMLTGRITVFTEQPSAPTWNGNFFPPQMTLLPLPPQRPSYHDLVFQCGSDSTTDNQTGVRLVCNGVISAHHNLRLWGSSDSPASASRVAGITGMFL

SEQ ID NO: 39420 - protein, 191 aa, Homo sapiens
MVKKLVMAQKRGETRALCLGVTMVVCAVITYYILVTTVLPLYQKSVWTQESKCHLIETNIRDQEELKGKKVPQYPCLWVNVSAAGRWAVLYHTEDTRDQNQQCSYIPGSVDNYQTARADVEKVRAKFQEQQVFYCFSAPRGNETSVLFQRLYGPQALLFSLFWPTFLLTGGLLIIAMVKSNQYLSILAAQK

SEQ ID NO: 39421 - protein, 130 aa, Homo sapiens
MVKKLVMAQKRGETRALCLGVTMVVCAVITYYILVTTVLPLYQKSVWTQESKCHLIETNIRDQEELKGKKVPQYPCLWVNVSAAGRWAVLYHTEDTRDQNQQVLNWRDGDTSLYPCQVCEPVPNCPCPRG

SEQ ID NO: 39422 - protein, 569 aa, Homo sapiens
MLAASIFRPTLLLCWLAAPWPTQPESLFHSRDRSDLEPSPLRQAKPIADLHAAQRFLSRYGWSGVWAAWGPSPEGPPETPKGAALAEAVRRFQRANALPASGELDAATLAAMNRPRCGVPDMRPPPPSAPPSPPGPPPRARSRRSPRAPLSLSRRGWQPRGYPDGGAAQAFSKRTLSWRLLGEALSSQLSVADQRRIVALAFRMWSEVTPLDFREDLAAPGAAVDIKLGFGRGRHLGCPRAFDGSGQEFAHAWRLGDIHFDDDEHFTPPTSDTGISLLKVAVHEIGHVLGLPHTYRTGSIMQPNYIPQEPAFELDWSDRKAIQKLYGSCEGSFDTAFDWIRKERNQYGEVMVRFSTYFFRNSWYWLYENRNNRTRYGDPIQILTGWPGIPTHNIDAFVHIWTWKRDERYFFQGNQYWRYDSDKDQALTEDEQGKSYPKLISEGFPGIPSPLDTAFYDRRQKLIYFFKESLVFAFDVNRNRVLNSYPKRITEVFPAVIPQNHPFRNIDSAYYSYAYNSIFFFKGNAYWKVVNDKDKQQNSWLPANGLFPKKFISEKWFDVCDVHISTLNM

SEQ ID NO: 39423 - protein, 2986 aa, Homo sapiens
MTDRFWDQWYLWYLRLLRLLDRGSFRNDGLKASDVLPILKEKVAFVSGGRDKRGGPILTFPARSNHDRIRQEDLRKLVTYLASVPSEDVCKRGFTVIIDMRGSKWDLIKPLLKTLQEAFPAEIHVALIIKPDNFWQKQKTNFGSSKFIFETSMVSVEGLTKLVDPSQLTEEFDGSLDYNHEEWIELRLSLEEFFNSAVHLLSRLEDLQEMLARKEFPVDVEGSRRLIDEHTQLKKKVLKAPVEELDREGQRLLQCIRCSDGFSGRNCIPGSADFQSLVPKITSLLDKLHSTRQHLHQMWHVRKLKLDQCFQLRLFEQDAEKMFDWISHNKELFLQSHTEIGVSYQYALDLQTQHNHFAMNSMNAYVNINRIMSVASRLSEAGHYASQQIKQISTQLDQEWKSFAAALDERSTILAMSAVFHQKAEQFLSGVDAWCKMCSEGGLPSEMQDLELAIHHHQTLYEQVTQAYTEVSQDGKALLDVLQRPLSPGNSESLTATANYSKAVHQVLDVVHEVLHHQRRLESIWQHRKVRLHQRLQLCVFQQDVQQVLDWIENHGEAFLSKHTGVGKSLHRARALQKRHDDFEEVAQNTYTNADKLLEAAEQLAQTGECDPEEIYKAARHLEVRIQDFVRRVEQRKLLLDMSVSFHTHTKELWTWMEDLQKEMLEDVCADSVDAVQELIKQFQQQQTATLDATLNVIKEGEDLIQQLRSAPPSLGEPSEARDSAVSNNKTPHSSSISHIESVLQQLDDAQVQMEELFHERKIKLDIFLQLRIFEQYTIEVTAELDAWNEDLLRQMNDFNTEDLTLAEQRLQRHTERKLAMNNMTFEVIQQGQDLHQYITEVQASGIELICEKDIDLAAQVQELLEFLHEKQHELELNAEQTHKRLEQCLQLRHLQAEVKQVLGWIRNGESMLNASLVNASSLSEAEQLQREHEQFQLAIESLFHATSLQKTHQSALQVQQKAEVLLQAGHYDADAIRECAEKVALHWQQLMLKMEDRLKLVNASVAFYKTSEQVCSVLESLEQEYRRDEDWCGGRDKLGPAAEIDHVIPLISKHLEQKEAFLKACTLARRNAEVFLKYIHRNNVSMPSVASHTRGPEQQVKAILSELLQRENRVLHFWTLKKRRLDQCQQYVVFERSAKQALDWIQETGEFYLSTHTSTGETTEETQELLKEYGEFRVPAKQTKEKVKLLIQLADSFVEKGHIHATEIRKWVTTVDKHYRDFSLRMGKYRYSLEKALGVNTEDNKDLELDIIPASLSDREVKLRDANHEVNEEKRKSARKKEFIMAELLQTEKAYVRDLHECLETYLWEMTSGVEEIPPGILNKEHIIFGNIQEIYDFHNNIFLKELEKYEQLPEDVGHCFVTWADKFQMYVTYCKNKPDSNQLILEHAGTFFDEIQQRHGLANSISSYLIKPVQRITKYQLLLKELLTCCEEGKGELKDGLEVMLSVPKKANDAMHVSMLEGFDENLDVQGELILQDAFQVWDPKSLIRKGRERHLFLFEISLVFSKEIKDSSGHTKYVYKNKLLTSELGVTEHVEGDPCKFALWSGRTPSSDNKTVLKASNIETKQEWIKNIREVIQERIIHLKGALKEPLQLPKTPAKQRNNSKRDGVEDIDSQGDGSSQPDTISIASRTSQNTVDSDKLSGGCELTVVLQDFSAGHSSELTIQVGQTVELLERPSERPGWCLVRTTERSPPLEGLVPSSALCISHSRSSVEMDCFFPLVKDAYSHSSSENGGKSESVANLQAQPSLNSIHSSPGPKRSTNTLKKWLTSPVRRLNSGKADGNIKKQKKVRDGRKSFDLGSPKPGDETTPQGDSADEKSKKGWGEDEPDEESHTPLPPPMKIFDNDPTQDEMSSSLLAARQASTEVPTAADLVNAIEKLVKNKLSLEGSSYRGSLKDPAGCLNEGMAPPTPPKNPEEEQKAKALRGRMFVLNELVQTEKDYVKDLGIVVEGFMKRIEEKGVPEDMRGKDKIVFGNIHQIYDWHKDFFLAELEKCIQEQDRLAQLFIKHERKLHIYVWYCQNKPRSEYIVAEYDAYFEEVKQEINQRLTLSDFLIKPIQRITKYQLLLKDFLRYSEKAGLECSDIEKAVELMCLVPKRCNDMMNLGRLQGFEGTLTAQGKLLQQDTFYVIELDAGMQSRTKERRVFLFEQIVIFSELLRKGSLTPGYMFKRSIKMNYLVLEENVDNDPCKFALMNRETSERVVLQAANADIQQAWVQDINQVLETQRDFLNALQSPIEYQRKERSTAVMRSQPARLPQASPRPYSSVPAGSEKPPKGSSYNPPLPPLKISTSNGSPGFEYHQPGDKFEASKQNDLGGCNGTSSMAVIKDYYALKENEICVSQGEVVQVLAVNQQNMCLVYQPASDHSPAAEGWVPGSILAPLTKATAAESSDGSIKKSCSWHTLRMRKRAEVENTGKNEATGPRKPKDILGNKVSVKETNSSEESECDDLDPNTSMEILNPNFIQEVAPEFLVPLVDVTCLLGDTVILQCKVCGRPKPTITWKGPDQNILDTDNSSATYTVSSCDSGEITLKICNLMPQDSGIYTCIATNDHGTTSTSATVKVQGVPAAPNRPIAQERSCTSVILRWLPPSSTGNCTISGYTVEYREEGSQIWQQSVASTLDTYLVIEDLSPGCPYQFRVSASNPWGISLPSEPSEFVRLPEYDAAADGATISWKENFDSAYTELNEIGRGRFSIVKKCIHKATRKDVAVKFVSKKMKKKEQAAHEAALLQHLQHPQYITLHDTYESPTSYILILELMDDGRLLDYLMNHDELMEEKVAFYIRDIMEALQYLHNCRVAHLDIKPENLLIDLRIPVPRVKLIDLEDAVQISGHFHIHHLLGNPEFAAPEVIQGIPVSLGTDIWSIGVLTYVMLSGVSPFLDESKEETCINVCRVDFSFPHEYFCGVSNAARDFINVILQEDFRRRPTAATCLQHPWLQPHNGSYSKIPLDTSRLACFIERRKHQNDVRPIPNVKSYIVNRVNQGT

SEQ ID NO: 39424 - protein, 1663 aa, Homo sapiens
MTDRFWDQWYLWYLRLLRLLDRGSFRNDGLKASDVLPILKEKVAFVSGGRDKRGGPILTFPARSNHDRIRQEDLRKLVTYLASVPSEDVCKRGFTVIIDMRGSKWDLIKPLLKTLQEAFPAEIHVALIIKPDNFWQKQKTNFGSSKFIFETSMVSVEGLTKLVDPSQLTEEFDGSLDYNHEEWIELRLSLEEFFNSAVHLLSRLEDLQEMLARKEFPVDVEGSRRLIDEHTQLKKKVLKAPVEELDREGQRLLQCIRCSDGFSGRNCIPGSADFQSLVPKITSLLDKLHSTRQHLHQMWHVRKLKLDQCFQLRLFEQDAEKMFDWISHNKELFLQSHTEIGVSYQYALDLQTQHNHFAMNSMNAYVNINRIMSVASRLSEAGHYASQQIKQISTQLDQEWKSFAAALDERSTILAMSAVFHQKAEQFLSGVDAWCKMCSEGGLPSEMQDLELAIHHHQTLYEQVTQAYTEVSQDGKALLDVLQRPLSPGNSESLTATANYSKAVHQVLDVVHEVLHHQRRLESIWQHRKVRLHQRLQLCVFQQDVQQVLDWIENHGEAFLSKHTGVGKSLHRARALQKRHDDFEEVAQNTYTNADKLLEAAEQLAQTGECDPEEIYKAARHLEVRIQDFVRRVEQRKLLLDMSVSFHTHTKELWTWMEDLQKEMLEDVCADSVDAVQELIKQFQQQQTATLDATLNVIKEGEDLIQQLRSAPPSLGEPSEARDSAVSNNKTPHSSSISHIESVLQQLDDAQVQMEELFHERKIKLDIFLQLRIFEQYTIEVTAELDAWNEDLLRQMNDFNTEDLTLAEQRLQRHTERKLAMNNMTFEVIQQGQDLHQYITEVQASGIELICEKDIDLAAQVQELLEFLHEKQHELELNAEQTHKRLEQCLQLRHLQAEVKQVLGWIRNGESMLNASLVNASSLSEAEQLQREHEQFQLAIESLFHATSLQKTHQSALQVQQKAEVLLQAGHYDADAIRECAEKVALHWQQLMLKMEDRLKLVNASVAFYKTSEQVCSVLESLEQEYRRDEDWCGGRDKLGPAAEIDHVIPLISKHLEQKEAFLKACTLARRNAEVFLKYIHRNNVSMPSVASHTRGPEQQVKAILSELLQRENRVLHFWTLKKRRLDQCQQYVVFERSAKQALDWIQETGEFYLSTHTSTGETTEETQELLKEYGEFRVPAKQTKEKVKLLIQLADSFVEKGHIHATEIRKWVTTVDKHYRDFSLRMGKYRYSLEKALGVNTEDNKDLELDIIPASLSDREVKLRDANHEVNEEKRKSARKKEFIMAELLQTEKAYVRDLHECLETYLWEMTSGVEEIPPGILNKEHIIFGNIQEIYDFHNNIFLKELEKYEQLPEDVGHCFVTWADKFQMYVTYCKNKPDSNQLILEHAGTFFDEIQQRHGLANSISSYLIKPVQRITKYQLLLKELLTCCEEGKGELKDGLEVMLSVPKKANDAMHVSMLEGFDENLDVQGELILQDAFQVWDPKSLIRKGRERHLFLFEISLVFSKEIKDSSGHTKYVYKNKLLTSELGVTEHVEGDPCKFALWSGRTPSSDNKTVLKASNIETKQEWIKNIREVIQERIIHLKGALKEPLQLPKTPAKQRNNSKRDGVEDIDSQGDGSSQPDTISIASRTSQNTVDSDKDGNLVPRWHLGPGDPFSTYV

SEQ ID NO: 39425 - protein, 1289 aa, Homo sapiens
MKGGDRAYTRGPSLGWLFAKCCCCFPCRDAYSHSSSENGGKSESVANLQAQPSLNSIHSSPGPKRSTNTLKKWLTSPVRRLNSGKADGNIKKQKKVRDGRKSFDLGSPKPGDETTPQGDSADEKSKKGWGEDEPDEESHTPLPPPMKIFDNDPTQDEMSSSLLAARQASTEVPTAADLVNAIEKLVKNKLSLEGSSYRGSLKDPAGCLNEGMAPPTPPKNPEEEQKAKALRGRMFVLNELVQTEKDYVKDLGIVVEGFMKRIEEKGVPEDMRGKDKIVFGNIHQIYDWHKDFFLAELEKCIQEQDRLAQLFIKHERKLHIYVWYCQNKPRSEYIVAEYDAYFEEVKQEINQRLTLSDFLIKPIQRITKYQLLLKDFLRYSEKAGLECSDIEKAVELMCLVPKRCNDMMNLGRLQGFEGTLTAQGKLLQQDTFYVIELDAGMQSRTKERRVFLFEQIVIFSELLRKGSLTPGYMFKRSIKMNYLVLEENVDNDPCKFALMNRETSERVVLQAANADIQQAWVQDINQVLETQRDFLNALQSPIEYQRKERSTAVMRSQPARLPQASPRPYSSVPAGSEKPPKGSSYNPPLPPLKISTSNGSPGFEYHQPGDKFEASKQNDLGGCNGTSSMAVIKDYYALKENEICVSQGEVVQVLAVNQQNMCLVYQPASDHSPAAEGWVPGSILAPLTKATAAESSDGSIKKSCSWHTLRMRKRAEVENTGKNEATGPRKPKDILGNKVSVKETNSSEESECDDLDPNTSMEILNPNFIQEVAPEFLVPLVDVTCLLGDTVILQCKVCGRPKPTITWKGPDQNILDTDNSSATYTVSSCDSGEITLKICNLMPQDSGIYTCIATNDHGTTSTSATVKVQGVPAAPNRPIAQERSCTSVILRWLPPSSTGNCTISGYTVEYREEGSQIWQQSVASTLDTYLVIEDLSPGCPYQFRVSASNPWGISLPSEPSEFVRLPEYDAAADGATISWKENFDSAYTELNEIGRGRFSIVKKCIHKATRKDVAVKFVSKKMKKKEQAAHEAALLQHLQHPQYITLHDTYESPTSYILILELMDDGRLLDYLMNHDELMEEKVAFYIRDIMEALQYLHNCRVAHLDIKPENLLIDLRIPVPRVKLIDLEDAVQISGHFHIHHLLGNPEFAAPEVIQGIPVSLGTDIWSIGVLTYVMLSGVSPFLDESKEETCINVCRVDFSFPHEYFCGVSNAARDFINVILQEDFRRRPTAATCLQHPWLQPHNGSYSKIPLDTSRLACFIERRKHQNDVRPIPNVKSYIVNRVNQGT

SEQ ID NO: 39426 - protein, 738 aa, Homo sapiens
MLKWISWRQSKANKAQLSGGCELTVVLQDFSAGHSSELTIQVGQTVELLERPSERPGWCLVRTTERSPPLEGLVPSSALCISHSRSSVEMDCFFPLVKDAYSHSSSENGGKSESVANLQAQPSLNSIHSSPGPKRSTNTLKKWLTSPVRRLNSGKADGNIKKQKKVRDGRKSFDLGSPKPGDETTPQGDSADEKSKKGWGEDEPDEESHTPLPPPMKIFDNDPTQDEMSLEGSSYRGSLKDPAGCLNEGMAPPTPPKNPEEEQKAKALRGRMFVLNELVQTEKDYVKDLGIVVEGFMKRIEEKGVPEDMRGKDKIVFGNIHQIYDWHKDFFLAELEKCIQEQDRLAQLFIKHERKLHIYVWYCQNKPRSEYIVAEYDAYFEEVKQEINQRLTLSDFLIKPIQRITKYQLLLKDFLRYSEKAGLECSDIEKAVELMCLVPKRCNDMMNLGRLQGFEGTLTAQGKLLQQDTFYVIELDAGMQSRTKERRVFLFEQIVIFSELLRKGSLTPGYMFKRSIKMNYLVLEENVDNDPCKFALMNRETSERVVLQAANADIQQAWVQDINQVLETQRDFLNALQSPIEYQRKERSTAVMRSQPARLPQASPRPYSSVPAGSEKPPKGSSYNPPLPPLKISTSNGSPGFEYHQPGDKFEASKNDLGGCNGTSSMAVIKDYYALKENEICVSQGEVVQVLAVNQQNMCLVYQPASDHSPAAEGWVPGSILAPLTKATAAESSDGSIK

SEQ ID NO: 39427 - protein, 1257 aa, Homo sapiens
MKGGDRAYTRGPSLGWLFAKCCCCFPCRDAYSHSSSENGGKSESVANLQAQPSLNSIHSSPGPKRSTNTLKKWLTSPVRRLNSGKADGNIKKQKKVRDGRKSFDLGSPKPGDETTPQGDSADEKSKKGWGEDEPDEESHTPLPPPMKIFDNDPTQDEMSLEGSSYRGSLKDPAGCLNEGMAPPTPPKNPEEEQKAKALRGRMFVLNELVQTEKDYVKDLGIVVEGFMKRIEEKGVPEDMRGKDKIVFGNIHQIYDWHKDFFLAELEKCIQEQDRLAQLFIKHERKLHIYVWYCQNKPRSEYIVAEYDAYFEEVKQEINQRLTLSDFLIKPIQRITKYQLLLKDFLRYSEKAGLECSDIEKAVELMCLVPKRCNDMMNLGRLQGFEGTLTAQGKLLQQDTFYVIELDAGMQSRTKERRVFLFEQIVIFSELLRKGSLTPGYMFKRSIKMNYLVLEENVDNDPCKFALMNRETSERVVLQAANADIQQAWVQDINQVLETQRDFLNALQSPIEYQRKERSTAVMRSQPARLPQASPRPYSSVPAGSEKPPKGSSYNPPLPPLKISTSNGSPGFEYHQPGDKFEASKQNDLGGCNGTSSMAVIKDYYALKENEICVSQGEVVQVLAVNQQNMCLVYQPASDHSPAAEGWVPGSILAPLTKATAAESSDGSIKKSCSWHTLRMRKRAEVENTGKNEATGPRKPKDILGNKVSVKETNSSEESECDDLDPNTSMEILNPNFIQEVAPEFLVPLVDVTCLLGDTVILQCKVCGRPKPTITWKGPDQNILDTDNSSATYTVSSCDSGEITLKICNLMPQDSGIYTCIATNDHGTTSTSATVKVQGVPAAPNRPIAQERSCTSVILRWLPPSSTGNCTISGYTVEYREEGSQIWQQSVASTLDTYLVIEDLSPGCPYQFRVSASNPWGISLPSEPSEFVRLPEYDAAADGATISWKENFDSAYTELNEIGRGRFSIVKKCIHKATRKDVAVKFVSKKMKKKEQAAHEAALLQHLQHPQYITLHDTYESPTSYILILELMDDGRLLDYLMNHDELMEEKVAFYIRDIMEALQYLHNCRVAHLDIKPENLLIDLRIPVPRVKLIDLEDAVQISGHFHIHHLLGNPEFAAPEVIQGIPVSLGTDIWSIGVLTYVMLSGVSPFLDESKEETCINVCRVDFSFPHEYFCGVSNAARDFINVILQEDFRRRPTAATCLQHPWLQPHNGSYSKIPLDTSRLACFIERRKHQNDVRPIPNVKSYIVNRVNQGT

SEQ ID NO: 39428 - protein, 1236 aa, Homo sapiens
MANGGGGGGGSSGGGGGGGGSSLRMSSNIHANHLSLDASSSSSSSSSSSSSSSSSSSSSSVHEPKMDALIIPVTMEVPCDSRGQRMWWAFLASSMVTFFGGLFIILLWRTLKYLWTVCCHCGGKTKEAQKINNGSSQADGTLKPVDEKEEAVAAEVGWMTSVKDWAGVMISAQTLTGRVLVVLVFALSIGALVIYFIDSSNPIESCQNFYKDFTLQIDMAFNVFFLLYFGLRFIAANDKLWFWLEVNSVVDFFTVPPVFVSVYLNRSWLGLRFLRALRLIQFSEILQFLNILKTSNSIKLVNLLSIFISTWLTAAGFIHLVENSGDPWENFQNNQALTYWECVYLLMVTMSTVGYGDVYAKTTLGRLFMVFFILGGLAMFASYVPEIIELIGNRKKYGGSYSAVSGRKHIVVCGHITLESVSNFLKDFLHKDRDDVNVEIVFLHNISPNLELEALFKRHFTQVEFYQGSVLNPHDLARVKIESADACLILANKYCADPDAEDASNIMRVISIKNYHPKIRIITQMLQYHNKAHLLNIPSWNWKEGDDAICLAELKLGFIAQSCLAQGLSTMLANLFSMRSFIKIEEDTWQKYYLEGVSNEMYTEYLSSAFVGLSFPTVCELCFVKLKLLMIAIEYKSANRESRILINPGNHLKIQEGTLGFFIASDAKEVKRAFFYCKACHDDITDPKRIKKCGCKRPKMSIYKRMRRACCFDCGRSERDCSCMSGRVRGNVDTLERAFPLSSVSVNDCSTSFRAFEDEQPSTLSPKKKQRNGGMRNSPNTSPKLMRHDPLLIPGNDQIDNMDSNVKKYDSTGMFHWCAPKEIEKVILTRSEAAMTVLSGHVVVCIFGDVSSALIGLRNLVMPLRASNFHYHELKHIVFVGSIEYLKREWETLHNFPKVSILPGTPLSRADLRAVNINLCDMCVILSANQNNIDDTSLQDKECILASLNIKSMQFDDSIGVLQANSQGFTPPGMDRSSPDNSPVHGMLRQPSITTGVNIPIITELVNDTNVQFLDQDDDDDPDTELYLTQPFACGTAFAVSVLDSLMSATYFNDNILTLIRTLVTGGATPELEALIAEENALRGGYSTPQTLANRDRCRVAQLALLDGPFADLGDGGCYGDLFCKALKTYNMLCFGIYRLRDAHLSTPSQCTKRYVITNPPYEFELVPTDLIFCLMQFDHNAGQSRASLSHSSHSSQSSSKKSSSVHSIPSTANRQNRPKSRESRDKQKYVQEERL

SEQ ID NO: 39429 - protein, 1219 aa, Homo sapiens
MANGGGGGGGSSGGGGGGGGSSLRMSSNIHANHLSLDASSSSSSSSSSSSSSSSSSSSSSVHEPKMDALIIPVTMEVPCDSRGQRMWWAFLASSMVTFFGGLFIILLWRTLKYLWTVCCHCGGKTKEAQKINNGSSQADGTLKPVDEKEEAVAAEVGWMTSVKDWAGVMISAQTLTGRVLVVLVFALSIGALVIYFIDSSNPIESCQNFYKDFTLQIDMAFNVFFLLYFGLRFIAANDKLWFWLEVNSVVDFFTVPPVFVSVYLNRSWLGLRFLRALRLIQFSEILQFLNILKTSNSIKLVNLLSIFISTWLTAAGFIHLVENSGDPWENFQNNQALTYWECVYLLMVTMSTVGYGDVYAKTTLGRLFMVFFILGGLAMFASYVPEIIELIGNRKKYGGSYSAVSGRKHIVVCGHITLESVSNFLKDFLHKDRDDVNVEIVFLHNISPNLELEALFKRHFTQVEFYQGSVLNPHDLARVKIESADACLILANKYCADPDAEDASNIMRVISIKNYHPKIRIITQMLQYHNKAHLLNIPSWNWKEGDDAICLAELKLGFIAQSCLAQGLSTMLANLFSMRSFIKIEEDTWQKYYLEGVSNEMYTEYLSSAFVGLSFPTVCELCFVKLKLLMIAIEYKSANRESRILINPGNHLKIQEGTLGFFIASDAKEVKRAFFYCKACHDDITDPKRIKKCGCKRLEDEQPSTLSPKKKQRNGGMRNSPNTSPKLMRHDPLLIPGNDQIDNMDSNVKKYDSTGMFHWCAPKEIEKVILVTGWMPYLGPRVLMTCLDIGVVCMPTDIQSTSPASIKKFKETRSEAAMTVLSGHVVVCIFGDVSSALIGLRNLVMPLRASNFHYHELKHIVFVGSIEYLKREWETLHNFPKVSILPGTPLSRADLRAVNINLCDMCVILSANQNNIDDTSLQDKECILASLNIKSMQFDDSIGVLQANSQGFTPPGMDRSSPDNSPVHGMLRQPSITTGVNIPIITELVNDTNVQFLDQDDDDDPDTELYLTQPFACGTAFAVSVLDSLMSATYFNDNILTLIRTLVTGGATPELEALIAEENALRGGYSTPQTLANRDRCRVAQLALLDGPFADLGDGGCYGDLFCKALKTYNMLCFGIYRLRDAHLSTPSQCTKRYVITNPPYEFELVPTDLIFCLMQFDHNAGQSRASLSHSSHSSQSSSKKSSSVHSIPSTANRQNRPKSRESRDKQKYVQEERL

SEQ ID NO: 39430 - protein, 1240 aa, Homo sapiens
MANGGGGGGGSSGGGGGGGGSSLRMSSNIHANHLSLDASSSSSSSSSSSSSSSSSSSSSSVHEPKMDALIIPVTMEVPCDSRGQRMWWAFLASSMVTFFGGLFIILLWRTLKYLWTVCCHCGGKTKEAQKINNGSSQADGTLKPVDEKEEAVAAEVGWMTSVKDWAGVMISAQTLTGRVLVVLVFALSIGALVIYFIDSSNPIESCQNFYKDFTLQIDMAFNVFFLLYFGLRFIAANDKLWFWLEVNSVVDFFTVPPVFVSVYLNRSWLGLRFLRALRLIQFSEILQFLNILKTSNSIKLVNLLSIFISTWLTAAGFIHLVENSGDPWENFQNNQALTYWECVYLLMVTMSTVGYGDVYAKTTLGRLFMVFFILGGLAMFASYVPEIIELIGNRKKYGGSYSAVSGRKHIVVCGHITLESVSNFLKDFLHKDRDDVNVEIVFLHNISPNLELEALFKRHFTQVEFYQGSVLNPHDLARVKIESADACLILANKYCADPDAEDASNIMRVISIKNYHPKIRIITQMLQYHNKAHLLNIPSWNWKEGDDAICLAELKLGFIAQSCLAQGLSTMLANLFSMRSFIKIEEDTWQKYYLEGVSNEMYTEYLSSAFVGLSFPTVCELCFVKLKLLMIAIEYKSANRESRSRKRILINPGNHLKIQEGTLGFFIASDAKEVKRAFFYCKACHDDITDPKRIKKCGCKRPKMSIYKRMRRACCFDCGRSERDCSCMSGRVRGNVDTLERAFPLSSVSVNDCSTSFRAFEDEQPSTLSPKKKQRNGGMRNSPNTSPKLMRHDPLLIPGNDQIDNMDSNVKKYDSTGMFHWCAPKEIEKVILTRSEAAMTVLSGHVVVCIFGDVSSALIGLRNLVMPLRASNFHYHELKHIVFVGSIEYLKREWETLHNFPKVSILPGTPLSRADLRAVNINLCDMCVILSANQNNIDDTSLQDKECILASLNIKSMQFDDSIGVLQANSQGFTPPGMDRSSPDNSPVHGMLRQPSITTGVNIPIITELVNDTNVQFLDQDDDDDPDTELYLTQPFACGTAFAVSVLDSLMSATYFNDNILTLIRTLVTGGATPELEALIAEENALRGGYSTPQTLANRDRCRVAQLALLDGPFADLGDGGCYGDLFCKALKTYNMLCFGIYRLRDAHLSTPSQCTKRYVITNPPYEFELVPTDLIFCLMQFDHNAGQSRASLSHSSHSSQSSSKKSSSVHSIPSTANRQNRPKSRESRDKQKYVQEERL

SEQ ID NO: 39431 - protein, 1207 aa, Homo sapiens
MANGGGGGGGSSGGGGGGGGSSLRMSSNIHANHLSLDASSSSSSSSSSSSSSSSSSSSSSVHEPKMDALIIPVTMEVPCDSRGQRMWWAFLASSMVTFFGGLFIILLWRTLKYLWTVCCHCGGKTKEAQKINNGSSQADGTLKPVDEKEEAVAAEVGWMTSVKDWAGVMISAQTLTGRVLVVLVFALSIGALVIYFIDSSNPIESCQNFYKDFTLQIDMAFNVFFLLYFGLRFIAANDKLWFWLEVNSVVDFFTVPPVFVSVYLNRSWLGLRFLRALRLIQFSEILQFLNILKTSNSIKLVNLLSIFISTWLTAAGFIHLVENSGDPWENFQNNQALTYWECVYLLMVTMSTVGYGDVYAKTTLGRLFMVFFILGGLAMFASYVPEIIELIGNRKKYGGSYSAVSGRKHIVVCGHITLESVSNFLKDFLHKDRDDVNVEIVFLHNISPNLELEALFKRHFTQVEFYQGSVLNPHDLARVKIESADACLILANKYCADPDAEDASNIMRVISIKNYHPKIRIITQMLQYHNKAHLLNIPSWNWKEGDDAICLAELKLGFIAQSCLAQGLSTMLANLFSMRSFIKIEEDTWQKYYLEGVSNEMYTEYLSSAFVGLSFPTVCELCFVKLKLLMIAIEYKSANRESRILINPGNHLKIQEGTLGFFIASDAKEVKRAFFYCKACHDDITDPKRIKKCGCKRLKVAARSRYSKDPFEFKKETPNSRLVTEPVEDEQPSTLSPKKKQRNGGMRNSPNTSPKLMRHDPLLIPGNDQIDNMDSNVKKYDSTGMFHWCAPKEIEKVILTRSEAAMTVLSGHVVVCIFGDVSSALIGLRNLVMPLRASNFHYHELKHIVFVGSIEYLKREWETLHNFPKVSILPGTPLSRADLRAVNINLCDMCVILSANQNNIDDTSLQDKECILASLNIKSMQFDDSIGVLQANSQGFTPPGMDRSSPDNSPVHGMLRQPSITTGVNIPIITELVNDTNVQFLDQDDDDDPDTELYLTQPFACGTAFAVSVLDSLMSATYFNDNILTLIRTLVTGGATPELEALIAEENALRGGYSTPQTLANRDRCRVAQLALLDGPFADLGDGGCYGDLFCKALKTYNMLCFGIYRLRDAHLSTPSQCTKRYVITNPPYEFELVPTDLIFCLMQFDHNAGQSRASLSHSSHSSQSSSKKSSSVHSIPSTANRQNRPKSRESRDKQKYVQEERL

SEQ ID NO: 39432 - protein, 1178 aa, Homo sapiens
MANGGGGGGGSSGGGGGGGGSSLRMSSNIHANHLSLDASSSSSSSSSSSSSSSSSSSSSSVHEPKMDALIIPVTMEVPCDSRGQRMWWAFLASSMVTFFGGLFIILLWRTLKYLWTVCCHCGGKTKEAQKINNGSSQADGTLKPVDEKEEAVAAEVGWMTSVKDWAGVMISAQTLTGRVLVVLVFALSIGALVIYFIDSSNPIESCQNFYKDFTLQIDMAFNVFFLLYFGLRFIAANDKLWFWLEVNSVVDFFTVPPVFVSVYLNRSWLGLRFLRALRLIQFSEILQFLNILKTSNSIKLVNLLSIFISTWLTAAGFIHLVENSGDPWENFQNNQALTYWECVYLLMVTMSTVGYGDVYAKTTLGRLFMVFFILGGLAMFASYVPEIIELIGNRKKYGGSYSAVSGRKHIVVCGHITLESVSNFLKDFLHKDRDDVNVEIVFLHNISPNLELEALFKRHFTQVEFYQGSVLNPHDLARVKIESADACLILANKYCADPDAEDASNIMRVISIKNYHPKIRIITQMLQYHNKAHLLNIPSWNWKEGDDAICLAELKLGFIAQSCLAQGLSTMLANLFSMRSFIKIEEDTWQKYYLEGVSNEMYTEYLSSAFVGLSFPTVCELCFVKLKLLMIAIEYKSANRESRILINPGNHLKIQEGTLGFFIASDAKEVKRAFFYCKACHDDITDPKRIKKCGCKRLEDEQPSTLSPKKKQRNGGMRNSPNTSPKLMRHDPLLIPGNDQIDNMDSNVKKYDSTGMFHWCAPKEIEKVILTRSEAAMTVLSGHVVVCIFGDVSSALIGLRNLVMPLRASNFHYHELKHIVFVGSIEYLKREWETLHNFPKVSILPGTPLSRADLRAVNINLCDMCVILSANQNNIDDTSLQDKECILASLNIKSMQFDDSIGVLQANSQGFTPPGMDRSSPDNSPVHGMLRQPSITTGVNIPIITELVNDTNVQFLDQDDDDDPDTELYLTQPFACGTAFAVSVLDSLMSATYFNDNILTLIRTLVTGGATPELEALIAEENALRGGYSTPQTLANRDRCRVAQLALLDGPFADLGDGGCYGDLFCKALKTYNMLCFGIYRLRDAHLSTPSQCTKRYVITNPPYEFELVPTDLIFCLMQFDHNAGQSRASLSHSSHSSQSSSKKSSSVHSIPSTANRQNRPKSRESRDKQKYVQEERL

SEQ ID NO: 39433 - protein, 168 aa, Homo sapiens
MANGGGGGGGSSGGGGGGGGSSLRMSSNIHANHLSLDASSSSSSSSSSSSSSSSSSSSSSVHEPKMDALIIPVTMEVPCDSRGQRMWWAFLASSMVTFFGGLFIILLWRTLKYLWTVCCHCGGKTKATHFGSPEMPPAARSWSGSPPEAAVLRGASSLALEVARCRRL

SEQ ID NO: 39434 - protein, 1239 aa, Homo sapiens
MANGGGGGGGSSGGGGGGGGSSLRMSSNIHANHLSLDASSSSSSSSSSSSSSSSSSSSSSVHEPKMDALIIPVTMEVPCDSRGQRMWWAFLASSMVTFFGGLFIILLWRTLKYLWTVCCHCGGKTKEAQKINNGSSQADGTLKPVDEKEEAVAAEVGWMTSVKDWAGVMISAQTLTGRVLVVLVFALSIGALVIYFIDSSNPIESCQNFYKDFTLQIDMAFNVFFLLYFGLRFIAANDKLWFWLEVNSVVDFFTVPPVFVSVYLNRSWLGLRFLRALRLIQFSEILQFLNILKTSNSIKLVNLLSIFISTWLTAAGFIHLVENSGDPWENFQNNQALTYWECVYLLMVTMSTVGYGDVYAKTTLGRLFMVFFILGGLAMFASYVPEIIELIGNRKKYGGSYSAVSGRKHIVVCGHITLESVSNFLKDFLHKDRDDVNVEIVFLHNISPNLELEALFKRHFTQVEFYQGSVLNPHDLARVKIESADACLILANKYCADPDAEDASNIMRVISIKNYHPKIRIITQMLQYHNKAHLLNIPSWNWKEGDDAICLAELKLGFIAQSCLAQGLSTMLANLFSMRSFIKIEEDTWQKYYLEGVSNEMYTEYLSSAFVGLSFPTVCELCFVKLKLLMIAIEYKSANRESRILINPGNHLKIQEGTLGFFIASDAKEVKRAFFYCKACHDDITDPKRIKKCGCKRRWEEHCSLWRLESKGNVRRLNYCRGQQTFSVKVKVAARSRYSKDPFEFKKETPNSRLVTEPVEDEQPSTLSPKKKQRNGGMRNSPNTSPKLMRHDPLLIPGNDQIDNMDSNVKKYDSTGMFHWCAPKEIEKVILTRSEAAMTVLSGHVVVCIFGDVSSALIGLRNLVMPLRASNFHYHELKHIVFVGSIEYLKREWETLHNFPKVSILPGTPLSRADLRAVNINLCDMCVILSANQNNIDDTSLQDKECILASLNIKSMQFDDSIGVLQANSQGFTPPGMDRSSPDNSPVHGMLRQPSITTGVNIPIITELVNDTNVQFLDQDDDDDPDTELYLTQPFACGTAFAVSVLDSLMSATYFNDNILTLIRTLVTGGATPELEALIAEENALRGGYSTPQTLANRDRCRVAQLALLDGPFADLGDGGCYGDLFCKALKTYNMLCFGIYRLRDAHLSTPSQCTKRYVITNPPYEFELVPTDLIFCLMQFDHNAGQSRASLSHSSHSSQSSSKKSSSVHSIPSTANRQNRPKSRESRDKQKYVQEERL

SEQ ID NO: 39435 - protein, 557 aa, Homo sapiens
MESERSKRMGNACIPLKRIAYFLCLLSALLLTEGKKPAKPKCPAVCTCTKDNALCENARSIPRTVPPDVISLSFVRSGFTEISEGSFLFTPSLQLLLFTSNSFDVISDDAFIGLPHLEYLFIENNNIKSISRHTFRGLKSLIHLSLANNNLQTLPKDIFKGLDSLTNVDLRGNSFNCDCKLKWLVEWLGHTNATVEDIYCEGPPEYKKRKINSLSSKDFDCIITEFAKSQDLPYQSLSIDTFSYLNDEYVVIAQPFTGKCIFLEWDHVEKTFRNYDNITGTSTVVCKPIVIETQLYVIVAQLFGGSHIYKRDSFANKFIKIQDIEILKIRKPNDIETFKIENNWYFVVADSSKAGFTTIYKWNGNGFYSHQSLHAWYRDTDVEYLEIVRTPQTLRTPHLILSSSSQRPVIYQWNKATQLFTNQTDIPNMEDVYAVKHFSVKGDVYICLTRFIGDSKVMKWGGSSFQDIQRMPSRGSMVFQPLQINNYQYAILGSDYSFTQVYNWDAEKAKFVKFQELNVQAPRSFTHVSINKRNFLFASSFKGNTQIYKHVIVDLSA

SEQ ID NO: 39436 - protein, 291 aa, Homo sapiens
MESERSKRMGNACIPLKRIAYFLCLLSALLLTEGKKPAKPKCPAVCTCTKDNALCENARSIPRTVPPDVISLSFVRSGFTEISEGSFLFTPSLQLLLFTSNSFDVISDDAFIGLPHLEYLFIENNNIKSISRHTFRGLKSLIHLSLANNNLQTLPKDIFKGLDSLTNVDLRGNSFNCDCKLKWLVEWLGHTNATVEDIYCEGPPEYKKRKINSLSSKDFDCIITEFAKSQDLPYQSLSIDTFSYLNDEYVVIAQPFTGKCIFLEWDHVEKTFRNYDNITVLREIHRFTNMS

SEQ ID NO: 39437 - protein, 509 aa, Homo sapiens
MESERSKRMGNACIPLKRIAYFLCLLSALLLTEGKKPAKPKCPAVCTCTKDNALCENARSIPRTVPPDVISLSFVRSGFTEISEGSFLFTPSLQLLSLANNNLQTLPKDIFKGLDSLTNVDLRGNSFNCDCKLKWLVEWLGHTNATVEDIYCEGPPEYKKRKINSLSSKDFDCIITEFAKSQDLPYQSLSIDTFSYLNDEYVVIAQPFTGKCIFLEWDHVEKTFRNYDNITGTSTVVCKPIVIETQLYVIVAQLFGGSHIYKRDSFANKFIKIQDIEILKIRKPNDIETFKIENNWYFVVADSSKAGFTTIYKWNGNGFYSHQSLHAWYRDTDVEYLEIVRTPQTLRTPHLILSSSSQRPVIYQWNKATQLFTNQTDIPNMEDVYAVKHFSVKGDVYICLTRFIGDSKVMKWGGSSFQDIQRMPSRGSMVFQPLQINNYQYAILGSDYSFTQVYNWDAEKAKFVKFQELNVQAPRSFTHVSINKRNFLFASSFKGNTQIYKHVIVDLSA

SEQ ID NO: 39438 - protein, 195 aa, Homo sapiens
MGSQSSKAPRGDVTAEEAAGASPAKANGQENGHVKSNGDLSPKGEGESPPVNGTDEAAGATGDAIEPAPPSQGAEAKGEVPPKETPKKKKKFSFKKPFKLSGLSFKRNRKEGGGDSSASSPTEEEQEQGEIGACSDEGTAQEGKAAATPESQEPQAKGAEASAASEEEAGPQATEPSTPSGPESGPTPASAEQNE

SEQ ID NO: 39439 - protein, 535 aa, Homo sapiens
MEEGARHRNNTEKKHPGGGESDASPEAGSGGGGVALKKEIGLVSACGIIVGNIIGSGIFVSPKGVLENAGSVGLALIVWIVTGFITVVGALCYAELGVTIPKSGGDYSYVKDIFGGLAGFLRLWIAVLVIYPTNQAVIALTFSNYVLQPLFPTCFPPESGLRLLAAICLLLLTWVNCSSVRWATRVQDIFTAGKLLALALIIIMGIVQICKGEYFWLEPKNAFENFQEPDIGLVALAFLQGSFAYGGWNFLNYVTEELVDPYKNLPRAIFISIPLVTFVYVFANVAYVTAMSPQELLASNAVAVTFGEKLLGVMAWIMPISVALSTFGGVNGSLFTSSRLFFAGAREGHLPSVLAMIHVKRCTPIPALLFTCISTLLMLVTSDMYTLINYVGFINYLFYGVTVAGQIVLRWKKPDIPRPIKINLLFPIIYLLFWAFLLVFSLWSEPVVCGIGLAIMLTGVPVYFLGVYWQHKPKCFSDFIELLTLVSQKMCVVVYPEVERGSGTEEANEDMEEQQQPMYQPTPTKDKDVAGQPQP

SEQ ID NO: 39440 - protein, 332 aa, Homo sapiens
MGIVQICKGEYFWLEPKNAFENFQEPDIGLVALAFLQGSFAYGGWNFLNYVTEELVDPYKNLPRAIFISIPLVTFVYVFANVAYVTAMSPQELLASNAVAVTFGEKLLGVMAWIMPISVALSTFGGVNGSLFTSSRLFFAGAREGHLPSVLAMIHVKRCTPIPALLFTCISTLLMLVTSDMYTLINYVGFINYLFYGVTVAGQIVLRWKKPDIPRPIKINLLFPIIYLLFWAFLLVFSLWSEPVVCGIGLAIMLTGVPVYFLGVYWQHKPKCFSDFIELLTLVSQKMCVVVYPEVERGSGTEEANEDMEEQQQPMYQPTPTKDKDVAGQPQP

SEQ ID NO: 39441 - protein, 311 aa, Homo sapiens
MGQLFQCAVGHPGSRHLHSWEAPGLGPDYHHGDCTDMQRNLPRAIFISIPLVTFVYVFANVAYVTAMSPQELLASNAVAVTFGEKLLGVMAWIMPISVALSTFGGVNGSLFTSSRLFFAGAREGHLPSVLAMIHVKRCTPIPALLFTCISTLLMLVTSDMYTLINYVGFINYLFYGVTVAGQIVLRWKKPDIPRPIKINLLFPIIYLLFWAFLLVFSLWSEPVVCGIGLAIMLTGVPVYFLGVYWQHKPKCFSDFIELLTLVSQKMCVVVYPEVERGSGTEEANEDMEEQQQPMYQPTPTKDKDVAGQPQP

SEQ ID NO: 39442 - protein, 430 aa, Homo sapiens
MGQYGQELSWKCLVKAVCLQEHSQPSQLLCTLLLCWCVLGRERPFRKAQSTSSPLEGVPRFLKRLLLTWVNCSSVRWATRVQDIFTAGKLLALALIIIMGIVQICKGEYFWLEPKNAFENFQEPDIGLVALAFLQGSFAYGGWNFLNYVTEELVDPYKNLPRAIFISIPLVTFVYVFANVAYVTAMSPQELLASNAVAVTFGEKLLGVMAWIMPISVALSTFGGVNGSLFTSSRLFFAGAREGHLPSVLAMIHVKRCTPIPALLFTCISTLLMLVTSDMYTLINYVGFINYLFYGVTVAGQIVLRWKKPDIPRPIKINLLFPIIYLLFWAFLLVFSLWSEPVVCGIGLAIMLTGVPVYFLGVYWQHKPKCFSDFIELLTLVSQKMCVVVYPEVERGSGTEEANEDMEEQQQPMYQPTPTKDKDVAGQPQP

SEQ ID NO: 39443 - protein, 132 aa, Homo sapiens
MDHHIPMHALPEEIQKMLPEEKVCKYCGVSYLILHEFKAMEEKVKAMEKEMKFYQGSVDREKRLQEKLHSLSQELEQYKIDNKSKTERIYDVGMQLKSQQNEFQKVKKQLSHLQDELKIKYRQSYIFRLCFC

SEQ ID NO: 39444 - protein, 780 aa, Homo sapiens
MTESASSTSGQEFDVFSVMDWKDGVGTLPGSDLKFRVNEFGALEVITDENEMENVKKATATTTWMVPTAQEAPTSPPSSRPVFPPAYWTSPPGCPTVFSEKTGMPFRLKDPVKVEGLQFCENCCQYGNVDECLSGGNYCSQNCARHIKDKDQKEERDVEEDNEEEDPKCSRKKKPKLSLKADTKEDGEERDDEMENKQDVRILRGSQRARRKRRGDSAVLKQGLPPKGKKAWCWASYLEEEKAVAVPAKLFKEHQSFPYNKNGFKVGMKLEGVDPEHQSVYCVLTVAEVCGYRIKLHFDGYSDCYDFWVNADALDIHPVGWCEKTGHKLHPPKGYKEEEFNWQTYLKTCKAQAAPKSLFENQNITVIPSGFRVGMKLEAVDKKNPSFICVATVTDMVDNRFLVHFDNWDESYDYWCEASSPHIHPVGWCKEHRRTLITPPGYPNVKHFSWDKYLEETNSLPAPARAFKVKPPHGFQKKMKLEVVDKRNPMFIRVATVADTDDHRVKVHFDGWNNCYDYWIDADSPDIHPVGWCSKTGHPLQPPLSPLELMEASEHGGCSTPGCKGIGHFKRARHLGPHSAANCPYSEINLNKDRIFPDRLSGEMPPASPSFPRNKRTDANESSSSPEIRDQHADDVKEDFEERTESEMRTSHEARGAREEPTVQQAQRRSAVFLSFKSPIPCLPLRWEQQSKLLPTVAGIPASKVSKWSTDEVSEFIQSLPGCEEHGKVFKDEQIDGEAFLLMTQTDIVKIMSIKLGPALKIFNSILMFKAAEKNSHNEL

SEQ ID NO: 39445 - protein, 755 aa, Homo sapiens
MTESASSTSGQEFDVFSVMDWKDGVGTLPGSDLKFRVNEFGALEVITDENEMENVKKATATTTWMVPTAQEVFSEKTGMPFRLKDPVKVEGLQFCENCCQYGNVDECLSGGNYCSQNCARHIKDKDQKEERDVEEDNEEEDPKCSRKKKPKLSLKADTKEDGEERDDEMENKQDVRILRGSQRARRKRRGDSAVLKQGLPPKGKKAWCWASYLEEEKAVAVPAKLFKEHQSFPYNKNGFKVGMKLEGVDPEHQSVYCVLTVAEVCGYRIKLHFDGYSDCYDFWVNADALDIHPVGWCEKTGHKLHPPKGYKEEEFNWQTYLKTCKAQAAPKSLFENQNITVIPSGFRVGMKLEAVDKKNPSFICVATVTDMVDNRFLVHFDNWDESYDYWCEASSPHIHPVGWCKEHRRTLITPPGYPNVKHFSWDKYLEETNSLPAPARAFKVKPPHGFQKKMKLEVVDKRNPMFIRVATVADTDDHRVKVHFDGWNNCYDYWIDADSPDIHPVGWCSKTGHPLQPPLSPLELMEASEHGGCSTPGCKGIGHFKRARHLGPHSAANCPYSEINLNKDRIFPDRLSGEMPPASPSFPRNKRTDANESSSSPEIRDQHADDVKEDFEERTESEMRTSHEARGAREEPTVQQAQRRSAVFLSFKSPIPCLPLRWEQQSKLLPTVAGIPASKVSKWSTDEVSEFIQSLPGCEEHGKVFKDEQIDGEAFLLMTQTDIVKIMSIKLGPALKIFNSILMFKAAEKNSHNEL

SEQ ID NO: 39446 - protein, 662 aa, Homo sapiens
MRPQILLLLALLTLGLAAQHQDKVPCKMVDKKVSCQVLGLLQVPSVLPPDTETLDLSGNQLRSILASPLGFYTALRHLDLSTNEISFLQPGAFQALTHLEHLSLAHNRLAMATALSAGGLGPLPRVTSLDLSGNSLYSGLLERLLGEAPSLHTLSLAENSLTRLTRHTFRDMPALEQLDLHSNVLMDIEDGAFEGLPRLTHLNLSRNSLTCISDFSLQQLRVLDLSCNSIEAFQTASQPQAEFQLTWLDLRENKLLHFPDLAALPRLIYLNLSNNLIRLPTGPPQDSKGIHAPSEGWSALPLSAPSGNASGRPLSQLLNLDLSYNEIELIPDSFLEHLTSLCFLNLSRNCLRTFEARRLGSLPCLMLLDLSHNALETLELGARALGSLRTLLLQGNALRDLPPYTFANLASLQRLNLQGNRVSPCGGPDEPGPSGCVAFSGITSLRSLSLVDNEIELLRAGAFLHTPLTELDLSSNPGLEVATGALGGLEASLEVLALQGNGLMVLQVDLPCFICLKRLNLAENRLSHLPAWTQAVSLEVLDLRNNSFSLLPGSAMGGLETSLRRLYLQGNPLSCCGNGWLAAQLHQGRVDVDATQDLICRFSSQEEVSLSHVRPEDCEKGGLKNINLIIILTFILVSAILLTTLAACCCVRRQKFNQQYKA

SEQ ID NO: 39447 - protein, 321 aa, Homo sapiens
MSGGKSAQGPEEGGVCITEALITKRNLTFPEDGELSEKMFHTLDELQTVRLDREGITTIRNLEGLQNLHSLYLQGNKIQQIENLACIPSLRFLSLAGNQIRQVENLLDLPCLQFLDLSENLIETLKLDEFPQSLLILNLSGNSCTNQDGYRELVTEALPLLLDLDGQPVVERWISDEEDEASSDEEFPELSGPFCSERGFLKELEQELSRHREHRQQTALTEHLLRMEMQPTLTDLPLLPGVPMAGDSSPSATPAQGEETVPEAVSSPQASSPTKKPCSLIPRGHQSSFWGRKGARAATAPKASVAEAPSTTKTTAKRSKK

SEQ ID NO: 39448 - protein, 692 aa, Homo sapiens
MELLPLWLCLGFHFLTVGWRNRSGTATAASQGVCKLVGGAADCRGQSLASVPSSLPPHARMLTLDANPLKTLWNHSLQPYPLLESLSLHSCHLERISRGAFQEQGHLRSLVLGDNCLSENYEETAAALHALPGLRRLDLSGNALTEDMAALMLQNLSSLRSVSLAGNTIMRLDDSVFEGLERLRELDLQRNYIFEIEGGAFDGLAELRHLNLAFNNLPCIVDFGLTRLRVLNVSYNVLEWFLATGGEAAFELETLDLSHNQLLFFPLLPQYSKLRTLLLRDNNMGFYRDLYNTSSPREMVAQFLLVDGNVTNITTVSLWEEFSSSDLADLRFLDMSQNQFQYLPDGFLRKMPSLSHLNLHQNCLMTLHIREHEPPGALTELDLSHNQLSELHLAPGLASCLGSLRLFNLSSNQLLGVPPGLFANARNITTLDMSHNQISLCPLPAASDRVGPPSCVDFRNMASLRSLSLEGCGLGALPDCPFQGTSLTYLDLSSNWGVLNGSLAPLQDVAPMLQVLSLRNMGLHSSFMALDFSGFGNLRDLDLSGNCLTTFPRFGGSLALETLDLRRNSLTALPQKAVSEQLSRGLRTIYLSQNPYDCCGVDGWGALQHGQTVADWAMVTCNLSSKIIRVTELPGGVPRDCKWERLDLGLLYLVLILPSCLTLLVACTVIVLTFKKPLLQVIKSRCHWSSVY

SEQ ID NO: 39449 - protein, 339 aa, Homo sapiens
MAEASSDPGAEEREELLGPTAQWSVEDEEEAVHEQCQHERDRQLQAQDEEGGGHVPERPKQEMLLSLKPSEAPELDEDEGFGDWSQRPEQRQQHEGAQGALDSGEPPQCRSPEGEQEDRPGLHAYEKEDSDEVHLEELSLSKEGPGPEDTVQDNLGAAGAEEEQEEHQKCQQPRTPSPLVLEGTIEQSSPPLSPTTKLIDRTESLNRSIEKSNSVKKSQPDLPISKIDQWLEQYTQAIETAGRTPKLARQASIELPSMAVASTKSRWETGEVQAQSAAKTPSCKDIVAGDMSKKSLWEQKGGSKTSSTIKSTPSGKRYKFVATGHGKYEKVLVEGGPAP

SEQ ID NO: 39450 - protein, 277 aa, Homo sapiens
MLLSLKPSEAPELDEDEGFGDWSQRPEQRQQHEGAQGALDSGEPPQCRSPEGEQEDRPGLHAYEKEDSDEVHLEELSLSKEGPGPEDTVQDNLGAAGAEEEQEEHQKCQQPRTPSPLVLEGTIEQSSPPLSPTTKLIDRTESLNRSIEKSNSVKKSQPDLPISKIDQWLEQYTQAIETAGRTPKLARQASIELPSMAVASTKSRWETGEVQAQSAAKTPSCKDIVAGDMSKKSLWEQKGGSKTSSTIKSTPSGKRYKFVATGHGKYEKVLVEGGPAP

SEQ ID NO: 39451 - protein, 467 aa, Homo sapiens
MAPIWSPPGRVSGCHLSSGPAPGSAVGPWLGTPHPSLPLPLAPHKPPPPGLPGSAGQTSLPAQRECVFPGDAAVHQELCGLGFEECLGSIPQAHQCYLTNGPKRRKCSPRRRGRAPAWLCGGSPPCHQGLGHEHPSSGPSTNCSPRPTAQWSVEDEEEAVHEQCQHERDRQLQAQDEEGGGHVPERPKQEMLLSLKPSEAPELDEDEGFGDWSQRPEQRQQHEGAQGALDSGEPPQCRSPEGEQEDRPGLHAYEKEDSDEVHLEELSLSKEGPGPEDTVQDNLGAAGAEEEQEEHQKCQQPRTPSPLVLEGTIEQSSPPLSPTTKLIDRTESLNRSIEKSNSVKKSQPDLPISKIDQWLEQYTQAIETAGRTPKLARQASIELPSMAVASTKSRWETGEVQAQSAAKTPSCKDIVAGDMSKKSLWEQKGGSKTSSTIKSTPSGKRYKFVATGHGKYEKVLVEGGPAP

SEQ ID NO: 39452 - protein, 173 aa, Homo sapiens
MYSFMGGGLFCAWVGTILLVVAMATDHWMQYRLSGSFAHQGLWRYCLGNKCYLQTDSIAYWNATRAFMILSALCAISGIIMGIMAFAHQPTFSRISRPFSAGIMFFSSTLFVVLALAIYTGVTVSFLGRRFGDWRFSWSYILGWVAVLMTFFAGIFYMCAYRVHECRRLSTPR

SEQ ID NO: 39453 - protein, 215 aa, Homo sapiens
MYSFMGGGLFCAWVGTILLVVAMATDHWMQYRLSGSFAHQGLWRYCLGNKCYLQTDSIGEPPGQGPGRAWGKSRADLGAQGHLYSRWRTLRLKEGKGATQAYWNATRAFMILSALCAISGIIMGIMAFAHQPTFSRISRPFSAGIMFFSSTLFVVLALAIYTGVTVSFLGRRFGDWRFSWSYILGWVAVLMTFFAGIFYMCAYRVHECRRLSTPR

SEQ ID NO: 39454 - protein, 341 aa, Homo sapiens
MTGSNMSDALANAVCQRCQARFSPAERIVNSNGELYHEHCFVCAQCFRPFPEGLFYEFEGRKYCEHDFQMLFAPCCGSCGEFIIGRVIKAMNNNWHPGCFRCELCDVELADLGFVKNAGRHLCRPCHNREKAKGLGKYICQRCHLVIDEQPLMFRSDAYHPDHFNCTHCGKELTAEARELKGELYCLPCHDKMGVPICGACRRPIEGRVVNALGKQWHVEHFVCAKCEKPFLGHRHYEKKGLAYCETHYNQLFGDVCYNCSHVIEGDVVSALNKAWCVSCFSCSTCNSKLTLKNKFVEFDMKPVCKRCYEKFPLELKKRLKKLSELTSRKAQPKATDLNSA

SEQ ID NO: 39455 - protein, 365 aa, Homo sapiens
MAARLGALAASGLYRRRQHRQSPPPATGNMSDALANAVCQRCQARFSPAERIVNSNGELYHEHCFVCAQCFRPFPEGLFYEFEGRKYCEHDFQMLFAPCCGSCGEFIIGRVIKAMNNNWHPGCFRCELCDVELADLGFVKNAGRHLCRPCHNREKAKGLGKYICQRCHLVIDEQPLMFRSDAYHPDHFNCTHCGKELTAEARELKGELYCLPCHDKMGVPICGACRRPIEGRVVNALGKQWHVEHFVCAKCEKPFLGHRHYEKKGLAYCETHYNQLFGDVCYNCSHVIEGDVVSALNKAWCVSCFSCSTCNSKLTLKNKFVEFDMKPVCKRCYEKFPLELKKRLKKLSELTSRKAQPKATDLNSA

SEQ ID NO: 39456 - protein, 336 aa, Homo sapiens
MSDALANAVCQRCQARFSPAERIVNSNGELYHEHCFVCAQCFRPFPEGLFYEFEGRKYCEHDFQMLFAPCCGSCGEFIIGRVIKAMNNNWHPGCFRCELCDVELADLGFVKNAGRHLCRPCHNREKAKGLGKYICQRCHLVIDEQPLMFRSDAYHPDHFNCTHCGKELTAEARELKGELYCLPCHDKMGVPICGACRRPIEGRVVNALGKQWHVEHFVCAKCEKPFLGHRHYEKKGLAYCETHYNQLFGDVCYNCSHVIEGDVVSALNKAWCVSCFSCSTCNSKLTLKNKFVEFDMKPVCKRCYEKFPLELKKRLKKLSELTSRKAQPKATDLNSA

SEQ ID NO: 39457 - protein, 189 aa, Homo sapiens
MFRSDAYHPDHFNCTHCGKELTAEARELKGELYCLPCHDKMGVPICGACRRPIEGRVVNALGKQWHVEHFVCAKCEKPFLGHRHYEKKGLAYCETHYNQLFGDVCYNCSHVIEGDVVSALNKAWCVSCFSCSTCNSKLTLKNKFVEFDMKPVCKRCYEKFPLELKKRLKKLSELTSRKAQPKATDLNSA

SEQ ID NO: 39458 - protein, 363 aa, Homo sapiens
MTGRKRKWGETGTGSGAAPAAALRWSNMSDALANAVCQRCQARFSPAERIVNSNGELYHEHCFVCAQCFRPFPEGLFYEFEGRKYCEHDFQMLFAPCCGSCGEFIIGRVIKAMNNNWHPGCFRCELCDVELADLGFVKNAGRHLCRPCHNREKAKGLGKYICQRCHLVIDEQPLMFRSDAYHPDHFNCTHCGKELTAEARELKGELYCLPCHDKMGVPICGACRRPIEGRVVNALGKQWHVEHFVCAKCEKPFLGHRHYEKKGLAYCETHYNQLFGDVCYNCSHVIEGDVVSALNKAWCVSCFSCSTCNSKLTLKNKFVEFDMKPVCKRCYEKFPLELKKRLKKLSELTSRKAQPKATDLNSA

SEQ ID NO: 39459 - protein, 478 aa, Homo sapiens
MPPMPSAPPVHPPPDGGWGWIVVGAAFISIGFSYAFPKAVTVFFKEIQQIFHTTYSEIAWISSIMLAVMYAGGPVSSVLVNKYGSRPVVIAGGLLCCLGMVLASFSSSVVQLYLTMGFITGLGLAFNLQPALTIIGKYFYRKRPMANGLAMAGSPVFLSSLAPFNQYLFNTFGWKGSFLILGSLLLNACVAGSLMRPLGPNQTTSKSKNKTGKTEDDSSPKKIKTKKSTWEKVNKYLDFSLFKHRGFLIYLSGNVIMFLGFFAPIIFLAPYAKDQGIDEYSAAFLLSVMAFVDMFARPSVGLIANSKYIRPRIQYFFSFAIMFNGVCHLLCPLAQDYTSLVLYAVFFGLGFGSVSSVLFETLMDLVGAPRFSSAVGLVTIVECGPVLLGPPLAGKLVDLTGEYKYMYMSCGAIVVAASVWLLIGNAINYRLLAKERKEENARQKTRESEPLSKSKHSEDVNVKVSNAQSVTSERETNI

SEQ ID NO: 39460 - protein, 16 aa, Homo sapiens
MRWQEMGYIFYPRKLR

SEQ ID NO: 39461 - protein, 471 aa, Homo sapiens
MHPGVLAAFLFLSWTHCRALPLPSGGDEDDLSEEDLQFAERYLRSYYHPTNLAGILKENAASSMTERLREMQSFFGLEVTGKLDDNTLDVMKKPRCGVPDVGEYNVFPRTLKWSKMNLTYRIVNYTPDMTHSEVEKAFKKAFKVWSDVTPLNFTRLHDGIADIMISFGIKEHGDFYPFDGPSGLLAHAFPPGPNYGGDAHFDDDETWTSSSKGYNLFLVAAHEFGHSLGLDHSKDPGALMFPIYTYTGKSHFMLPDDDVQGIQSLYGPGDEDPNPKHPKTPDKCDPSLSLDAITSLRGETMIFKDRFFWRLHPQQVDAELFLTKSFWPELPNRIDAAYEHPSHDLIFIFRGRKFWALNGYDILEGYPKKISELGLPKEVKKISAAVHFEDTGKTLLFSGNQVWRYDDTNHIMDKDYPRLIEEDFPGIGDKVDAVYEKNGYIYFFNGPIQFEYSIWSNRIVRVMPANSILWC

SEQ ID NO: 39462 - protein, 818 aa, Homo sapiens
MAGTRRKSLQNRQVGSLLIFLCISVGDATTIRYSVAEEMESGSFVANVAKDLGLEVGKLAARGARLVSEGNKMHFRLHRKTGDLFVKEKLDRESLCGKADPCVLHFEVVLVEPLQSFRAEVRVFDINDNAPVFLNKEPLLKIPESTPLGSRFPLQSAQDLDVGLNGLQNYTLSANGYFHLHTRFCSHGPKYAELVLNKPLDREEQPEVNLTITAVDGGSPPKSGTAHIHVVVLDVNDHVPQFSRLVYRAQVSENSPNGSLVATVTAVDLDEGTNKAITYSLAQNPEAILKTFQIDPQNGEVRLRGPLDFEAIETYDIDIQATDGGGLSAHSKVLVEVVDVNDNPPEVMVSSVSSPLPEDSPPQTVVALFTIRDRDIRVGGKVTCFLREDLPFVIKPTFGNSYSLVTDRSLDREEVSGYNITIVAMDTGPPSLSAETMIEVLISDVNDNPPIFREDSYILTVRENNSPAVFIGKVHAEDLDLGENAQITYSLLPPKNGDLSVFAYISINSGNGKLYALRTMDYEAIQDFQFVVKATDGGFLSLSSQVTVRVVVLDDNDNRPMILYPLQNGTLPCNDLVPRSAEAGYLVTKVVAVDGDSGQNSWLSYHLLKATDLGLFSVQRQNGEIHTLRQISERDPMMQKLIILVQDHGQPALSTTVSLNILLVDGFSEPYLQFQDPTKHSRKVNPSTKYLVISLVILSFLFLLSVIVIFIIHVYQKIKYREKFTIQEHFYDDCNFSNNLVQGQGNGSLSRPCPYEMCSATGTGNSEFRFLKRFMPNFPFPHATGEIKMEAGSSLPPNSDRNKSQRLEGHDQVSDDYM

SEQ ID NO: 39463 - protein, 203 aa, Homo sapiens
MAAAAVSSAKRSLRGELKQRLRAMSAEERLRQSRVLSQKVIAHSEYQKSKRISIFLSMQDEIETEEIIKDIFQRGKICFIPRYRFQSNHMDMVRIESPEEISLLPKTSWNIPQPGEGDVREEALSTGGLDLIFMPGLGFDKHGNRLGRGKGYYDAYLKRCLQHQEVKPYTLALAFKEQICLQVPVNENDMKVDEVLYEDSSTA

SEQ ID NO: 39464 - protein, 179 aa, Homo sapiens
MARSRLTATSVSQVQVIAHSEYQKSKRISIFLSMQDEIETEEIIKDIFQRGKICFIPRYRFQSNHMDMVRIESPEEISLLPKTSWNIPQPGEGDVREEALSTGGLDLIFMPGLGFDKHGNRLGRGKGYYDAYLKRCLQHQEVKPYTLALAFKEQICLQVPVNENDMKVDEVLYEDSSTA

SEQ ID NO: 39465 - protein, 533 aa, Homo sapiens
MAPKPKPWVQTEGPEKKKGRQAGREEDPFRSTAEALKAIPAEKRIIRVDPTCPLSSNPGTQVYEDYNCTLNQTNIENNNNKFYIIQLLQDSNRFFTCWNRWGRVGEVGQSKINHFTRLEDAKKDFEKKFREKTKNNWAERDHFVSHPGKYTLIEVQAEDEAQEAVVKVDRGPVRTVTKRVQPCSLDPATQKLITNIFSKEMFKNTMALMDLDVKKMPLGKLSKQQIARGFEALEALEEALKGPTDGGQSLEELSSHFYTVIPHNFGHSQPPPINSPELLQAKKDMLLVLADIELAQALQAVSEQEKTVEEVPHPLDRDYQLLKCQLQLLDSGAPEYKVIQTYLEQTGSNHRCPTLQHIWKVNQEGEEDRFQAHSKLGNRKLLWHGTNMAVVAAILTSGLRIMPHSGGRVGKGIYFASENSKSAGYVIGMKCGAHHVGYMFLGEVALGREHHINTDNPSLKSPPPGFDSVIARGHTEPDPTQDTELELDGQQVVVPQGQPVPCPEFSSSTFSQSEYLIYQESQCRLRYLLEVHL

SEQ ID NO: 39466 - protein, 540 aa, Homo sapiens
MSLLFLAMAPKPKPWVQTEGPEKKKGRQAGREEDPFRSTAEALKAIPAEKRIIRVDPTCPLSSNPGTQVYEDYNCTLNQTNIENNNNKFYIIQLLQDSNRFFTCWNRWGRVGEVGQSKINHFTRLEDAKKDFEKKFREKTKNNWAERDHFVSHPGKYTLIEVQAEDEAQEAVVKVDRGPVRTVTKRVQPCSLDPATQKLITNIFSKEMFKNTMALMDLDVKKMPLGKLSKQQIARGFEALEALEEALKGPTDGGQSLEELSSHFYTVIPHNFGHSQPPPINSPELLQAKKDMLLVLADIELAQALQAVSEQEKTVEEVPHPLDRDYQLLKCQLQLLDSGAPEYKVIQTYLEQTGSNHRCPTLQHIWKVNQEGEEDRFQAHSKLGNRKLLWHGTNMAVVAAILTSGLRIMPHSGGRVGKGIYFASENSKSAGYVIGMKCGAHHVGYMFLGEVALGREHHINTDNPSLKSPPPGFDSVIARGHTEPDPTQDTELELDGQQVVVPQGQPVPCPEFSSSTFSQSEYLIYQESQCRLRYLLEVHL

SEQ ID NO: 39467 - protein, 278 aa, Homo sapiens
MVRGAGPGPSLSALSHPTGASGMAAAEGPGYLVSPQAEKHRRARNWTDAEMRGLMLVWEEFFDELKQTKRNAKVYEKMASKLFEMTGERRLGEEIKIKITNMTFQYRKLKCMTDSESAPPDWPYYLAIDGILAKVPESCDGKLPDSQPPGPSTSQTEASLSPPAKSTPLYFPYNQCSYEGRFEDDRSDSSSSLLSLKFRSEERPVKKRKVQSCHLQKKQLRLLEAMVEEQRRLSRAVEETCREVRRVLDQQHILQVQSLQLQERMMSLLERIITKSSV

SEQ ID NO: 39468 - protein, 650 aa, Homo sapiens
MAGARAAAAAASAGSSASSGNQPPQELGLGELLEEFSRTQYRAKDGSGTGGSKVERIEKRCLELFGRDYCFSVIPNTNGDICGHYPRHIVFLEYESSEKEKDTFESTVQVSKLQDLIHRSKMARCRGRFVCPVILFKGKHICRSATLAGWGELYGRSGYNYFFSGGADDAWADVEDVTEEDCALRSGDTHLFDKVRGYDIKLLRYLSVKYICDLMVENKKVKFGMNVTSSEKVDKAQRYADFTLLSIPYPGCEFFKEYKDRDYMAEGLIFNWKQDYVDAPLSIPDFLTHSLNIDWSQYQCWDLVQQTQNYLKLLLSLVNSDDDSGLLVHCISGWDRTPLFISLLRLSLWADGLIHTSLKPTEILYLTVAYDWFLFGHMLVDRLSKGEEIFFFCFNFLKHITSEEFSALKTQRRKSLPARDGGFTLEDICMLRRKDRGSTTSLGSDFSLVMESSPGATGSFTYEAVELVPAGAPTQAAWRKSHSSSPQSVLWNRPQPSEDRLPSQQGLAEARSSSSSSSNHSDNFFRMGSSPLEVPKPRSVDHPLPGSSLSTDYGSWQMVTGCGSIQERAVLHTDSSLPFSFPDELPNSCLLAALSDRETRLQEVRSAFLAAYSSTVGLRAVAPSPSGAIGGLLEQFARGVGLRSISSNAL

SEQ ID NO: 39469 - protein, 598 aa, Homo sapiens
MAGARAAAAAASAGSSASSGNQPPQELGLGELLEEFSRTQYRAKDGSGTGGSKVERIEKRCLELFGRDYCFSVIPNTNGDICGHYPRHIVFLEYESSEKEKDTFESTVQVSKLQDLIHRSKMARCRGRFVCPVILFKGKHICRSATLAGWGELYGRSGYNYFFSGGADDAWADVEDVTEEDCALRSGDTHLFDKVRGYDIKLLRYLSVKYICDLMVENKKVKFGMNVTSSEKVDKAQRYADFTLLSIPYPGCEFFKEYKDRDYMAEGLIFNWKQDYVDAPLSIPDFLTHSLNIDWSQYQCWDLVQQTQNYLKLLLSLVNSDDDSGLLVHCISGWDRTPLFISLLRLSLWADGLIHTSLKPTEILYLTVAYDWFLFGHMLVDRLSKGEEIFFFCFNFLKHITSEEFSALKTQRRKSLPARDGGFTLEDICMLRRKDRGSTTSLGSDFSLVMESSPGATGSFTYEAVELVPAGAPTQAAWRKSHSSSPQSVLWNRPQPSEDRLPSQQGLAEARSSSSSSSNHSDNFFRMGSSPLEVPKPRLAALSDRETRLQEVRSAFLAAYSSTVGLRAVAPSPSGAIGGLLEQFARGVGLRSISSNAL

SEQ ID NO: 39470 - protein, 538 aa, Homo sapiens
MAGARAAAAAASAGSSASSGNQPPQELGLGELLEEFSRTQYRAKDGSGTGGSKVERIEKRCLELFGRDYCFSVIPNTNGDICGHYPRHIVFLEYESSEKEKDTFESTVQVSKLQDLIHRSKMARCRGRFVCPVILFKGKHICRSATLAGWGELYGRSGYNYFFSGGADDAWADVEDVTEEDCALRSGDTHLFDKVRGYDIKLLRYLSVKYICDLMVENKKVKFGMNVTSSEKVDKAQRYADFTLLSIPYPGCEFFKEYKDRDYMAEGLIFNWKQDYVDAPLSIPDFLTHSLNIDWSQYQCWDLVQQTQNYLKLLLSLVNSDDDSGLLVHCISGWDRTPLFISLLRLSLWADGLIHTSLKPTEILYLTVAYDWFLFGHMLVDRLSKGEEIFFFCFNFLKHITSEEFSALKTQRRKSLPARDGGFTLEDICMLRRKDRGSTTSLGSDFSLVMESSPGATGSFTYEAVELVPAGAPTQAAWLAALSDRETRLQEVRSAFLAAYSSTVGLRAVAPSPSGAIGGLLEQFARGVGLRSISSNAL

SEQ ID NO: 39471 - protein, 178 aa, Homo sapiens
MTTLRAFTCDDLFRFNNINLDPLTETYGIPFYLQYLAHWPEYFIVAEAPGGELMGYIMGKAEGSVAREEWHGHVTALSVAPEFRRLGLAAKLMELLEEISERKGGFFVDLFVRVSNQVAVNMYKQLGYSVYRTVIEYYSASNGEPDEDAYDMRKALSRDTEKKSIIPLPHPVRPEDIE

SEQ ID NO: 39472 - protein, 111 aa, Homo sapiens
MTTLRAFTCDDLFRFNNINLDPLTETYGIPFYLQYLAHWPEYFIVAEAPGGELMGYIMGKAEGSVAREEWHGHVTALSVAPEFRRLGLAAKLMELLEEISERYEESTFQGY

SEQ ID NO: 39473 - protein, 1960 aa, Homo sapiens
MAQQAADKYLYVDKNFINNPLAQADWAAKKLVWVPSDKSGFEPASLKEEVGEEAIVELVENGKKVKVNKDDIQKMNPPKFSKVEDMAELTCLNEASVLHNLKERYYSGLIYTYSGLFCVVINPYKNLPIYSEEIVEMYKGKKRHEMPPHIYAITDTAYRSMMQDREDQSILCTGESGAGKTENTKKVIQYLAYVASSHKSKKDQGELERQLLQANPILEAFGNAKTVKNDNSSRFGKFIRINFDVNGYIVGANIETYLLEKSRAIRQAKEERTFHIFYYLLSGAGEHLKTDLLLEPYNKYRFLSNGHVTIPGQQDKDMFQETMEAMRIMGIPEEEQMGLLRVISGVLQLGNIVFKKERNTDQASMPDNTAAQKVSHLLGINVTDFTRGILTPRIKVGRDYVQKAQTKEQADFAIEALAKATYERMFRWLVLRINKALDKTKRQGASFIGILDIAGFEIFDLNSFEQLCINYTNEKLQQLFNHTMFILEQEEYQREGIEWNFIDFGLDLQPCIDLIEKPAGPPGILALLDEECWFPKATDKSFVEKVMQEQGTHPKFQKPKQLKDKADFCIIHYAGKVDYKADEWLMKNMDPLNDNIATLLHQSSDKFVSELWKDVDRIIGLDQVAGMSETALPGAFKTRKGMFRTVGQLYKEQLAKLMATLRNTNPNFVRCIIPNHEKKAGKLDPHLVLDQLRCNGVLEGIRICRQGFPNRVVFQEFRQRYEILTPNSIPKGFMDGKQACVLMIKALELDSNLYRIGQSKVFFRAGVLAHLEEERDLKITDVIIGFQACCRGYLARKAFAKRQQQLTAMKVLQRNCAAYLKLRNWQWWRLFTKVKPLLQVSRQEEEMMAKEEELVKVREKQLAAENRLTEMETLQSQLMAEKLQLQEQLQAETELCAEAEELRARLTAKKQELEEICHDLEARVEEEEERCQHLQAEKKKMQQNIQELEEQLEEEESARQKLQLEKVTTEAKLKKLEEEQIILEDQNCKLAKEKKLLEDRIAEFTTNLTEEEEKSKSLAKLKNKHEAMITDLEERLRREEKQRQELEKTRRKLEGDSTDLSDQIAELQAQIAELKMQLAKKEEELQAALARVEEEAAQKNMALKKIRELESQISELQEDLESERASRNKAEKQKRDLGEELEALKTELEDTLDSTAAQQELRSKREQEVNILKKTLEEEAKTHEAQIQEMRQKHSQAVEELAEQLEQTKRVKANLEKAKQTLENERGELANEVKVLLQGKGDSEHKRKKVEAQLQELQVKFNEGERVRTELADKVTKLQVELDNVTGLLSQSDSKSSKLTKDFSALESQLQDTQELLQEENRQKLSLSTKLKQVEDEKNSFREQLEEEEEAKHNLEKQIATLHAQVADMKKKMEDSVGCLETAEEVKRKLQKDLEGLSQRHEEKVAAYDKLEKTKTRLQQELDDLLVDLDHQRQSACNLEKKQKKFDQLLAEEKTISAKYAEERDRAEAEAREKETKALSLARALEEAMEQKAELERLNKQFRTEMEDLMSSKDDVGKSVHELEKSKRALEQQVEEMKTQLEELEDELQATEDAKLRLEVNLQAMKAQFERDLQGRDEQSEEKKKQLVRQVREMEAELEDERKQRSMAVAARKKLEMDLKDLEAHIDSANKNRDEAIKQLRKLQAQMKDCMRELDDTRASREEILAQAKENEKKLKSMEAEMIQLQEELAAAERAKRQAQQERDELADEIANSSGKGALALEEKRRLEARIAQLEEELEEEQGNTELINDRLKKANLQIDQINTDLNLERSHAQKNENARQQLERQNKELKVKLQEMEGTVKSKYKASITALEAKIAQLEEQLDNETKERQAACKQVRRTEKKLKDVLLQVDDERRNAEQYKDQADKASTRLKQLKRQLEEAEEEAQRANASRRKLQRELEDATETADAMNREVSSLKNKLRRGDLPFVVPRRMARKGAGDGSDEEVDGKADGAEAKPAE

SEQ ID NO: 39474 - protein, 1382 aa, Homo sapiens
MYKGKKRHEMPPHIYAITDTAYRSMMQDREDQSILCTGESGAGKTENTKKVIQYLAYVASSHKSKKDQGELERQLLQANPILEAFGNAKTVKNDNSSRFGKFIRINFDVNGYIVGANIETYLLEKSRAIRQAKEERTFHIFYYLLSGAGEHLKTDLLLEPYNKYRFLSNGHVTIPGQQDKDMFQETMEAMRIMGIPEEEQMGLLRVISGVLQLGNIVFKKERNTDQASMPDNTAAQKVSHLLGINVTDFTRGILTPRIKVGRDYVQKAQTKEQADFAIEALAKATYERMFRWLVLRINKALDKTKRQGASFIGILDIAGFEIFDLNSFEQLCINYTNEKLQQLFNHTMFILEQEEYQREGIEWNFIDFGLDLQPCIDLIEKPAGPPGILALLDEECWFPKATDKSFVEKVMQEQGTHPKFQKPKQLKDKADFCIIHYAGKVDYKADEWLMKNMDPLNDNIATLLHQSSDKFVSELWKDVDRIIGLDQVAGMSETALPGAFKTRKGMFRTVGQLYKEQLAKLMATLRNTNPNFVRCIIPNHEKKAGKLDPHLVLDQLRCNGVLEGIRICRQGFPNRVVFQEFRQRYEILTPNSIPKGFMDGKQACVLMIKALELDSNLYRIGQSKVFFRAGVLAHLEEERDLKITDVIIGFQACCRGYLARKAFAKRQQQLTAMKVLQRNCAAYLKLRNWQWWRLFTKVKPLLQVSRQEEEMMAKEEELVKVREKQLAAENRLTEMETLQSQLMAEKLQLQEQLQAETELCAEAEELRARLTAKKQELEEICHDLEARVEEEEERCQHLQAEKKKMQQNIQELEEQLEEEESARQKLQLEKVTTEAKLKKLEEELDDLLVDLDHQRQSACNLEKKQKKFDQLLAEEKTISAKYAEERDRAEAEAREKETKALSLARALEEAMEQKAELERLNKQFRTEMEDLMSSKDDVGKSVHELEKSKRALEQQVEEMKTQLEELEDELQATEDAKLRLEVNLQAMKAQFERDLQGRDEQSEEKKKQLVRQVREMEAELEDERKQRSMAVAARKKLEMDLKDLEAHIDSANKNRDEAIKQLRKLQAQMKDCMRELDDTRASREEILAQAKENEKKLKSMEAEMIQLQEELAAAERAKRQAQQERDELADEIANSSGKGALALEEKRRLEARIAQLEEELEEEQGNTELINDRLKKANLQIDQINTDLNLERSHAQKNENARQQLERQNKELKVKLQEMEGTVKSKYKASITALEAKIAQLEEQLDNETKERQAACKQVRRTEKKLKDVLLQVDDERRNAEQYKDQADKASTRLKQLKRQLEEAEEEAQRANASRRKLQRELEDATETADAMNREVSSLKNKLRRGDLPFVVPRRMARKGAGDGSDEEVDGKADGAEAKPAE

SEQ ID NO: 39475 - protein, 504 aa, Homo sapiens
MRFFCARCCSFGPEMPAVQLLLLACLVWDVGARTAQLRKANDQSGRCQYTFSVASPNESSCPEQSQAMSVIHNLQRDSSTQRLDLEATKARLSSLESLLHQLTLDQAARPQETQEGLQRELGTLRRERDQLETQTRELETAYSNLLRDKSVLEEEKKRLRQENENLARRLESSSQEVARLRRGQCPQTRDTARAVPPGSREVSTWNLDTLAFQELKSELTEVPASRILKESPSGYLRSGEGDTGCGELVWVGEPLTLRTAETITGKYGVWMRDPKPTYPYTQETTWRIDTVGTDVRQVFEYDLISQFMQGYPSKVHILPRPLESTGAVVYSGSLYFQGAESRTVIRYELNTETVKAEKEIPGAGYHGQFPYSWGGYTDIDLAVDEAGLWVIYSTDEAKGAIVLSKLNPENLELEQTWETNIRKQSVANAFIICGTLYTVSSYTSADATVNFAYDTGTGISKTLTIPFKNRYKYSSMIDYNPLEKKLFAWDNLNMVTYDIKLSKM

SEQ ID NO: 39476 - protein, 276 aa, Homo sapiens
MNSRRREPITLQDPEAKYPLPLIEKEKISHNTRRFRFGLPSPDHVLGLPVGNYVQLLAKIDNELVVRAYTPVSSDDDRGFVDLIIKIYFKNVHPQYPEGGKMTQYLENMKIGETIFFRGPRGRLFYHGPGNLGIRPDQTSEPKKTLADHLGMIAGGTGITPMLQLIRHITKDPSDRTRMSLIFANQTEEDILVRKELEEIARTHPDQFNLWYTLDRPPIGWKYSSGFVTADMIKEHLPPPAKSTLILVCGPPPLIQTAAHPNLEKLGYTQDMIFTY

SEQ ID NO: 39477 - protein, 237 aa, Homo sapiens
MNSRRREPITLQDPEAKYPLPLIEKEKISHNTRRFRFGLPSPDHVLGLPVGNYVQLLAKIDNELVVRAYTPVSSDDDRGFVDLIIKIYFKNVHPQYPEGGKMTQYLENMKIGETIFFRGPRGRLFYHGPGNLGIRPDQTSEPKKTLADHLGMIAGGTGITPMLQLIRHITKDPSDRTRMSLIFANQTEEDILVRKELEEIARTHPDQFNLWYTLDRPPIGPWSAEGATLLSNSAQFH

SEQ ID NO: 39478 - protein, 172 aa, Homo sapiens
MSSKRAKAKTTKKRPQRATSNVFAMFDQSQIQEFKEAFNMIDQNRDGFIDKEDLHDMLASLGKNPTDEYLEGMMSEAPGPINFTMFLTMFGEKLNGTDPEDVIRNAFACFDEEASGFIHEDHLRELLTTMGDRFTDEEVDEMYREAPIDKKGNFNYVEFTRILKHGAKDKDD

SEQ ID NO: 39479 - protein, 118 aa, Homo sapiens
MSSKRAKAKTTKKRPQRATSNVFAMFDQSQIQEFKEAFNMIDQNRDGFIDKEDLHDMLASLGFIHEDHLRELLTTMGDRFTDEEVDEMYREAPIDKKGNFNYVEFTRILKHGAKDKDD

SEQ ID NO: 39480 - protein, 320 aa, Homo sapiens
MELLSPPLRDVDLTAPDGSLCSFATTDDFYDDPCFDSPDLRFFEDLDPRLMHVGALLKPEEHSHFPAAVHPAPGAREDEHVRAPSGHHQAGRCLLWACKACKRKTTNADRRKAATMRERRRLSKVNEAFETLKRCTSSNPNQRLPKVEILRNAIRYIEGLQALLRDQDAAPPGAAAAFYAPGPLPPGRGGEHYSGDSDASSPRSNCSDGMMDYSGPPSGARRRNCYEGAYYNEAPSEPRPGKSAAVSSLDCLSSIVERISTESPAAPALLLADVPSESPPRRQEAAAPSEGESSGDPTQSPDAAPQCPAGANPNPIYQVL

SEQ ID NO: 39481 - protein, 221 aa, Homo sapiens
MGTLVAKLLLPTLSSLAFLPTVSIAAKRRFHMEAMVYLFTLFFVALHHACNGPGLSVLCFMRHDILEYFSVYGTALSMWVSLMALADFDEPKRSTFVMFGVLTIAVRIYHDRWGYGVYSGPIGTAILIIAAKWLQKMKEKKGLYPDKSVYTQQIGPGLCFGALALMLRFFFEDWDYTYVHSFYHCALAMSFVLLLPKVNKKAGSPGTPAKLDCSTLCCACV

SEQ ID NO: 39482 - protein, 84 aa, Homo sapiens
MPTPLLPLLLRLLLSCLLLPAARLARQYLLPLLRRLARRLGSQDMREALLGCLLFILSQRHSPDAGEASRVDRLERRERLGPQK

SEQ ID NO: 39483 - protein, 417 aa, Homo sapiens
MSLSKKLTLDKLDVRGKRVIMRVDFNVPMKKNQITNNQRIKASIPSIKYCLDNGAKAVVLMSHLGRPDGVPMPDKYSLAPVAVELKSLLGKDVLFLKDCVGAEVEKACANPAPGSVILLENLRFHVEEEGKGQDPSGKKIKAEPDKIEAFRASLSKLGDVYVNDAFGTAHRAHSSMVGVNLPHKASGFLMKKELDYFAKALENPVRPFLAILGGAKVADKIQLIKNMLDKVNEMIIGGGMAYTFLKVLNNMEIGASLFDEEGAKIVKDIMAKAQKNGVRITFPVDFVTGDKFDENAQVGKATVASGISPGWMGLDCGPESNKNHAQVVAQARLIVWNGPLGVFEWDAFAKGTKALMDEIVKATSKGCITVIGGGDTATCCAKWNTEDKVSHVSTGGGASLELLEGKILPGVEALSNM

SEQ ID NO: 39484 - protein, 152 aa, Homo sapiens
MKSPDEVLREGELEKRSDSLFQLWKKKRGVLTSDRLSLFPASPRARPKELRFHSILKVDCVERTGKYVYFTIVTTDHKEIDFRCAGESCWNAAIALALIDFQNRRALQDFRSRQERTAPAAPAEDAVAAAAAAPSEPSEPSRPSPQPKPRTP

SEQ ID NO: 39485 - protein, 442 aa, Homo sapiens
MTCYRGFLLGSCCRVAGGRAAALRGPGAGGPAARPRLGGDGGGRRHLGQGQPRELAGCGSRADGGFRPSRVVVVAKTTRYEFEQQRYRYAELSEEDLKQLLALKGSSYSGLLERHHIHTKNVEHIIDSLRNEGIEVRLVKRREYDEETVRWADAVIAAGGDGTMLLAASKVLDRLKPVIGVNTDPERSEGHLCLPVRYTHSFPEALQKFYRGEFRWLWRQRIRLYLEGTGINPVPVDLHEQQLSLNQHNRALNIERAHDERSEASGPQLLPVRALNEVFIGESLSSRASYYEISVDDGPWEKQKSSGLNLCTGTGSKAWSFNINRVATQAVEDVLNIAKRQGNLSLPLNRELVEKVTNEYNESLLYSPEEPKILFSIREPIANRVFSSSRQRCFSSKVCVRSRCWDACMVVDGGTSFEFNDGAIASMMINKEDELRTVLLEQ

SEQ ID NO: 39486 - protein, 410 aa, Homo sapiens
MTCYRGFLLGSCCRVAGGRAAALRGPGAGGPAARPRLGGDGGGRRHLGQGQPRELAGCGSRADGGFRPSRVVVVAKTTRYEFEQQRYRYAELSEEDLKQLLALKGSSYSGLLERHHIHTKNVEHIIDSLRNEGIEVRLVKRREYDEETVRWADAVIAAGGDGTMLLAASKVLDRLKPVIGVNTDPERSEGHLCLPVRYTHSFPEALQKFYRGEFRWLWRQRIRLYLEGTGINPVPVDLHEQQLSLNQHNRALNIERAHDERSEASGPQLLPVRALNEVFIGESLSSRSFNINRVATQAVEDVLNIAKRQGNLSLPLNRELVEKVTNEYNESLLYSPEEPKILFSIREPIANRVFSSSRQRCFSSKVCVRSRCWDACMVVDGGTSFEFNDGAIASMMINKEDELRTVLLEQ

SEQ ID NO: 39487 - protein, 279 aa, Homo sapiens
MLLAASKVLDRLKPVIGVNTDPERSEGHLCLPVRYTHSFPEALQKFYRGEFRWLWRQRIRLYLEGTGINPVPVDLHEQQLSLNQHNRALNIERAHDERSEASGPQLLPVRALNEVFIGESLSSRASYYEISVDDGPWEKQKSSGLNLCTGTGSKAWSFNINRVATQAVEDVLNIAKRQGNLSLPLNRELVEKVTNEYNESLLYSPEEPKILFSIREPIANRVFSSSRQRCFSSKVCVRSRCWDACMVVDGGTSFEFNDGAIASMMINKEDELRTVLLEQ

SEQ ID NO: 39488 - protein, 291 aa, Homo sapiens
MALAALMIALGSLGLHTWQAQAVPILPLGLAPDTFDDTYVGCAEEMEEKAAPLLKEEMAHHALLRESWEAAQETWEDKRRGLTLPPGFKAQNGIAIMVYTNSSNTLYWELNQAVRTGGGSRELYMRHFPFKALHFYLIRALQLLRGSGGCSRGPGEVVFRGVGSLRFEPKRLGDSVRLGQFASSSLDKAVAHRFGNATLFSLTTCFGAPIQAFSVFPKEREVLIPPHEVFLVTRFSQDGAQSLVTLWSYNQTCSHFNCAYLGGEKRRGCVSAPGALGTGDLHMTKRHLQQP

SEQ ID NO: 39489 - protein, 239 aa, Homo sapiens
MALAALMIALGSLGLHTWQAQAVPILPLGLAPDTFDDTYVGCAEEMEEKAAPLLKEEMAHHALLRESWEAAQETWEDKRRGLTLPPGFKAQNGIAIMVYTNSSNTLYWELNQAVRTGGGSRELYMRHFPFKALHFYLIRALQLLRGSGGCSRGPGEVVFRGVGSLRFEPKRLGDSVRLGQFASSSLDKAVAHRFGEKRRGCVSAPGVQLGSQSEGASSLPPWKTLLLAPGEFQLSGVGP

SEQ ID NO: 39490 - protein, 314 aa, Homo sapiens
MGPLINRCKKILLPTTVPPATMRIWLLGGLLPFLLLLSGLQRPTEGSEVAIKIDFDFAPGSFDDQYQGCSKQVMEKLTQGDYFTKDIEAQKNYFRMWQKAHLAWLNQGKVLPQNMTTTHAVAILFYTLNSNVHSDFTRAMASVARTPQQYERSFHFKYLHYYLTSAIQLLRKDSIMENGTLCYEVHYRTKDVHFNAYTGATIRFGQFLSTSLLKEEAQEFGNQTLFTIFTCLGAPVQYFSLKKEVLIPPYELFKVINMSYHPRGNWLQLRSTGNLSTYNCQLLKASSKKCIPDPIAIASLSFLTSVIIFSKSRV

SEQ ID NO: 39491 - protein, 380 aa, Homo sapiens
MTEEVIVIAKWDYTAQQDQELDIKKNERLWLLDDSKTWWRVRNAANRTGYVPSNYVERKNSLKKGSLVKNLKDTLGLGKTRRKTSARDASPTPSTDAEYPANGSGADRIYDLNIPAFVKFAYVAEREDELSLVKGSRVTVMEKCSDGWWRGSYNGQIGWFPSNYVLEEVDEAAAESPSFLSLRKGASLSNGQGSRVLHVVQTLYPFSSVTEEELNFEKGETMEVIEKPENDPEWWKCKNARGQVGLVPKNYVVVLSDGPALHPAHAPQISYTGPSSSGRFAGREWYYGNVTRHQAECALNERGVEGDFLIRDSESSPSDFSVSLKASGKNKHFKVQLVDNVYCIGQRRFHTMDELVEHYKKAPIFTSEHGEKLYLVRALQ

SEQ ID NO: 39492 - protein, 377 aa, Homo sapiens
MAEEVVVVAKFDYVAQQEQELDIKKNERLWLLDDSKSWWRVRNSMNKTGFVPSNYVERKNSARKASIVKNLKDTLGIGKVKRKPSVPDSASPADDSFVDPGERLYDLNMPAYVKFNYMAEREDELSLIKGTKVIVMEKCSDGWWRGSYNGQVGWFPSNYVTEEGDSPLGDHVGSLSEKLAAVVNNLNTGQVLHVVQALYPFSSSNDEELNFEKGDVMDVIEKPENDPEWWKCRKINGMVGLVPKNYVTVMQNNPLTSGLEPSPPQCDYIRPSLTGKFAGNPWYYGKVTRHQAEMALNERGHEGDFLIRDSESSPNDFSVSLKAQGKNKHFKVQLKETVYCIGQRKFSTMEELVEHYKKAPIFTSEQGEKLYLVKHLS

SEQ ID NO: 39493 - protein, 313 aa, Homo sapiens
MDWLNVFKDFFSIGKVKRKPSVPDSASPADDSFVDPGERLYDLNMPAYVKFNYMAEREDELSLIKGTKVIVMEKCSDGWWRGSYNGQVGWFPSNYVTEEGDSPLGDHVGSLSEKLAAVVNNLNTGQVLHVVQALYPFSSSNDEELNFEKGDVMDVIEKPENDPEWWKCRKINGMVGLVPKNYVTVMQNNPLTSGLEPSPPQCDYIRPSLTGKFAGNPWYYGKVTRHQAEMALNERGHEGDFLIRDSESSPNDFSVSLKAQGKNKHFKVQLKETVYCIGQRKFSTMEELVEHYKKAPIFTSEQGEKLYLVKHLS

SEQ ID NO: 39494 - protein, 655 aa, Homo sapiens
MAMAKARKPREALLWALSDLEENDFKKLKFYLRDMTLSEGQPPLARGELEGLIPVDLAELLISKYGEKEAVKVVLKGLKVMNLLELVDQLSHICLHDYREVYREHVRCLEEWQEAGVNGRYNQVLLVAKPSSESPESLACPFPEQELESVTVEALFDSGEKPSLAPSLVVLQGSAGTGKTTLARKMVLDWATGTLYPGRFDYVFYVSCKEVVLLLESKLEQLLFWCCGDNQAPVTEILRQPERLLFILDGFDELQRPFEEKLKKRGLSPKESLLHLLIRRHTLPTCSLLITTRPLALRNLEPLLKQARHVHILGFSEEERARYFSSYFTDEKQADRAFDIVQKNDILYKACQVPGICWVVCSWLQGQMERGKVVLETPRNSTDIFMAYVSTFLPPDDDGGCSELSRHRVLRSLCSLAAEGIQHQRFLFEEAELRKHNLDGPRLAAFLSSNDYQLGLAIKKFYSFRHISFQDFFHAMSYLVKEDQSRLGKESRREVQRLLEVKEQEGNDEMTLTMQFLLDISKKDSFSNLELKFCFRISPCLAQDLKHFKEQMESMKHNRTWDLEFSLYEAKIKNLVKGIQMNNVSFKIKHSNEKKSQSQNLFSVKSSLSHGPKEEQKCPSVHGQKEGKDNIAGTQKEASTGKGRGTEETPKNTYI

SEQ ID NO: 39495 - protein, 1128 aa, Homo sapiens
MSRSVLQPSQQKLAEKLTILNDRGVGMLTRLYNIKKACGDPKAKPSYLIDKNLESAVKFIVRKFPAVETRNNNQQLAQLQKEKSEILKNLALYYFTFVDVMEFKDHVCELLNTIDVCQVFFDITVNFDLTKNYLDLIITYTTLMILLSRIEERKAIIGLYNYAHEMTHGASDREYPRLGQMIVDYENPLKKMMEEFVPHSKSLSDALISLQMVYPRRNLSADQWRNAQLLSLISAPSTMLNPAQSDTMPCEYLSLDAMEKWIIFGFILCHGILNTDATALNLWKLALQSSSCLSLFRDEVFHIHKAAEDLFVNIRGYNKRINDIRECKEAAVSHAGSMHRERRKFLRSALKELATVLSDQPGLLGPKALFVFMALSFARDEIIWLLRHADNMPKKSADDFIDKHIAELIFYMEELRAHVRKYGPVMQRYYVQYLSGFDAVVLNELVQNLSVCPEDESIIMSSFVNTMTSLSVKQVEDGEVFDFRGMRLDWFRLQAYTSVSKASLGLADHRELGKMMNTIIFHTKMVDSLVEMLVETSDLSIFCFYSRAFEKMFQQCLELPSQSRYSIAFPLLCTHFMSCTHELCPEERHHIGDRSLSLCNMFLDEMAKQARNLITDICTEQCTLSDQLLPKHCAKTISQAVNKKSKKQTGKKGEPEREKPGVESMRKNRLVVTNLDKLHTALSELCFSINYVPNMVVWEHTFTPREYLTSHLEIRFTKSIVGMTMYNQATQEIAKPSELLTSVRAYMTVLQSIENYVQIDITRVFNNVLLQQTQHLDSHGEPTITSLYTNWYLETLLRQVSNGHIAYFPAMKAFVNLPTENELTFNAEEYSDISEMRSLSELLGPYGMKFLSESLMWHISSQVAELKKLVVENVDVLTQMRTSFDKPDQMAALFKRLSSVDSVLKRMTIIGVILSFRSLAQEALRDVLSYHIPFLVSSIEDFKDHIPRETDMKVAMNVYELSSAAGLPCEIDPALVVALSSQKSENISPEEEYKIACLLMVFVAVSLPTLASNVMSQYSPAIEGHCNNIHCLAKAINQIAAALFTIHKGSIEDRLKEFLALASSSLLKIGQETDKTTTRNRESVYLLLDMIVQESPFLTMDLLESCFPYVLLRNAYHAVYKQSVTSSA

SEQ ID NO: 39496 - protein, 1134 aa, Homo sapiens
MSRSVLQPSQQKLAEKLTILNDRGVGMLTRLYNIKKQGQVWKACGDPKAKPSYLIDKNLESAVKFIVRKFPAVETRNNNQQLAQLQKEKSEILKNLALYYFTFVDVMEFKDHVCELLNTIDVCQVFFDITVNFDLTKNYLDLIITYTTLMILLSRIEERKAIIGLYNYAHEMTHGASDREYPRLGQMIVDYENPLKKMMEEFVPHSKSLSDALISLQMVYPRRNLSADQWRNAQLLSLISAPSTMLNPAQSDTMPCEYLSLDAMEKWIIFGFILCHGILNTDATALNLWKLALQSSSCLSLFRDEVFHIHKAAEDLFVNIRGYNKRINDIRECKEAAVSHAGSMHRERRKFLRSALKELATVLSDQPGLLGPKALFVFMALSFARDEIIWLLRHADNMPKKSADDFIDKHIAELIFYMEELRAHVRKYGPVMQRYYVQYLSGFDAVVLNELVQNLSVCPEDESIIMSSFVNTMTSLSVKQVEDGEVFDFRGMRLDWFRLQAYTSVSKASLGLADHRELGKMMNTIIFHTKMVDSLVEMLVETSDLSIFCFYSRAFEKMFQQCLELPSQSRYSIAFPLLCTHFMSCTHELCPEERHHIGDRSLSLCNMFLDEMAKQARNLITDICTEQCTLSDQLLPKHCAKTISQAVNKKSKKQTGKKGEPEREKPGVESMRKNRLVVTNLDKLHTALSELCFSINYVPNMVVWEHTFTPREYLTSHLEIRFTKSIVGMTMYNQATQEIAKPSELLTSVRAYMTVLQSIENYVQIDITRVFNNVLLQQTQHLDSHGEPTITSLYTNWYLETLLRQVSNGHIAYFPAMKAFVNLPTENELTFNAEEYSDISEMRSLSELLGPYGMKFLSESLMWHISSQVAELKKLVVENVDVLTQMRTSFDKPDQMAALFKRLSSVDSVLKRMTIIGVILSFRSLAQEALRDVLSYHIPFLVSSIEDFKDHIPRETDMKVAMNVYELSSAAGLPCEIDPALVVALSSQKSENISPEEEYKIACLLMVFVAVSLPTLASNVMSQYSPAIEGHCNNIHCLAKAINQIAAALFTIHKGSIEDRLKEFLALASSSLLKIGQETDKTTTRNRESVYLLLDMIVQESPFLTMDLLESCFPYVLLRNAYHAVYKQSVTSSA

SEQ ID NO: 39497 - protein, 1909 aa, Homo sapiens
MEGKRQLEKRDFGKRLSLDSSLVEYMDSNKYIEHLLTQLEEQHRSLWREKLAVARLQREVAQRTSEGAMHEKLIHELEEERHLRLQSEKRLQEVTLESERNRIQMRSLQQQFSRMEETVRNLLQSQGSPEQKKEETVNIMVYQEKLSEEERKHKEALEDLHMVVDEDSRSESSSTDEGKEKTKLLLERLKALEAENSALALENENQREQYERCLDEVANQVVQALLTQKDLREECVKLKTRVFDLEQQNRTLSILFQQRVRPTSDLLLQKLHSRLLDLSSGDLLSEVERNRSLTQSRTDAEVHEHQLNTKSALKCPGLGAVIPGHLCPRNSYSSSSELSLSSTCSEYSSGSSYTWHDGKNLRKRQSSQNWDKRLSIDSSLPSGFASPTNELPPTRIKESHILEGLRKLQKRKVLLEPPSVITKWGYKDCMNSNEGIYSPGIKSSSLKEYPPCKTADLGSPCKEPHKTFVYDLDSHVDADDDPSTLALLQAVPNQSCRPHGSKLTHSVSDSLFGWETNRKHFLEGTSSVYPKERPEKLTSCASSCPLEMKLCPSVQTPQVQRERGPQGQGHGRMALNLQLSDTDDNETFDELHIESSDEKSPSDVSLAADTDKSVENLDVLVGFGKSLCGSPEEEEKQVPIPSETRPKTFSFIKQQRVVKRTSSEECVTVIFDAEDGEPIEFSSHQTGVVTVTRNEISINSTPAGPKAEHTELLPQGIACLQPRAAARDYTFFKRSEEDTEKNIPKDNVDNVPRVSTESFSSRTVTQNPQQQKLVKPTHNISCQSNSRSSAPMGIYQKQNLTKIPPRGKSSPQKSKLMEPEATTLLPSSGLVTLEKSPALAPGKLSRFMKTESSGPLFELRSDPHIPKHSAQLPHSSRMPSRRDWVQCPKSQTPGSRSRPAIESSDSGEPPTRDEHCGSGPEAGVKSPSPPPPPGRSVSLLARPSYDYSPAPSSTKSETRVPSETARTPFKSPLLKGISAPVISSNPATTEVQRKKPSVAFKKPIFTHPMPSPEAVIQTRCPAHAPSSSFTVMALGPPKVSPKRGVPKTSPRQTLGTPQRDIGLQTPRISPSTHEPLEMTSSKSVSPGRKGQLNDSASTPPKPSFLGVNESPSSQVSSSSSSSSPAKSHNSPHGCQSAHEKGLKTRLPVGLKVLMKSPQLLRKSSTVPGKHEKDSLNEASKSSVAVNKSKPEDSKNPASMEITAGERNVTLPDSQAQGSLADGLPLETALQEPLESSIPGSDGRDGVDNRSMRRSLSSSKPHLKPALGMNGAKARSHSFSTHSGDKPSTPPIEGSGKVRTQIITNTAERGNSLTRQNSSTESSPNKAPSAPMLESLPSVGRPSGHPSSGKGSLGSSGSFSSQHGSPSKLPLRIPPKSEGLLIPPGKEDQQAFTQGECPSANVAVLGEPGSDRRSCPPTPTDCPEALQSPGRTQHPSTFETSSTSKLETSGRHPDASATATDAVSSEAPLSPTIEEKVMLCIQENVEKGQVQTKPTSVEAKQKPGPSFASWFGFRKSRLPALSSRKMDISKTKVEKKDAKVLGFGNRQLKSERKKEKKKPELQCETENELIKDTKSADNPDGGLQSKNNRRTPQDIYNQLKIEPRNRHSPVACSTKDTFMTELLNRVDKKAAPQTESGSSNASCRNVLKGSSQGSCLIGSSISTQGNHKKNMKIKADMEVPKDSLVKEANENLQEDEDDAVADSVFQSHIIESNCQMRTLDSGIGTFPLPDSGNRSTGRYLCQPDSPEDAEPLLPLQSALSAVSSMRAQTLEREVPSSTDGQRPADSAIVHSTSDPIMTARGMRPLQSRLPKPASSGKVSSQKQNEAEPRPQTCSSFGYAEDPMASQPLPDWGSEVAATGTQDKAPRMCTYSASGGSNSDSDLDYGDNGFGAGRGQLVKALKSAAPEIETT

SEQ ID NO: 39498 - protein, 590 aa, Homo sapiens
MEGKRQLEKRDFGKRLSLDSSLVEYMDSNKYIEHLLTQLEEQHRSLWREKLAVARLQREVAQRTSEGAMHEKLIHELEEERHLRLQSEKRLQEVTLESERNRIQMRSLQQQFSRMEETVRNLLQSQGSPEQKKEETVNIMVYQEKLSEEERKHKEALEDLHMVVDEDSRSESSSTDEGKEKTKLLLERLKALEAENSALALENENQREQYERCLDEVANQVVQALLTQKDLREECVKLKTRVFDLEQQNRTLSILFQQRVRPTSDLLLQKLHSRLLDLSSGDLLSEVERNRSLTQSRTDAEVHEHQLNTKSALKCPGLGAVIPGHLCPRNSYSSSSELSLSSTCSEYSSGSSYTWHDGKNLRKRVKEANENLQEDEDDAVADSVFQSHIIESNCQMRTLDSGIGTFPLPDSGNRSTGRYLCQPDSPEDAEPLLPLQSALSAVSSMRAQTLEREVPSSTDGQRPADSAIVHSTSDPIMTARGMRPLQSRLPKPASSGKVSSQKQNEAEPRPQTCSSFGYAEDPMASQPLPDWGSEVAATGTQDKAPRMCTYSASGGSNSDSDLDYGDNGFGAGRGQLVKALKSAAPEIETT

SEQ ID NO: 39499 - protein, 178 aa, Homo sapiens
MDSNKYIEHLLTQLEEQHRSLWREKLAVARLQREVAQRTSEGAMHEKLIHELEEERHLRLQSEKRLQEVTLESERNRIQMRSLQQQFSRMEETVRNLLQSQGSPEQKKEETVNIMVYQEKLSEEERKHKEALEDLHMVVDEDSRSESSSTDEGKEKTKLLLERLKALEKHGWNWRPLS

SEQ ID NO: 39500 - protein, 118 aa, Homo sapiens
MEGKRQLEKRDFGKRLSLDSSLVEYMDSNKYIEHLLTQLEEQHRSLWREKLAVARLQREVAQRTSEGAMHEKLIHELEEERHLRLQSEKRLQEVTLESERNRIQMRSLQQQFSRRRKM

SEQ ID NO: 39501 - protein, 994 aa, Homo sapiens
MAASFFSDFGLMWYLEELKKEEFRKFKEHLKQMTLQLELKQIPWTEVKKASREELANLLIKHYEEQQAWNITLRIFQKMDRKDLCMKVMRERTGYTKTYQAHAKQKFSRLWSSKSVTEIHLYFEEEVKQEECDHLDRLFAPKEAGKQPRTVIIQGPQGIGKTTLLMKLMMAWSDNKIFRDRFLYTFYFCCRELRELPPTSLADLISREWPDPAAPITEIVSQPERLLFVIDSFEELQGGLNEPDSDLCGDLMEKRPVQVLLSSLLRKKMLPEASLLIAIKPVCPKELRDQVTISEIYQPRGFNESDRLVYFCCFFKDPKRAMEAFNLVRESEQLFSICQIPLLCWILCTSLKQEMQKGKDLALTCQSTTSVYSSFVFNLFTPEGAEGPTPQTQHQLKALCSLAAEGMWTDTFEFCEDDLRRNGVVDADIPALLGTKILLKYGERESSYVFLHVCIQEFCAALFYLLKSHLDHPHPAVRCVQELLVANFEKARRAHWIFLGCFLTGLLNKKEQEKLDAFFGFQLSQEIKQQIHQCLKSLGERGNPQGQVDSLAIFYCLFEMQDPAFVKQAVNLLQEANFHIIDNVDLVVSAYCLKYCSSLRKLCFSVQNVFKKEDEHSSTSDYSLICWHHICSVLTTSGHLRELQVQDSTLSESTFVTWCNQLRHPSCRLQKLGINNVSFSGQSVLLFEVLFYQPDLKYLSFTLTKLSRDDIRSLCDALNYPAGNVKELALVNCHLSPIDCEVLAGLLTNNKKLTYLNVSCNQLDTGVPLLCEALCSPDTVLVYLMLAFCHLSEQCCEYISEMLLRNKSVRYLDLSANVLKDEGLKTLCEALKHPDCCLDSLCLVKCFITAAGCEDLASALISNQNLKILQIGCNEIGDVGVQLLCRALTHTDCRLEILGLEECGLTSTCCKDLASVLTCSKTLQQLNLTLNTLDHTGVVVLCEALRHPECALQVLGLRKTDFDEETQALLTAEEERNPNLTITDDCDTITRVEI

SEQ ID NO: 39502 - protein, 503 aa, Homo sapiens
KILLKYGERESSYVFLHVCIQEFCAALFYLLKSHLDHPHPAVRCVQELLVANFEKARRAHWIFLGCFLTGLLNKKEQEKLDAFFGFQLSQEIKQQIHQCLKSLGERGNPQGQVDSLAIFYCLFEMQDPAFVKQAVNLLQEANFHIIDNVDLVVSAYCLKYCSSLRKLCFSVQNVFKKEDEHSSTSDYSLICWHHICSVLTTSGHLRELQVQDSTLSESTFVTWCNQLRHPSCRLQKLGINNVSFSGQSVLLFEVLFYQPDLKYLSFTLTKLSRDDIRSLCDALNYPAGNVKELALAFCHLSEQCCEYISEMLLRNKSVRYLDLSANVLKDEGLKTLCEALKHPDCCLDSLCLVKCFITAAGCEDLASALISNQNLKILQIGCNEIGDVGVQLLCRALTHTDCRLEILGLEECGLTSTCCKDLASVLTCSKTLQQLNLTLNTLDHTGVVVLCEALRHPECALQVLGLRKTDFDEETQALLTAEEERNPNLTITDDCDTITRVEI

SEQ ID NO: 39503 - protein, 919 aa, Homo sapiens
MQECLTLWVFSPLALTDSGYTKTYQAHAKQKFSRLWSSKSVTEIHLYFEEEVKQEECDHLDRLFAPKEAGKQPRTVIIQGPQGIGKTTLLMKLMMAWSDNKIFRDRFLYTFYFCCRELRELPPTSLADLISREWPDPAAPITEIVSQPERLLFVIDSFEELQGGLNEPDSDLCGDLMEKRPVQVLLSSLLRKKMLPEASLLIAIKPVCPKELRDQVTISEIYQPRGFNESDRLVYFCCFFKDPKRAMEAFNLVRESEQLFSICQIPLLCWILCTSLKQEMQKGKDLALTCQSTTSVYSSFVFNLFTPEGAEGPTPQTQHQLKALCSLAAEGMWTDTFEFCEDDLRRNGVVDADIPALLGTKILLKYGERESSYVFLHVCIQEFCAALFYLLKSHLDHPHPAVRCVQELLVANFEKARRAHWIFLGCFLTGLLNKKEQEKLDAFFGFQLSQEIKQQIHQCLKSLGERGNPQGQVDSLAIFYCLFEMQDPAFVKQAVNLLQEANFHIIDNVDLVVSAYCLKYCSSLRKLCFSVQNVFKKEDEHSSTSDYSLICWHHICSVLTTSGHLRELQVQDSTLSESTFVTWCNQLRHPSCRLQKLGINNVSFSGQSVLLFEVLFYQPDLKYLSFTLTKLSRDDIRSLCDALNYPAGNVKELALVNCHLSPIDCEVLAGLLTNNKKLTYLNVSCNQLDTGVPLLCEALCSPDTVLVYLMLAFCHLSEQCCEYISEMLLRNKSVRYLDLSANVLKDEGLKTLCEALKHPDCCLDSLCLVKCFITAAGCEDLASALISNQNLKILQIGCNEIGDVGVQLLCRALTHTDCRLEILGLEECGLTSTCCKDLASVLTCSKTLQQLNLTLNTLDHTGVVVLCEALRHPECALQVLGLRKTDFDEETQALLTAEEERNPNLTITDDCDTITRVEI

SEQ ID NO: 39504 - protein, 740 aa, Homo sapiens
MQWTKVLGLGLGAAALLGLGIILGHFAIPKKANSLAPQDLDLEILETVMGQLDAHRIRENLRELSREPHLASSPRDEDLVQLLLQRWKDPESGLDSAEASTYEVLLSFPSQEQPNVVDIVGPTGGIIHSCHRTEENVTGEQGGPDVVQPYAAYAPSGTPQGLLVYANRGAEEDFKELQTQGIKLEGTIALTRYGGVGRGAKAVNAAKHGVAGVLVYTDPADINDGLSSPDETFPNSWYLPPSGVERGSYYEYFGDPLTPYLPAVPSSFRVDLANVSGFPPIPTQPIGFQDARDLLCNLNGTLAPATWQGALGCHYRLGPGFRPDGDFPADSQVNVSVYNRLELRNSSNVLGIIRGAVEPDRYVLYGNHRDSWVHGAVDPSSGTAVLLELSRVLGTLLKKGTWRPRRSIVFASWGAEEFGLIGSTEFTEEFFNKLQERTVAYINVDISVFANATLRVQGTPPVQSVVFSATKEIRSPGPGDLSIYDNWIRYFNRSSPVYGLVPSLGSLGAGSDYAPFVHFLGISSMDIAYTYDRSKTSARIYPTYHTAFDTFDYVDKFLDPGFSSHQAVARTAGSVILRLSDSFFLPLKVSDYSETLRSFLQAAQQDLGALLEQHSISLGPLVTAVEKFEAEAAALGQRISTLQKGSPDPLQVRMLNDQLMLLERTFLNPRAFPEERYYSHVLWAPRTGSVVTFPGLSNACSRARDTASGSEAWAEVQRQLSIVVTALEGAAATLRPVADL

SEQ ID NO: 39505 - protein, 699 aa, Homo sapiens
MQWTKVLGLGLGAAALLGLGIILGHFAIPKKANSLAPQDLDLEILETVMGQLDAHRIRENLRELSREPHLASSPRDEDLVQLLLQRWKDPESGLDSAEASTYEVLLSFPSQEQPNVVDIVGPTGGIIHSCHRTEENVTGEQGGPDVVQPYAAYAPSGTPQAVNAAKHGVAGVLVYTDPADINDGLSSPDETFPNSWYLPPSGVERGSYYEYFGDPLTPYLPAVPSSFRVDLANVSGFPPIPTQPIGFQDARDLLCNLNGTLAPATWQGALGCHYRLGPGFRPDGDFPADSQVNVSVYNRLELRNSSNVLGIIRGAVEPDRYVLYGNHRDSWVHGAVDPSSGTAVLLELSRVLGTLLKKGTWRPRRSIVFASWGAEEFGLIGSTEFTEEFFNKLQERTVAYINVDISVFANATLRVQGTPPVQSVVFSATKEIRSPGPGDLSIYDNWIRYFNRSSPVYGLVPSLGSLGAGSDYAPFVHFLGISSMDIAYTYDRSKTSARIYPTYHTAFDTFDYVDKFLDPGFSSHQAVARTAGSVILRLSDSFFLPLKVSDYSETLRSFLQAAQQDLGALLEQHSISLGPLVTAVEKFEAEAAALGQRISTLQKGSPDPLQVRMLNDQLMLLERTFLNPRAFPEERYYSHVLWAPRTGSVVTFPGLSNACSRARDTASGSEAWAEVQRQLSIVVTALEGAAATLRPVADL

SEQ ID NO: 39506 - protein, 705 aa, Homo sapiens
MQWTKVLGLGLGAAALLGLGIILGHFAIPKKANSLAPQDLDLEILETVMGQLDAHRIRENLRELSREPHLASSPRDEDLVQLLLQRWKDPESGLDSAEASTYEVLLSFPSQEQPNVVDIVGPTGGIIHSCHRTEENVTGEQGGPDVVQPYAAYAPSGTPQGLLVYANRGAEEDFKELQTQGIKLEGTIALTRYGGVGRGAKAVNAAKHGVAGVLVYTDPADINDGLSSPDETFPNSWYLPPSGVERGSYYEYFGDPLTPYLPAVPSSFRVDLANVSGFPPIPTQPIGFQDARDLLSQVNVSVYNRLELRNSSNVLGIIRGAVEPDRYVLYGNHRDSWVHGAVDPSSGTAVLLELSRVLGTLLKKGTWRPRRSIVFASWGAEEFGLIGSTEFTEEFFNKLQERTVAYINVDISVFANATLRVQGTPPVQSVVFSATKEIRSPGPGDLSIYDNWIRYFNRSSPVYGLVPSLGSLGAGSDYAPFVHFLGISSMDIAYTYDRSKTSARIYPTYHTAFDTFDYVDKFLDPGFSSHQAVARTAGSVILRLSDSFFLPLKVSDYSETLRSFLQAAQQDLGALLEQHSISLGPLVTAVEKFEAEAAALGQRISTLQKGSPDPLQVRMLNDQLMLLERTFLNPRAFPEERYYSHVLWAPRTGSVVTFPGLSNACSRARDTASGSEAWAEVQRQLSIVVTALEGAAATLRPVADL

SEQ ID NO: 39507 - protein, 791 aa, Homo sapiens
MQWTKVLGLGLGAAALLGLGIILGHFAIPKKANSLAPQDLDLEILETVMGQLDAHRIRENLRELSREPHLASSPRDEDLVQLLLQRWKDPESGLDSAEASTYEVLLSFPSQEQPNVVDIVGPTGGIIHSCHRTEENVTGEQGGPDVVQPYAAYAPSGTPQGLLVYANRGAEEDFKELQTQGIKLEGTIALTRYGGVGRGAKAVNAAKHGVAGVLVYTDPADINDGLSSPDETFPNSWYLPPSGVERGSYYEYFGDPLTPYLPAVPSSFRVDLANVSGFPPIPTQPIGFQDARDLLCNLNGTLAPATWQGALGCHYRLGPGFRPDGDFPADSQVNVSVYNRLELRNSSNVLGIIRGAVEPGEPSSCCLHPRPLLCSGCRCPHPALPLPPPSPAPPAHLSLSSGSLPLFLWPDRYVLYGNHRDSWVHGAVDPSSGTAVLLELSRVLGTLLKKGTWRPRRSIVFASWGAEEFGLIGSTEFTEEFFNKLQERTVAYINVDISVFANATLRVQGTPPVQSVVFSATKEIRSPGPGDLSIYDNWIRYFNRSSPVYGLVPSLGSLGAGSDYAPFVHFLGISSMDIAYTYDRSKTSARIYPTYHTAFDTFDYVDKFLDPGFSSHQAVARTAGSVILRLSDSFFLPLKVSDYSETLRSFLQAAQQDLGALLEQHSISLGPLVTAVEKFEAEAAALGQRISTLQKGSPDPLQVRMLNDQLMLLERTFLNPRAFPEERYYSHVLWAPRTGSVVTFPGLSNACSRARDTASGSEAWAEVQRQLSIVVTALEGAAATLRPVADL

SEQ ID NO: 39508 - protein, 522 aa, Homo sapiens
MQWTKVLGLGLGAAALLGLGIILGHFAIPKKANSLAPQDLDLEILETVMGQLDAHRIRENLRELSREPHLASSPRDEDLVQLLLQRWKDPESGLDSAEASTYEVLLSFPSQEQPNVVDIVGPTGGIIHSCHRTEENVTGEQGGPDVVQPYAAYAPSGTPQGLLVYANRGAEEDFKELQTQGIKLEGTIALTRYGGVGRGAKAVNAAKHGVAGVLVYTDPADINDGLSSPDETFPNSWYLPPSGVERGSYYEYFGDPLTPYLPAVPSSFRVDLANVSGFPPIPTQPIGFQDARDLLCNLNGTLAPATWQGALGCHYRLGPGFRPDGDFPADSQVNVSVYNRLELRNSSNVLGIIRGAVEPDRYVLYGNHRDSWVHGAVDPSSGTAVLLELSRVLGTLLKKGTWRPRRSIVFASWGAEEFGLIGSTEFTEEFFNKLQERTVAYINVDISVFANATLRVQGTPPVQSVVFSATKEIRSPGPGDLSIYDNWIRYFNRSSPVYGLVPRLQQPSGCGPDSGECDSPAQ

SEQ ID NO: 39509 - protein, 543 aa, Homo sapiens
MQWTKVLGLGLGAAALLGLGIILGHFAIPKKANSLAPQDLDLEILETVMGQLDAHRIRENLRELSREPHLASSPRDEDLVQLLLQRWKDPESGLDSAEASTYEVLLSFPSQEQPNVVDIVGPTGGIIHSCHRTEENVTGEQGGPDVVQPYAAYAPSGTPQGLLVYANRGAEEDFKELQTQGIKLEGTIALTRYGGVGRGAKAVNAAKHGVAGVLVYTDPADINDGLSSPDETFPNSWYLPPSGVERGSYYEYFGDPLTPYLPAVPSSFRVDLANVSGFPPIPTQPIGFQDARDLLCNLNGTLAPATWQGALGCHYRLGPGFRPDGDFPADSQVNVSVYNRLELRNSSNVLGIIRGAVEPDRYVLYGNHRDSWVHGAVDPSSGTAVLLELSRVLGTLLKKGTWRPRRSIVFASWGAEEFGLIGSTEFTEEFFNKLQERTVAYINVDISVFANATLRVQGTPPVQSVVFSATKEIRSPGPGDLSIYDNWIRYFNRSSPVYGLVPRARLQPGSPPTTQPLTPLTMWTSFWTRASAAIRLWPGQRGV

SEQ ID NO: 39510 - protein, 579 aa, Homo sapiens
MQWTKVLGLGLGAAALLGLGIILGHFAIPKKANSLAPQDLDLEILETVMGQLDAHRIRENLRELSREPHLASSPRDEDLVQLLLQRWKDPESGLDSAEASTYEVLLSFPSQEQPNVVDIVGPTGGIIHSCHRTEENVTGEQGGPDVVQPYAAYAPSGTPQGLLVYANRGAEEDFKELQTQGIKLEGTIALTRYGGVGRGAKAVNAAKHGVAGVLVYTDPADINDGLSSPDETFPNSWYLPPSGVERGSYYEYFGDPLTPYLPAVPSSFRVDLANVSGFPPIPTQPIGFQDARDLLCNLNGTLAPATWQGALGCHYRLGPGFRPDGDFPADSQVNVSVYNRLELRNSSNVLGIIRGAVEPDRYVLYGNHRDSWVHGAVDPSSGTAVLLELSRVLGTLLKKGTWRPRRSIVFASWGAEEFGLIGSTEFTEEFFNKLQERTVAYINVDISVFANATLRVQGTPPVQSVVFSATKEIRSPGPGDLSIYDNWIRYFNRSSPVYGLVPSLGSLGAGSDYAPFVHFLGISSMDIAYTYDRSKTSARIYPTYHTAFDTFDYVDKFLDPGFEEGDKGHPETRTGEAED

SEQ ID NO: 39511 - protein, 635 aa, Homo sapiens
MQWTKVLGLGLGAAALLGLGIILGHFAIPKKANSLAPQDLDLEILETVMGQLDAHRIRENLRELSREPHLASSPRDEDLVQLLLQRWKDPESGLDSAEASTYEVLLSFPSQEQPNVVDIVGPTGGIIHSCHRTEENVTGEQGGPDVVQPYAAYAPSGTPQGLLVYANRGAEEDFKELQTQGIKLEGTIALTRYGGVGRGAKAVNAAKHGVAGVLVYTDPADINDGLSSPDETFPNSWYLPPSGVERGSYYEYFGDPLTPYLPAVPSSFRVDLANVSGFPPIPTQPIGFQDARDLLCNLNGTLAPATWQGALGCHYRLGPGFRPDGDFPADSQVNVSVYNRLELRNSSNVLGIIRGAVEPDRYVLYGNHRDSWVHGAVDPSSGTAVLLELSRVLGTLLKKGTWRPRRSIVFASWGAEEFGLIGSTEFTEEFFNKLQERTVAYINVDISVFANATLRVQGTPPVQSVVFSATKEIRSPGPGDLSIYDNWIRYFNRSSPVYGLVPSLGSLGAGSDYAPFVHFLGISSMDIAYTYDRSKTSARIYPTYHTAFDTFDYVDKFLDPGFSSHQAVARTAGSVILRLSDSFFLPLKVSDYSETLRSFLQAAQQDLGALLEQHSISLGMHSPDPEVWGALHPHD

SEQ ID NO: 39512 - protein, 500 aa, Homo sapiens
MQTKGGQTWARRALLLGILWATAHLPLSGTSLPQRLPRATGNSTQCVISPSSEFPEGFFTRQERRDGGIIIYFLIIVYMFMAISIVCDEYFLPSLEIISESLGLSQDVAGTTFMAAGSSAPELVTAFLGVFITKGDIGISTILGSAIYNLLGICAACGLLSNTVSTLSCWPLFRDCAAYTISAAAVLGIIYDNQVYWYEGALLLLIYGLYVLVLCFDIKINQYIIKKCSPCCACLAKAMERSEQQPLMGWEDEGQPFIRRQSRTDSGIFYEDSGYSQLSISLHGLSQVSEDPPSVFNMPEADLKRIFWVLSLPIITLLFLTTPDCRKKFWKNYFVITFFMSAIWISAFTYILVWMVTITGETLEIPDTVMGLTLLAAGTSIPDTIASVLVARKGKGDMAMSNIVGSNVFDMLCLGIPWFIKTAFINGSAPAEVNSRGLTYITISLNISIIFLFLAVHFNGWKLDRKLGIVCLLSYLGLATLSVLYELGIIGNNKIRGCGG

SEQ ID NO: 39513 - protein, 440 aa, Homo sapiens
MQTKGGQTWARRALLLGILWATAHLPLSGTSLPQRLPRATALGLSQDVAGTTFMAAGSSAPELVTAFLGVFITKGDIGISTILGSAIYNLLGICAACGLLSNTVSTLSCWPLFRDCAAYTISAAAVLGIIYDNQVYWYEGALLLLIYGLYVLVLCFDIKINQYIIKKCSPCCACLAKAMERSEQQPLMGWEDEGQPFIRRQSRTDSGIFYEDSGYSQLSISLHGLSQVSEDPPSVFNMPEADLKRIFWVLSLPIITLLFLTTPDCRKKFWKNYFVITFFMSAIWISAFTYILVWMVTITGETLEIPDTVMGLTLLAAGTSIPDTIASVLVARKGKGDMAMSNIVGSNVFDMLCLGIPWFIKTAFINGSAPAEVNSRGLTYITISLNISIIFLFLAVHFNGWKLDRKLGIVCLLSYLGLATLSVLYELGIIGNNKIRGCGG

SEQ ID NO: 39514 - protein, 584 aa, Homo sapiens
MAGRRLNLRWALSVLCVLLMAETVSGTRGSSTGAHISPQFPASGVNQTPVVDCRKVCGLNVSDRCDFIRTNPDCHSDGGYLDYLEGIFCHFPPSLLPLAVTLYVSWLLYLFLILGVTAAKFFCPNLSAISTTLKLSHNVAGVTFLAFGNGAPDIFSALVAFSDPHTAGLALGALFGAGVLVTTVVAGGITILHPFMAASRPFFRDIVFYMVAVFLTFLMLFRGRVTLAWALGYLGLYVFYVVTVILCTWIYQRQRRGSLFCPMPVTPEILSDSEEDRVSSNTNSYDYGDEYRPLFFYQETTAQILVRALNPLDYMKWRRKSAYWKALKVFKLPVEFLLLLTVPVVDPDKDDQNWKRPLNCLHLVISPLVVVLTLQSGTYGVYEIGGLVPVWVVVVIAGTALASVTFFATSDSQPPRLHWLFAFLGFLTSALWINAAATEVVNILRSLGVVFRLSNTVLGLTLLAWGNSIGDAFSDFTLARQGYPRMAFSACFGGIIFNILVGVGLGCLLQISRSHTEVKLEPDGLLVWVLAGALGLSLVFSLVSVPLQCFQLSRVYGFCLLLFYLNFLVVALLTEFGVIHLKSM

SEQ ID NO: 39515 - protein, 528 aa, Homo sapiens
MAGRRLNLRWALSVLCVLLMAETVSGTRGSSTGAHISPQFPASGVNQTPVVDCRKVCGLNVSDRCDFIRTNPDCHSDGGYLDYLEGIFCHFPPSLLPLAVTLYVSWLLYLFLILGVTAAKFFCPNLSAISTTLKLSHNVAGVTFLAFGNGAPDIFSALVAFSDPHTAGLALGALFGYLGLYVFYVVTVILCTWIYQRQRRGSLFCPMPVTPEILSDSEEDRVSSNTNSYDYGDEYRPLFFYQETTAQILVRALNPLDYMKWRRKSAYWKALKVFKLPVEFLLLLTVPVVDPDKDDQNWKRPLNCLHLVISPLVVVLTLQSGTYGVYEIGGLVPVWVVVVIAGTALASVTFFATSDSQPPRLHWLFAFLGFLTSALWINAAATEVVNILRSLGVVFRLSNTVLGLTLLAWGNSIGDAFSDFTLARQGYPRMAFSACFGGIIFNILVGVGLGCLLQISRSHTEVKLEPDGLLVWVLAGALGLSLVFSLVSVPLQCFQLSRVYGFCLLLFYLNFLVVALLTEFGVIHLKSM

SEQ ID NO: 39516 - protein, 1253 aa, Homo sapiens
MEEHSYIQKELDLQNGSLEEDSVVHSVENDSQNMMESLSPKKYSSSLRFKANGDYSGSYLTLSQPVPAKRSPSPLGTSVRSSPSLAKIQGSKQFSYDGTDKNIPMKPPTPLLNTTSSLSGYPLGRADFDHYTGRDSERALRLSEKPPYSKYSSRHKSHDNVYSLGGLEGRKASGSLLAMWNGSSLSDAGPPPISRSGAASMPSSPKQARKMSIQDSLALQPKLTRHKELASENINLRTRKYSSSSLSHMGAYSRSLPRLYRATENQLTPLSLPPRNSLGNSKRTKLGEKDLPHSVIDNDNYLNFSSLSSGALPYKTSASEGNPYVSSTLSVPASPRVARKMLLASTSSCASDDFDQASYVGTNPSHSLLAGESDRVFATRRNFSCGSVEFDEADLESLRQASGTPQPALRERKSSISSISGRDDLMDYHRRQREERLREQEMERLERQRLETILSLCAEYTKPDSRLSTGTTVEDVQKINKELEKLQLSDEESVFEEALMSPDTRYRCHRKDSLPDADLASCGSLSQSSASFFTPRSTRNDELLSDLTRTPPPPSSTFPKASSESSYLSILPKTPEGISEEQRSQELAAMEETRIVILNNLEELKQKIKDINDQMDESFRELDMECALLDGEQKSETTELMKEKEILDHLNRKIAELEKNIVGEKTKEKVKLDAEREKLERLQELYSEQKTQLDNCPESMREQLQQQLKRDADLLDVESKHFEDLEFQQLEHESRLDEEKENLTQQLLREVAEYQRNIVSRKEKISALKKQANHIVQQAQREQDHFVKEKNNLIMMLQREKENLCNLEKKYSSLSGGKGFPVNPNTLKEGYISVNEINEPCGNSTNLSPSTQFPADADAVATEPATAVLASQPQSKEHFRSLEERKKQHKEGLYLSDTLPRKKTTSSISPHFSSATMGRSITPKAHLPLGQSNSCGSVLPPSLAAMAKDSESRRMLRGYNHQQMSEGHRQKSEFYNRTASESNVYLNSFHYPDHSYKDQAFDTLSLDSSDSMETSISACSPDNISSASTSNIARIEEMERLLKQAHAEKTRLLESREREMEAKKRALEEEKRRREILEKRLQEETSQRQKLIEKEVKIRERQRAQARPLTRYLPVRKEDFDLRSHVETAGHNIDTCYHVSITEKTCRGFLIKMGGKIKTWKKRWFVFDRNKRTFSYYADKHETKLKGVIYFQAIEEVYYDHLKNANKSPNPLLTFSVKTHDRIYYMVAPSPEAMRIWMDVIVTGAEGYTHFLL

SEQ ID NO: 39517 - protein, 1210 aa, Homo sapiens
MEEHSYIQKELDLQNGSLEEDSVVHSVENDSQNMMESLSPKKYSSSLRFKANGDYSGSYLTLSQPVPAKRSPSPLGTSVRSSPSLAKIQGSKQFSYDGTDKNIPMKPPTPLLNTTSSLSGYPLGRADFDHYTGRDSERALRLSEKPPYSKYSSRHKSHDNVYSLGGLEGRKASGSLLAMWNGSSLSDAGPPPISRSGAASMPSSPKQARKMSIQDSLALQPKLTRHKELASENINLRTRKYSSSSLSHMGAYSRSLPRLYRATENQLTPLSLPPRNSLGNSKRTKLGEKDLPHSVIDNDNYLNFSSLSSGALPYKTSASEGNPYVSSTLSVPASPRVARKMLLASTSSCASDDFDQASYVGTNPSHSLLAGESDRVFATRRNFSCGSVEFDEADLESLRQASGTPQPALRERKSSISSISGRDDLMDYHRRQREERLREQEMERLERQRLETILSLCAEYTKPDSRLSTGTTVEDVQKINKELEKLQLSDEESVFEEALMSPDTRYRCHRKDSLPDADLASCGSLSQSSASFFTPRSTRNDELLSDLTRTPPPPSSTFPKASSESSYLSILPKTPEGISEEQRSQELAAMEETRIVILNNLEELKQKIKDINDQMDESFRELDMECALLDGEQKSETTELMKEKEILDHLNRKIAELEKNIVGEKTKDADLLDVESKHFEDLEFQQLEHESRLDEEKENLTQQLLREVAEYQRNIVSRKEKISALKKQANHIVQQAQREQDHFVKEKNNLIMMLQREKENLCNLEKKYSSLSGGKGFPVNPNTLKEGYISVNEINEPCGNSTNLSPSTQFPADADAVATEPATAVLASQPQSKEHFRSLEERKKQHKEGLYLSDTLPRKKTTSSISPHFSSATMGRSITPKAHLPLGQSNSCGSVLPPSLAAMAKDSESRRMLRGYNHQQMSEGHRQKSEFYNRTASESNVYLNSFHYPDHSYKDQAFDTLSLDSSDSMETSISACSPDNISSASTSNIARIEEMERLLKQAHAEKTRLLESREREMEAKKRALEEEKRRREILEKRLQEETSQRQKLIEKEVKIRERQRAQARPLTRYLPVRKEDFDLRSHVETAGHNIDTCYHVSITEKTCRGFLIKMGGKIKTWKKRWFVFDRNKRTFSYYADKHETKLKGVIYFQAIEEVYYDHLKNANKSPNPLLTFSVKTHDRIYYMVAPSPEAMRIWMDVIVTGAEGYTHFLL

SEQ ID NO: 39518 - protein, 1237 aa, Homo sapiens
MEEEDTKREVPKEDGVGDVQHFDSSKIMEEHSYIQKELDLQNGSLEEDSVVHSVENDSQNMMESLSPKKYSSSLRFKANGDYSGSYLTLSQPVPAKRSPSPLGTSVRSSPSLAKIQGSKQFSYDGTDKNIPMKPPTPLLNTTSSLSGYPLGRADFDHYTGRDSERALRLSEKPPYSKYSSRHKSHDNVYSLGGLEGRKASGSLLAMWNGSSLSDAGPPPISRSGAASMPSSPKQARKMSIQDSLALQPKLTRHKELASENINLRTRKYSSSSLSHMGAYSRSLPRLYRATENQLTPLSLPPRNSLGNSKRTKLGEKDLPHSVIDNDNYLNFSSLSSGALPYKTSASEGNPYVSSTLSVPASPRVARKMLLASTSSCASDDFDQASYVGTNPSHSLLAGESDRVFATRRNFSCGSVEFDEADLESLRQASGTPQPALRERKSSISSISGRDDLMDYHRRQREERLREQEMERLERQRLETILSLCAEYTKPDSRLSTGTTVEDVQKINKELEKLQLSDEESVFEEALMSPDTRYRCHRKDSLPDADLASCGSLSQSSASFFTPRSTRNDELLSDLTRTPPPPSSTFPKASSESSYLSILPKTPEGISEEQRSQELAAMEETRIVILNNLEELKQKIKDINDQMDESFRELDMECALLDGEQKSETTELMKEKEILDHLNRKIAELEKNIVGEKTKDADLLDVESKHFEDLEFQQLEHESRLDEEKENLTQQLLREVAEYQRNIVSRKEKISALKKQANHIVQQAQREQDHFVKEKNNLIMMLQREKENLCNLEKKYSSLSGGKGFPVNPNTLKEGYISVNEINEPCGNSTNLSPSTQFPADADAVATEPATAVLASQPQSKEHFRSLEERKKQHKEGLYLSDTLPRKKTTSSISPHFSSATMGRSITPKAHLPLGQSNSCGSVLPPSLAAMAKDSESRRMLRGYNHQQMSEGHRQKSEFYNRTASESNVYLNSFHYPDHSYKDQAFDTLSLDSSDSMETSISACSPDNISSASTSNIARIEEMERLLKQAHAEKTRLLESREREMEAKKRALEEEKRRREILEKRLQEETSQRQKLIEKEVKIRERQRAQARPLTRYLPVRKEDFDLRSHVETAGHNIDTCYHVSITEKTCRGFLIKMGGKIKTWKKRWFVFDRNKRTFSYYADKHETKLKGVIYFQAIEEVYYDHLKNANKSPNPLLTFSVKTHDRIYYMVAPSPEAMRIWMDVIVTGAEGYTHFLL

SEQ ID NO: 39519 - protein, 74 aa, Homo sapiens
MSANGAVWGRVRSRLRAFPERLAACGAEAAAYGRCVQASTAPGGRLSKDFCAREFEALRSCFAAAAKKTLEGGC

SEQ ID NO: 39520 - protein, 386 aa, Homo sapiens
MCERAARLCRAGAHRLLREPPQQGRALGGLLRWVGARMGEPRESLAPAAPADPGPASPRGGTAVILDIFRRADKNDDGKLSLEEFQLFFADGVLNEKELEDLFHTIDSDNTNHVDTKELCDYFVDHMGDYEDVLASLETLNHSVLKAMGYTKKVYEGGSNVDQFVTRFLLKETANQIQSLLSSVESAVEAIEEQTSQLRQNHIKPSHSAAQTWCGSPTPASAPNHKLMAMEQGKTLPSATEDAKEEGLEAQISRLAELIGRLESKALWFDLQQRLSDEDGTNMHLQLVRQEMAVCPEQLSEFLDSLRQYLRGTTGVRNCFHITAVRLSDGFTFVIYEFWETEEAWKRHLQSPLCKAFRHVKVDTLSQPEALSRILVPAAWCTVGRD

SEQ ID NO: 39521 - protein, 303 aa, Homo sapiens
MMMGSCPWRNSSSSLQMASLMRKNWRISFTRLTLTTPNYFVDHMGDYEDVLASLETLNHSVLKAMGYTKKVYEGGSNVDQFVTRFLLKETANQIQSLLSSVESAVEAIEEQTSQLRQNHIKPSHSAAQTWCGSPTPASAPNHKLMAMEQGKTLPSATEDAKEEGLEAQISRLAELIGRLESKALWFDLQQRLSDEDGTNMHLQLVRQEMAVCPEQLSEFLDSLRQYLRGTTGVRNCFHITAVRLSDGFTFVIYEFWETEEAWKRHLQSPLCKAFRHVKVDTLSQPEALSRILVPAAWCTVGRD

SEQ ID NO: 39522 - protein, 333 aa, Homo sapiens
MAVRGANTLTSFSIQAILNKKEERGGLAAPEGRPAPGGTAASVAAAPAVCCWRLFGERDAGALGGAEDSLLASPAGTRTAAGRTAESPEGWDSDSALSEENESRRRCADARGASGAGLAGGSLSLGQPVCELAASKDLEEEAAGRSDSEMSASVSGDRSPRTEDDGVGPRGAHVSALCSGAGGGGGSGPAGVAEEEEEPAAPKPRKKRSRAAFSHAQVFELERRFNHQRYLSGPERADLAASLKLTETQVKIWFQNRRYKTKRRQMAADLLASAPAAKKVAVKVLVRDDQRQYLPGEVLRPPSLLPLQPSYYYPYYCLPGWALSTCAAAAGTQ

SEQ ID NO: 39523 - protein, 239 aa, Homo sapiens
MATSGRLSFTVRSLLDLPEQDAQHLPRREPEPRAPQPDPCAAWLDSERGHYPSSDESSLETSPPDSSQRPSARPASPGSDAEKRKKRRVLFSKAQTLELERRFRQQRYLSAPEREQLASLLRLTPTQVKIWFQNHRYKLKRARAPGAAESPDLAASAELHAAPGLLRRVVVPVLVRDGQPCGGGGGGEVGTAAAQEKCGAPPAAACPLPGYPAFGPGSALGLFPAYQHLASPALVSWNW

SEQ ID NO: 39524 - protein, 638 aa, Homo sapiens
MESERDMYRQFQDWCLRTYGDSGKTKTVTRKKYERIVQLLNGSESSSTDNAKFKFWVKSKGFQLGQPDEVRGGGGGAKQVLYVPVKTTDGVGVDEKLSLRRVAVVEDFFDIIYSMHVETGPNGEQIRKHAGQKRTYKAISESYAFLPREAVTRFLMSCSECQKRMHLNPDGTDHKDNGKPPTLVTSMIDYNMPITMAYMKHMKLQLLNSQQDEDESSIESDEFDMSDSTRMSAVNSDLSSNLEERMQSPQNLHGQQDDDSAAESFNGNETLGHSSIASGGTHSREMGDSNSDGKTGLEQDEQPLNLSDSPLSAQLTSEYRIDDHNSNGKNKYKNLLISDLKMEREARENGSKSPAHSYSSYDSGKNESVDRGAEDLSLNRGDEDEDDHEDHDDSEKVNETDGVEAERLKAFNMFVRLFVDENLDRMVPISKQPKEKIQAIIDSCRRQFPEYQERARKRIRTYLKSCRRMKRSGFEMSRPIPSHLTSAVAESILASACESESRNAAKRMRLERQQDESAPADKQCKPEATQATYSTSAVPGSQDVLYINGNGTYSYHSYRGLGGGLLNLNDASSSGPTDLSMKRQLATSSGSSSSSNSRPQLSPTEINAVRQLVAGYRESAAFLLRSADELENLILQQN

SEQ ID NO: 39525 - protein, 536 aa, Homo sapiens
MESERDMYRQFQDWCLRTYGDSGKTKTVTRKKYERIVQLLNGSESSSTDNAKFKFWVKSKGFQLGQPDEVRGGGGGAKQVLYVPVKTTDGVGVDEKLSLRRVAVVEDFFDIIYSMHVETGPNGEQIRKHAGQKRTYKAISESYAFLPREAVTRFLMSCSECQKRMHLNPDGTDHKDNGKPPTLVTSMIDYNMPITMAYMKHMKLQLLNSQQDEDESSIESDEFDMSDSTRMSAVNSDLSSNLEERMQSPQNLHGQQDDDSAAESFNGNETLGHSSIASGGTHSREMGDSNSDGKTGLEQDEQPLNLSDSPLSAQLTSEYRIDDHNSNGKNKYKNLLISDLKMEREARENGSKSPAHSYSSYDSGKNESVDRGAEDLSLNRGDEDEDDHEDHDDSEKVNETDGVEAERLKAFNDESAPADKQCKPEATQATYSTSAVPGSQDVLYINGNGTYSYHSYRGLGGGLLNLNDASSSGPTDLSMKRQLATSSGSSSSSNSRPQLSPTEINAVRQLVAGYRESAAFLLRSADELENLILQQN

SEQ ID NO: 39526 - protein, 564 aa, Homo sapiens
MADLMQETFLHHATDGVGVDEKLSLRRVAVVEDFFDIIYSMHVETGPNGEQIRKHAGQKRTYKAISESYAFLPREAVTRFLMSCSECQKRMHLNPDGTDHKDNGKPPTLVTSMIDYNMPITMAYMKHMKLQLLNSQQDEDESSIESDEFDMSDSTRMSAVNSDLSSNLEERMQSPQNLHGQQDDDSAAESFNGNETLGHSSIASGGTHSREMGDSNSDGKTGLEQDEQPLNLSDSPLSAQLTSEYRIDDHNSNGKNKYKNLLISDLKMEREARENGSKSPAHSYSSYDSGKNESVDRGAEDLSLNRGDEDEDDHEDHDDSEKVNETDGVEAERLKAFNMFVRLFVDENLDRMVPISKQPKEKIQAIIDSCRRQFPEYQERARKRIRTYLKSCRRMKRSGFEMSRPIPSHLTSAVAESILASACESESRNAAKRMRLERQQDESAPADKQCKPEATQATYSTSAVPGSQDVLYINGNGTYSYHSYRGLGGGLLNLNDASSSGPTDLSMKRQLATSSGSSSSSNSRPQLSPTEINAVRQLVAGYRESAAFLLRSADELENLILQQN

SEQ ID NO: 39527 - protein, 353 aa, Homo sapiens
MGDSNSDGKTGLEQDEQPLNLSDSPLSAQLTSEYRIDDHNSNGKNKYKNLLISDLKMEREARENGSKSPAHSYSSYDSGKNESVDRGAEDLSLNRGDEDEDDHEDHDDSEKVNETDGVEAERLKAFNMFVRLFVDENLDRMVPISKQPKEKIQAIIDSCRRQFPEYQERARKRIRTYLKSCRRMKRSGFEMSRPIPSHLTSAVAESILASACESESRNAAKRMRLERQQDESAPADKQCKPEATQATYSTSAVPGSQDVLYINGNGTYSYHSYRGLGGGLLNLNDASSSGPTDLSMKRQLATSSGSSSSSNSRPQLSPTEINAVRQLVAGYRESAAFLLRSADELENLILQQN

SEQ ID NO: 39528 - protein, 1225 aa, Homo sapiens
MPFYRRTVVPQRLCPRNPPQQLAELRDVSHLAALSLLRQLADLCGHSLALLEDLEGHLLALGRRTDSLYRRTVRLRRRLPCRLLGPEEDEEELAAANSGRENATATAHSRSSWRQPVNVFLSSGRPPSVEELLREAQLNLQSLLQEEYEEQYSEARLVGQTFRSSDEATKPTPNPRPQSARRLEFILMPTKRQLSEDETTTQGVRAPEASLSLSTTADKQTAWNSLFPLPILEEKRWPQLCSTQSDIVPINISGQQFDKHASLRHSLFNTETAVNPKSTLRRRRTIIGFSNFSQRDQGHSNSPAGSVAHSTTSDIRPSHSVPEGVHGRVAVGQDARFPSLTSPVLRTPSSEPDEPHQARSGPNPPGMESMGMVYSVPSSCNGPTESTFSTSWKGDAFTYMTPSATSQSNQVNENGKNPSCGNSWVSLNKVPPLVPKEAATLLVARDNPAGCSGSAGYPERLIQQRHMPERPSKIGLLTSGTSRLETGPGGASRFRERSLSVPTDSGTTDVDYDEEQKANEACALPFASTSSEGSNSADNIASLSAQQEAQHRRQRSKSISLRKAKKKPSPPTRSVSLVKDEPGLLPEGGSALPKDQRPKSLCLSLEHQGHHSSHPDAQGHPAIPNHKDPESTQFSHHWYLTDWKSGDTYQSLSSSSTATGTTVIECTQVQGSSESLASPSTSRATTPSQLSIEVEAREISSPGRPPGLMSPSSGYSSQSETPTPTVSMSLTLGHLPPPSSSVRVRPVVPERKSSLPPTSPMEKFPKSRLSFDLPLTSSPNLDLSGMSISIRSKTKVSRHHSETNFGVKLAQKTNPNQPIMPMVTQSDLRSVRLRSVSKSEPEDDIESPEYAEEPRAEEVFTLPERKTKPPVAEKPPVARRPPSLVHKPPSVPEEYALTSPTLAMPPRSSIQHARPLPQDSYTVVRKPKPSSFPDGRSPGESTAPSSLVFTPFASSSDAFFSGTQQPPQGSVEDEGPKVRVLPERISLQSQEEAEKKKGKIPPPVPKKPSVLYLPLTSPTAQMEAYVAEPRLPLSPIITLEEDTKCPATGDDLQSLGQRVTSTPQADSEREASPLGSSVEPGTEEKSLISDKTAEWIAEDDDDVFVASRTTEDLFTVIHRSKRKLLGWKEPGEAFVGGRTSSHSPIKNTAESPISESTATAGSGSSANLDAGRNDDFKALLQKKGSKATPRSRPSAAELLKTTNPLARRIIAQFSKDYETTDNPST

SEQ ID NO: 39529 - protein, 709 aa, Homo sapiens
MESMGMVYSVPSSCNGPTESTFSTSWKGDAFTYMTPSATSQSNQVNENGKNPSCGNSWVSLNKVPPLVPKEAATLLVARDNPAGCSGSAGYPERLIQQRHMPERPSKIGLLTSGTSRLETGPGGASRFRERSLSVPTDSGTTDVDYDEEQKANEACALPFASTSSEGSNSADNIASLSAQQEAQHRRQRSKSISLRKAKKKPSPPTRSVSLVKDEPGLLPEGGSALPKDQRPKSLCLSLEHQGHHSSHPDAQGHPAIPNHKDPESTQFSHHWYLTDWKSGDTYQSLSSSSTATGTTVIECTQVQGSSESLASPSTSRATTPSQLSIEVEAREISSPGRPPGLMSPSSGYSSQSETPTPTVSMSLTLGHLPPPSSSVRVRPVVPERKSSLPPTSPMEKFPKSRLSFDLPLTSSPNLDLSGMSISIRSKTKVSRHHSETNFGVKLAQKTNPNQPIMPMVTQSDLRSVRLRSVSKSEPEDDIESPEYAEEPRAEEVFTLPERKTKPPVAEKPPVARRPPSLVHKPPSVPEEYALTSPTLAMPPRSSIQHARPLPQDSYTVVRKPKPSSFPDGRSPGESTAPSSLVFTPFASSSDAFFSGTQQPPQGSVEDEGPKVRVLPERISLQSQEEAEKKKGKIPPPVPKKPSVLYLPLTSPTAQMEAYVAEPRLPLSPIITLEEDTKCPATGDDLQSLGQRVTSTPQADSEREASPLG

SEQ ID NO: 39530 - protein, 841 aa, Homo sapiens
MPLAAYCYLRVVGKGSYGEVTLVKHRRDGKQYVIKKLNLRNASSRERRAAEQEAQLLSQLKHPNIVTYKESWEGGDGLLYIVMGFCEGGDLYRKLKEQKGQLLPENQVVEWFVQIAMALQYLHEKHILHRDLKTQNVFLTRTNIIKVGDLGIARVLENHCDMASTLIGTPYYMSPELFSNKPYNYKSDVWALGCCVYEMATLKHAFNAKDMNSLVYRIIEGKLPPMPRDYSPELAELIRTMLSKRPEERPSVRSILRQPYIKRQISFFLEATKIKTSKNNIKNGDSQSKPFATVVSGEAESNHEVIHPQPLSSEGSQTYIMGEGKCLSQEKPRASGLLKSPASLKAHTCKQDLSNTTELATISSVNIDILPAKGRDSVSDGFVQENQPRYLDASNELGGICSISQVEEEMLQDNTKSSAQPENLIPMWSSDIVTGEKNEPVKPLQPLIKEQKPKDQSLALSPKLECSGTILAHSNLRLLGSSDSPASASRVAGITGVCHHAQDQVAGECIIEKQGRIHPDLQPHNSGSEPSLSRQRRQKRREQTEHRGEKRQVRRDLFAFQESPPRFLPSHPIVGKVDVTSTQKEAENQRRVVTGSVSSSRSSEMSSSKDRPLSARERRRLKQSQEEMSSSGPSVRKASLSVAGPGKPQEEDQPLPARRLSSDCSVTQERKQIHCLSEDELSSSTSSTDKSDGDYGEGKGQTNEINALVQLMTQTLKLDSKESCEDVPVANPVSEFKLHRKYRDTLILHGKVAEEAEEIHFKELPSAIMPGSEKIRRLVEVLRTDVIRGLGVQLLEQVYDLLEEEDEFDREVRLREHMGEKYTTYSVKARQLKFFEENMNF

SEQ ID NO: 39531 - protein, 781 aa, Homo sapiens
MPLAAYCYLRVVGKGSYGEVTLVKHRRDGKQYVIKKLNLRNASSRERRAAEQEAQLLSQLKHPNIVTYKESWEGGDGLLYIVMGFCEGGDLYRKLKEQKGQLLPENQVVEWFVQIAMALQYLHEKHILHRDLKTQNVFLTRTNIIKVGDLGIARVLENHCDMASTLIGTPYYMSPELFSNKPYNYKSDVWALGCCVYEMATLKHAFNAKDMNSLVYRIIEGKLPPMPRDYSPELAELIRTMLSKRPEERPSVRSILRQPYIKRQISFFLEATKIKTSKNNIKNGDSQSKPFATVVSGEAESNHEVIHPQPLSSEGSQTYIMGEGKCLSQEKPRASGLLKSPASLKAHTCKQDLSNTTELATISSVNIDILPAKGRDSVSDGFVQENQPRYLDASNELGGICSISQVEEEMLQDNTKSSAQPENLIPMWSSDIVTGEKNEPVKPLQPLIKEQKPKDQDQVAGECIIEKQGRIHPDLQPHNSGSEPSLSRQRRQKRREQTEHRGEKRQVRRDLFAFQESPPRFLPSHPIVGKVDVTSTQKEAENQRRVVTGSVSSSRSSEMSSSKDRPLSARERRRLKQSQEEMSSSGPSVRKASLSVAGPGKPQEEDQPLPARRLSSDCSVTQERKQIHCLSEDELSSSTSSTDKSDGDYGEGKGQTNEINALVQLMTQTLKLDSKESCEDVPVANPVSEFKLHRKYRDTLILHGKVAEEAEEIHFKELPSAIMPGSEKIRRLVEVLRTDVIRGLGVQLLEQVYDLLEEEDEFDREVSVSLTVSRCLCYRIF

SEQ ID NO: 39532 - protein, 752 aa, Homo sapiens
MPLAAYCYLRVVGKGSYGEVTLVKHRRDGKQYLHEKHILHRDLKTQNVFLTRTNIIKVGDLGIARVLENHCDMASTLIGTPYYMSPELFSNKPYNYKSDVWALGCCVYEMATLKHAFNAKDMNSLVYRIIEGKLPPMPRDYSPELAELIRTMLSKRPEERPSVRSILRQPYIKRQISFFLEATKIKTSKNNIKNGDSQSKPFATVVSGEAESNHEVIHPQPLSSEGSQTYIMGEGKCLSQEKPRASGLLKSPASLKAHTCKQDLSNTTELATISSVNIDILPAKGRDSVSDGFVQENQPRYLDASNELGGICSISQVEEEMLQDNTKSSAQPENLIPMWSSDIVTGEKNEPVKPLQPLIKEQKPKDQSLALSPKLECSGTILAHSNLRLLGSSDSPASASRVAGITGVCHHAQDQVAGECIIEKQGRIHPDLQPHNSGSEPSLSRQRRQKRREQTEHRGEKRQVRRDLFAFQESPPRFLPSHPIVGKVDVTSTQKEAENQRRVVTGSVSSSRSSEMSSSKDRPLSARERRRLKQSQEEMSSSGPSVRKASLSVAGPGKPQEEDQPLPARRLSSDCSVTQERKQIHCLSEDELSSSTSSTDKSDGDYGEGKGQTNEINALVQLMTQTLKLDSKESCEDVPVANPVSEFKLHRKYRDTLILHGKVAEEAEEIHFKELPSAIMPGSEKIRRLVEVLRTDVIRGLGVQLLEQVYDLLEEEDEFDREVRLREHMGEKYTTYSVKARQLKFFEENMNF

SEQ ID NO: 39533 - protein, 506 aa, Homo sapiens
MDDYMVLRMIGEGSFGRALLVQHESSNQMFAMKEIRLPKSFSNTQNSRKEAVLLAKMKHPNIVAFKESFEAEGHLYIVMEYCDGGDLMQKIKQQKGKLFPEDMILNWFTQMCLGVNHIHKKRVLHRDIKSKNIFLTQNGKVKLGDFGSARLLSNPMAFACTYVGTPYYVPPEIWENLPYNNKSDIWSLGCILYELCTLKHPFQANSWKNLILKVCQGCISPLPSHYSYELQFLVKQMFKRNPSHRPSATTLLSRGIVARLVQKCLPPEIIMEYGEEVLEEIKNSKHNTPRKKTNPSRIRIALGNEASTVQEEEQDRKGSHTDLESINENLVESALRRVNREEKGNKSVHLRKASSPNLHRRQWEKNVPNTALTALENASILTSSLTAEDDRGGSVIKYSKNTTRKQWLKETPDTLLNILKNADLSLAFQTYTIYRPGSEGFLKGPLSEETEASDSVDGGHDSVILDPERLEPGLDEEDTDFEEEDDNPDWVSELKKRAGWQGLCDR

SEQ ID NO: 39534 - protein, 489 aa, Homo sapiens
MDDYMVLRMIGEGSFGRALLVQHESSNQMFAMKEIRLPKSFSNTQNSRKEAVLLAKMKHPNIVAFKESFEAEGHLYIVMEYCDGGDLMQKIKQQKGKLFPEDMILNWFTQMCLGVNHIHKKRVLHRDIKSKNIFLTQNGKVKLGDFGSARLLSNPMAFACTYVGTPYYVPPEIWENLPYNNKSDIWSLGCILYELCTLKHPFQANSWKNLILKVCQGCISPLPSHYSYELQFLVKQMFKRNPSHRPSATTLLSRGIVARLVQKCLPPEIIMEYGEEVLEEIKNSKHNTPRKKQEEEQDRKGSHTDLESINENLVESALRRVNREEKGNKSVHLRKASSPNLHRRQWEKNVPNTALTALENASILTSSLTAEDDRGGSVIKYSKNTTRKQWLKETPDTLLNILKNADLSLAFQTYTIYRPGSEGFLKGPLSEETEASDSVDGGHDSVILDPERLEPGLDEEDTDFEEEDDNPDWVSELKKRAGWQGLCDR

SEQ ID NO: 39535 - protein, 532 aa, Homo sapiens
MEEQVFKGDPDTPHSISFSGSGFLSFYQAGAVDALRDLAPRMLETAHRFAGTSAGAVIAALAICGIEMDEYLRVLNVGVAEVKKSFLGPLSPSCKMVQMMRQFLYRVLPEDSYKVTTGKLHVSLTRLTDGENVVVSEFTSKEELIEALYCSCFVPVYCGLIPPTYRGVRYIDGGFTGMQPCAFWTDAITISTFSGQQDICPRDCPAIFHDFRMFNCSFQFSLENIARMTHALFPPDLVILHDYYYRGYEDAVLYLRRLNAVYLNSSSKRVIFPRVEVYCQIELALGNECPERSQPSLRARQASLEGATQPHKEWVPKGDGRGSHGPPVSQPVQTLEFTCESPVSAPVSPLEQPPAQPLASSTPLSLSGMPPVSFPAVHKPPSSTPGSSLPTPPPGLSPLSPQQQVQPSGSPARSLHSQAPTSPRPSLGPSTVGAPQTLPRSSLSAFPAQPPVEELGQEQPQAVALLVSSKPKSAVPLVHVKETVSKPYVTESPAEDSNWVNKVFKKNKQKTSGTRKGFPRHSGSKKPSSKVQ

SEQ ID NO: 39536 - protein, 437 aa, Homo sapiens
MVQMMRQFLYRVLPEDSYKVTTGKLHVSLTRLTDGENVVVSEFTSKEELIEALYCSCFVPVYCGLIPPTYRGVRYIDGGFTGMQPCAFWTDAITISTFSGQQDICPRDCPAIFHDFRMFNCSFQFSLENIARMTHALFPPDLVILHDYYYRGYEDAVLYLRRLNAVYLNSSSKRVIFPRVEVYCQIELALGNECPERSQPSLRARQASLEGATQPHKEWVPKGDGRGSHGPPVSQPVQTLEFTCESPVSAPVSPLEQPPAQPLASSTPLSLSGMPPVSFPAVHKPPSSTPGSSLPTPPPGLSPLSPQQQVQPSGSPARSLHSQAPTSPRPSLGPSTVGAPQTLPRSSLSAFPAQPPVEELGQEQPQAVALLVSSKPKSAVPLVHVKETVSKPYVTESPAEDSNWVNKVFKKNKQKTSGTRKGFPRHSGSKKPSSKVQ

SEQ ID NO: 39537 - protein, 446 aa, Homo sapiens
MVQMMRQFLYRVLPEDSYKVTTGKLHVSLTRLTDGENVVVSEFTSKEELIEALYCSCFVPVYCGLIPPTYRGVWAFLTLPPQRYIDGGFTGMQPCAFWTDAITISTFSGQQDICPRDCPAIFHDFRMFNCSFQFSLENIARMTHALFPPDLVILHDYYYRGYEDAVLYLRRLNAVYLNSSSKRVIFPRVEVYCQIELALGNECPERSQPSLRARQASLEGATQPHKEWVPKGDGRGSHGPPVSQPVQTLEFTCESPVSAPVSPLEQPPAQPLASSTPLSLSGMPPVSFPAVHKPPSSTPGSSLPTPPPGLSPLSPQQQVQPSGSPARSLHSQAPTSPRPSLGPSTVGAPQTLPRSSLSAFPAQPPVEELGQEQPQAVALLVSSKPKSAVPLVHVKETVSKPYVTESPAEDSNWVNKVFKKNKQKTSGTRKGFPRHSGSKKPSSKVQ

SEQ ID NO: 39538 - protein, 528 aa, Homo sapiens
MASMRESDTGLWLHNKLGATDELWAPPSIASLLTAAVIDNIRLCFHGLSSAVKLKLLLGTLHLPRRTVDEMKGALMEIIQLASLDSDPWVLMVADILKSFPDTGSLNLELEEQNPNVQDILGELREKVGECEASAMLPLECQYLNKNALTTLAGPLTPPVKHFQLKRKPKSATLRAELLQKSTETAQQLKRSAGVPFHAKGRGLLRKMDTTTPLKGIPKQAPFRSPTAPSVFSPTGNRTPIPPSRTLLRKERGVKLLDISELDMVGAGREAKRRRKTLDAEVVEKPAKEETVVENATPDYAAGLVSTQKLGSLNNEPALPSTSYLPSTPSVVPASSYIPSSETPPAPSSREASRPPEEPSAPSPTLPAQFKQRAPMYNSGLSPATPTPAAPTSPLTPTTPPAVAPTTQTPPVAMVAPQTQAPAQQQPKKNLSLTREQMFAAQEMFKTANKVTRPEKALILGFMAGSRENPCQEQGDVIQIKLSEHTEDLPKADGQGSTTMLVDTVFEMNYATGQWTRFKKYKPMTNVS

SEQ ID NO: 39539 - protein, 265 aa, Homo sapiens
MVGAGREAKRRRKTLDAEVVEKPAKEETVVENATPDYAAGLVSTQKLGSLNNEPALPSTSYLPSTPSVVPASSYIPSSETPPAPSSREASRPPEEPSAPSPTLPAQFKQRAPMYNSGLSPATPTPAAPTSPLTPTTPPAVAPTTQTPPVAMVAPQTQAPAQQQPKKNLSLTREQMFAAQEMFKTANKVTRPEKALILGFMAGSRENPCQEQGDVIQIKLSEHTEDLPKADGQGSTTMLVDTVFEMNYATGQWTRFKKYKPMTNVS

SEQ ID NO: 39540 - protein, 1436 aa, Homo sapiens
MLHLSAAPPAPPPEVTATARPCLCSVGRRGDGGKMAAAGALERSFVELSGAERERPRHFREFTVCSIGTANAVAGAVKYSESAGGFYYVESGKLFSVTRNRFIHWKTSGDTLELMEESLDINLLNNAIRLKFQNCSVLPGGVYVSETQNRVIILMLTNQTVHRLLLPHPSRMYRSELVVDSQMQSIFTDIGKVDFTDPCNYQLIPAVPGISPNSTASTAWLSSDGEALFALPCASGGIFVLKLPPYDIPGMVSVVELKQSSVMQRLLTGWMPTAIRGDQSPSDRPLSLAVHCVEHDAFIFALCQDHKLRMWSYKEQMCLMVADMLEYVPVKKDLRLTAGTGHKLRLAYSPTMGLYLGIYMHAPKRGQFCIFQLVSTESNRYSLDHISSLFTSQETLIDFALTSTDIWALWHDAENQTVVKYINFEHNVAGQWNPVFMQPLPEEEIVIRDDQDPREMYLQSLFTPGQFTNEALCKALQIFCRGTERNLDLSWSELKKEVTLAVENELQGSVTEYEFSQEEFRNLQQEFWCKFYACCLQYQEALSHPLALHLNPHTNMVCLLKKGYLSFLIPSSLVDHLYLLPYENLLTEDETTISDDVDIARDVICLIKCLRLIEESVTVDMSVIMEMSCYNLQSPEKAAEQILEDMITIDVENVMEDICSKLQEIRNPIHAIGLLIREMDYETEVEMEKGFNPAQPLNIRMNLTQLYGSNTAGYIVCRGVHKIASTRFLICRDLLILQQLLMRLGDAVIWGTGQLFQAQQDLLHRTAPLLLSYYLIKWGSECLATDVPLDTLESNLQHLSVLELTDSGALMANRFVSSPQTIVELFFQEVARKHIISHLFSQPKAPLSQTGLNWPEMITAITSYLLQLLWPSNPGCLFLECLMGNCQYVQLQDYIQLLHPWCQVNVGSCRFMLGRCYLVTGEGQKALECFCQAASEVGKEEFLDRLIRSEDGEIVSTPRLQYYDKVLRLLDVIGLPELVIQLATSAITEAGDDWKSQATLRTCIFKHHLDLGHNSQAYEALTQIPDSSRQLDCLRQLVVVLCERSQLQDLVEFPYVNLHNEVVGIIESRARAVDLMTHNYYELLYAFHIYRHNYRKAGTVMFEYGMRLGREVRTLRGLEKQGNCYLAALNCLRLIRPEYAWIVQPVSGAVYDRPGASPKRNHDGECTAAPTNRQIEILELEDLEKECSLARIRLTLAQHDPSAVAVAGSSSAEEMVTLLVQAGLFDTAISLCQTFKLPLTPVFEGLAFKCIKLQFGGEAAQAEAWAWLAANQLSSVITTKESSATDEAWRLLSTYLERYKVQNNLYHHCVINKLLSHGVPLPNWLINSYKKVDAAELLRLYLNYDLLEEAVDLVSEYVDAVLGKGHQYFGIEFPLSATAPMVWLPYSSIDQLLQALGENSANSHNIALSQKILDKLEDYQQKVDKATRDLLYRRTL

SEQ ID NO: 39541 - protein, 224 aa, Homo sapiens
MLHLSAAPPAPPPEVTATARPCLCSVGRRGDGGKMAAAGALERSFVELSGAERERPRHFREFTVCSIGTANAVAGAVKYSESAGGFYYVESGKLFSVTRNRFIHWKTSGDTLELMEESLDINLLNNAIRLKFQNCSVLPGGVYVSETQNRVIILMLTNQTVHRLLLPHPSRMYRSVSWLSAISFISQITLGVTNVVLERCLLELKEIWILVIPHQAYFDSYRLK

SEQ ID NO: 39542 - protein, 485 aa, Homo sapiens
MVSVVELKQSSVMQRLLTGWMPTAIRGDQSPSDRPLSLAVHCVEHDAFIFALCQDHKLRMWSYKEQMCLMVADMLEYVPVKKDLRLTAGTGHKLRLAYSPTMGLYLGIYMHAPKRGQRRGFAMLPGLKLLSSSSPPTSASQCAGITSVNHSTQPEFFFCIFQLVSTESNRYSLDHISSLFTSQETLIDFALTSTDIWALWHDAENQTVVKYINFEHNVAGQWNPVFMQPLPEEEIVIRDDQDPREMYLQSLFTPGQFTNEALCKALQIFCRGTERNLDLSWSELKKEVTLAVENELQGSVTEYEFSQEEFRNLQQEFWCKFYACCLQYQEALSHPLALHLNPHTNMVCLLKKGYLSFLIPSSLVDHLYLLPYENLLTEDETTISDDVDIARDVICLIKCLRLIEESVTVDMSVIMEMSCYNLQSPEKAAEQILEDMITIDVENVMEDICSKLQEIRNPIHAIGLLIREMDYETEVEMEKGFNPGK

SEQ ID NO: 39543 - protein, 274 aa, Homo sapiens
MVMSQGTYTFLTCFAGFWLIWGLIVLLCCFCSFLRRRLKRRQEERLREQNLRALELEPLELEGSLAGSPPGLAPPQPPPHRSRLEAPAHAHSHPHVHVHPLLHHGPAQPHAHAHPHPHHHALPHPPPTHLSVPPRPWSYPRQAESDMSKPPCYEEAVLMAEPPPPYSEVLTDTRGLYRKIVTPFLSRRDSAEKQEQPPPSYKPLFLDRGYTSALHLPSAPRPAPPCPALCLQADRGRRVFPSWTDSELSSREPLEHGAWRLPVSIPLFGRTTAV

SEQ ID NO: 39544 - protein, 253 aa, Homo sapiens
MVMSQGTYTFLTCFAGFWLIWGLIVLLCCFCSFLRRRLKRRQEERLREQNLRALELEPLELEGSLAGSPPGLAPPQPPPHRSRLEAPAHAHAHPHPHHHALPHPPPTHLSVPPRPWSYPRQAESDMSKPPCYEEAVLMAEPPPPYSEVLTDTRGLYRKIVTPFLSRRDSAEKQEQPPPSYKPLFLDRGYTSALHLPSAPRPAPPCPALCLQADRGRRVFPSWTDSELSSREPLEHGAWRLPVSIPLFGRTTAV

SEQ ID NO: 39545 - protein, 520 aa, Homo sapiens
MRVESGSAQERGILLESLSTLLEKTTASHEGRAPGNRELTDLLPPEVCSLLNPAAIYANNEISLRDVEVYGFDYDYTLAQYADALHPEIFSTARDILIEHYKYPEGIRKYDYNPSFAIRGLHYDIQKSLLMKIDAFHYVQLGTAYRGLQPVPDEEVIELYGGTQHIPLYQMSGFYGKGPSIKQFMDIFSLPEMALLSCVVDYFLGHSLEFDQAHLYKDVTDAIRDVHVKGLMYQWIEQDMEKYILRGDETFAVLSRLVAHGKQLFLITNSPFSFVDKGMRHMVGPDWRQLFDVVIVQADKPSFFTDRRKPFRKLDEKGSLQWDRITRLEKGKIYRQGNLFDFLRLTEWRGPRVLYFGDHLYSDLADLMLRHGWRTGAIIPELEREIRIINTEQYMHSLTWQQALTGLLERMQTYQDAESRQVLAAWMKERQELRCITKALFNAQFGSIFRTFHNPTYFSRRLVRFSDLYMASLSCLLNYRVDFTFYPRRTPLQHEAPLWMDQLCTGCMKTPFLGDMAHIR

SEQ ID NO: 39546 - protein, 557 aa, Homo sapiens
MAGAGLRAAARRWLLCGGHGGPRAASSSPSCPGCGPPGPGAHCPGVPRSAPAQAPTSGADLSAHLWARYQDMRRLVHDLLPPEVCSLLNPAAIYANNEISLRDVEVYGFDYDYTLAQYADALHPEIFSTARDILIEHYKYPEGIRKYDYNPSFAIRGLHYDIQKSLLMKIDAFHYVQLGTAYRGLQPVPDEEVIELYGGTQHIPLYQMSGFYGKGPSIKQFMDIFSLPEMALLSCVVDYFLGHSLEFDQAHLYKDVTDAIRDVHVKGLMYQWIEQDMEKYILRGDETFAVLSRLVAHGKQLFLITNSPFSFVDKGMRHMVGPDWRQLFDVVIVQADKPSFFTDRRKPFRKLDEKGSLQWDRITRLEKGKIYRQGNLFDFLRLTEWRGPRVLYFGDHLYSDLADLMLRHGWRTGAIIPELEREIRIINTEQYMHSLTWQQALTGLLERMQTYQDAESRQVLAAWMKERQELRCITKALFNAQFGSIFRTFHNPTYFSRRLVRFSDLYMASLSCLLNYRVDFTFYPRRTPLQHEAPLWMDQLCTGCMKTPFLGDMAHIR

SEQ ID NO: 39547 - protein, 532 aa, Homo sapiens
MAGAGLRAAARRWLLCGGHGGPRAASSSPSCPGCGPPGPGAHCPGVPRSAPAQAPTSGADLSAHLWARYQDMRRLVHDLLPPEVCSLLNPAAIYANNEISLRDVEVYGFDYDYTLAQYADALHPEIFSTARDILIEHYKSLLMKIDAFHYVQLGTAYRGLQPVPDEEVIELYGGTQHIPLYQMSGFYGKGPSIKQFMDIFSLPEMALLSCVVDYFLGHSLEFDQAHLYKDVTDAIRDVHVKGLMYQWIEQDMEKYILRGDETFAVLSRLVAHGKQLFLITNSPFSFVDKGMRHMVGPDWRQLFDVVIVQADKPSFFTDRRKPFRKLDEKGSLQWDRITRLEKGKIYRQGNLFDFLRLTEWRGPRVLYFGDHLYSDLADLMLRHGWRTGAIIPELEREIRIINTEQYMHSLTWQQALTGLLERMQTYQDAESRQVLAAWMKERQELRCITKALFNAQFGSIFRTFHNPTYFSRRLVRFSDLYMASLSCLLNYRVDFTFYPRRTPLQHEAPLWMDQLCTGCMKTPFLGDMAHIR

SEQ ID NO: 39548 - protein, 390 aa, Homo sapiens
MKIDAFHYVQLGTAYRGLQPVPDEEVIELYGGTQHIPLYQMSGFYGKGPSIKQFMDIFSLPEMALLSCVVDYFLGHSLEFDQAHLYKDVTDAIRDVHVKGLMYQWIEQDMEKYILRGDETFAVLSRLVAHGKQLFLITNSPFSFVDKGMRHMVGPDWRQLFDVVIVQADKPSFFTDRRKPFRKLDEKGSLQWDRITRLEKGKIYRQGNLFDFLRLTEWRGPRVLYFGDHLYSDLADLMLRHGWRTGAIIPELEREIRIINTEQYMHSLTWQQALTGLLERMQTYQDAESRQVLAAWMKERQELRCITKALFNAQFGSIFRTFHNPTYFSRRLVRFSDLYMASLSCLLNYRVDFTFYPRRTPLQHEAPLWMDQLCTGCMKTPFLGDMAHIR

SEQ ID NO: 39549 - protein, 455 aa, Homo sapiens
MAQHFSLAACDVVGFDLDHTLCRYNLPESAPLIYNSFAQFLVKEKGYDKELLNVTPEDWDFCCKGLALDLEDGNFLKLANNGTVLRASHGTKMMTPEVLAEAYGKKEWKHFLSDTGMACRSGKYYFYDNYFDLPGALLCARVVDYLTKLNNGQKTFDFWKDIVAAIQHNYKMSAFKENCGIYFPEIKRDPGRYLHSCPESVKKWLRQLKNAGKILLLITSSHSDYCRLLCEYILGNDFTDLFDIVITNALKPGFFSHLPSQRPFRTLENDEEQEALPSLDKPGWYSQGNAVHLYELLKKMTGKPEPKVVYFGDSMHSDIFPARHYSNWETVLILEELRGDEGTRSQRPEESEPLEKKGKYEGPKAKPLNTSSKKWGSFFIDSVLGLENTEDSLVYTWSCKRISTYSTIAIPSIEAIAELPLDYKFTRFSSSNSKTAGYYPNPPLVLSSDETLISK

SEQ ID NO: 39550 - protein, 405 aa, Homo sapiens
MFLLAPVATGINSHNDRGRGIQGTINEQCASSLKIRASHGTKMMTPEVLAEAYGKKEWKHFLSDTGMACRSGKYYFYDNYFDLPGALLCARVVDYLTKLNNGQKTFDFWKDIVAAIQHNYKMSAFKENCGIYFPEIKRDPGRYLHSCPESVKKWLRQLKNAGKILLLITSSHSDYCRLLCEYILGNDFTDLFDIVITNALKPGFFSHLPSQRPFRTLENDEEQEALPSLDKPGWYSQGNAVHLYELLKKMTGKPEPKVVYFGDSMHSDIFPARHYSNWETVLILEELRGDEGTRSQRPEESEPLEKKGKYEGPKAKPLNTSSKKWGSFFIDSVLGLENTEDSLVYTWSCKRISTYSTIAIPSIEAIAELPLDYKFTRFSSSNSKTAGYYPNPPLVLSSDETLISK

SEQ ID NO: 39551 - protein, 171 aa, Homo sapiens
MVKLNSNPSEKGTKPPSVEDGFQTVPLITPLEVNHLQLPAPEKVIVKTRTEYQPEQKNKGKFRVPKIAEFTVTILVSLALAFLACIVFLVVYKAFTYDHSCPEGFVYKHKRCIPASLDAYYSSQDPNSRSRFYTVISHYSVAKQSTARAIGPWLSAAAVIHEPKPPKTQGH

SEQ ID NO: 39552 - protein, 548 aa, Homo sapiens
MTMAAAAVVARGAGARAATAAALRGGCGTAARGRPCAGPARPLCTAPGTAPDMKRYLWERYREAKRSTEELVPSIMSNLLNPDAIFSNNEMSLSDIEIYGFDYDYTLVFYSKHLHTLIFNAARDLLINEHRYPAEIRKYEYDPNFAIRGLHYDVQRAVLMKIDAFHYIQLGTVYRGLSVVPDEEVIEMYEGSHVPLEQMSDFYGKSSHGNTMKQFMDIFSLPEMTLLSCVNEYFLKNNIDYEPVHLYKDVKDSIRDVHIKGIMYRAIEADIEKYICYAEQTRAVLAKLADHGKKMFLITNSPSSFVDKGMSYIVGKDWRDLFDVVIVQAEKPNFFNDKRRPFRKMNEKGVLLWDKIHKLQKGQIYKQGNLYEFLKLTGWRGSRVLYFGDHIYSDLADLTLKHGWRTGAIIPELRSELKIMNTEQYIQTMTWLQTLTGLLEQMQVHRDAESQLVLQEWKKERKEMREMTKSFFNAQFGSLFRTDQNPTYFLRRLSRFADIYMASLSCLLNYDVSHTFYPRRTPLQHELPAWSERPPTFGTPLLQEAQAK

SEQ ID NO: 39553 - protein, 464 aa, Homo sapiens
MSNLLNPDAIFSNNEMSLSDIEIYGFDYDYTLVFYSKHLHTLIFNAARDLLINEHRYPAEIRKYEYDPNFAIRGLHYDVQRAVLMKIDAFHYIQLGTVYRGLSVVPDEEVIEMYEGSHVPLEQMSDFYGKSSHGNTMKQFMDIFSLPEMTLLSCVNEYFLKNNIDYEPVHLYKDVKDSIRDVHIKGIMYRAIEADIEKYICYAEQTRAVLAKLADHGKKMFLITNSPSSFVDKGMSYIVGKDWRDLFDVVIVQAEKPNFFNDKRRPFRKMNEKGVLLWDKIHKLQKGQIYKQGNLYEFLKLTGWRGSRVLYFGDHIYSDLADLTLKHGWRTGAIIPELRSELKIMNTEQYIQTMTWLQTLTGLLEQMQVHRDAESQLVLQEWKKERKEMRQFGSLFRTDQNPTYFLRRLSRFADIYMASLSCLLNYDVSHTFYPRRTPLQHELPAWSERPPTFGTPLLQEAQAK

SEQ ID NO: 39554 - protein, 312 aa, Homo sapiens
MRNHTEITEFILLGLTDDPNFQVVIFVFLLITYMLSITGNLTLITITLLDSHLQTPMYFFLRNFSILEISFTTVSIPKFLGNIISGDKTISFNNCIVQLFFFILLGVTEFYLLAAMSYDRYVAICKPLHCLSIMNRRVCTLLVFTSWLVSFLIIFPALMLLLKLHYCRSNIIDHFTCDYFPLLQLACSDTKFLEVMGFSCAAFTLMFTLALIFLSYIYIIRTILRIPSTSQRTKAFSTCSSHMVVVSISYGSCIFMYIKPSAKDRVSLSKGVAILNTSVAPMMNPFIYSLRNQQVKQAFINMARKTVFFTST

SEQ ID NO: 39555 - protein, 312 aa, Homo sapiens
MRNGTVITEFILLGFPVIQGLQTPLFIAIFLTYILTLAGNGLIIATVWAEPRLQIPMYFFLCNLSFLEIWYTTTVIPKLLGTFVVARTVICMSCCLLQAFFHFFVGTTEFLILTIMSFDRYLTICNPLHHPTIMTSKLCLQLALSSWVVGFTIVFCQTMLLIQLPFCGNNVISHFYCDVGPSLKAACIDTSILELLGVIATILVIPGSLLFNMISYIYILSAILRIPSATGHQKTFSTCASHLTVVSLLYGAVLFMYLRPTAHSSFKINKVVSVLNTILTPLLNPFIYTIRNKEVKGALRKAMTCPKTGHAK

SEQ ID NO: 39556 - protein, 329 aa, Homo sapiens
MPKLNSTFVTEFLFEGFSSFRRQHKLVFFVVFLTLYLLTLSGNVIIMTIIRLDHHLHTPMYFFLCMLSISETCYTVAIIPHMLSGLLNPHQPIATQSCATQLFFYLTFGINNCFLLTVMGYDRYVAICNPLRYSVIMGKRACIQLASGSLGIGLGMAIVQVTSVFGLPFCDAFVISHFFCDVRHLLKLACTDTTVNEIINFVVSVCVLVLPMGLVFISYVLIISTILKIASAEGQKKAFATCASHLTVVIIHYGCASIIYLKPKSQSSLGQDRLISVTYTHHSPTEPCCVQPEEQGGQRCSAQSRGAKNSVSLMKRGCEGFSFAFINMY

SEQ ID NO: 39557 - protein, 257 aa, Homo sapiens
MDAEYSGNEFPRSEGERDQHQRPGKERKSGEAGWGTGELGQDGRLLSSTLSLSSNRSLGQRQNSPLPFQWRITHSFRWMAQVLASELSLVAFILLLVVAFSKKWLDLSRSLFYQRWPVDVSNRIHTSAHVMSMGLLHFYKSRSCSDLENGKVTFIFSTLMLFPINIWIFELERNVSIPIGWSYFIGWLVLILYFTCAILCYFNHKSFWSLILSHPSGAVSCSSSFGSVEESPRAQTITDTPITQEGVLDPEQKDTHV

SEQ ID NO: 39558 - protein, 950 aa, Homo sapiens
MNTEAEQQLLHHARNGNAEEVRQLLETMARNEVIADINCKGRSKSNLGWTPLHLACYFGHRQVVQDLLKAGAEVNVLNDMGDTPLHRAAFTGRKELVMLLLEYNADTTIVNGSGQTAKEVTHAEEIRSMLEAVERTQQRKLEELLLAAAREGKTTELTALLNRPNPPDVNCSDQLGNTPLHCAAYRAHKQCALKLLRSGADPNLKNKNDQKPLDLAQGAEMKHILVGNKVIYKALKRYEGPLWKSSRFFGWRLFWVVLEHGVLSWYRKQPDAVHNIYRQGCKHLTQAVCTVKSTDSCLFFIKCFDDTIHGFRVPKNSLQQSREDWLEAIEEHSAYSTHYCSQDQLTDEEEEDTVSAADLKKSLEKAQSCQQRLDREISNFLKMIKECDMAKEMLPSFLQKVEVVSEASRETCVALTDCLNLFTKQEGVRNFKLEQEQEKNKILSEALETLATEHHELEQSLVKGSPPASILSEDEFYDALSDSESERSLSRLEAVTARSFEEEGEHLGSRKHRMSEEKDCGGGDALSNGIKKHRTSLPSPMFSRNDFSIWSILRKCIGMELSKITMPVIFNEPLSFLQRLTEYMEHTYLIHKASSLSDPVERMQCVAAFAVSAVASQWERTGKPFNPLLGETYELVRDDLGFRLISEQVSHHPPISAFHAEGLNNDFIFHGSIYPKLKFWGKSVEAEPKGTITLELLEHNEAYTWTNPTCCVHNIIVGKLWIEQYGNVEIINHKTGDKCVLNFKPCGLFGKELHKVEGYIQDKSKKKLCALYGKWTECLYSVDPATFDAYKKNDKKNTEEKKNSKQMSTSEELDEMPVPDSESVFIIPGSVLLWRIAPRPPNSAQMYNFTSFAMVLNEVDKDMESVIPKTDCRLRPDIRAMENGEIDQASEEKKRLEEKQRAARKNRSKSEEDWKTRWFHQGPNPYNGAQDWIYSGSYWDRNYFNLPDIY

SEQ ID NO: 39559 - protein, 437 aa, Homo sapiens
MSEEKDCGGGDALSNGIKKHRTSLPSPMFSRNDFSIWSILRKCIGMELSKITMPVIFNEPLSFLQRLTEYMEHTYLIHKASSLSDPVERMQCVAAFAVSAVASQWERTGKPFNPLLGETYELVRDDLGFRLISEQVSHHPPISAFHAEGLNNDFIFHGSIYPKLKFWGKSVEAEPKGTITLELLEHNEAYTWTNPTCCVHNIIVGKLWIEQYGNVEIINHKTGDKCVLNFKPCGLFGKELHKVEGYIQDKSKKKLCALYGKWTECLYSVDPATFDAYKKNDKKNTEEKKNSKQMSTSEELDEMPVPDSESVFIIPGSVLLWRIAPRPPNSAQMYNFTSFAMVLNEVDKDMESVIPKTDCRLRPDIRAMENGEIDQASEEKKRLEEKQRAARKNRSKSEEDWKTRWFHQGPNPYNGAQDWIYSGSYWDRNYFNLPDIY

SEQ ID NO: 39560 - protein, 568 aa, Homo sapiens
MIKECDMAKEMLPSFLQKVEVVSEASRETCVALTDCLNLFTKQEGVRNFKLEQEQEKNKILSEALETLATEHHELEQSLVKGSPPASILSEDEFYDALSDSESERSLSRLEAVTARSFEEEGEHLGSRKHRMSEEKDCGGGDALSNGIKKHRTSLPSPMFSRNDFSIWSILRKCIGMELSKITMPVIFNEPLSFLQRLTEYMEHTYLIHKASSLSDPVERMQCVAAFAVSAVASQWERTGKPFNPLLGETYELVRDDLGFRLISEQVSHHPPISAFHAEGLNNDFIFHGSIYPKLKFWGKSVEAEPKGTITLELLEHNEAYTWTNPTCCVHNIIVGKLWIEQYGNVEIINHKTGDKCVLNFKPCGLFGKELHKVEGYIQDKSKKKLCALYGKWTECLYSVDPATFDAYKKNDKKNTEEKKNSKQMSTSEELDEMPVPDSESVFIIPGSVLLWRIAPRPPNSAQMYNFTSFAMVLNEVDKDMESVIPKTDCRLRPDIRAMENGEIDQASEEKKRLEEKQRAARKNRSKSEEDWKTRWFHQGPNPYNGAQDWIYSGSYWDRNYFNLPDIY

SEQ ID NO: 39561 - protein, 350 aa, Homo sapiens
MFCCLGYEWLSGGCKTWHSAWVINTLADHRHRGTDFGGSPWLLIITVFLRSYKFAISLCTSYLCVSFLKTIFPSQNGHDGSTDVQQRARRSNRRRQEGIKIVLEDIFTLWRQVETKVRAKICKMKVTTKVNRHDKINGKRKTAKEHLRKLSMKEREHGEKERQVSEAEENGKLDMKEIHTYMEMFQRAQALRRRAEDYYRCKITPSARKPLCNRVRMAAAEHRHSSGLPYWPYLTAETLKNRMGHQPPPPTQQHSIIDNSLSLKTPPECLLTPLPPSALPSADDNLKTPAECLLYPLPPSADDNLKTPPECLLTPLPPSAPPSVDDNLKTPPKCVCSLPFHPQRMIISRN

SEQ ID NO: 39562 - protein, 397 aa, Homo sapiens
MRRNTQDENMRKWFKVTIPYGIKYDKAWLMNSIQSNCSVPFTPVDFHYIRNRACFFVQVASAASALKDVSYKIYDDENQKICIFVSHFTAPYSVKNKLKPGQMEMLKLTMNKRYNVSQQALDLQNLRFDPDLMGRDIDIILNRRNCMAATLKITERNFPELLSLNLCNNKLYQLDGLSDITEKAPKVKTLNLSKNKLESAWELGKVKGLKLEELWLEGNPLCSTFSDQSAYVSAIRDCFPKLLRLDGRELSAPVIVDIDSSETMKPCKENFTGSETLKHLVLQFLQQSNLCKYFKDSRNIKILKDPYLQRKLLKHTKCPRNVDSLSALPETQHDFTSILVDMWYQTVNTCFLPRAGPESQRWWCLLSLKWKDGLRVLILPSCGPSSLPLAAIPVCAS

SEQ ID NO: 39563 - protein, 368 aa, Homo sapiens
MRRNTQDENMRKWFKVTIPYGIKYDKAWLMNSIQSNCSVPFTPVDFHYIRNRACFFVQVASAASALKDVSYKIYDDENQKICIFVSHFTAPYSVKNKLKPGQMEMLKLTMNKRYNVSQQALDLQNLRFDPDLMGRDIDIILNRRNCMAATLKITERNFPELLSLNLCNNKLYQLDGLSDITEKAPKVKTLNLSKNKLESAWELGKVKGLKLEELWLEGNPLCSTFSDQSAYVSAIRDCFPKLLRLDGRELSAPVIVDIDSSETMKPCKENFTGSETLKHLVLQFLQQSNLCKYFKDSRNIKILKDPYLQRKLLKHTKCPRNVDSLSALPETQHDFTSILVDMWYQTVNTCFLPRAGPESQSGRMVSGF

SEQ ID NO: 39564 - protein, 168 aa, Homo sapiens
MRRNTQDENMRKWFKVTIPYGIKYDKAWLMNSIQSNCSVPFTPVDFHYIRNRACFFVQVASAASALKDVSYKIYDDENQKICIFVSHFTAPYSVKNKLKPGQMEMLKLTMNKRYNVSQQALDLQNLRFDPDLMGRDIDIILNRRNCMAATLKITERNFPERRLPKSRP

SEQ ID NO: 39565 - protein, 305 aa, Homo sapiens
MRRNTQDENMRKWFKVTICIFVSHFTAPYSVKNKLKPGQMEMLKLTMNKRYNVSQQALDLQNLRFDPDLMGRDIDIILNRRNCMAATLKITERNFPELLSLNLCNNKLYQLDGLSDITEKAPKVKTLNLSKNKLESAWELGKVKGLKLEELWLEGNPLCSTFSDQSAYVSAIRDCFPKLLRLDGRELSAPVIVDIDSSETMKPCKENFTGSETLKHLVLQFLQQSNLCKYFKDSRNIKILKDPYLQRKLLKHTKCPRNVDSLSALPETQHDFTSILVDMWYQTVNTCFLPRAGPESQSGRMVSGF

SEQ ID NO: 39566 - protein, 302 aa, Homo sapiens
MRRNTQDENMRKWFKVTICIFVSHFTAPYSVKNKLKPGQMEMLKLTMNKRYNVSQQALDLQNLRFDPDLMGRDIDIILNRRNCMAATLKITERNFPELLSLNLCNNKLYQLDGLSDITEKAPKVKTLNLSKNKLESAWELGKVKGLKLEELWLEGNPLCSTFSDQSAYVSAIRDCFPKLLRLDGRELSAPVIVDIDSSETMKPCKENFTGSETLKHLVLQFLQQSNLCKYFKDSRNIKILKDPYLQRKLLKHTKCPRNVDSLSALPETQHDFTSILVDMWYQTVNTCFLPRAGPESQRWVGG

SEQ ID NO: 39567 - protein, 365 aa, Homo sapiens
MRRNTQDENMRKWFKVTIPYGIKYDKAWLMNSIQSNCSVPFTPVDFHYIRNRACFFVQVASAASALKDVSYKIYDDENQKICIFVSHFTAPYSVKNKLKPGQMEMLKLTMNKRYNVSQQALDLQNLRFDPDLMGRDIDIILNRRNCMAATLKITERNFPELLSLNLCNNKLYQLDGLSDITEKAPKVKTLNLSKNKLESAWELGKVKGLKLEELWLEGNPLCSTFSDQSAYVSAIRDCFPKLLRLDGRELSAPVIVDIDSSETMKPCKENFTGSETLKHLVLQFLQQSNLCKYFKDSRNIKILKDPYLQRKLLKHTKCPRNVDSLSALPETQHDFTSILVDMWYQTVNTCFLPRAGPESQSLRPL

SEQ ID NO: 39568 - protein, 310 aa, Homo sapiens
MGGNQTSITEFLLLGFPIGPRIQMLLFGLFSLFYIFILLGNGTILGLISLDSRLHTPMYFFLSHLAVVDIACACSTVPQMLVNLLHPAKPISFAGCMTQMFLFLSFAHTECLLLVVMSYDRYVAICHPLRYSTIMTWKVCITLALTSWILGVLLALVHLVLLLPLSFCGPQKLNHFFCEIMAVLKLACADTHINEVMVLAGAVSVLVGAFFSTVISYVHILCAILKIQSGEGCQKAFSICSSHLCVVGLFYGTAIIMYVEPQYESPKEQKKYLLLFHSLFNPMLNPLIYSLRNKEVQGTLKRMLEKKRTS

SEQ ID NO: 39569 - protein, 37 aa, Homo sapiens
MITDVQLAIFANMLGVSLFLLVVLYHYVAVNNPKKQE

SEQ ID NO: 39570 - protein, 347 aa, Homo sapiens
MAWENQTFNSDFILLGIFNHSPPHTFLFFLVLGIFLVAFMGNSVMVLLIYLDTQLHTPMYFLLSQLSLMDLMLICTTVPKMAFNYLSGSKSISMAGCVTQIFFYISLSGSECFLLAVMAYDRYIAICHPLRYTNLMNPKICGLMATFSWILGSTDGIIDAVATFSFSFCGSREIAHFFCEFPSLLILSCNDTSIFEEVIFICCIVMLVFPVAIIIASYARVILAVIHMGSGEGRCKAFTTCSSHLMVVGMYYGAALFMYIRPTSDHSPTQDKMVSVFYTILTPMLNPLIYSLRNKEVTRAFMKILGKGKSESELPHKLYVLLFAKFFFLISIFFYDVKILALIMYIA

SEQ ID NO: 39571 - protein, 346 aa, Homo sapiens
MYRFTDFDVSNISIYLNHVLFYTTQQAGDLEHMETRNYSAMTEFFLVGLSQYPELQLFLFLLCLIMYMIILLGNSLLIIITILDSRLHTPMYFFLGNLSFLDICYTSSSIPPMLIIFMSERKSISFIGCALQMVVSLGLGSTECVLLAVMAYDHYVAICNPLRYSIIMNGVLYVQMAAWSWIIGCLTSLLQTVLTMMLPFCGNNVIDHITCEILALLKLVCSDITINVLIMTVTNIVSLVILLLLIFISYVFILSSILRINCAEGRKKAFSTCSAHSIVVILFYGSALFMYMKPKSKNTNTSDEIIGLSYGVVSPMLNPIIYSLRNKEVKEAVKKVLSRHLHLLKM

SEQ ID NO: 39572 - protein, 1153 aa, Homo sapiens
MSQEPTTYSLFLFLFLSHGVSSYTVPNSRQDLHPLLQNMAEEIIDGSYLNALLDLIQFQSSHVWTDDLSHRVLAYLNSRNVAFTIPSLQAAVENHLEQRLHQPQKLLEDLRKTDAQQFRTAMKCLLEDKKDGLDLKDIIIDLGEIRERALQSPGVNRSLFLITLERCFQMLNSLECVEILGKVLRGSSGSFLQPDITERLPRDLREDAFKNLSAVFKDLYDKTSAHSQRALYSWMTGILQTSSNATDDSASWVSAEHLWVLGRYMVHLSFEEITKISPIEIGLFISYDNATKQLDMVYDITPELAQAFLERISSSNFNMRNTSTIHRQAHELWALEPFPKMLGLLVCFYNDLELLDATVAQVLLYQMIKCSHLRGFQAGVQKLKAELLDIAMENQTLNETLGSLSDAVVGLTYSQLESLSPEAVHGAISTLNQVSGWAKSQVIILSAKYLAHEKVLSFYNVSQMGALLAGVSTQAFCSMKRKDISQVLRSAVSQYVSDLSPAQQQGILSKMVQAEDTAPGIVEIQGAFFKEVSLFDLRRQPGFNSTVLKDKELGRSQALFLYELLLKTTRRPEELLSAGQLVKGVTCSHIDAMSTDFFLAHFQDFQNNFALLSPYQVNCLAWKYWEVSRLSMPPFLLAALPARYLASVPASQCVPFLISLGKSWLDSLVLDSHKKTSVLRKVQQCLDDSIADEYTVDIMGNLLCHLPAAIIDRGISPRAWATALHGLRDCPDLNPEQKAAVRLKLLGQYGLPQHWTAETTKDLGPFLVLFSGDELSSIATKFPEILLQAASKMARTLPTKEFLWAVFQSVRNSSDKIPSYDPMPGCHGVVAPSSDDIFKLAEANACWALEDLRCMEEDTFIRTVELLGAVQGFSRPQLMTLKEKAIQVWDMPSYWREHHIVSLGRIALALNESELEQLDLSSIDTVASLSWQTEWTPGQAESILQGYLDDSGYSIQDLKSFHLVGLGATLCAINITEIPLIKISEFRVVVARIGTLLCSTHVLAEFKRKAEVVFGDPTEWTSSVLQELGTIAAGLTKAELRMLDKDLMPYFQPSAIKCLPDEIFKELSAEQIASLGPENAAAVTHAQRRRLSPLQLQSLQQALDGAKTHSWQDAPASAGPTRTSSSRSPAGALQSWGLWLGCPLLVLMAKLLW

SEQ ID NO: 39573 - protein, 815 aa, Homo sapiens
MFRLGLLVCFYNDLELLDATVAQVLLYQMIKCSHLRGFQAGVQKLKAELLDIAMENQTLNETLGSLSDAVVGLTYSQLESLSPEAVHGAISTLNQVSGWAKSQVIILSAKYLAHEKVLSFYNVSQMGALLAGVSTQAFCSMKRKDISQVLRSAVSQYVSDLSPAQQQGILSKMVQAEDTAPGIVEIQGAFFKEVSLFDLRRQPGFNSTVLKDKELGRSQALFLYELLLKTTRRPEELLSAGQLVKGVTCSHIDAMSTDFFLAHFQDFQNNFALLSPYQVNCLAWKYWEVSRLSMPPFLLAALPARYLASVPASQCVPFLISLGKSWLDSLVLDSHKKTSVLRKVQQCLDDSIADEYTVDIMGNLLCHLPAAIIDRGISPRAWATALHGLRDCPDLNPEQKAAVRLKLLGQYGLPQHWTAETTKDLGPFLVLFSGDELSSIATKFPEILLQAASKMARTLPTKEFLWAVFQSVRNSSDKIPSYDPMPGCHGVVAPSSDDIFKLAEANACWALEDLRCMEEDTFIRTVELLGAVQGFSRPQLMTLKEKAIQVWDMPSYWREHHIVSLGRIALALNESELEQLDLSSIDTVASLSWQTEWTPGQAESILQGYLDDSGYSIQDLKSFHLVGLGATLCAINITEIPLIKISEFRVVVARIGTLLCSTHVLAEFKRKAEVVFGDPTEWTSSVLQELGTIAAGLTKAELRMLDKDLMPYFQPSAIKCLPDEIFKELSAEQIASLGPENAAAVTHAQRRRLSPLQLQSLQQALDGAKTHSWQDAPASAGPTRTSSSRSPAGALQSWGLWLGCPLLVLMAKLLW

SEQ ID NO: 39574 - protein, 425 aa, Homo sapiens
MNVCKDSPRNKVNQKSKVMEKKLPQHWTAETTKDLGPFLVLFSGDELSSIATKFPEILLQAASKMARTLPTKEFLWAVFQSVRNSSDKIPSYDPMPGCHGVVAPSSDDIFKLAEANACWALEDLRCMEEDTFIRTVELLGAVQGFSRPQLMTLKEKAIQVWDMPSYWREHHIVSLGRIALALNESELEQLDLSSIDTVASLSWQTEWTPGQAESILQGYLDDSGYSIQDLKSFHLVGLGATLCAINITEIPLIKISEFRVVVARIGTLLCSTHVLAEFKRKAEVVFGDPTEWTSSVLQELGTIAAGLTKAELRMLDKDLMPYFQPSAIKCLPDEIFKELSAEQIASLGPENAAAVTHAQRRRLSPLQLQSLQQALDGAKTHSWQDAPASAGPTRTSSSRSPAGALQSWGLWLGCPLLVLMAKLLW

SEQ ID NO: 39575 - protein, 1060 aa, Homo sapiens
MGNSITYRDQAAVENHLEQRLHQPQKLLEDLRKTDAQQFRTAMKCLLEDKKDGLDLKDIIIDLGEIRERALQSPGVNRSLFLITLERCFQMLNSLECVEILGKVLRGSSGSFLQPDITERLPRDLREDAFKNLSAVFKDLYDKTSAHSQRALYSWMTGILQTSSNATDDSASWVSAEHLWVLGRYMVHLSFEEITKISPIEIGLFISYDNATKQLDMVYDITPELAQAFLERISSSNFNMRNTSTIHRLGLLVCFYNDLELLDATVAQVLLYQMIKCSHLRGFQAGVQKLKAELLDIAMENQTLNETLGSLSDAVVGLTYSQLESLSPEAVHGAISTLNQVSGWAKSQVIILSAKYLAHEKVLSFYNVSQMGALLAGVSTQAFCSMKRKDISQVLRSAVSQYVSDLSPAQQQGILSKMVQAEDTAPGIVEIQGAFFKEVSLFDLRRQPGFNSTVLKDKELGRSQALFLYELLLKTTRRPEELLSAGQLVKGVTCSHIDAMSTDFFLAHFQDFQNNFALLSPYQVNCLAWKYWEVSRLSMPPFLLAALPARYLASVPASQCVPFLISLGKSWLDSLVLDSHKKTSVLRKVQQCLDDSIADEYTVDIMGNLLCHLPAAIIDRGISPRAWATALHGLRDCPDLNPEQKAAVRLKLLGQYGLPQHWTAETTKDLGPFLVLFSGDELSSIATKFPEILLQAASKMARTLPTKEFLWAVFQSVRNSSDKIPSYDPMPGCHGVVAPSSDDIFKLAEANACWALEDLRCMEEDTFIRTVELLGAVQGFSRPQLMTLKEKAIQVWDMPSYWREHHIVSLGRIALALNESELEQLDLSSIDTVASLSWQTEWTPGQAESILQGYLDDSGYSIQDLKSFHLVGLGATLCAINITEIPLIKISEFRVVVARIGTLLCSTHVLAEFKRKAEVVFGDPTEWTSSVLQELGTIAAGLTKAELRMLDKDLMPYFQPSAIKCLPDEIFKELSAEQIASLGPENAAAVTHAQRRRLSPLQLQSLQQALDGAKTHSWQDAPASAGPTRTSSSRSPAGALQSWGLWLGCPLLVLMAKLLW

SEQ ID NO: 39576 - protein, 1139 aa, Homo sapiens
MSQEPTTYSLFLFLFLSHGVSSYTVPNSRQDLHPLLQNMAEEIIDGSYLNALLDLIQFQSSHVWTDDLSHRVLAYLNSRNVAFTIPSLQAAVENHLEQRLHQPQKLLEDLRKTDAQQFRTAMKCLLEDKKDGLDLKDIIIDLGEIRERALQSPGVNRSLFLITLERCFQMLNSLECVEILGKVLRGSSGSFLQPDITERLPRDLREDAFKNLSAVFKDLYDKTSAHSQRALYSWMTGILQTSSNATDDSASWVSAEHLWVLGRYMVHLSFEEITKISPIEIGLFISYDNATKQLDMVYDITPELAQAFLERISSSNFNMRNTSTIHRLGLLVCFYNDLELLDATVAQVLLYQMIKCSHLRGFQAGVQKLKAELLDIAMENQTLNETLGSLSDAVVGLTYSQLESLSPEAVHGAISTLNQVSGWAKSQVIILSAKYLAHEKVLSFYNVSQMGALLAGVSTQAFCSMKRKDISQVLRSAVSQYVSDLSPAQQQGILSKMVQAEDTAPGIVEIQGAFFKEVSLFDLRRQPGFNSTVLKDKELGRSQALFLYELLLKTTRRPEELLSAGQLVKGVTCSHIDAMSTDFFLAHFQDFQNNFALLSPYQVNCLAWKYWEVSRLSMPPFLLAALPARYLASVPASQCVPFLISLGKSWLDSLVLDSHKKTSVLRKVQQCLDDSIADEYTVDIMGNLLCHLPAAIIDRGISPRAWATALHGLRDCPDLNPEQKAAVRLKLLGQYGLPQHWTAETTKDLGPFLVLFSGDELSSIATKFPEILLQAASKMARTLPTKEFLWAVFQSVRNSSDKIPSYDPMPGCHGVVAPSSDDIFKLAEANACWALEDLRCMEEDTFIRTVELLGAVQGFSRPQLMTLKEKAIQVWDMPSYWREHHIVSLGRIALALNESELEQLDLSSIDTVASLSWQTEWTPGQAESILQGYLDDSGYSIQDLKSFHLVGLGATLCAINITEIPLIKISEFRVVVARIGTLLCSTHVLAEFKRKAEVVFGDPTEWTSSVLQELGTIAAGLTKAELRMLDKDLMPYFQPSAIKCLPDEIFKELSAEQIASLGPENAAAVTHAQRRRLSPLQLQSLQQALDGAKTHSWQDAPASAGPTRTSSSRSPAGALQSWGLWLGCPLLVLMAKLLW

SEQ ID NO: 39577 - protein, 314 aa, Homo sapiens
MMASERNQSSTPTFILLGFSEYPEIQVPLFLVFLFVYTVTVVGNLGMIIIIRLNSKLHTIMCFFLSHLSLTDFCFSTVVTPKLLENLVVEYRTISFSGCIMQFCFACIFGVTETFMLAAMAYDRFVAVCKPLLYTTIMSQKLCALLVAGSYTWGIVCSLILTYFLLDLSFCESTFINNFICDHSVIVSASYSDPYISQRLCFIIAIFNEVSSLIIILTSYMLIFTTIMKMRSASGRQKTFSTCASHLTAITIFHGTILFLYCVPNPKTSSLIVTVASVFYTVAIPMLNPLIYSLRNKDINNMFEKLVVTKLIYH

SEQ ID NO: 39578 - protein, 312 aa, Homo sapiens
MMIKKNASSEDFFILLGFSNWPQLEVVLFVVILIFYLMTLTGNLFIIILSYVDSHLHTPMYFFLSNLSFLDLCHTTSSIPQLLVNLRGPEKTISYAGCMVQLYFVLALGIAECVLLVVMSYDRYVAVCRPLHYTVLMHPRFCHLLAAASWVIGFTISALHSSFTFWVPLCGHRLVDHFFCEVPALLRLSCVDTHANELTLMVMSSIFVLIPLILILTAYGAIARAVLSMQSTTGLQKVFRTCGAHLMVVSLFFIPVMCMYLQPPSENSPDQGKFIALFYTVVTPSLNPLIYTLRNKHVKGAAKRLLGWEWGK

SEQ ID NO: 39579 - protein, 314 aa, Homo sapiens
MTNQTQMMEFLLVRFTENWVLLRLHALLFSLIYLTAVLMNLVIILLMILDHRLHMAMYFFLRHLSFLDLCLISATVPKSILNSVASTDSISFLGCVLQLFLVVLLAGSEIGILTAMSYDRYAAICCPLHCEAVMSRGLCVQLMALSWLNRGALGLLYTAGTFSLNFYGSDELHQFFCDVPALLKLTCSKEHAIISVSVAIGVCYAFSCLVCIVVSYVYIFSAVLRISQRQRQSKAFSNCVPHLIVVTVFLVTGAVAYLKPGSDAPSILDLLVSVFYSVAPPTLNPVIYCLKNKDIKSALSKVLWNVRSSGVMKR

SEQ ID NO: 39580 - protein, 314 aa, Homo sapiens
MSASNITLTHPTAFLLVGIPGLEHLHIWISIPFCLAYTLALLGNCTLLLIIQADAALHEPMYLFLAMLAAIDLVLSSSALPKMLAIFWFRDREINFFACLAQMFFLHSFSIMESAVLLAMAFDRYVAICKPLHYTKVLTGSLITKIGMAAVARAVTLMTPLPFLLRCFHYCRGPVIAHCYCEHMAVVRLACGDTSFNNIYGIAVAMFIVVLDLLLVILSYIFILQAVLLLASQEARYKAFGTCVSHIGAILAFYTTVVISSVMHRVARHAAPHVHILLANFYLLFPPMVNPIIYGVKTKQIRESILGVFPRKDM

SEQ ID NO: 39581 - protein, 308 aa, Homo sapiens
MPTLSFWVCSATPVSPGFFALILLVFVTSIASNVVKIILIHIDSRLHTPMYFLLSQLSLRDILYISTIVPKMLVDQVMSQRAISFAGCTAQHFLYLTLAGAEFFLLGLMSCDRYVAICNPLHYPDLMSRKICWLIVAAAWLGGSIDGFLLTPVTMQFPFCASREINHFFCEVPALLKLSCTDTSAYETAMYVCCIMMLLIPFSVISGSYTRILITVYRMSEAEGRRKAVATCSSHMVVVSLFYGAAMYTYVLPHSYHTPEQDKAVSAFYTILTPMLNPLIYSLRNKDVTGALQKVVGRCVSSGKVTTF

SEQ ID NO: 39582 - protein, 312 aa, Homo sapiens
MVNQSSTPGFLLLGFSEHPGLERTLFVVVLTSYLLTLVGNTLIILLSALDPKLHSPMYFFLSNLSFLDLCFTTSCVPQMLVNLWGPKKTISFLDCSVQIFIFLSLGTTECILLTVMAFDRYVAVCQPLHYATIIHPRLCWQLASVAWVIGLVESVVQTPSTLHLPFCPDRQVDDFVCEVPALIRLSCEDTSYNEIQVAVASVFILVVPLSLILVSYGAITWAVLRINSAKGRRKAFGTCSSHLTVVTLFYSSVIAVYLQPKNPYAQERGKFFGLFYAVGTPSLNPLIYTLRNKEVTRAFRRLLGKEMGLTQS

SEQ ID NO: 39583 - protein, 331 aa, Homo sapiens
MTSRSVCEKMTMTTENPNQTVVSHFFLEGLRYTAKHSSLFFLLFLLIYSITVAGNLLILLTVGSDSHLSLPMYHFLGHLSFLDACLSTVTVPKVMAGLLTLDGKVISFEGCAVQLYCFHFLASTECFLYTVMAYDRYLAICQPLHYPVAMNRRMCAEMAGITWAIGATHAAIHTSLTFRLLYCGPCHIAYFFCDIPPVLKLACTDTTINELVMLASIGIVAAGCLILIVISYIFIVAAVLRIRTAQGRQRAFSPCTAQLTGVLLYYVPPVCIYLQPRSSEAGAGAPAVFYTIVTPMLNPFIYTLRNKEVKHALQRLLCSSFRESTAGSPPP

SEQ ID NO: 39584 - protein, 97 aa, Homo sapiens
MEAPAERALPRLQALARPPPPISYEEELYDCLDYYYLRDFPACGAGRSKGRTRREQALRTNWPAPGGHERKVAQKLLNGQRKRRQRQLHPKMRTRLT

SEQ ID NO: 39585 - protein, 310 aa, Homo sapiens
MPNFTDVTEFTLLGLTCRQELQVLFFVVFLAVYMITLLGNIGMIILISISPQLQSPMYFFLSHLSFADVCFSSNVTPKMLENLLSETKTISYVGCLVQCYFFIAVVHVEVYILAVMAFDRYMAGCNPLLYGSKMSRTVCVRLISVPYVYGFSVSLICTLWTYGLYFCGNFEINHFYCADPPLIQIACGRVHIKEITMIVIAGINFTYSLSVVLISYTLIVVAVLRMRSADGRRKAFSTCGSHLTAVSMFYGTPIFMYLRRPTEESVEQGKMVAVFYTTVIPMLNPMIYSLRNKDVKEAVNKAITKTYVRQ

SEQ ID NO: 39586 - protein, 1801 aa, Homo sapiens
MAVPGSFPLLVEGSWGPDPPKNLNTKLQMYFQSPKRSGGGECEVRQDPRSPSRFLVFFYPEDVRQKVLERKNHELVWQGKGTFKLTVQLPATPDEIDHVFEEELLTKESKTKEDVKEPDVSEELDTKLPLDGGLDKMEDIPEECENISSLVAFENLKANVTDIMLILLVENISGLSNDDFQVEIIRDFDVAVVTFQKHIDTIRFVDDCTKHHSIKQLQLSPRLLEVTNTIRVENLPPGADDYSLKLFFENPYNGGGRVANVEYFPEESSALIEFFDRKVLDTIMATKLDFNKMPLSVFPYYASLGTALYGKEKPLIKLPAPFEESLDLPLWKFLQKKNHLIEEINDEMRRCHCELTWSQLSGKVTIRPAATLVNEGRPRIKTWQADTSTTLSSIRSKYKVNPIKVDPTMWDTIKNDVKDDRILIEFDTLKEMVILAGKSEDVQSIEVQVRELIESTTQKIKREEQSLKEKMIISPGRYFLLCHSSLLDHLLTECPEIEICYDRVTQHLCLKGPSADVYKAKCEIQEKVYTMAQKNIQVSPEIFQFLQQVNWKEFSKCLFIAQKILALYELEGTTVLLTSCSSEALLEAEKQMLSALNYKRIEVENKEVLHGKKWKGLTHNLLKKQNSSPNTVIINELTSETTAEVIITGCVKEVNETYKLLFNFVEQNMKIERLVEVKPSLVIDYLKTEKKLFWPKIKKVNVQVSFNPENKQKGILLTGSKTEVLKAVDIVKQVWDSVCVKSVHTDKPGAKQFFQDKARFYQSEIKRLFGCYIELQENEVMKEGGSPAGQKCFSRTVLAPGVVLIVQQGDLARLPVDVVVNASNEDLKHYGGLAAALSKAAGPELQADCDQIVKREGRLLPGNATISKAGKLPYHHVIHAVGPRWSGYEAPRCVYLLRRAVQLSLCLAEKYKYRSIAIPAISSGVFGFPLGRCVETIVSAIKENFQFKKDGHCLKEIYLVDVSEKTVEAFAEAVKTVFKATLPDTAAPPGLPPAAAGPGKTSWEKGSLVSPGGLQMLLVKEGVQNAKTDVVVNSVPLDLVLSRGPLSKSLLEKAGPELQEELDTVGQGVAVSMGTVLKTSSWNLDCRYVLHVVAPEWRNGSTSSLKIMEDIIRECMEITESLSLKSIAFPAIGTGNLGFPKNIFAELIISEVFKFSSKNQLKTLQEVHFLLHPSDHENIQAFSDEFARRANGNLVSDKIPKAKDTQGFYGTVSSPDSGVYEMKIGSIIFQVASGDITKEEADVIVNSTSNSFNLKAGVSKAILECAGQNVERECSQQAQQRKNDYIITGGGFLRCKNIIHVIGGNDVKSSVSSVLQECEKKNYSSICLPAIGTGNAKQHPDKVAEAIIDAIEDFVQKGSAQSVKKVKVVIFLPQVLDVFYANMKKREGTQLSSQQSVMSKLASFLGFSKQSPQKKNHLVLEKKTESATFRVCGENVTCVEYAISWLQDLIEKEQCPYTSEDECIKDFDEKEYQELNELQKKLNINISLDHKRPLIKVLGISRDVMQARDEIEAMIKRVRLAKEQESRADCISEFIEWQYNDNNTSHCFNKMTNLKLEDARREKKKTVDVKINHRHYTVNLNTYTATDTKGHSLSVQRLTKSKVDIPAHWSDMKQQNFCVVELLPSDPEYNTVASKFNQTCSHFRIEKIERIQNPDLWNSYQAKKKTMDAKNGQTMNEKQLFHGTDAGSVPHVNRNGFNRSYAGKNAVAYGKGTYFAVNANYSANDTYSRPDANGRKHVYYVRVLTGIYTHGNHSLIVPPSKNPQNPTDLYDTVTDNVHHPSLFVAFYDYQAYPEYLITFRK

SEQ ID NO: 39587 - protein, 1720 aa, Homo sapiens
MAVPGSFPLLVEGSWGPDPPKNLNTKLQMYFQSPKRSGGGECEVRQDPRSPSRFLVFFYPEDVRQKVLERKNHELVWQGKGTFKLTVQLPATPDEIDHVFEEELLTKESKTKEDVKEPDTIRFVDDCTKHHSIKQLQLSPRLLEVTNTIRVENLPPGADDYSLKLFFENPYNGGGRVANVEYFPEESSALIEFFDRKVLDTIMATKLDFNKMPLSVFPYYASLGTALYGKEKPLIKLPAPFEESLDLPLWKFLQKKNHLIEEINDEMRRCHCELTWSQLSGKVTIRPAATLVNEGRPRIKTWQADTSTTLSSIRSKYKVNPIKVDPTMWDTIKNDVKDDRILIEFDTLKEMVILAGKSEDVQSIEVQVRELIESTTQKIKREEQSLKEKMIISPGRYFLLCHSSLLDHLLTECPEIEICYDRVTQHLCLKGPSADVYKAKCEIQEKVYTMAQKNIQVSPEIFQFLQQVNWKEFSKCLFIAQKILALYELEGTTVLLTSCSSEALLEAEKQMLSALNYKRIEVENKEVLHGKKWKGLTHNLLKKQNSSPNTVIINELTSETTAEVIITGCVKEVNETYKLLFNFVEQNMKIERLVEVKPSLVIDYLKTEKKLFWPKIKKVNVQVSFNPENKQKGILLTGSKTEVLKAVDIVKQVWDSVCVKSVHTDKPGAKQFFQDKARFYQSEIKRLFGCYIELQENEVMKEGGSPAGQKCFSRTVLAPGVVLIVQQGDLARLPVDVVVNASNEDLKHYGGLAAALSKAAGPELQADCDQIVKREGRLLPGNATISKAGKLPYHHVIHAVGPRWSGYEAPRCVYLLRRAVQLSLCLAEKYKYRSIAIPAISSGVFGFPLGRCVETIVSAIKENFQFKKDGHCLKEIYLVDVSEKTVEAFAEAVKTVFKATLPDTAAPPGLPPAAAGPGKTSWEKGSLVSPGGLQMLLVKEGVQNAKTDVVVNSVPLDLVLSRGPLSKSLLEKAGPELQEELDTVGQGVAVSMGTVLKTSSWNLDCRYVLHVVAPEWRNGSTSSLKIMEDIIRECMEITESLSLKSIAFPAIGTGNLGFPKNIFAELIISEVFKFSSKNQLKTLQEVHFLLHPSDHENIQAFSDEFARRANGNLVSDKIPKAKDTQGFYGTVSSPDSGVYEMKIGSIIFQVASGDITKEEADVIVNSTSNSFNLKAGVSKAILECAGQNVERECSQQAQQRKNDYIITGGGFLRCKNIIHVIGGNDVKSSVSSVLQECEKKNYSSICLPAIGTGNAKQHPDKVAEAIIDAIEDFVQKGSAQSVKKVKVVIFLPQVLDVFYANMKKREGTQLSSQQSVMSKLASFLGFSKQSPQKKNHLVLEKKTESATFRVCGENVTCVEYAISWLQDLIEKEQCPYTSEDECIKDFDEKEYQELNELQKKLNINISLDHKRPLIKVLGISRDVMQARDEIEAMIKRVRLAKEQESRADCISEFIEWQYNDNNTSHCFNKMTNLKLEDARREKKKTVDVKINHRHYTVNLNTYTATDTKGHSLSVQRLTKSKVDIPAHWSDMKQQNFCVVELLPSDPEYNTVASKFNQTCSHFRIEKIERIQNPDLWNSYQAKKKTMDAKNGQTMNEKQLFHGTDAGSVPHVNRNGFNRSYAGKNAVAYGKGTYFAVNANYSANDTYSRPDANGRKHVYYVRVLTGIYTHGNHSLIVPPSKNPQNPTDLYDTVTDNVHHPSLFVAFYDYQAYPEYLITFRK

SEQ ID NO: 39588 - protein, 1518 aa, Homo sapiens
MATKLDFNKMPLSVFPYYASLGTALYGKEKPLIKLPAPFEESLDLPLWKFLQKKNHLIEEINDEMRRCHCELTWSQLSGKVTIRPAATLVNEGRPRIKTWQADTSTTLSSIRSKYKVNPIKVDPTMWDTIKNDVKDDRILIEFDTLKEMVILAGKSEDVQSIEVQVRELIESTTQKIKREEQSLKEKMIISPGRYFLLCHSSLLDHLLTECPEIEICYDRVTQHLCLKGPSADVYKAKCEIQEKVYTMAQKNIQVSPEIFQFLQQVNWKEFSKCLFIAQKILALYELEGTTVLLTSCSSEALLEAEKQMLSALNYKRIEVENKEVLHGKKWKGLTHNLLKKQNSSPNTVIINELTSETTAEVIITGCVKEVNETYKLLFNFVEQNMKIERLVEVKPSLVIDYLKTEKKLFWPKIKKVNVQVSFNPENKQKGILLTGSKTEVLKAVDIVKQVWDSVCVKSVHTDKPGAKQFFQDKARFYQSEIKRLFGCYIELQENEVMKEGGSPAGQKCFSRTVLAPGVVLIVQQGDLARLPVDVVVNASNEDLKHYGGLAAALSKAAGPELQADCDQIVKREGRLLPGNATISKAGKLPYHHVIHAVGPRWSGYEAPRCVYLLRRAVQLSLCLAEKYKYRSIAIPAISSGVFGFPLGRCVETIVSAIKENFQFKKDGHCLKEIYLVDVSEKTVEAFAEAVKTVFKATLPDTAAPPGLPPAAAGPGKTSWEKGSLVSPGGLQMLLVKEGVQNAKTDVVVNSVPLDLVLSRGPLSKSLLEKAGPELQEELDTVGQGVAVSMGTVLKTSSWNLDCRYVLHVVAPEWRNGSTSSLKIMEDIIRECMEITESLSLKSIAFPAIGTGNLGFPKNIFAELIISEVFKFSSKNQLKTLQEVHFLLHPSDHENIQAFSDEFARRANGNLVSDKIPKAKDTQGFYGTVSSPDSGVYEMKIGSIIFQVASGDITKEEADVIVNSTSNSFNLKAGVSKAILECAGQNVERECSQQAQQRKNDYIITGGGFLRCKNIIHVIGGNDVKSSVSSVLQECEKKNYSSICLPAIGTGNAKQHPDKVAEAIIDAIEDFVQKGSAQSVKKVKVVIFLPQVLDVFYANMKKREGTQLSSQQSVMSKLASFLGFSKQSPQKKNHLVLEKKTESATFRVCGENVTCVEYAISWLQDLIEKEQCPYTSEDECIKDFDEKEYQELNELQKKLNINISLDHKRPLIKVLGISRDVMQARDEIEAMIKRVRLAKEQESRADCISEFIEWQYNDNNTSHCFNKMTNLKLEDARREKKKTVDVKINHRHYTVNLNTYTATDTKGHSLSVQRLTKSKVDIPAHWSDMKQQNFCVVELLPSDPEYNTVASKFNQTCSHFRIEKIERIQNPDLWNSYQAKKKTMDAKNGQTMNEKQLFHGTDAGSVPHVNRNGFNRSYAGKNAVAYGKGTYFAVNANYSANDTYSRPDANGRKHVYYVRVLTGIYTHGNHSLIVPPSKNPQNPTDLYDTVTDNVHHPSLFVAFYDYQAYPEYLITFRK

SEQ ID NO: 39589 - protein, 1680 aa, Homo sapiens
MAVPGSFPLLVEGSWGPDPPKNLNTKLQMYFQSPKRSGGGECEVRQDPRSPSRFLVFFYPEDVRQKVLERKNHELVWQGKGTFKLTVQLPATPDEIDHVFEEELLTKESKTKEDVKEPDVSEELDTKLPLDGGLDKMEDIPEECENISSLVAFENLKANVTDIMLILLVENISGLSNDDFQVEIIRDFDVAVVTFQKHIDTIRFVDDCTKHHSIKQLQLSPRLLEVTNTIRVENLPPGADDYSLKLFFENPYNGGGRVANVEYFPEESSALIEFFDRKVLDTIMATKLDFNKMPLSVFPYYASLGTALYGKEKPLIKLPAPFEESLDLPLWKFLQKKNHLIEEINDEMRRCHCELTWSQLSGKVTIRPAATLVNEGRPRIKTWQADTSTTLSSIRSKYKVNPIKVDPTMWDTIKNDVKDDRILIEFDTLKEMVILAGKSEDVQSIEVQVRELIESTTQKIKREEQSLKEKMIISPGRYFLLCHSSLLDHLLTECPEIEICYDRVTQHLCLKGPSADVYKAKCEIQEKVYTMAQKNIQVSPEIFQFLQQVNWKEFSKCLFIAQKILALYELEGTTVLLTSCSSEALLEAEKQMLSALNYKRIEVENKEVLHGKKWKGLTHNLLKKQNSSPNTVIINELTSETTAEVIITGCVKEVNETYKLLFNFVEQNMKIERLVEVKPSLVIDYLKTEKKLFWPKIKKVNVQVSFNPENKQKGILLTGSKTEVLKAVDIVKQVWDSVCVKSVHTDKPGAKQFFQDKARFYQSEIKRLFGCYIELQENEVMKEGGSPAGQKCFSRTVLAPGVVLIVQQGDLARLPVDVVVNASNEDLKHYGGLAAALSKAAGPELQADCDQIVKREGRLLPGNATISKAGKLPYHHVIHAVGPRWSGYEAPRCVYLLRRAVQLSLCLAEKYKYRSIAIPAISSGVFGFPLGRCVETIVSAIKENFQFKKDGHCLKEIYLVDVSEKTVEAFAEAVKTVFKATLPDTAAPPGLPPAAAGPGKTSWEKGSLVSPGGLQMLLVKEGVQNAKTDVVVNSVPLDLVLSRGPLSKSLLEKAGPELQEELDTVGQGVAVSMGTVLKTSSWNLDCRYVLHVVAPEWRNGSTSSLKIMEDIIRECMEITESLSLKSIAFPAIGTGNLGFPKNIFAELIISEVFKFSSKNQLKTLQEVHFLLHPSDHENIQAFSDEFARRANGNLVSDKIPKAKDTQGFYGTVSSPDSGVYEMKIGSIIFQVASGDITKEEADVIVNSTSNSFNLKAGVSKAILECAGQNVERECSQQAQQRKNDYIITGGGFLRCKNIIHVIGGNDVKSSVSSVLQECEKKNYSSICLPAIGTGNAKQHPDKVAEAIIDAIEDFVQKGSAQSVKKVKVVIFLPQVLDVFYANMKKREGTQLSSQQSVMSKLASFLGFSKQSPQKKNHLVLEKKTESATFRVCGENVTCVEYAISWLQDLIEKEQCPYTSEDECIKDFDEKEYQELNELQKKLNINISLDHKRPLIKVLGISRDVMQARDEIEAMIKRVRLAKEQESRADCISEFIEWQYNDNNTSHCFNKMTNLKLEDARREKKKTVDVKINHRHYTVNLNTYTATDTKGHSLSVQRLTKSKVDIPAHWSDMKQQNFCVVELLPSDPEYNTVASKFNQTCSHFRIEKVSLLLECSFWMVEISSVMVLYKIHFHSLPITFF

SEQ ID NO: 39590 - protein, 797 aa, Homo sapiens
MYLRRLLRPLQMLLVKEGVQNAKTDVVVNSVPLDLVLSRGPLSKSLLEKAGPELQEELDTVGQGVAVSMGTVLKTSSWNLDCRYVLHVVAPEWRNGSTSSLKIMEDIIRECMEITESLSLKSIAFPAIGTGNLGFPKNIFAELIISEVFKFSSKNQLKTLQEVHFLLHPSDHENIQAFSDEFARRANGNLVSDKIPKAKDTQGFYGTVSSPDSGVYEMKIGSIIFQVASGDITKEEADVIVNSTSNSFNLKAGVSKAILECAGQNVERECSQQAQQRKNDYIITGGGFLRCKNIIHVIGGNDVKSSVSSVLQECEKKNYSSICLPAIGTGNAKQHPDKVAEAIIDAIEDFVQKGSAQSVKKVKVVIFLPQVLDVFYANMKKREGTQLSSQQSVMSKLASFLGFSKQSPQKKNHLVLEKKTESATFRVCGENVTCVEYAISWLQDLIEKEQCPYTSEDECIKDFDEKEYQELNELQKKLNINISLDHKRPLIKVLGISRDVMQARDEIEAMIKRVRLAKEQESRADCISEFIEWQYNDNNTSHCFNKMTNLKLEDARREKKKTVDVKINHRHYTVNLNTYTATDTKGHSLSVQRLTKSKVDIPAHWSDMKQQNFCVVELLPSDPEYNTVASKFNQTCSHFRIEKIERIQNPDLWNSYQAKKKTMDAKNGQTMNEKQLFHGTDAGSVPHVNRNGFNRSYAGKNAVAYGKGTYFAVNANYSANDTYSRPDANGRKHVYYVRVLTGIYTHGNHSLIVPPSKNPQNPTDLYDTVTDNVHHPSLFVAFYDYQAYPEYLITFRK

SEQ ID NO: 39591 - protein, 951 aa, Homo sapiens
MRGRGNARSSQALGVSWCPATWHPRLDMGRLHRPRSSTSYRNLPHLFLFFLFVGPFSCLGSYSRATELLYSLNEGLPAGVLIGSLAEDLRLLPRSAGRPDPQSQLPERTGAEWNPPLSFSLASRGLSGQYVTLDNRSGELHTSAQEIDREALCVEGGGGTAWSGSVSISSSPSDSCLLLLDVLVLPQEYFRFVKVKIAIRDINDNAPQFPVSQISVWVPENAPVNTRLAIEHPAVDPDVGINGVQTYRLLDYHGMFTLDVEENENGERTPYLIVMGALDRETQDQYVSIIIAEDGGSPPLLGSATLTIGISDINDNCPLFTDSQINVTVYGNATVGTPIAAVQAVDKDLGTNAQITYSYSQKVPQASKDLFHLDENTGVIKLFSKIGGSVLESHKLTILANGPGCIPAVITALVSIIKVIFRPPEIVPRYIANEIDGVVYLKELEPVNTPIAFFTIRDPEGKYKVNCYLDGEGPFRLSPYKPYNNEYLLETTKPMDYELQQFYEVAVVAWNSEGFHVKRVIKVQLLDDNDNAPIFLQPLIELTIEENNSPNAFLTKLYATDADSEERGQVSYFLGPDAPSYFSLDSVTGILTVSTQLDREEKEKYRYTVRAVDCGKPPRESVATVALTVLDKNDNSPRFINKDFSFFVPENFPGYGEIGVISVTDADAGRNGWVALSVVNQSDIFVIDTGKGMLRAKVSLDREQQSSYTLWVEAVDGGEPALSSTAKITILLLDINDNPPLVLFPQSNMSYLLVLPSTLPGSPVTEVYAVDKDTGMNAVIAYSIIGRRGPRPESFRIDPKTGNITLEEALLQTDYGLHRLLVKVSDHGYPEPLHSTVMVNLFVNDTVSNESYIESLLRKEPEINIEEKEPQISIEPTHRKVESVSCMPTLVALSVISLGSITLVTGMGIYICLRKGEKHPREDENLEVQIPLKGKIDLHMRERKPMDISNI

SEQ ID NO: 39592 - protein, 204 aa, Homo sapiens
MDPLSPPLCTLPPGPEPPRFVCYCEGEESGEGDRGGFNLYVTDAAELWSTCFTPDSLAALKARFGLSAAEDITPRFRAACEQQAVALTLQEDRASLTLSGGPSALAFDLSKVPGPEAAPRLRALTLGLAKRVWSLERRLAAAEETAVSPRKSPRPAGPQLFLPDPDPQRGGPGPGVRRRCPGESLINPGFKSKKPAGGVDFDET

SEQ ID NO: 39593 - protein, 106 aa, Homo sapiens
MDPLSPPLCTLPPGPEPPRFVCYCEGEESGEGDRGGFNLYVTDAAELWSTCFTPDSLAALVGNWAGLGAATPLLAVQIVYGATDIWDSPEGSDTLCPPCSCSPPIG

SEQ ID NO: 39594 - protein, 781 aa, Homo sapiens
MAVAEVSRTCLLTVRVLQAHRLPSKDLVTPSDCYVTLWLPTACSHRLQTRTVKNSSSPVWNQSFHFRIHRQLKNVMELKVFDQDLVTGDDPVLSVLFDAGTLRAGEFRRESFSLSPQGEGRLEVEFRLQSLADRGEWLVSNGVLVARELSCLHVQLEETGDQKSSEHRVQLVVPGSCEGPQEASVGTGTFRFHCPACWEQELSIRLQDAPEEQLKAPLSALPSGQVVRLVFPTSQEPLMRVELKKEAGLRELAVRLGFGPCAEEQAFLSRRKQVVAAALRQALQLDGDLQEDEIPVVAIMATGGGIRAMTSLYGQLAGLKELGLLDCVSYITGASGSTWALANLYEDPEWSQKDLAGPTELLKTQVTKNKLGVLAPSQLQRYRQELAERARLGYPSCFTNLWALINEALLHDEPHDHKLSDQREALSHGQNPLPIYCALNTKGQSLTTFEFGEWCEFSPYEVGFPKYGAFIPSELFGSEFFMGQLMKRLPESRICFLEGIWSNLYAANLQDSLYWASEPSQFWDRWVRNQANLDKEQVPLLKIEEPPSTAGRIAEFFTDLLTWRPLAQATHNFLRGLHFHKDYFQHPHFSTWKATTLDGLPNQLTPSEPHLCLLDVGYLINTSCLPLLQPTRDVDLILSLDYNLHGAFQQLQLLGRFCQEQGIPFPPISPSPEEQLQPRECHTFSDPTCPGAPAVLHFPLVSDSFREYSAPGVRRTPEEAAAGEVNLSSSDSPYHYTKVTYSQEDVDKLLHLTHYNVCNNQEQLLEALRQAVQRRRQRRPH

SEQ ID NO: 39595 - protein, 893 aa, Homo sapiens
MAEAALEAVRSELREFPAAARELCVPLAVPYLDKPPTPLHFYRDWVCPNRPCIIRNALQHWPALQKWSLPYFRATVGSTEVSVAVTPDGYADAVRGDRFMMPAERRLPLSFVLDVLEGRAQHPGVLYVQKQCSNLPSELPQLLPDLESHVPWASEALGKMPDAVNFWLGEAAAVTSLHKDHYENLYCVVSGEKHFLFHPPSDRPFIPYELYTPATYQLTEEGTFKVVDEEAMEKAEVSRTCLLTVRVLQAHRLPSKDLVTPSDCYVTLWLPTACSHRLQTRTVKNSSSPVWNQSFHFRIHRQLKNVMELKVFDQDLVTGDDPVLSVLFDAGTLRAGEFRRESFSLSPQGEGRLEVEFRLQSLADRGEWLVSNGVLVARELSCLHVQLEETGDQKSSEHRVQLVVPGSCEGPQEASVGTGTFRFHCPACWEQELSIRLQDAPEEQLKAPLSALPSGQVVRLVFPTSQEPLMRVELKKEAGLRELAVRLGFGPCAEEQAFLSRRKQVVAAALRQALQLDGDLQEDEIPVVAIMATGGGIRAMTSLYGQLAGLKELGLLDCVSYITGASGSTWALANLYEDPEWSQKDLAGPTELLKTQVTKNKLGVLAPSQLQRYRQELAERARLGYPSCFTNLWALINEALLHDEPHDHKLSDQREALSHGQNPLPIYCALNTKGQSLTTFEFGEWCEFSPYEVGFPKYGAFIPSELFGSEFFMGQLMKRLPESRICFLEGIWSNLYAANLQDSLYWASEPSQFWDRWVRNQANLDKEQVPLLKIEEPPSTAGRIAEFFTDLLTWRPLAQATHNFLRGLHFHKDYFQHPHFSTWKATTLDGLPNQLTPSEPHLCLLDVGYLINTSCLPLLQPTRDVDLILSLDYNLHGAFQGSGGHPRRRQLGR

SEQ ID NO: 39596 - protein, 887 aa, Homo sapiens
MAEAALEAVRSELREFPAAARELCVPLAVPYLDKPPTPLHFYRDWVCPNRPCIIRNALQHWPALQKWSLPYFRATVGSTEVSVAVTPDGYADAVRGDRFMMPAERRLPLSFVLDVLEGRAQHPGVLYVQKQCSNLPSELPQLLPDLESHVPWASEALGKMPDAVNFWLGEAAAVTSLHKDHYENLYCVVSGEKHFLFHPPSDRPFIPYELYTPATYQLTEEGTFKVVDEEAMEKAEVSRTCLLTVRVLQAHRLPSKDLVTPSDCYVTLWLPTACSHRLQTRTVKNSSSPVWNQSFHFRIHRQLKNVMELKVFDQDLVTGDDPVLSVLFDAGTLRAGEFRRESFSLSPQGEGRLEVEFRLQSLADRGEWLVSNGVLVARELSCLHVQLEETGDQKSSEHRVQLVVPGSCEGPQEASVGTGTFRFHCPACWEQELSIRLQDAPEEQLKAPLSALPSGQVVRLVFPTSQEPLMRVELKKEAGLRELAVRLGFGPCAEEQAFLSRRKQVVAAALRQALQLDGDLQEDEIPVVAIMATGGGIRAMTSLYGQLAGLKELGLLDCVSYITGASGSTWALANLYEDPEWSQKDLAGPTELLKTQVTKNKLGVLAPSQLQRYRQELAERARLGYPSCFTNLWALINEALLHDEPHDHKLSDQREALSHGQNPLPIYCALNTKGQSLTTFEFGEWCEFSPYEVGFPKYGAFIPSELFGSEFFMGQLMKRLPESRICFLEGIWSNLYAANLQDSLYWASEPSQFWDRWVRNQANLDKEQVPLLKIEEPPSTAGRIAEFFTDLLTWRPLAQATHNFLRGLHFHKDYFQHPHFSTWKATTLDGLPNQLTPSEPHLCLLDVGYLINTSCLPLLQPTRDVDLILSLEALRQAVQRRRQRRPH

SEQ ID NO: 39597 - protein, 482 aa, Homo sapiens
MATGGGIRAMTSLYGQLAGLKELGLLDCVSYITGASGSTWALANLYEDPEWSQKDLAGPTELLKTQVTKNKLGVLAPSQLQRYRQELAERARLGYPSCFTNLWALINEALLHDEPHDHKLSDQREALSHGQNPLPIYCALNTKGQSLTTFEFGEWCEFSPYEVGFPKYGAFIPSELFGSEFFMGQLMKRLPESRICFLEGIWSNLYAANLQDSLYWASEPSQFWDRWVRNQANLDKEQVPLLKIEEPPSTAGRIAEFFTDLLTWRPLAQATHNFLRGLHFHKDYFQHPHFSTWKATTLDGLPNQLTPSEPHLCLLDVGYLINTSCLPLLQPTRDVDLILSLDYNLHGAFQQLQLLGRFCQEQGIPFPPISPSPEEQLQPRECHTFSDPTCPGAPAVLHFPLVSDSFREYSAPGVRRTPEEAAAGEVNLSSSDSPYHYTKVTYSQEDVDKLLHLTHYNVCNNQEQLLEALRQAVQRRRQRRPH

SEQ ID NO: 39598 - protein, 1012 aa, Homo sapiens
MAEAALEAVRSELREFPAAARELCVPLAVPYLDKPPTPLHFYRDWVCPNRPCIIRNALQHWPALQKWSLPYFRATVGSTEVSVAVTPDGYADAVRGDRFMMPAERRLPLSFVLDVLEGRAQHPGVLYVQKQCSNLPSELPQLLPDLESHVPWASEALGKMPDAVNFWLGEAAAVTSLHKDHYENLYCVVSGEKHFLFHPPSDRPFIPYELYTPATYQLTEEGTFKVVDEEAMEKAEVSRTCLLTVRVLQAHRLPSKDLVTPSDCYVTLWLPTACSHRLQTRTVKNSSSPVWNQSFHFRIHRQLKNVMELKVFDQDLVTGDDPVLSVLFDAGTLRAGEFRRESFSLSPQGEGRLEVEFRLQSLADRGEWLVSNGVLVARELSCLHVQLEETGDQKSSEHRVQLVVPGSCEGPQEASVGTGTFRFHCPACWEQELSIRLQDAPEEQLKAPLSALPSGQVVRLVFPTSQEPLMRVELKKEAGLRELAVRLGFGPCAEEQAFLSRRKQVVAAALRQALQLDGDLQEDEIPVVAIMATGGGIRAMTSLYGQLAGLKELGLLDCVSYITGASGSTWALANLYEDPEWSQKDLAGPTELLKTQVTKNKLGVLAPSQLQRYRQELAERARLGYPSCFTNLWALINEALLHDEPHDHKLSDQREALSHGQNPLPIYCALNTKGQSLTTFEFGEWCEFSPYEVGFPKYGAFIPSELFGSEFFMGQLMKRLPESRICFLEGIWSNLYAANLQDSLYWASEPSQFWDRWVRNQANLDKEQVPLLKIEEPPSTAGRIAEFFTDLLTWRPLAQATHNFLRGLHFHKDYFQHPHFSTWKATTLDGLPNQLTPSEPHLCLLDVGYLINTSCLPLLQPTRDVDLILSLDYNLHGAFQQLQLLGRFCQEQGIPFPPISPSPEEQLQPRECHTFSDPTCPGAPAVLHFPLVSDSFREYSAPGVRRTPEEAAAGEVNLSSSDSPYHYTKVTYSQEDVDKLLHLTHYNVCNNQEQLLEALRQAVQRRRQRRPH

SEQ ID NO: 39599 - protein, 2137 aa, Homo sapiens
MVSQVLQLLRQGVWAALTGGWYHDPEQSKFTNSCHLYLWLFLLLLPLALHLAFPPNAIIVFFYCSAVTIFFTIIKLVSYRLHLMFDKGEVIQQKPSRKEEKPNKDKEAKGEHITNHRNPSNNRQIHNGKKEEASRNLSTPPLRCSSRGQSITSHHSSGPLELSAQETVEDLKGVILLEDHPIAPVSSTSPGIKVESLPASQAHMLETTTKSVIPVKPVATETLINGKGKERGGKGQPPLRHRSEGGLVDKGPLKKLPHLSLSQYDLLETDVSFQPWGSENSVLIPEPVSCPRGSIRERVQSKSPQDSLSSSCPQCDTIVAKPVEEPADTSCQVDTSCQGDLPLHQEVDSSDSEVAVTLIDTSQPGDPLSLHEPIKIVITMSSTPNSMTDLESSLHLRVVGTEKTSVKSDAEPTNPGAAGSPNAEQISIPVITLDLPEGGGGGVPCPEGNGSERTPERLKTRVSTNQCSGYGSGEGGNAIKDHSSSSREPWESVSRLTPDTGSESKVGKEGQTNLDPSSCKSSHEKRHARVLSVDSGTDVFLSKSSAEIVNDTEKTMPTSKSDLEAKEGQMPNESNFLEFVSLLESINTSKMTASSQLNGSAEQNEESGLLRDNCSQEKKEEILENEKPSGHSSKQGKPDLQSQDHTSTGPACTQPAKTTAFFQGNRQRQIIYRVTSQQDSSVLQVISGPETSVQEEISVDAMHVFIDEHGEIRSCYLKSGNQKEGPLQPLPSNNDCLSQAREMQVSSSSTTTSESQDPSSGDPAVSALQQQLLLMVARRTQSETPRHVSQDLEASSCSSTQGKFNREQFYKFIIFPGKWIKVWYDRLTLLALLDRTEDIKENVLAILLIVLVSLLGFLTLSQGFCKDMWVLLFCLVMASCQYSLLKSVQPDPASPIHGHNQIITYSRPIYFCVLCGLILLLDTGAKARHPPSYVVYGLKLFSPVFLQSARDYLIVFLYCFPAISLLGLFPQINTFCTYLLEQIDMLFFGGSAVSGITSAVYSVARSVLAAALLHAVCFSAVKEPWSMQHIPALFSAFCGLLVALSYHLSRQSSDPSVLMSFIQCRLFPKFLHQNLAESAADPLPKKMKDSVTDVLKWDLIVCAVVAVLSFAVSASTVFLSLRPFLSIVLFALAGAVGFVTHYVLPQLRKHHPWMWISHPILKNKEYHQREVRDVAHLMWFERLYVWLQCFEKYILYPALILNALTIDAFLISNHRRLGTHWDIFLMIIAGMKLLRTSFCNPVYQFINLSFTVIFFHFDYKDISESFLLDFFMVSILFSKLGDLLHKLQFVLTYVAPWQMAWGSSFHVFAQLFAIPHSAMLFFQTIATSIFSTPLSPFLGSVIFITSYVRPVKFWEKNYNTRRVDNSNTRLAVQIERDPGNDDNNLNSIFYEHLTRTLQESLCGDLVLGRWGNYSSGDCFILASDDLNAFVHLIEIGNGLVTFQLRGLEFRGTYCQQREVEAIMEGDEEDRGCCCCKPGHLPHLLSCNAAFHLRWLTWEITQTQYILEGYSILDNNAATMLQVFDLRRILIRYYIKSIIYYMVTSPKLLSWIKNESLLKSLQPFAKWHYIERDLAMFNINIDDDYVPCLQGITRASFCNVYLEWIQHCARKRQEPSTTLDSDEDSPLVTLSFALCTLGRRALGTAAHNMAISLDSFLYGLHVLFKGDFRITARDEWVFADMDLLHKVVAPAIRMSLKLHQDQFTCPDEYEDPAVLYEAIQSFEKKVVICHEGDPAWRGAVLSNKEELLTLRHVVDEGADEYKVIMLHRSFLSFKVIKVNKECVRGLWAGQQQELIFLRNRNPERGSIQNNKQVLRNLINSSCDQPLGYPMYVSPLTTSYLGTHRQLKNIWGGPITLDRIRTWFWTKWVRMRKDCNARQHSGGNIEDVDGGGAPTTGGNNAPSGGSQESSAEQPRKGGAQHGVSSCEGTQRTGRRKGRSQSVQAHSALSQRPPMLSSSGPILESRQTFLQTSTSVHELAQRLSGSRLSLHASATSLHSQPPPVTTTGHLSVRERAEALIRSSLGSSTSSTLSFLFGKRSFSSALVISGLSAAEGGNTSDTQSSSSVNIVMGPSARAASQATRHLSEPCEPPDATEQGQLHDRCLAEAVADTLGVVCRRASQEDMGLDDTASQQSVSDEQ

SEQ ID NO: 39600 - protein, 286 aa, Homo sapiens
MHVFIDEHGEIRSCYLKSGNQKEGPLQPLPSNNDCLSQAREMQVSSSSTTTSESQDPSSGDPAVSALQQQLLLMVARRTQSETPRHVSQDLEASSCSSTQGKFNREQFYKFIIFPGKWIKVWYDRLTLLALLDRTEDIKENVLAILLIVLVSLLGFLTLSQGFCKDMWVLLFCLVMASCQYSLLKSVQPDPASPIHGHNQIITYSRPIYFCVLCGLILLLDTGAKARHPPSYVVYGLKLFSPVFLQSARDYLIGKIMNSHKDFFTSEKKKDKIISAISSVIFLKSW

SEQ ID NO: 39601 - protein, 777 aa, Homo sapiens
MTFYPFVASSSTRRVDNSNTRLAVQIERDPGNDDNNLNSIFYEHLTRTLQESLCGDLVLGRWGNYSSGDCFILASDDLNAFVHLIEIGNGLVTFQLRGLEFRGTYCQQREVEAIMEGDEEDRGCCCCKPGHLPHLLSCNAAFHLRWLTWEITQTQYILEGYSILDNNAATMLQVFDLRRILIRYYIKSIIYYMVTSPKLLSWIKNESLLKSLQPFAKWHYIERDLAMFNINIDDDYVPCLQGITRASFCNVYLEWIQHCARKRQEPSTTLDSDEDSPLVTLSFALCTLGRRALGTAAHNMAISLDSFLYGLHVLFKGDFRITARDEWVFADMDLLHKVVAPAIRMSLKLHQDQFTCPDEYEDPAVLYEAIQSFEKKVVICHEGDPAWRGAVLSNKEELLTLRHVVDEGADEYKVIMLHRSFLSFKVIKVNKECVRGLWAGQQQELIFLRNRNPERGSIQNNKQVLRNLINSSCDQPLGYPMYVSPLTTSYLGTHRQLKNIWGGPITLDRIRTWFWTKWVRMRKDCNARQHSGGNIEDVDGGGAPTTGGNNAPSGGSQESSAEQPRKGGAQHGVSSCEGTQRTGRRKGRSQSVQAHSALSQRPPMLSSSGPILESRQTFLQTSTSVHELAQRLSGSRLSLHASATSLHSQPPPVTTTGHLSVRERAEALIRSSLGSSTSSTLSFLFGKRSFSSALVISGLSAAEGGNTSDTQSSSSVNIVMGPSARAASQATRVRGWAGLTRTGWDGGTGSWPERGTCLAFPPFCLQNPIPFSMGLPE

SEQ ID NO: 39602 - protein, 421 aa, Homo sapiens
MWVLLFCLVMASCQYSLLKSVQPDPASPIHGHNQIITYSRPIYFCVLCGLILLLDTGAKARHPPSYVVYGLKLFSPVFLQSARDYLIVFLYCFPAISLLGLFPQINTFCTYLLEQIDMLFFGGSAVSGITSAVYSVARSVLAAALLHAVCFSAVKEPWSMQHIPALFSAFCGLLVALSYHLSRQSSDPSVLMSFIQCRLFPKFLHQNLAESAADPLPKKMKDSVTDVLKWDLIVCAVVAVLSFAVSASTVFLSLRPFLSIVLFALAGAVGFVTHYVLPQLRKHHPWMWISHPILKNKEYHQREVRDVAHLMWFERLYVWLQCFEKYILYPALILNALTIDAFLISNHRRLGTHWDIFLMIIAGMKLLRTSFCNPVYQFINLSFTVIFFHFDYKDISESFLLDFFMVSILFSKVFLGYVRQK

SEQ ID NO: 39603 - protein, 675 aa, Homo sapiens
MEGDEEDRGCCCCKPGHLPHLLSCNAAFHLRWLTWEITQTQYILEGYSILDNNAATMLQVFDLRRILIRYYIKSIIYYMVTSPKLLSWIKNESLLKSLQPFAKWHYIERDLAMFNINIDDDYVPCLQGITRASFCNVYLEWIQHCARKRQEPSTTLDSDEDSPLVTLSFALCTLGRRALGTAAHNMAISLDSFLYGLHVLFKGDFRITARDEWVFADMDLLHKVVAPAIRMSLKLHQDQFTCPDEYEDPAVLYEAIQSFEKKVVICHEGDPAWRGAVLSNKEELLTLRHVVDEGADEYKVIMLHRSFLSFKVIKVNKECVRGLWAGQQQELIFLRNRNPERGSIQNNKQVLRNLINSSCDQPLGYPMYVSPLTTSYLGTHRQLKNIWGGPITLDRIRTWFWTKWVRMRKDCNARQHSGGNIEDVDGGGAPTTGGNNAPSGGSQESSAEQPRKGGAQHGVSSCEGTQRTGRRKGRSQSVQAHSALSQRPPMLSSSGPILESRQTFLQTSTSVHELAQRLSGSRLSLHASATSLHSQPPPVTTTGHLSVRERAEALIRSSLGSSTSSTLSFLFGKRSFSSALVISGLSAAEGGNTSDTQSSSSVNIVMGPSARAASQATRHLSEPCEPPDATEQGQLHDRCLAEAVADTLGVVCRRASQEDMGLDDTASQQSVSDEQ

SEQ ID NO: 39604 - protein, 430 aa, Homo sapiens
MDERLLGPPPPGGGRGGLGLVSGEPGGPGEPPGGGDPGGGSGGVPGGRGKQDIGDILQQIMTITDQSLDEAQAKKHALNCHRMKPALFSVLCEIKEKTGLSIRSSQEEEPVDPQLMRLDNMLLAEGVAGPEKGGGSAAAAAAAAASGGGVSPDNSIEHSDYRSKLAQIRHIYHSELEKYEQACNEFTTHVMNLLREQSRTRPVAPKEMERMVSIIHRKFSAIQMQLKQSTCEAVMILRSRFLDARRKRRNFSKQATEVLNEYFYSHLSNPYPSEEAKEELAKKCGITVSQVSNWFGNKRIRYKKNIGKFQEEANIYAVKTAVSVTQGGHSRTSSPTPPSSAGSGGSFNLSGSGDMFLGMPGLNGDSYSASQVESLRHSMGPGGYGDNLGGGQMYSPREMRANGSWQEAVTPSSVTSPTEGPGSVHSDTSN

SEQ ID NO: 39605 - protein, 403 aa, Homo sapiens
MSTSTSPAAMLLRRLRRLSWGSTAVQLFILTVVTFGLLAPLACHRLLHSYFYLRHWHLNQMSQEFLQQSLKEGEAALHYFEELPSANGSVPIVWQATPRPWLVITIITVDRQPGFHYVLQVVSQFHRLLQQCGPQCEGHQLFLCNVERSVSHFDAKLLSKYVPVANRYEGTEDDYGDDPSTNSFEKEKQDYVYCLESSLQTYNPDYVLMVEDDAVPEEQIFPVLEHLLRARFSEPHLRDALYLKLYHPERLQHYINPEPMRILEWVGVGMLLGPLLTWIYMRFASRPGFSWPVMLFFSLYSMGLVELVGRHYFLELRRLSPSLYSVVPASQCCTPAMLFPAPAARRTLTYLSQVYCHKGFGKDMALYSLLRAKGERAYVVEPNLVKHIGLFSSLRYNFHPSLL

SEQ ID NO: 39606 - protein, 253 aa, Homo sapiens
MATHRLVMVRHGESTWNQENRFCGWFDAELSEKGTEEAKRGAKAIKDAKMEFDICYTSVLKRAIRTLWAILDGTDQMWLPVVRTWRLNERHYGGLTGLNKAETAAKHGEEQVKIWRRSFDIPPPPMDEKHPYYNSISKERRYAGLKPGELPTCESLKDTIARALPFWNEEIVPQIKAGKRVLIAAHGNSLRGIVKHLEGMSDQAIMELNLPTGIPIVYELNKELKPTKPMQFLGDEETVRKAMEAVAAQGKAK

SEQ ID NO: 39607 - protein, 524 aa, Homo sapiens
MAEGGGGARRRAPALLEAARARYESLHISDDVFGESGPDSGGNPFYSTSAASRSSSAASSDDEREPPGPPGAAPPPPRAPDAQEPEEDEAGAGWSAALRDRPPPRFEDTGGPTRKMPPSASAVDFFQLFVPDNVLKNMVVQTNMYAKKFQERFGSDGAWVEVTLTEMKAFLGYMISTSISHCESVLSIWSGGFYSNRSLALVMSQARFEKILKYFHVVAFRSSQTTHGLYKVQPFLDSLQNSFDSAFRPSQTQVLHEPLIDEDPVFIATCTERELRKRKKRKFSLWVRQCSSTGFIIQIYVHLKEGGGPDGLDALKNKPQLHSMVARSLCRNAAGKNYIIFTGPSITSLTLFEEFEKQGIYCCGLLRARKSDCTGLPLSMLTNPATPPARGQYQIKMKGNMSLICWYNKGHFRFLTNAYSPVQQGVIIKRKSGEIPCPLAVEAFAAHLSYICRYDDKYSKYFISHKPNKTWQQVFWFAISIAINNAYILYKMSDAYHVKRYSRAQFGERLVRELLGLEDASPTH

SEQ ID NO: 39608 - protein, 455 aa, Homo sapiens
MPDYRTRALFVQSTLGDSAGPELQLLSIVPGRDLQPSDSFTGPTRKMPPSASAVDFFQLFVPDNVLKNMVVQTNMYAKKFQERFGSDGAWVEVTLTEMKAFLGYMISTSISHCESVLSIWSGGFYSNRSLALVMSQARFEKILKYFHVVAFRSSQTTHGLYKVQPFLDSLQNSFDSAFRPSQTQVLHEPLIDEDPVFIATCTERELRKRKKRKFSLWVRQCSSTGFIIQIYVHLKEGGGPDGLDALKNKPQLHSMVARSLCRNAAGKNYIIFTGPSITSLTLFEEFEKQGIYCCGLLRARKSDCTGLPLSMLTNPATPPARGQYQIKMKGNMSLICWYNKGHFRFLTNAYSPVQQGVIIKRKSGEIPCPLAVEAFAAHLSYICRYDDKYSKYFISHKPNKTWQQVFWFAISIAINNAYILYKMSDAYHVKRYSRAQFGERLVRELLGLEDASPTH

SEQ ID NO: 39609 - protein, 2530 aa, Homo sapiens
MTTLLWVFVTLRVITAAVTVETSDHDNSLSVSIPQPSPLRVLLGTSLTIPCYFIDPMHPVTTAPSTAPLAPRIKWSRVSKEKEVVLLVATEGRVRVNSAYQDKVSLPNYPAIPSDATLEVQSLRSNDSGVYRCEVMHGIEDSEATLEVVVKGIVFHYRAISTRYTLDFDRAQRACLQNSAIIATPEQLQAAYEDGFHQCDAGWLADQTVRYPIHTPREGCYGDKDEFPGVRTYGIRDTNETYDVYCFAEEMEGEVFYATSPEKFTFQEAANECRRLGARLATTGQLYLAWQAGMDMCSAGWLADRSVRYPISKARPNCGGNLLGVRTVYVHANQTGYPDPSSRYDAICYTGEDFVDIPENFFGVGGEEDITVQTVTWPDMELPLPRNITEGEARGSVILTVKPIFEVSPSPLEPEEPFTFAPEIGATAFAEVENETGEATRPWGFPTPGLGPATAFTSEDLVVQVTAVPGQPHLPGGVVFHYRPGPTRYSLTFEEAQQACLRTGAVIASPEQLQAAYEAGYEQCDAGWLRDQTVRYPIVSPRTPCVGDKDSSPGVRTYGVRPSTETYDVYCFVDRLEGEVFFATRLEQFTFQEALEFCESHNATLATTGQLYAAWSRGLDKCYAGWLADGSLRYPIVTPRPACGGDKPGVRTVYLYPNQTGLPDPLSRHHAFCFRGISAVPSPGEEEGGTPTSPSGVEEWIVTQVVPGVAAVPVEEETTAVPSGETTAILEFTTEPENQTEWEPAYTPVGTSPLPGILPTWPPTGAATEESTEGPSATEVPSASEEPSPSEVPFPSEEPSPSEEPFPSVRPFPSVELFPSEEPFPSKEPSPSEEPSASEEPYTPSPPVPSWTELPSSGEESGAPDVSGDFTGSGDVSGHLDFSGQLSGDRASGLPSGDLDSSGLTSTVGSGLPVESGLPSGDEERIEWPSTPTVGELPSGAEILEGSASGVGDLSGLPSGEVLETSASGVGDLSGLPSGEVLETTAPGVEDISGLPSGEVLETTAPGVEDISGLPSGEVLETTAPGVEDISGLPSGEVLETTAPGVEDISGLPSGEVLETTAPGVEDISGLPSGEVLETTAPGVEDISGLPSGEVLETAAPGVEDISGLPSGEVLETAAPGVEDISGLPSGEVLETAAPGVEDISGLPSGEVLETAAPGVEDISGLPSGEVLETAAPGVEDISGLPSGEVLETAAPGVEDISGLPSGEVLETAAPGVEDISGLPSGEVLETAAPGVEDISGLPSGEVLETAAPGVEDISGLPSGEVLETAAPGVEDISGLPSGEVLETAAPGVEDISGLPSGEVLETAAPGVEDISGLPSGEVLETAAPGVEDISGLPSGEVLETAAPGVEDISGLPSGEVLETAAPGVEDISGLPSGEVLETAAPGVEDISGLPSGEVLETTAPGVEEISGLPSGEVLETTAPGVDEISGLPSGEVLETTAPGVEEISGLPSGEVLETSTSAVGDLSGLPSGGEVLEISVSGVEDISGLPSGEVVETSASGIEDVSELPSGEGLETSASGVEDLSRLPSGEEVLEISASGFGDLSGLPSGGEGLETSASEVGTDLSGLPSGREGLETSASGAEDLSGLPSGKEDLVGSASGDLDLGKLPSGTLGSGQAPETSGLPSGFSGEYSGVDLGSGPPSGLPDFSGLPSGFPTVSLVDSTLVEVVTASTASELEGRGTIGISGAGEISGLPSSELDISGRASGLPSGTELSGQASGSPDVSGEIPGLFGVSGQPSGFPDTSGETSGVTELSGLSSGQPGISGEASGVLYGTSQPFGITDLSGETSGVPDLSGQPSGLPGFSGATSGVPDLVSGTTSGSGESSGITFVDTSLVEVAPTTFKEEEGLGSVELSGLPSGEADLSGKSGMVDVSGQFSGTVDSSGFTSQTPEFSGLPSGIAEVSGESSRAEIGSSLPSGAYYGSGTPSSFPTVSLVDRTLVESVTQAPTAQEAGEGPSGILELSGAHSGAPDMSGEHSGFLDLSGLQSGLIEPSGEPPGTPYFSGDFASTTNVSGESSVAMGTSGEASGLPEVTLITSEFVEGVTEPTISQELGQRPPVTHTPQLFESSGKVSTAGDISGATPVLPGSGVEVSSVPESSSETSAYPEAGFGASAAPEASREDSGSPDLSETTSAFHEANLERSSGLGVSGSTLTFQEGEASAAPEVSGESTTTSDVGTEAPGLPSATPTASGDRTEISGDLSGHTSQLGVVISTSIPESEWTQQTQRPAETHLEIESSSLLYSGEETHTVETATSPTDASIPASPEWKRESESTAAAPARSCAEEPCGAGTCKETEGHVICLCPPGYTGEHCNIDQEVCEEGWNKYQGHCYRHFPDRETWVDAERRCREQQSHLSSIVTPEEQEFVNNNAQDYQWIGLNDRTIEGDFRWSDGHPMQFENWRPNQPDNFFAAGEDCVVMIWHEKGEWNDVPCNYHLPFTCKKGTVACGEPPVVEHARTFGQKKDRYEINSLVRYQCTEGFVQRHMPTIRCQPSGHWEEPQITCTDPTTYKRRLQKRSSRHPRRSRPSTAH

SEQ ID NO: 39610 - protein, 2492 aa, Homo sapiens
MTTLLWVFVTLRVITAAVTVETSDHDNSLSVSIPQPSPLRVLLGTSLTIPCYFIDPMHPVTTAPSTAPLAPRIKWSRVSKEKEVVLLVATEGRVRVNSAYQDKVSLPNYPAIPSDATLEVQSLRSNDSGVYRCEVMHGIEDSEATLEVVVKGIVFHYRAISTRYTLDFDRAQRACLQNSAIIATPEQLQAAYEDGFHQCDAGWLADQTVRYPIHTPREGCYGDKDEFPGVRTYGIRDTNETYDVYCFAEEMEGEVFYATSPEKFTFQEAANECRRLGARLATTGQLYLAWQAGMDMCSAGWLADRSVRYPISKARPNCGGNLLGVRTVYVHANQTGYPDPSSRYDAICYTGEDFVDIPENFFGVGGEEDITVQTVTWPDMELPLPRNITEGEARGSVILTVKPIFEVSPSPLEPEEPFTFAPEIGATAFAEVENETGEATRPWGFPTPGLGPATAFTSEDLVVQVTAVPGQPHLPGGVVFHYRPGPTRYSLTFEEAQQACLRTGAVIASPEQLQAAYEAGYEQCDAGWLRDQTVRYPIVSPRTPCVGDKDSSPGVRTYGVRPSTETYDVYCFVDRLEGEVFFATRLEQFTFQEALEFCESHNATLATTGQLYAAWSRGLDKCYAGWLADGSLRYPIVTPRPACGGDKPGVRTVYLYPNQTGLPDPLSRHHAFCFRGISAVPSPGEEEGGTPTSPSGVEEWIVTQVVPGVAAVPVEEETTAVPSGETTAILEFTTEPENQTEWEPAYTPVGTSPLPGILPTWPPTGAATEESTEGPSATEVPSASEEPSPSEVPFPSEEPSPSEEPFPSVRPFPSVELFPSEEPFPSKEPSPSEEPSASEEPYTPSPPVPSWTELPSSGEESGAPDVSGDFTGSGDVSGHLDFSGQLSGDRASGLPSGDLDSSGLTSTVGSGLPVESGLPSGDEERIEWPSTPTVGELPSGAEILEGSASGVGDLSGLPSGEVLETSASGVGDLSGLPSGEVLETTAPGVEDISGLPSGEVLETTAPGVEDISGLPSGEVLETTAPGVEDISGLPSGEVLETTAPGVEDISGLPSGEVLETTAPGVEDISGLPSGEVLETTAPGVEDISGLPSGEVLETAAPGVEDISGLPSGEVLETAAPGVEDISGLPSGEVLETAAPGVEDISGLPSGEVLETAAPGVEDISGLPSGEVLETAAPGVEDISGLPSGEVLETAAPGVEDISGLPSGEVLETAAPGVEDISGLPSGEVLETAAPGVEDISGLPSGEVLETAAPGVEDISGLPSGEVLETAAPGVEDISGLPSGEVLETAAPGVEDISGLPSGEVLETAAPGVEDISGLPSGEVLETAAPGVEDISGLPSGEVLETAAPGVEDISGLPSGEVLETAAPGVEDISGLPSGEVLETAAPGVEDISGLPSGEVLETTAPGVEEISGLPSGEVLETTAPGVDEISGLPSGEVLETTAPGVEEISGLPSGEVLETSTSAVGDLSGLPSGGEVLEISVSGVEDISGLPSGEVVETSASGIEDVSELPSGEGLETSASGVEDLSRLPSGEEVLEISASGFGDLSGLPSGGEGLETSASEVGTDLSGLPSGREGLETSASGAEDLSGLPSGKEDLVGSASGDLDLGKLPSGTLGSGQAPETSGLPSGFSGEYSGVDLGSGPPSGLPDFSGLPSGFPTVSLVDSTLVEVVTASTASELEGRGTIGISGAGEISGLPSSELDISGRASGLPSGTELSGQASGSPDVSGEIPGLFGVSGQPSGFPDTSGETSGVTELSGLSSGQPGISGEASGVLYGTSQPFGITDLSGETSGVPDLSGQPSGLPGFSGATSGVPDLVSGTTSGSGESSGITFVDTSLVEVAPTTFKEEEGLGSVELSGLPSGEADLSGKSGMVDVSGQFSGTVDSSGFTSQTPEFSGLPSGIAEVSGESSRAEIGSSLPSGAYYGSGTPSSFPTVSLVDRTLVESVTQAPTAQEAGEGPSGILELSGAHSGAPDMSGEHSGFLDLSGLQSGLIEPSGEPPGTPYFSGDFASTTNVSGESSVAMGTSGEASGLPEVTLITSEFVEGVTEPTISQELGQRPPVTHTPQLFESSGKVSTAGDISGATPVLPGSGVEVSSVPESSSETSAYPEAGFGASAAPEASREDSGSPDLSETTSAFHEANLERSSGLGVSGSTLTFQEGEASAAPEVSGESTTTSDVGTEAPGLPSATPTASGDRTEISGDLSGHTSQLGVVISTSIPESEWTQQTQRPAETHLEIESSSLLYSGEETHTVETATSPTDASIPASPEWKRESESTAADQEVCEEGWNKYQGHCYRHFPDRETWVDAERRCREQQSHLSSIVTPEEQEFVNNNAQDYQWIGLNDRTIEGDFRWSDGHPMQFENWRPNQPDNFFAAGEDCVVMIWHEKGEWNDVPCNYHLPFTCKKGTVACGEPPVVEHARTFGQKKDRYEINSLVRYQCTEGFVQRHMPTIRCQPSGHWEEPQITCTDPTTYKRRLQKRSSRHPRRSRPSTAH

SEQ ID NO: 39611 - protein, 2431 aa, Homo sapiens
MTTLLWVFVTLRVITAAVTVETSDHDNSLSVSIPQPSPLRVLLGTSLTIPCYFIDPMHPVTTAPSTAPLAPRIKWSRVSKEKEVVLLVATEGRVRVNSAYQDKVSLPNYPAIPSDATLEVQSLRSNDSGVYRCEVMHGIEDSEATLEVVVKGIVFHYRAISTRYTLDFDRAQRACLQNSAIIATPEQLQAAYEDGFHQCDAGWLADQTVRYPIHTPREGCYGDKDEFPGVRTYGIRDTNETYDVYCFAEEMEGEVFYATSPEKFTFQEAANECRRLGARLATTGQLYLAWQAGMDMCSAGWLADRSVRYPISKARPNCGGNLLGVRTVYVHANQTGYPDPSSRYDAICYTGEDFVDIPENFFGVGGEEDITVQTVTWPDMELPLPRNITEGEARGSVILTVKPIFEVSPSPLEPEEPFTFAPEIGATAFAEVENETGEATRPWGFPTPGLGPATAFTSEDLVVQVTAVPGQPHLPGGVVFHYRPGPTRYSLTFEEAQQACLRTGAVIASPEQLQAAYEAGYEQCDAGWLRDQTVRYPIVSPRTPCVGDKDSSPGVRTYGVRPSTETYDVYCFVDRLEGEVFFATRLEQFTFQEALEFCESHNATLATTGQLYAAWSRGLDKCYAGWLADGSLRYPIVTPRPACGGDKPGVRTVYLYPNQTGLPDPLSRHHAFCFRGISAVPSPGEEEGGTPTSPSGVEEWIVTQVVPGVAAVPVEEETTAVPSGETTAILEFTTEPENQTEWEPAYTPVGTSPLPGILPTWPPTGAATEESTEGPSATEVPSASEEPSPSEVPFPSEEPSPSEEPFPSVRPFPSVELFPSEEPFPSKEPSPSEEPSASEEPYTPSPPVPSWTELPSSGEESGAPDVSGDFTGSGDVSGHLDFSGQLSGDRASGLPSGDLDSSGLTSTVGSGLPVESGLPSGDEERIEWPSTPTVGELPSGAEILEGSASGVGDLSGLPSGEVLETSASGVGDLSGLPSGEVLETTAPGVEDISGLPSGEVLETTAPGVEDISGLPSGEVLETTAPGVEDISGLPSGEVLETTAPGVEDISGLPSGEVLETTAPGVEDISGLPSGEVLETTAPGVEDISGLPSGEVLETAAPGVEDISGLPSGEVLETAAPGVEDISGLPSGEVLETAAPGVEDISGLPSGEVLETAAPGVEDISGLPSGEVLETAAPGVEDISGLPSGEVLETAAPGVEDISGLPSGEVLETAAPGVEDISGLPSGEVLETAAPGVEDISGLPSGEVLETAAPGVEDISGLPSGEVLETAAPGVEDISGLPSGEVLETAAPGVEDISGLPSGEVLETAAPGVEDISGLPSGEVLETAAPGVEDISGLPSGEVLETAAPGVEDISGLPSGEVLETAAPGVEDISGLPSGEVLETAAPGVEDISGLPSGEVLETTAPGVEEISGLPSGEVLETTAPGVDEISGLPSGEVLETTAPGVEEISGLPSGEVLETSTSAVGDLSGLPSGGEVLEISVSGVEDISGLPSGEVVETSASGIEDVSELPSGEGLETSASGVEDLSRLPSGEEVLEISASGFGDLSGLPSGGEGLETSASEVGTDLSGLPSGREGLETSASGAEDLSGLPSGKEDLVGSASGDLDLGKLPSGTLGSGQAPETSGLPSGFSGEYSGVDLGSGPPSGLPDFSGLPSGFPTVSLVDSTLVEVVTASTASELEGRGTIGISGAGEISGLPSSELDISGRASGLPSGTELSGQASGSPDVSGEIPGLFGVSGQPSGFPDTSGETSGVTELSGLSSGQPGISGEASGVLYGTSQPFGITDLSGETSGVPDLSGQPSGLPGFSGATSGVPDLVSGTTSGSGESSGITFVDTSLVEVAPTTFKEEEGLGSVELSGLPSGEADLSGKSGMVDVSGQFSGTVDSSGFTSQTPEFSGLPSGIAEVSGESSRAEIGSSLPSGAYYGSGTPSSFPTVSLVDRTLVESVTQAPTAQEAGEGPSGILELSGAHSGAPDMSGEHSGFLDLSGLQSGLIEPSGEPPGTPYFSGDFASTTNVSGESSVAMGTSGEASGLPEVTLITSEFVEGVTEPTISQELGQRPPVTHTPQLFESSGKVSTAGDISGATPVLPGSGVEVSSVPESSSETSAYPEAGFGASAAPEASREDSGSPDLSETTSAFHEANLERSSGLGVSGSTLTFQEGEASAAPEVSGESTTTSDVGTEAPGLPSATPTASGDRTEISGDLSGHTSQLGVVISTSIPESEWTQQTQRPAETHLEIESSSLLYSGEETHTVETATSPTDASIPASPEWKRESESTAADQEVCEEGWNKYQGHCYRHFPDRETWVDAERRCREQQSHLSSIVTPEEQEFVNNNAQDYQWIGLNDRTIEGDFRWSDGHPMQFENWRPNQPDNFFAAGEDCVVMIWHEKGEWNDVPCNYHLPFTCKKGTATTYKRRLQKRSSRHPRRSRPSTAH

SEQ ID NO: 39612 - protein, 4391 aa, Homo sapiens
MGWRAAGALLLALLLHGRLLAVTHGLRAYDGLSLPEDIETVTASQMRWTHSYLSDDEDMLADSISGDDLGSGDLGSGDFQMVYFRALVNFTRSIEYSPQLEDAGSREFREVSEAVVDTLESEYLKIPGDQVVSVVFIKELDGWVFVELDVGSEGNADGAQIQEMLLRVISSGSVASYVTSPQGFQFRRLGTVPQFPRACTEAEFACHSYNECVALEYRCDRRPDCRDMSDELNCEEPVLGISPTFSLLVETTSLPPRPETTIMRQPPVTHAPQPLLPGSVRPLPCGPQEAACRNGHCIPRDYLCDGQEDCEDGSDELDCGPPPPCEPNEFPCGNGHCALKLWRCDGDFDCEDRTDEANCPTKRPEEVCGPTQFRCVSTNMCIPASFHCDEESDCPDRSDEFGCMPPQVVTPPRESIQASRGQTVTFTCVAIGVPTPIINWRLNWGHIPSHPRVTVTSEGGRGTLIIRDVKESDQGAYTCEAMNARGMVFGIPDGVLELVPQRGPCPDGHFYLEHSAACLPCFCFGITSVCQSTRRFRDQIRLRFDQPDDFKGVNVTMPAQPGTPPLSSTQLQIDPSLHEFQLVDLSRRFLVHDSFWALPEQFLGNKVDSYGGSLRYNVRYELARGMLEPVQRPDVVLMGAGYRLLSRGHTPTQPGALNQRQVQFSEEHWVHESGRPVQRAELLQVLQSLEAVLIQTVYNTKMASVGLSDIAMDTTVTHATSHGRAHSVEECRCPIGYSGLSCESCDAHFTRVPGGPYLGTCSGCNCNGHASSCDPVYGHCLNCQHNTEGPQCNKCKAGFFGDAMKATATSCRPCPCPYIDASRRFSDTCFLDTDGQATCDACAPGYTGRRCESCAPGYEGNPIQPGGKCRPVNQEIVRCDERGSMGTSGEACRCKNNVVGRLCNECADGSFHLSTRNPDGCLKCFCMGVSRHCTSSSWSRAQLHGASEEPGHFSLTNAASTHTTNEGIFSPTPGELGFSSFHRLLSGPYFWSLPSRFLGDKVTSYGGELRFTVTQRSQPGSTPLHGQPLVVLQGNNIILEHHVAQEPSPGQPSTFIVPFREQAWQRPDGQPATREHLLMALAGIDTLLIRASYAQQPAESRVSGISMDVAVPEETGQDPALEVEQCSCPPGYRGPSCQDCDTGYTRTPSGLYLGTCERCSCHGHSEACEPETGACQGCQHHTEGPRCEQCQPGYYGDAQRGTPQDCQLCPCYGDPAAGQAAHTCFLDTDGHPTCDACSPGHSGRHCERCAPGYYGNPSQGQPCQRDSQVPGPIGCNCDPQGSVSSQCDAAGQCQCKAQVEGLTCSHCRPHHFHLSASNPDGCLPCFCMGITQQCASSAYTRHLISTHFAPGDFQGFALVNPQRNSRLTGEFTVEPVPEGAQLSFGNFAQLGHESFYWQLPETYQGDKVAAYGGKLRYTLSYTAGPQGSPLSDPDVQITGNNIMLVASQPALQGPERRSYEIMFREEFWRRPDGQPATREHLLMALADLDELLIRATFSSVPLAASISAVSLEVAQPGPSNRPRALEVEECRCPPGYIGLSCQDCAPGYTRTGSGLYLGHCELCECNGHSDLCHPETGACSQCQHNAAGEFCELCAPGYYGDATAGTPEDCQPCACPLTNPENMFSRTCESLGAGGYRCTACEPGYTGQYCEQCGPGYVGNPSVQGGQCLPETNQAPLVVEVHPARSIVPQGGSHSLRCQVSGSPPHYFYWSREDGRPVPSGTQQRHQGSELHFPSVQPSDAGVYICTCRNLHQSNTSRAELLVTEAPSKPITVTVEEQRSQSVRPGADVTFICTAKSKSPAYTLVWTRLHNGKLPTRAMDFNGILTIRNVQLSDAGTYVCTGSNMFAMDQGTATLHVQASGTLSAPVVSIHPPQLTVQPGQLAEFRCSATGSPTPTLEWTGGPGGQLPAKAQIHGGILRLPAVEPTDQAQYLCRAHSSAGQQVARAVLHVHGGGGPRVQVSPERTQVHAGRTVRLYCRAAGVPSATITWRKEGGSLPPQARSERTDIATLLIPAITTADAGFYLCVATSPAGTAQARIQVVVLSASDASPPPVKIESSSPSVTEGQTLDLNCVVAGSAHAQVTWYRRGGSLPPHTQVHGSRLRLPQVSPADSGEYVCRVENGSGPKEASITVSVLHGTHSGPSYTPVPGSTRPIRIEPSSSHVAEGQTLDLNCVVPGQAHAQVTWHKRGGSLPARHQTHGSLLRLHQVTPADSGEYVCHVVGTSGPLEASVLVTIEASVIPGPIPPVRIESSSSTVAEGQTLDLSCVVAGQAHAQVTWYKRGGSLPARHQVRGSRLYIFQASPADAGQYVCRASNGMEASITVTVTGTQGANLAYPAGSTQPIRIEPSSSQVAEGQTLDLNCVVPGQSHAQVTWHKRGGSLPVRHQTHGSLLRLYQASPADSGEYVCRVLGSSVPLEASVLVTIEPAGSVPALGVTPTVRIESSSSQVAEGQTLDLNCLVAGQAHAQVTWHKRGGSLPARHQVHGSRLRLLQVTPADSGEYVCRVVGSSGTQEASVLVTIQQRLSGSHSQGVAYPVRIESSSASLANGHTLDLNCLVASQAPHTITWYKRGGSLPSRHQIVGSRLRIPQVTPADSGEYVCHVSNGAGSRETSLIVTIQGSGSSHVPSVSPPIRIESSSPTVVEGQTLDLNCVVARQPQAIITWYKRGGSLPSRHQTHGSHLRLHQMSVADSGEYVCRANNNIDALEASIVISVSPSAGSPSAPGSSMPIRIESSSSHVAEGETLDLNCVVPGQAHAQVTWHKRGGSLPSHHQTRGSRLRLHHVSPADSGEYVCRVMGSSGPLEASVLVTIEASGSSAVHVPAPGGAPPIRIEPSSSRVAEGQTLDLKCVVPGQAHAQVTWHKRGGNLPARHQVHGPLLRLNQVSPADSGEYSCQVTGSSGTLEASVLVTIEPSSPGPIPAPGLAQPIYIEASSSHVTEGQTLDLNCVVPGQAHAQVTWYKRGGSLPARHQTHGSQLRLHLVSPADSGEYVCRAASGPGPEQEASFTVTVPPSEGSSYRLRSPVISIDPPSSTVQQGQDASFKCLIHDGAAPISLEWKTRNQELEDNVHISPNGSIITIVGTRPSNHGTYRCVASNAYGVAQSVVNLSVHGPPTVSVLPEGPVWVKVGKAVTLECVSAGEPRSSARWTRISSTPAKLEQRTYGLMDSHAVLQISSAKPSDAGTYVCLAQNALGTAQKQVEVIVDTGAMAPGAPQVQAEEAELTVEAGHTATLRCSATGSPAPTIHWSKLRSPLPWQHRLEGDTLIIPRVAQQDSGQYICNATSPAGHAEATIILHVESPPYATTVPEHASVQAGETVQLQCLAHGTPPLTFQWSRVGSSLPGRATARNELLHFERAAPEDSGRYRCRVTNKVGSAEAFAQLLVQGPPGSLPATSIPAGSTPTVQVTPQLETKSIGASVEFHCAVPSDRGTQLRWFKEGGQLPPGHSVQDGVLRIQNLDQSCQGTYICQAHGPWGKAQASAQLVIQALPSVLINIRTSVQTVVVGHAVEFECLALGDPKPQVTWSKVGGHLRPGIVQSGGVVRIAHVELADAGQYRCTATNAAGTTQSHVLLLVQALPQISMPQEVRVPAGSAAVFPCIASGYPTPDISWSKLDGSLPPDSRLENNMLMLPSVRPQDAGTYVCTATNRQGKVKAFAHLQVPERVVPYFTQTPYSFLPLPTIKDAYRKFEIKITFRPDSADGMLLYNGQKRVPGSPTNLANRQPDFISFGLVGGRPEFRFDAGSGMATIRHPTPLALGHFHTVTLLRSLTQGSLIVGDLAPVNGTSQGKFQGLDLNEELYLGGYPDYGAIPKAGLSSGFIGCVRELRIQGEEIVFHDLNLTAHGISHCPTCRDRPCQNGGQCHDSESSSYVCVCPAGFTGSRCEHSQALHCHPEACGPDATCVNRPDGRGYTCRCHLGRSGLRCEEGVTVTTPSLSGAGSYLALPALTNTHHELRLDVEFKPLAPDGVLLFSGGKSGPVEDFVSLAMVGGHLEFRYELGSGLAVLRSAEPLALGRWHRVSAERLNKDGSLRVNGGRPVLRSSPGKSQGLNLHTLLYLGGVEPSVPLSPATNMSAHFRGCVGEVSVNGKRLDLTYSFLGSQGIGQCYDSSPCERQPCQHGATCMPAGEYEFQCLCRDGFKGDLCEHEENPCQLREPCLHGGTCQGTRCLCLPGFSGPRCQQGSGHGIAESDWHLEGSGGNDAPGQYGAYFHDDGFLAFPGHVFSRSLPEVPETIELEVRTSTASGLLLWQGVEVGEAGQGKDFISLGLQDGHLVFRYQLGSGEARLVSEDPINDGEWHRVTALREGRRGSIQVDGEELVSGRSPGPNVAVNAKGSVYIGGAPDVATLTGGRFSSGITGCVKNLVLHSARPGAPPPQPLDLQHRAQAGANTRPCPS

SEQ ID NO: 39613 - protein, 648 aa, Homo sapiens [sequence omitted]

SEQ ID NO: 39614 - protein, 668 aa, Homo sapiens
MEHIQGAWKTISNGFGFKDAVFDGSSCISPTIVQQFGYQRRASDDGKLTDPSKTSNTIRVFLPNKQRTVVNVRNGMSLHDCLMKALKVRGLQPECCAVFRLLHEHKGKKARLDWNTDAASLIGEELQVDFLDHVPLTTHNFARKTFLKLAFCDICQKFLLNGFRCQTCGYKFHEHCSTKVPTMCVDWSNIRQLLLFPNSTIGDSGVPALPSLTMRRMRESVSRMPVSSQHRYSTPHAFTFNTSSPSSEGSLSQRQRSTSTPNVHMVSTTLPVDSRMIENNNLSASPRAWSRRFCLRGRDAIRSHSESASPSALSSSPNNLSPTGWSQPKTPVPAQRERAPVSGTQEKNKIRPRGQRDSSYYWEIEASEVMLSTRIGSGSFGTVYKGKWHGDVAVKILKVVDPTPEQFQAFRNEVAVLRKTRHVNILLFMGYMTKDNLAIVTQWCEGSSLYKHLHVQETKFQMFQLIDIARQTAQGMDYLHAKNIIHRDMKSNNIFLHEGLTVKIGDFGLATVKSRWSGSQQVEQPTGSVLWMAPEVIRMQDNNPFSFQSDVYSYGIVLYELMTGELPYSHINNRDQIIFMVGRGYASPDLSKLYKNCPKAMKRLVADCVKKVKEERPLFPQILSSIELLQHSLPKINRSASEPSLHRAAHTEDINACTLTTSPRLPVF

SEQ ID NO: 39615 - protein, 183 aa, Homo sapiens
MREYKVVVLGSGGVGKSALTVQFVTGTFIEKYDPTIEDFYRKEIEVDSSPSVLEILDTAGTEQFASMRDLYIKNGQGFILVYSLVNQQSFQDIKPMRDQIIRVKRYEKVPVILVGNKVDLESEREVSSSEGRALAEEWGCPFMETSAKSKTMVDELFAEIVRQMNYAAQPDKDDPCCSACNIQ

SEQ ID NO: 39616 - protein, 183 aa, Homo sapiens
MREYKVVVLGSGGVGKSALTVQFVTGSFIEKYDPTIEDFYRKEIEVDSSPSVLEILDTAGTEQFASMRDLYIKNGQGFILVYSLVNQQSFQDIKPMRDQIIRVKRYERVPMILVGNKVDLEGEREVSYGEGKALAEEWSCPFMETSAKNKASVDELFAEIVRQMNYAAQPNGDEGCCSACVIL

SEQ ID NO: 39617 - protein, 183 aa, Homo sapiens
MREYKVVVLGSGGVGKSALTVQFVTGTFIEKYDPTIEDFYRKEIEVDSSPSVLEILDTAGTEQFASMRDLYIKNGQGFILVYSLVNQQSFQDIKPMRDQIVRVKRYEKVPLILVGNKVDLEPEREVMSSEGRALAQEWGCPFMETSAKSKSMVDELFAEIVRQMNYSSLPEKQDQCCTTCVVQ

SEQ ID NO: 39618 - protein, 737 aa, Homo sapiens
MEDAGEDPTTFAAHSLPSDPRLLATVTNAYLGTRVFHDTLHVSGVYNGAGGDTHRAMLPSPLNVRLEAPAGMGEQLTETFALDTNTGSFLHTLEGPRFRASQCIYAHRTLPHVLAFRVSIARLAPGSGPITLLLRSAFSPESPDLDLHQGPDFQGARYLYGHTLTPEQPGGPQQEVHMLWTPAPPDLTLGEGEEARTWDFLTAVGGSQAEAQACLTEALQLQARGALYTAHAQAWAQLWVECGLDVVGPLQLRQALRGSLYYLLSALPQPKAPGYICHGLSPGGLSNGSREECYWGHVFWDQDLWMFPSILMFHPEAARAILEYRIRTLDGALENAQNLGYQGAKFAWESADSGLEVCPEDIYGVQEVHVNGAVVLAFELYYHTTQDLQLFREAGGWDVVRAVAEFWCSRVEWSPREEKYHLRGVMSPDEYHSGVNNSVYTNVLVQNSLRFAAALAQDLGLPIPSQWLAVADKIKVPFDVEQNFHPEFDGYEPGEVVKQADVVLLGYPVPFSLSPDVRRKNLEIYEAVTSPQGPAMTWSMFAVGWMELKDAVRARGLLDRSFANMAEPFKVWTENADGSGAVNFLTGMGGFLQAVVFGCTGFRVTRAGVTFDPVCLSGISRVSVSGIFYQGNKLNFSFSEDSVTVEVTARAGPWAPHLEAELWPSQSRLSLLPGHKVSFPRSAGRIQMSPPKLPGSSSSEFPGRTFSDVRDPLQSPLWVTLGSSSPTESLTVDPASE

SEQ ID NO: 39619 - protein, 354 aa, Homo sapiens
MEDAGEDPTTFAAHSLPSDPRLLATVTNAYLGTRVFHDTLHVSGVYNGAGGDTHRAMLPSPLNVRLEAPAGMGEQLTETFALDTNTGSFLHTLEGPRFRASQCIYAHRTLPHVLAFRVSIARLAPGSGPITLLLRSAFSPESPDLDLHQGPDFQGARYLYGHTLTPEQPGGPQQEVHMLWTPAPPDLTLGEGEEARTWDFLTAVGGSQAEAQACLTEALQLQARGALYTAHAQAWAQLWVECGLDVVGPLQLRQALRGSLYYLLSALPQPKAPGYICHGLSPGGLSNGSREECYWGHVFWDQVSTVHPAPATQQATHGGPRSLPSLGPGLWLGKHRDCGKREEAWKVCRSLVEE

SEQ ID NO: 39620 - protein, 82 aa, Homo sapiens
MDPGPKGHCHCGGHGHPPGHCGPPPGHGPGPCGPPPHHGPGPCGPPPGHGPGPCGPPPHHGPGPCGPPPGHGPGHPPPGPHH

SEQ ID NO: 39621 - protein, 323 aa, Homo sapiens
MSAVCGGAARMLRTPGRHGYAAEFSPYLPGRLACATAQHYGIAGCGTLLILDPDEAGLRLFRSFDWNDGLFDVTWSENNEHVLITCSGDGSLQLWDTAKAAGPLQVYKEHAQEVYSVDWSQTRGEQLVVSGSWDQTVKLWDPTVGKSLCTFRGHESIIYSTIWSPHIPGCFASASGDQTLRIWDVKAAGVRIVIPAHQAEILSCDWCKYNENLLVTGAVDCSLRGWDLRNVRQPVFELLGHTYAIRRVKFSPFHASVLASCSYDFTVRFWNFSKPDSLLETVEHHTEFTCGLDFSLQSPTQVADCSWDETIKIYDPACLTIPA

SEQ ID NO: 39622 - protein, 280 aa, Homo sapiens
MSAVCGGAARMLRTPGRHGYAAEFSPYLPGRLACATAQHYGIAGCGTLLILDPDEAGLRLFRSFDWNDGLFDVTWSENNEHVLITCSGDGSLQLWDTAKAAGPLQVYKEHAQEVYSVDWSQTRGEQLVVSGSWDQTVKLWDPTVGKSLCTFRGHESIIYSTIWSPHIPGCFASASGDQTLRIWDVKAAGVRIVIPAHQAEILSCDWCKYNENLLVTGAVDCSLRGWDLRNVRQPVFELLGHTYAIRRVKMESCPVTQTRSQLTATSAFWVQAVLLPQPTE

SEQ ID NO: 39623 - protein, 2839 aa, Homo sapiens
MPITQDNAVLHLPLLYQWLQNSLQEGGDGPEQRLCQAAIQKLQEYIQLNFAVDESTVPPDHSPPEMEICTVYLTKELGDTETVGLSFGNIPVFGDYGEKRRGGKKRKTHQGPVLDVGCIWVTELRKNSPAGKSGKVRLRDEILSLNGQLMVGVDVSGASYLAEQCWNGGFIYLIMLRRFKHKAHSTYNGNSSNSSEPGETPTLELGDRTAKKGKRTRKFGVISRPPANKAPEESKGSAGCEVSSDPSTELENGPDPELGNGHVFQLENGPDSLKEVAGPHLERSEVDRGTEHRIPKTDAPLTTSNDKRRFSKGGKTDFQSSDCLAREEVGRIWKMELLKESDGLGIQVSGGRGSKRSPHAIVVTQVKEGGAAHRDGRLSLGDELLVINGHLLVGLSHEEAVAILRSATGMVQLVVASKENSAEDLLRLTSKSLPDLTSSVEDVSSWTDNEDQEADGEEDEGTSSSVQRAMPGTDEPQDVCGAEESKGNLESPKQGSNKIKLKSRLSGGVHRLESVEEYNELMVRNGDPRIRMLEVSRDGRKHSLPQLLDSSSASQEYHIVKKSTRSLSTTQVESPWRLIRPSVISIIGLYKEKGKGLGFSIAGGRDCIRGQMGIFVKTIFPNGSAAEDGRLKEGDEILDVNGIPIKGLTFQEAIHTFKQIRSGLFVLTVRTKLVSPSLTPCSTPTHMSRSASPNFNTSGGASAGGSDEGSSSSLGRKTPGPKDRIVMEVTLNKEPRVGLGIGACCLALENSPPGIYIHSLAPGSVAKMESNLSRGDQILEVNSVNVRHAALSKVHAILSKCPPGPVRLVIGRHPNPKVSEQEMDEVIARSTYQESKEANSSPGLGTPLKSPSLAKKDSLISESELSQYFAHDVPGPLSDFMVAGSEDEDHPGSGCSTSEEGSLPPSTSTHKEPGKPRANSLVTLGSHRASGLFHKQVTVARQASLPGSPQALRNPLLRQRKVGCYDANDASDEEEFDREGDCISLPGALPGPIRPLSEDDPRRVSISSSKGMDVHNQEERPRKTLVSKAISAPLLGSSVDLEESIPEGMVDAASYAANLTDSAEAPKGSPGSWWKKELSGSSSAPKLEYTVRTDTQSPTNTGSPSSPQQKSEGLGSRHRPVARVSPHCKRSEAEAKPSGSQTVNLTGRANDPCDLDSRVQATSVKVTVAGFQPGGAVEKESLGKLTTGDACVSTSCELASALSHLDASHLTENLPKAASELGQQPMTELDSSSDLISSPGKKGAAHPDPSKTSVDTGQVSRPENPSQPASPRVTKCKARSPVRLPHEGSPSPGEKAAAPPDYSKTRSASETSTPHNTRRVAALRGAGPGAEGMTPAGAVLPGDPLTSQEQRQGAPGNHSKALEMTGIHAPESSQEPSLLEGADSVSSRAPQASLSMLPSTDNTKEACGHVSGHCCPGGSRESPVTDIDSFIKELDASAARSPSSQTGDSGSQEGSAQGHPPAGAGGGSSCRAEPVPGGQTSSPRRAWAAGAPAYPQWASQPSVLDSINPDKHFTVNKNFLSNYSRNFSSFHEDSTSLSGLGDSTEPSLSSMYGDAEDSSSDPESLTEAPRASARDGWSPPRSRVSLHKEDPSESEEEQIEICSTRGCPNPPSSPAHLPTQAAICPASAKVLSLKYSTPRESVASPREKAACLPGSYTSGPDSSQPSSLLEMSSQEHETHADISTSQNHRPSCAEETTEVTSASSAMENSPLSKVARHFHSPPIILSSPNMVNGLEHDLLDDETLNQYETSINAAASLSSFSVDVPKNGESVLENLHISESQDLDDLLQKPKMIARRPIMAWFKEINKHNQGTHLRSKTEKEQPLMPARSPDSKIQMVSSSQKKGVTVPHSPPQPKTNLENKDLSKKSPAEMLLTNGQKAKCGPKLKRLSLKGKAKVNSEAPAANAVKAGGTDHRKPLISPQTSHKTLSKAVSQRLHVADHEDPDRNTTAAPRSPQCVLESKPPLATSGPLKPSVSDTSIRTFVSPLTSPKPVPEQGMWSRFHMAVLSEPDRGCPTTPKSPKCRAEGRAPRADSGPVSPAASRNGMSVAGNRQSEPRLASHVAADTAQPRPTGEKGGNIMASDRLERTNQLKIVEISAEAVSETVCGNKPAESDRRGGCLAQGNCQEKSEIRLYRQVAESSTSHPSSLPSHASQAEQEMSRSFSMAKLASSSSSLQTAIRKAEYSQGKSSLMSDSRGVPRNSIPGGPSGEDHLYFTPRPATRTYSMPAQFSSHFGREGHPPHSLGRSRDSQVPVTSSVVPEAKASRGGLPSLANGQGIYSVKPLLDTSRNLPATDEGDIISVQETSCLVTDKIKVTRRHYCYEQNWPHESTSFFSVKQRIKSFENLANADRPVAKSGASPFLSVSSKPPIGRRSSGSIVSGSLGHPGDAAARLLRRSLSSCSENQSEAGTLLPQMAKSPSIMTLTISRQNPPETSSKGSDSELKKSLGPLGIPTPTMTLASPVKRNKSSVRHTQPSPVSRSKLQELRALSMPDLDKLCSEDYSAGPSAVLFKTELEITPRRSPGPPAGGVSCPEKGGNRACPGGSGPKTSAAETPSSASDTGEAAQDLPFRRSWSVNLDQLLVSAGDQQRLQSVLSSVGSKSTILTLIQEAKAQSENEEDVCFIVLNRKEGSGLGFSVAGGTDVEPKSITVHRVFSQGAASQEGTMNRGDFLLSVNGASLAGLAHGNVLKVLHQAQLHKDALVVIKKGMDQPRPSARQEPPTANGKGLLSRKTIPLEPGIGRSVAVHDALCVEVLKTSAGLGLSLDGGKSSVTGDGPLVIKRVYKGGAAEQAGIIEAGDEILAINGKPLVGLMHFDAWNIMKSVPEGPVQLLIRKHRNSS

SEQ ID NO: 39624 - protein, 2640 aa, Homo sapiens
MPITQDNAVLHLPLLYQWLQNSLQEGGDGPEQRLCQAAIQKLQEYIQLNFAVDESTVPPDHSPPEMEICTVYLTKELGDTETVGLSFGNIPVFGDYGEKRRGGKKRKTHQGPVLDVGCIWVTELRKNSPAGKSGKVRLRDEILSLNGQLMVGVDVSGASYLAEQCWNGGFIYLIMLRRFKHKAHSTYNGNSSNSSEPGETPTLELGDRTAKKGKRTRKFGVISRPPANKAPEESKGSAGCEVSSDPSTELENGPDPELGNGHVFQLENGPDSLKEVAGPHLERSEVDRGTEHRIPKTDAPLTTSNDKRRFSKGGKTDFQSSDCLAREEVGRIWKMELLKESDGLGIQVSGGRGSKRSPHAIVVTQVKEGGAAHREYHIVKKSTRSLSTTQVESPWRLIRPSVISIIGLYKEKGKGLGFSIAGGRDCIRGQMGIFVKTIFPNGSAAEDGRLKEGDEILDVNGIPIKGLTFQEAIHTFKQIRSGLFVLTVRTKLVSPSLTPCSTPTHMSRSASPNFNTSGGASAGGSDEGSSSSLGRKTPGPKDRIVMEVTLNKEPRVGLGIGACCLALENSPPGIYIHSLAPGSVAKMESNLSRGDQILEVNSVNVRHAALSKVHAILSKCPVSEQEMDEVIARSTYQESKEANSSPGLGTPLKSPSLAKKDSLISESELSQYFAHDVPGPLSDFMVAGSEDEDHPGSGCSTSEEGSLPPSTSSEPGKPRANSLVTLGSHRASGLFHKQVTVARQASLPGSPQALRNPLLRQRKVGCYDANDASDEEEFDREGDCISLPGALPGPIRPLSEDDPRRVSISSSKGMDVHNQEERPRKTLVSKAISAPLLGSSVDLEESIPEGMVDAASYAANLTDSAEAPKGSPGSWWKKELSGSSSAPKLEYTVRTDTQSPTNTGSPSSPQQKSEGLGSRHRPVARVSPHCKRSEAEAKPSGSQTVNLTGRANDPCDLDSRVQATSVKVTVAGFQPGGAVEKLCQESLGKLTTGDACVSTSCELASALSHLDASHLTENLPKAASELGQQPMTSSDLISSPGKKGAAHPDPSKTSVDTGQVSRPENPSQPASPRVTKCKARSPVRLPHEGSPSPGEKAAAPPDYSKTRSASETSTPHNTRRVAALRGAGPGAEGMTPAGAVLPGDPLTSQEQRQGAPGNHSKALEMTGIHAPESSQEPSLLEGADSVSSRAPQASLSMLPSTDNTKEACGHVSGHCCPGGSRESPVTDIDSFIKELDASAARSPSSQTGDSGSQEGSAQGHPPAGAGGGSSCRAEPVPGGQTSSPRRAWAAGAPAYPQWASQPSVLDSINPDKHFTVNKNFLSNYSRNFSSFHEDSTSLSGLGDSTEPSLSSMYGDAEDSSSDPESLTEAPRASARDGWSPPRSRVSLHKEDPSESEEEQIEICSTRGCPNPPSSPAHLPTQAAICPASAKVLSLKYSTPRESVASPREKAACLPGSYTSGPDSSQPSSLLEMSSQEHETHADISTSQNHRPSCAEETTEVTSASSAMENSPLSKVARHFHSPPIILSSPNMVNGLEHDLLDDETLNQYETSINAAASLSSFSVDVPKNGESVLENLHISESQDLDDLLQKPKMIARRPIMAWFKEINKHNQGTHLRSKTEKEQPLMPARSPDSKIQMVSSSQKKGVTVPHSPPQPKTNLENKDLSKKSPAEMLLTNGQKAKCGPKLKRLSLKGKAKVNSEAPAANAVKAGGTDHRKPLISPQTSHKTLSKAVSQRLHVADHEDPDRNTTAAPRSPQCVLESKPPLATSGPLKPSVSDTSIRTFVSPLTSPKPVPEQGMWSRFHMAVLSEPDRGCPTTPKSPKCRAEGRAPRADSGPVSPAASRNGMSVAGNRQSEPRLASHVAADTAQPRPTGEKGGNIMASDRLERTNQLKIVEISAEAVSETVCGNKPAESDRRGGCLAQGNCQEKSEIRLYRQVAESSTSHPSSLPSHASQAEQEMSRSFSMAKLASSSSSLQTAIRKAEYSQGKSSLMSDSRGVPRNSIPGGPSGEDHLYFTPRPATRTYSMPAQFSSHFGREGHPPHSLGRSRDSQVPVTSSVVPEAKASRGGLPSLANGQGIYSVKPLLDTSRNLPATDEGDIISVQETSCLVTDKIKVTRRHYCYEQNWPHESTSFFSVKQRIKSFENLANADRPVAKSGASPFLSVSSKPPIGRRSSGSIVSGSLGHPGDAAARLLRRSLSSCSENQSEAGTLLPQMAKSPSIMTLTISRQNPPETSSKGSDSELKKSLGPLGIPTPTMTLASPVKRNKSSVRHTQPSPVSRSKLQELRALSMPDLDKLCSEDYSAGPSAVLFKTELEITPRRSPGPPAGGVSCPEKGGNRACPGGSGPKTSAAETPSSASDTGEAAQDLPFRRSWSVNLDQLLVSAGDQQRLQSVLSSVGSKSTILTLIQEAKAQSENEEDVCFIVLNRKEGSGLGFSVAGGTDVEPKSITVHRVFSQGAASQEGTMNRGDFLLSVNGASLAGLAHGNVLKVLHQAQLHKDALVVIKKGMDQPRPSARQEPPTANGKGLLSRKTIPLEPGIGRSVAVHDALCVEVLKTSAGLGLSLDGGKSSVTGDGPLVIKRVYKGGAAEQAGIIEAGDEILAINGKPLVGLMHFDAWNIMKSVPEGPVQLLIRKHRNSS

SEQ ID NO: 39625 - protein, 1447 aa, Homo sapiens
MAHSKTRTNDGKITYPPGVKEISDKISKEEMVRRLKMVVKTFMDMDQDSEEEKELYLNLALHLASDFFLKHPDKDVRLLVACCLADIFRIYAPEAPYTSPDKLKDIFMFITRQLKGLEDTKSPQFNRYFYLLENIAWVKSYNICFELEDSNEIFTQLYRTLFSVINNGHNQKVHMHMVDLMSSIICEGDTVSQELLDTVLVNLVPAHKNLNKQAYDLAKALLKRTAQAIEPYITNFFNQVLMLGKTSISDLSEHVFDLILELYNIDSHLLLSVLPQLEFKLKSNDNEERLQVVKLLAKMFGAKDSELASQNKPLWQCYLGRFNDIHVPIRLECVKFASHCLMNHPDLAKDLTEYLKVRSHDPEEAIRHDVIVSIVTAAKKDILLVNDHLLNFVRERTLDKRWRVRKEAMMGLAQIYKKYALQSAAGKDAAKQIAWIKDKLLHIYYQNSIDDRLLVERIFAQYMVPHNLETTERMKCLYYLYATLDLNAVKALNEMWKCQNLLRHQVKDLLDLIKQPKTDASVKAIFSKVMVITRNLPDPGKAQDFMKKFTQVLEDDEKIRKQLEVLVSPTCSCKQAEGCVREITKKLGNPKQPTNPFLEMIKFLLERIAPVHIDTESISALIKQVNKSIDGTADDEDEGVPTDQAIRAGLELLKVLSFTHPISFHSAETFESLLACLKMDDEKVAEAALQIFKNTGSKIEEDFPHIRSALLPVLHHKSKKGPPRQAKYAIHCIHAIFSSKETQFAQIFEPLHKSLDPSNLEHLITPLVTIGHIALLAPDQFAAPLKSLVATFIVKDLLMNDRLPGKKTTKLWVPDEEVSPETMVKIQAIKMMVRWLLGMKNNHSKSGTSTLRLLTTILHSDGDLTEQGKISKPDMSRLRLAAGSAIVKLAQEPCYHEIITLEQYQLCALAINDECYQVRQVFAQKLHKGLSRLRLPLEYMAICALCAKDPVKERRAHARQCLVKNINVRREYLKQHAAVSEKLLSLLPEYVVPYTIHLLAHDPDYVKVQDIEQLKDVKECLWFVLEILMAKNENNSHAFIRKMVENIKQTKDAQGPDDAKMNEKLYTVCDVAMNIIMSKSTTYSLESPKDPVLPARFFTQPDKNFSNTKNYLPPEMKSFFTPGKPKTTNVLGAVNKPLSSAGKQSQTKSSRMETVSNASSSSNPSSPGRIKGRLDSSEMDHSENEDYTMSSPLPGKKSDKRDDSDLVRSELEKPRGRKKTPVTEQEEKLGMDDLTKLVQEQKPKGSQRSRKRGHTASESDEQQWPEEKRLKEDILENEDEQNSPPKKGKRGRPPKPLGGGTPKEEPTMKTSKKGSKKKSGPPAPEEEEEEERQSGNTEQKSKSKQHRVSRRAQQRAESPESSAIESTQSTPQKGRGRPSKTPSPSQPKKNVRVGRSKQAATKENDSSEEVDVFQGSSPVDDIPQEETEEEEVSTVNVRRRSAKRERR

SEQ ID NO: 39626 - protein, 1391 aa, Homo sapiens
MAHSKTRTNDGKITYPPGVKEISDKISKEEMVRRLKMVVKTFMDMDQDSEEEKELYLNLALHLASDFFLKHPDKDVRLLVACCLADIFRIYAPEAPYTSPDKLKDIFMFITRQLKGLEDTKSPQFNRYFYLLENIAWVKSYNICFELEDSNEIFTQLYRTLFSVINNGHNQKVHMHMVDLMSSIICEGDTVSQELLDTVLVNLVPAHKNLNKQAYDLAKALLKRTAQAIEPYITNFFNQVLMLGKTSISDLSEHVFDLILELYNIDSHLLLSVLPQLEFKLKSNDNEERLQVVKLLAKMFGAKDSELASQNKPLWQCYLGRFNDIHVPIRLECVKFASHCLMNHPDLAKDLTEYLKVRSHDPEEAIRHDVIVSIVTAAKKDILLVNDHLLNFVRERTLDKRWRVRKEAMMGLAQIYKKYALQSAAGKDAAKQIAWIKDKLLHIYYQNSIDDRLLVERIFAQYMVPHNLETTERMKCLYYLYATLDLNAVKALNEMWKCQNLLRHQVKDLLDLIKQPKTDASVKAIFSKVMVITRNLPDPGKAQDFMKKFTQVLEDDEKIRKQLEVLVSPTCSCKQAEGCVREITKKLGNPKQPTNPFLEMIKFLLERIAPVHIDTESISALIKQVNKSIDGTADDEDEGVPTDQAIRAGLELLKVLSFTHPISFHSAETFESLLACLKMDDEKVAEAALQIFKNTGSKIEEDFPHIRSALLPVLHHKSKKGPPRQAKYAIHCIHAIFSSKETQFAQIFEPLHKSLDPSNLEHLITPLVTIGHIALLAPDQFAAPLKSLVATFIVKDLLMNDRLPGKKTTKLWVPDEEVSPETMVKIQAIKMMVRWLLGMKNNHSKSGTSTLRLLTTILHSDGDLTEQGKISKPDMSRLRLAAGSAIVKLAQEPCYHEIITLEQYQLCALAINDECYQVRQVFAQKLHKGLSRLRLPLEYMAICALCAKDPVKERRAHARQCLVKNINVRREYLKQHAAVSEKLLSLLPEYVVPYTIHLLAHDPDYVKVQDIEQLKDVKECLWFVLEILMAKNENNSHAFIRKMVENIKQTKDAQGPDDAKMNEKLYTVCDVAMNIIMSKSTTYSLESPKDPVLPARFFTQPDKNFSNTKNYLPPEMKSFFTPGKPKTTNVLGAVNKPLSSAGKQSQTKSSRMETVSNASSSSNPSSPGRIKGRLDSSEMDHSENEDYTMSSPLPGKKSDKRDDSDLVRSELEKPRGRKKTPVTEQEEKLGMDDLTKLVQEQKPKGSQRSRKRGHTASESDEQQWPEEKRLKEDILENEDEQNSPPKKGKRGRPPKPLGGGTPKEEPTMKTSKKGSKKKSGPPAPEEEEEEERQSGNTEQKSKSKQHRVSRRAQQRAESPESSAIESTQSTPQKGRGRPSKTPSPSQPKKNV

SEQ ID NO: 39627 - protein, 529 aa, Homo sapiens
MAHSKTRTNDGKITYPPGVKEISDKISKEEMVRRLKMVVKTFMDMDQDSEEEKELYLNLALHLASDFFLKHPDKDVRLLVACCLADIFRIYAPEAPYTSPDKLKDIFMFITRQLKGLEDTKSPQFNRYFYLLENIAWVKSYNICFELEDSNEIFTQLYRTLFSVINNGHNQKVHMHMVDLMSSIICEGDTVSQELLDTVLVNLVPAHKNLNKQAYDLAKALLKRTAQAIEPYITNFFNQVLMLGKTSISDLSEHVFDLILELYNIDSHLLLSVLPQLEFKLKSNDNEERLQVVKLLAKMFGAKDSELASQNKPLWQCYLGRFNDIHVPIRLECVKFASHCLMNHPDLAKDLTEYLKVRSHDPEEAIRHDVIVSIVTAAKKDILLVNDHLLNFVRERTLDKRWRVRKEAMMGLAQIYKKYALQSAAGKDAAKQIAWIKDKLLHIYYQNSIDDRLLVERIFAQYMVPHNLETTERMKCLYYLYATLDLNAVKYVSNIKFCSFHPLQYIGFYGKETTNTCILKCNLCSVNIV

SEQ ID NO: 39628 - protein, 122 aa, Homo sapiens
MAHSKTRTNDGKITYPPGVKEISDKISKEEMVRRLKMVVKTFMDMDQDSEEEKELYLNLALHLASDFFLKHPDKDVRLLVACCLADIFRIYAPEAPYTSPDKLKASTDLNNSKIDRYFDLSF

SEQ ID NO: 39629 - protein, 125 aa, Homo sapiens
MDDLTKLVQEQKPKGSQRSRKRGHTASESDEQQWPEEKRLKEDILENEDEQNSPPKKGKRGRPPKPLGGGTPKEEPTMKTSKKGSKKKSGPPAPEEEEEEERQSGNTEQKSKSKQHRVSRRAQQR

SEQ ID NO: 39630 - protein, 699 aa, Homo sapiens
MPSLWREILLESLLGCVSWSLYHDLGPMIYYFPLQTLELTGLEGFSIAFLSPIFLTITPFWKLVNKKWMLTLLRIITIGSIASFQAPNAKLRLMVLALGVSSSLIVQAVTWWSGSHLQRYLRIWGFILGQIVLVVLRIWYTSLNPIWSYQMSNKVILTLSAIATLDRIGTDGDCSKPEEKKTGEVATGMASRPNWLLAGAAFGSLVFLTHWVFGEVSLVSRWAVSGHPHPGPDPNPFGGAVLLCLASGLMLPSCLWFRGTGLIWWVTGTASAAGLLYLHTWAAAVSGCVFAIFTASMWPQTLGHLINSGTNPGKTMTIAMIFYLLEIFFCAWCTAFKFVPGGVYARERSDVLLGTMMLIIGLNMLFGPKKNLDLLLQTKNSSKVLFRKSEKYMKLFLWLLVGVGLLGLGLRHKAYERKLGKVAPTKEVSAAIWPFRFGYDNEGWSSLERSAHLLNETGADFITILESDASKPYMGNNDLTMWLGEKLGFYTDFGPSTRYHTWGIMALSRYPIVKSEHHLLPSPEGEIAPAITLTVNISGKLVDFVVTHFGNHEDDLDRKLQAIAVSKLLKSSSNQVIFLGYITSAPGSRDYLQLTEHGNVKDIDSTDHDRWCEYIMYRGLIRLGYARISHAELSDSEIQMAKFRIPDDPTNYRDNQKVVIDHREVSEKIHFNPRFGSYKEGHNYENNHHFHMNTPKYFL

SEQ ID NO: 39631 - protein, 1033 aa, Homo sapiens
MAQGFAVGFDPLGLGDLSSGSLSSLSSRGHLGSDSGSTATRYLLRKQQRLLNGPPRGIRASSPMGRVILINSPIEANSDESDIIHSVRVEKSPAGRLGFSVRGGSEHGLGIFVSKVEEGSSAERAGLCVGDKITEVNGLSLESTTMGSAVKVLTSSSRLHMMVRRMGRVPGIKFSKEKTTWVDVVNRRLVVEKCGSTPSDTSSEDGVRRIVHLYTTSDDFCLGFNIRGGKEFGLGIYVSKVDHGGLAEENGIKVGDQVLAANGVRFDDISHSQAVEVLKGQTHIMLTIKETGRYPAYKEMVSEYCWLDRLSNGVLQQLSPASESSSSVSSCASSAPYSSGSLPSDRMDICLGQEEPGSRGPGWGRADTAMQTEPDAGGRVETWCSVRPTVILRDTAIRSDGPHPGRRLDSALSESPKTALLLALSRPRPPITRSQSYLTLWEEKQQRKKEKSGSPGEKGALQRSKTLMNLFFKGGRQGRLARDGRREAWTLDSGSLAKTYPRLDIEKAGGVGPVQKFVTWRLRRDQERGRALLSARSGSPSSQLPNVDEQVQAWESRRPLIQDLAQRLLTDDEVLAVTRHCSRYVHEGGIEDLVRPLLAILDRPEKLLLLQDIRSVVAPTDLGRFDSMVMLVELEAFEALKSRAVRPPALRPARQDTPPKRHLITPVPDSRGGFYLLPVNGFPEEEDNGELRERLGALKVSPSASAPRHPHKGIPPLQDVPVDAFTPLRIACTPPPQLPPVAPRPLRPNWLLTEPLSREHPPQSQIRGRAQSRSRSRSRSRSRSSRGQGKSPGRRSPSPVPTPAPSMTNGRYHKPRKARPPLPRPLDGEAAKVGAKQGPSESGTEGTAKEAAMKNPSGELKTVTLSKMKQSLGISISGGIESKVQPMVKIEKIFPGGAAFLSGALQAGFELVAVDGENLEQVTHQRAVDTIRRAYRNKAREPMELVVRVPGPSPRPSPSDSSALTDGGLPADHLPAHQPLDAAPVPAHWLPEPPTNPQTPPTDARLLQPTPSPAPSPALQTPDSKPAPSPRIP

SEQ ID NO: 39632 - protein, 517 aa, Homo sapiens
MAQGFAVGFDPLGLGDLSSGSLSSLSSRGHLGSDSGSTATRYLLRKQQRLLNGPPRGIRASSPMGRVILINSPIEANSDESDIIHSVRVEKSPAGRLGFSVRGGSEHGLGIFVSKVEEGSSAERAGLCVGDKITEVNGLSLESTTMGSAVKVLTSSSRLHMMVRRMGRVPGIKFSKEKTTWVDVVNRRLVVEKCGSTPSDTSSEDGVRRIVHLYTTSDDFCLGFNIRGGKEFGLGIYVSKVDHGGLAEENGIKVGDQVLAANGVRFDDISHSQAVEVLKGQTHIMLTIKETGRYPAYKEMVSEYCWLDRLSNGVLQQLSPASESSSSVSSCASSAPYSSGSLPSDRMDICLGQEEPGSRGPGWGRADTAMQTEPDAGGRVETWCSVRPTVILRDTAIRSDGPHPGRRLDSALSESPKTALLLALSRPRPPITRSQSYLTLWEEKQQRKKEKSGSPGEKGALQRSKTLMNLFFKGGRQGRLARDGRREAWTLDSGSLAKTYPRLDIEKEMGVSPCCPG

SEQ ID NO: 39633 - protein, 512 aa, Homo sapiens
MAQGFAVGFDPLGLGDLSSGSLSSLSSRGHLGSDSGSTATRYLLRKQQRLLNGPPRGIRASSPMGRVILINSPIEANSDESDIIHSVRVEKSPAGRLGFSVRGGSEHGLGIFVSKVEEGSSAERAGLCVGDKITEVNGLSLESTTMGSAVKVLTSSSRLHMMVRRMGRVPGIKFSKEKTTWVDVVNRRLVVEKCGSTPSDTSSEDGVRRIVHLYTTSDDFCLGFNIRGGKEFGLGIYVSKVDHGGLAEENGIKVGDQVLAANGVRFDDISHSQAVEVLKGQTHIMLTIKETGRYPAYKEMVSEYCWLDRLSNGVLQQLSPASESSSSVSSCASSAPYSSGSLPSDRMDICLGQEEPGSRGPGWGRADTAMQTEPDAGGRVETWCSVRPTVILRDTAIRSDGPHPGRRLDSALSESPKTALLLALSRPRPPITRSQSYLTLWEEKQQRKKEKSGSPGEKGALQRSKTLMNLFFKGGRQGRLARDGRREAWTLDSGSLAKTYPRLDIEKEMGAT

SEQ ID NO: 39634 - protein, 261 aa, Homo sapiens
MTCWLRGVTATFGRPAEWPGYLSHLCGRSAAMDLGPMRKSYRGDREAFEETHLTSLDPVKQFAAWFEEAVQCPDIGEANAMCLATCTRDGKPSARMLLLKGFGKDGFRFFTNFESRKGKELDSNPFASLVFYWEPLNRQVRVEGPVKKLPEEEAECYFHSRPKSSQIGAVVSHQSSVIPDREYLRKKNEELEQLYQDQEVPKPKSWGGYVLYPQVMEFWQGQTNRLHDRIVFRRGLPTGDSPLGPMTHRGEEDWLYERLAP

SEQ ID NO: 39635 - protein, 69 aa, Homo sapiens
MTCWLRGVTATFGRPAEWPGYLSHLCGRSAAMDLGPMRKSYRGDRERWKTLCSHVAAEGLRERWLPLLH

SEQ ID NO: 39636 - protein, 243 aa, Homo sapiens
MTCWLRGVTATFGRPAEWPGYLSHLCGRSAAMDLGPMRKSYRGDREAFEETHLTSLDPVKQFAAWFEEAVQCPDIGEANAMCLATCTRDGKPSARMLLLKGFGKDGFRFFTNFESRKGKELVRVEGPVKKLPEEEAECYFHSRPKSSQIGAVVSHQSSVIPDREYLRKKNEELEQLYQDQEVPKPKSWGGYVLYPQVMEFWQGQTNRLHDRIVFRRGLPTGDSPLGPMTHRGEEDWLYERLAP

SEQ ID NO: 39637 - protein, 218 aa, Homo sapiens
MTCWLRGVTATFGRPAEWPGYLSHLCGRSAAMDLGPMRKSYRGDREAFEETHLTSLDPVKQFAAWFEEAVQCPDIGEANAMCLATCTRDGKPSARMLLLKGFGKDGFRFFTNFESRKGKELDSNPFASLVFYWEPLNRQYLRKKNEELEQLYQDQEVPKPKSWGGYVLYPQVMEFWQGQTNRLHDRIVFRRGLPTGDSPLGPMTHRGEEDWLYERLAP

SEQ ID NO: 39638 - protein, 647 aa, Homo sapiens
MALAMLRDWCRWMGANAERSLLILGIPDDCKEHEFQEAVRAALSPLGRYRVLTKHFRKELGAKAALVEFAEYLNRSLIPHQIPGNGGPWKVIFLPQVPVIEFQDMPSFPAQPQGQAVAKAAGEGGGAGEAGGVGEVGAAGEAGGTGEAGATGEAGAAGEAGGAGEAGGVGEAGAAGEAGGAGEAGAAGEGGAAGEAGGAGEAGGVGEAGAAGEAGGAGEAGGVGEAGAAGEAGGAGEAGAAGEAGGAGEGRAAGEAGAAGEAGAVGEAGAAGEAGAVGEAGAAGEAGAVGEAGGTNVTKAWVQPWRCTLQPVLENRAYRELRPFSRREQPGCEEESFESWVEHAKDMLQLWCHASEREKKRWLLESLGGPALEVVSGLLEEDTNLSALDCLAALGQVFRNQDTRMTSRLKFLTCTQGPQEGLFAFVVRLEGLLQRAVEKGAVCPALANYLRLQQVLSWARPSEALQDTLRGMQLEKRPPGFLGLLRLIREMEAWAAFPARSQQGVAWAAAPVESEDPAAAQASPAQGNASEAGPGAEDAAEAASATKEAARGAPAAGEGESAPAGPEGLGQARPIEVPWGSSPARMSSAVWVFPRGLSWGPEGLIQVRGQEARKPPLEGLQTILEEPENEDEDGAGDEGQPKSSQGK

SEQ ID NO: 39639 - protein, 578 aa, Homo sapiens
MLQDWCRRMGVNAERSLLILDIPDDCEEHEFQEAVRAALSPLGRYRVLIKVFRKELGARAALVEFAEGLNQSLIPRQIAGKGGPWKVISLPQALDAEFQDIPSFPAQPQGQAVARGAGEAGAAGEAGSVGEAGGVNEERSAGEDEAGGIGEAGGVGEAGAAGEAGAAGEAGAAGEAGGAGEAGGAGEAGGAGEEGGTGEEGGAGEAGGAGEEGGEDEAGAAGEAVGAGVVEAWTQSWRQTLRPLVKTMAYRELRPFSGREQPGCVEESFESWLEDAKDMLQLWCHASERERRRRLLDSLDGLALDIVSGLLEEDPDFSAQDCLTALGQVFRSRDTWMTSRMKFLTCTQGPQEGLFAFVVRLEGLLQKAVEKGAVHPAMANHLRLRQVLSRARPSEALQDTLRRMQLERRPPDFLRLLRLIRDMEAWAASLARSQQGVAWAAAPVESEDPAAAQASPAQGDASEADPGAEDADEAASTTKEAARVAPATGEDENAPAGLEGLGQGRSPDAPGGLPARMGSAVDMAPGGPSWEPEGLVQVGGQEAEEPPQEGLKPILEESENEDEDGAGEAGKPKSPPGK

SEQ ID NO: 39640 - protein, 279 aa, Homo sapiens
MGLSPGAEGEYALRLPRIPPPLPKPASRTASTGPKDQPPALRRSAVPHSGLNSISPLELEESVGFAALVQLPAKQPPPGTLEQGRSIQQGEKAVVSLETTPSQKADWSSIPKPENEGKLIKQAAEGKPRPRPGDLIEIFRIGYEHWAIYVEDDCVVHLAPPSEEFEVGSITSIFSNRAVVKYSRLEDVLHGCSWKVNNKLDGTYLPLPVDKIIQRTKKMVNKIVQYSLIEGNCEHFVNGLRYGVPRSQQVEHALMEGAKAAGAVISAVVDSIKPKPITA

SEQ ID NO: 39641 - protein, 253 aa, Homo sapiens
MGLSPGAEGEYALRLPRIPPPLPKPASRTASTGPKDQPPALRRSAVPHSGLNSISPLELEESVGFAALVQLPAKQPPPGTLEQGRSIQQGEKAVVSLETTPSQKADWSSIPKPENEGKLIKQAAEGKPRPRPGDLIEIFRIGYEHWAIYVEDDCVVHLAPPSEEFEVGSITSIFSNRAVVKYSRLEDVLHGCSWKVNNKLDGTYLPLPVDKIIQRTKKMVNKIVQYSLIEGNCRARPDGRSEGCWSSYFSCSG

SEQ ID NO: 39642 - protein, 269 aa, Homo sapiens
MGLSPGAEGEYALRLPRIPPPLPKPASRTASTGPKDQPPALRRSAVPHSEESVGFAALVQLPAKQPPPGTLEQGRSIQQGEKAVVSLETTPSQKADWSSIPKPENEGKLIKQAAEGKPRPRPGDLIEIFRIGYEHWAIYVEDDCVVHLAPPSEEFEVGSITSIFSNRAVVKYSRLEDVLHGCSWKVNNKLDGTYLPLPVDKIIQRTKKMVNKIVQYSLIEGNCEHFVNGLRYGVPRSQQVEHALMEGAKAAGAVISAVVDSIKPKPITA

SEQ ID NO: 39643 - protein, 376 aa, Homo sapiens
MGLLAFLKTQFVLHLLVGFVFVVSGLVINFVQLCTLALWPVSKQLYRRLNCRLAYSLWSQLVMLLEWWSCTECTLFTDQATVERFGKEHAVIILNHNFEIDFLCGWTMCERFGVLGSSKVLAKKELLYVPLIGWTWYFLEIVFCKRKWEEDRDTVVEGLRRLSDYPEYMWFLLYCEGTRFTETKHRVSMEVAAAKGLPVLKYHLLPRTKGFTTAVKCLRGTVAAVYDVTLNFRGNKNPSLLGILYGKKYEADMCVRRFPLEDIPLDEKEAAQWLHKLYQEKDALQEIYNQKGMFPGEQFKPARRPWTLLNFLSWATILLSPLFSFVLGVFASGSPLLILTFLGFVGAASFGVRRLIGVTEIEKGSSYGNQEFKKKE

SEQ ID NO: 39644 - protein, 314 aa, Homo sapiens
MLLEWWSCTECTLFTDQATVERFGKEHAVIILNHNFEIDFLCGWTMCERFGVLGSSKVLAKKELLYVPLIGWTWYFLEIVFCKRKWEEDRDTVVEGLRRLSDYPEYMWFLLYCEGTRFTETKHRVSMEVAAAKGLPVLKYHLLPRTKGFTTAVKCLRGTVAAVYDVTLNFRGNKNPSLLGILYGKKYEADMCVRRFPLEDIPLDEKEAAQWLHKLYQEKDALQEIYNQKGMFPGEQFKPARRPWTLLNFLSWATILLSPLFSFVLGVFASGSPLLILTFLGFVGAASFGVRRLIGVTEIEKGSSYGNQEFKKKE

SEQ ID NO: 39645 - protein, 396 aa, Homo sapiens
MQSGGSLPFCCYLPSVSSQLLLRESYCNFIKRTQCKSSKLMFSRDFLSGQKYCRCLLWALPDHPRRRGPTSANALPLSAELVMLLEWWSCTECTLFTDQATVERFGKEHAVIILNHNFEIDFLCGWTMCERFGVLGSSKVLAKKELLYVPLIGWTWYFLEIVFCKRKWEEDRDTVVEGLRRLSDYPEYMWFLLYCEGTRFTETKHRVSMEVAAAKGLPVLKYHLLPRTKGFTTAVKCLRGTVAAVYDVTLNFRGNKNPSLLGILYGKKYEADMCVRRFPLEDIPLDEKEAAQWLHKLYQEKDALQEIYNQKGMFPGEQFKPARRPWTLLNFLSWATILLSPLFSFVLGVFASGSPLLILTFLGFVGAASFGVRRLIGVTEIEKGSSYGNQEFKKKE

SEQ ID NO: 39646 - protein, 378 aa, Homo sapiens
MDLAGLLKSQFLCHLVFCYVFIASGLIINTIQLFTLLLWPINKQLFRKINCRLSYCISSQLVMLLEWWSGTECTIFTDPRAYLKYGKENAIVVLNHKFEIDFLCGWSLSERFGLLGGSKVLAKKELAYVPIIGWMWYFTEMVFCSRKWEQDRKTVATSLQHLRDYPEKYFFLIHCEGTRFTEKKHEISMQVARAKGLPRLKHHLLPRTKGFAITVRSLRNVVSAVYDCTLNFRNNENPTLLGVLNGKKYHADLYVRRIPLEDIPEDDDECSAWLHKLYQEKDAFQEEYYRTGTFPETPMVPPRRPWTLVNWLFWASLVLYPFFQFLVSMIRSGSSLTLASFILVFFVASVGVRWMIGVTEIDKGSAYGNSDSKQKLND

SEQ ID NO: 39647 - protein, 216 aa, Homo sapiens
MDLAGLLKSQFLCHLVFCYVFIASGLIINTIQLFTLLLWPINKQLFRKINCRLSYCISSLSAVYDCTLNFRNNENPTLLGVLNGKKYHADLYVRRIPLEDIPEDDDECSAWLHKLYQEKDAFQEEYYRTGTFPETPMVPPRRPWTLVNWLFWASLVLYPFFQFLVSMIRSGSSLTLASFILVFFVASVGVRWMIGVTEIDKGSAYGNSDSKQKLND

SEQ ID NO: 39648 - protein, 140 aa, Homo sapiens
MAENREPRGAVEAELDPVEYTLRKRLPSRLPRRPNDIYVNMKTDFKAQLARCQKLLDGGARGQNACSEIYIHGLGLAINRAINIALQLQAGSFGSLQVAANTSTVELVDELEPETDTREPLTRIRNNSAIHIRVFRVTPK

SEQ ID NO: 39649 - protein, 172 aa, Homo sapiens
MKIWSSEHVFGHPWDTVIQAAMRKYPNPMNPSVLGVDVLQRRVDGRGRLHSLRLLSTEWGLPSLVRAILGTSRTLTYIREHSVVDPVEKKMELCSTNITLTNLVSVNERLVYTPHPENPEMTVLTQEAIITVKGISLGSYLESLMANTISSNAKKGWAAIEWIIEHSESAVS

SEQ ID NO: 39650 - protein, 151 aa, Homo sapiens
MRKYPNPMNPSVLGVDVLQRRVDGRGRLHSLRLLSTEWGLPSLVRAILGTSRTLTYIREHSVVDPVEKKMELCSTNITLTNLVSVNERLVYTPHPENPEMTVLTQEAIITVKGISLGSYLESLMANTISSNAKKGWAAIEWIIEHSESAVS

SEQ ID NO: 39651 - protein, 685 aa, Homo sapiens
MELLRTITYQPAASTKMCEQALGKGCGADSKKKRPPQPPEESQPPQSQAQVPPAAPHHHHHHSHSGPEISRIIVDPTTGKRYCRGKVLGKGGFAKCYEMTDLTNNKVYAAKIIPHSRVAKPHQREKIDKEIELHRILHHKHVVQFYHYFEDKENIYILLEYCSRRSMAHILKARKVLTEPEVRYYLRQIVSGLKYLHEQEILHRDLKLGNFFINEAMELKVGDFGLAARLEPLEHRRRTICGTPNYLSPEVLNKQGHGCESDIWALGCVMYTMLLGRPPFETTNLKETYRCIREARYTMPSSLLAPAKHLIASMLSKNPEDRPSLDDIIRHDFFLQGFTPDRLSSSCCHTVPDFHLSSPAKNFFKKAAAALFGGKKDKARYIDTHNRVSKEDEDIYKLRHDLKKTSITQQPSKHRTDEELQPPTTTVARSGTPAVENKQQIGDAIRMIVRGTLGSCSSSSECLEDSTMGSVADTVARVLRGCLENMPEADCIPKEQLSTSFQWVTKWVDYSNKYGFGYQLSDHTVGVLFNNGAHMSLLPDKKTVHYYAELGQCSVFPATDAPEQFISQVTVLKYFSHYMEENLMDGGDLPSVTDIRRPRLYLLQWLKSDKALMMLFNDGTFQVNFYHDHTKIIICSQNEEYLLTYINEDRISTTFRLTTLLMSGCSSELKNRMEYALNMLLQRCN

SEQ ID NO: 39652 - protein, 351 aa, Homo sapiens
MAAAANSGSSLPLFDCPTWAGKPPPGLHLDVVKGDKLIEKLIIDEKKYYLFGRNPDLCDFTIDHQSCSRVHAALVYHKHLKRVFLIDLNSTHGTFLGHIRLEPHKPQQIPIDSTVSFGASTRAYTLREKPQTLPSAVKGDEKMGGEDDELKGLLGLPEEETELDNLTEFNTAHNKRISTLTIEEGNLDIQRPKRKRKNSRVTFSEDDEIINPEDVDPSVGRFRNMVQTAVVPVKKKRVEGPGSLGLEESGSRRMQNFAFSGGLYGGLPPTHSEAGSQPHGIHGTALIGGLPMPYPNLAPDVDLTPVVPSAVNMNPAPNPAVYNPEAVNEPKKKKYAKEAWPGKKPTPSLLI

SEQ ID NO: 39653 - protein, 209 aa, Homo sapiens
MGGEDDELKGLLGLPEEETELDNLTEFNTAHNKRISTLTIEEGNLDIQRPKRKRKNSRVTFSEDDEIINPEDVDPSVGRFRNMVQTAVVPVKKKRVEGPGSLGLEESGSRRMQNFAFSGGLYGGLPPTHSEAGSQPHGIHGTALIGGLPMPYPNLAPDVDLTPVVPSAVNMNPAPNPAVYNPEAVNEPKKKKYAKEAWPGKKPTPSLLI

SEQ ID NO: 39654 - protein, 127 aa, Homo sapiens
MVQTAVVPVKKKRVEGPGSLGLEESGSRRMQNFAFSGGLYGGLPPTHSEAGSQPHGIHGTALIGGLPMPYPNLAPDVDLTPVVPSAVNMNPAPNPAVYNPEAVNEPKKKKYAKEAWPGKKPTPSLLI

SEQ ID NO: 39655 - protein, 303 aa, Homo sapiens
MAAVHDLEMESMNLNMGREMKEELEEEEKMREDGGGKDRAKSKKVHRIVSKWMLPEKSRGTYLERANCFPPPVFIISISLAELAVFIYYAVWKPQKQWITLDTGILESPFIYSPEKREEAWRFISYMLVHAGVQHILGNLCMQLVLGIPLEMVHKGLRVGLVYLAGVIAGSLASSIFDPLRYLVGASGGVYALMGGYFMNVLVNFQEMIPAFGIFRLLIIILIIVLDMGFALYRRFFVPEDGSPVSFAAHIAGGFAGMSIGYTVFSCFDKALLKDPRFWIAIAAYLACVLFAVFFNIFLSPAN

SEQ ID NO: 39656 - protein, 132 aa, Homo sapiens
MAAVHDLEMESMNLNMGREMKEELEEEEKMREDGGGKDRAKSKKVHRIVSKWMLPEKSRGTYLERANCFPPPVFIISISLAELAVFIYYAVWKPQKQWITLDTGILESPFIYSPEKREEAWRFISYMLVHAG

SEQ ID NO: 39657 - protein, 246 aa, Homo sapiens
MAAPGPALCLFDVDGTLTAPRQKITKEMDDFLQKLRQKIKIGVVGGSDFEKVQEQLGNDVVEKYDYVFPENGLVAYKDGKLLCRQNIQSHLGEALIQDLINYCLSYIAKIKLPKKRGTFIEFRNGMLNVSPIGRSCSQEERIEFYELDKKENIRQKFVADLRKEFAGKGLTFSIGGQISFDVFPDGWDKRYCLRHVENDGYKTIYFFGDKTMPGGNDHEIFTDPRTMGYSVTAPEDTRRICELLFS

SEQ ID NO: 39658 - protein, 119 aa, Homo sapiens
MAAPGPALCLFDVDGTLTAPRQKITKEMDDFLQKLRQKIKIGVVGGSDFEKVQEQLGNDVVEKYDYVFPENGLVAYKDGKLLCRQNIQSHLGEALIQDLINYCLSYIAKIKLPKKRKKI

SEQ ID NO: 39659 - protein, 404 aa, Homo sapiens
MGEHPSPGPAVAACAEAERIEELEPEAEERLPAAPEDHWKVLFDQFDPGNTGYISTGKFRSLLESHSSKLDPHKREVLLALADSHADGQIGYQDFVSLMSNKRSNSFRQAILQGNRRLSSKALLEEKGLSLSQRLIRHVAYETLPREIDRKWYYDSYTCCPPPWFMITVTLLEVAFFLYNGVSLGQFVLQVTHPRYLKNSLVYHPQLRAQVWRYLTYIFMHAGIEHLGLNVVLQLLVGVPLEMVHGATRIGLVYVAGVVAGSLAVSVADMTAPVVGSSGGVYALVSAHLANIVMNWSGMKCQFKLLRMAVALICMSMEFGRAVWLRFHPSAYPPCPHPSFVAHLGGVAVGITLGVVVLRNYEQRLQDQSLWWIFVAMYTVFVLFAVFWNIFAYTLLDLKLPPPP

SEQ ID NO: 39660 - protein, 306 aa, Homo sapiens
MSNKRSNSFRQAILQGNRRLSSKALLEEKGLSLSQRLIRHVAYETLPREIDRKWYYDSYTCCPPPWFMITVTLLEVAFFLYNGVSLGQFVLQVTHPRYLKNSLVYHPQLRAQVWRYLTYIFMHAGIEHLGLNVVLQLLVGVPLEMVHGATRIGLVYVAGVVAGSLAVSVADMTAPVVGSSGGVYALVSAHLANIVMNWSGMKCQFKLLRMAVALICMSMEFGRAVWLRFHPSAYPPCPHPSFVAHLGGVAVGITLGVVVLRNYEQRLQDQSLWWIFVAMYTVFVLFAVFWNIFAYTLLDLKLPPPP

SEQ ID NO: 39661 - protein, 396 aa, Homo sapiens
MGEHPSPGPAVAACAEAERIEELEPEAEERLPAAPEDFDPGNTGYISTGKFRSLLESHSSKLDPHKREVLLALADSHADGQIGYQDFVSLMSNKRSNSFRQAILQGNRRLSSKALLEEKGLSLSQRLIRHVAYETLPREIDRKWYYDSYTCCPPPWFMITVTLLEVAFFLYNGVSLGQFVLQVTHPRYLKNSLVYHPQLRAQVWRYLTYIFMHAGIEHLGLNVVLQLLVGVPLEMVHGATRIGLVYVAGVVAGSLAVSVADMTAPVVGSSGGVYALVSAHLANIVMNWSGMKCQFKLLRMAVALICMSMEFGRAVWLRFHPSAYPPCPHPSFVAHLGGVAVGITLGVVVLRNYEQRLQDQSLWWIFVAMYTVFVLFAVFWNIFAYTLLDLKLPPPP

SEQ ID NO: 39662 - protein, 493 aa, Homo sapiens
MRRRRAAVAAGFCASFLLGSVLNVLFAPGSEPPRPGQSPEPSPAPGPGRRGGRGELARQIRARYEEVQRYSRGGPGPGAGRPERRRLMDLAPGGPGLPRPRPPWARPLSDGAPGWPPAPGPGSPGPGPRLGCAALRNVSGAQYMGSGYTKAVYRVRLPGGAAVALKAVDFSGHDLGSCVREFGVRRGCYRLAAHKLLKEMVLLERLRHPNVLQLYGYCYQDSEDIPDTLTTITELGAPVEMIQLLQTSWEDRFRICLSLGRLLHHLAHSPLGSVTLLDFRPRQFVLVDGELKVTDLDDARVEETPCAGSTDCILEFPARNFTLPCSAQGWCEGMNEKRNLYNAYRFFFTYLLPHSAPPSLRPLLDSIVNATGELAWGVDETLAQLEKVLHLYRSGQYLQNSTASSSTEYQCIPDSTIPQEDYRCWPSYHHGSCLLSVFNLAEAVDVCESHAQCRAFVVTNQTTWTGRQLVFFKTGWSQVVPDPNKTTYVKASG

SEQ ID NO: 39663 - protein, 329 aa, Homo sapiens
MSGVVPTAPEQPAGEMENQTKPPDPRPDAPPEYNSHFLPGPPGTAVPPPTGYPGGLPMGYYSPQQPSTFPLYQPVGGIHPVRYQPGKYPMPNQSVPITWMPGPTPMANCPPGLEYLVQLDNIHVLQHFEPLEMMTCFETNNRYDIKNNSDQMVYIVTEDTDDFTRNAYRTLRPFVLRVTDCMGREIMTMQRPFRCTCCCFCCPSARQELEVQCPPGVTIGFVAEHWNLCRAVYSIQNEKKENVMRVRGPCSTYGCGSDSVFEVKSLDGISNIGSIIRKWNGLLSAMADADHFDIHFPLDLDVKMKAMIFGACFLIDFMYFERSPPQRSR

SEQ ID NO: 39664 - protein, 224 aa, Homo sapiens
MENQTKPPDPRPDAPPEYNSHFLPGPPGTAVPPPTGYPGGLPMGYYSPQQPSTFPLYQPVGGIHPVRYQPGKYPMPNQSVPITWMPGPTPMANCPPGLEYLVQLEVQCPPGVTIGFVAEHWNLCRAVYSIQNEKKENVMRVRGPCSTYGCGSDSVFEVKSLDGISNIGSIIRKWNGLLSAMADADHFDIHFPLDLDVKMKAMIFGACFLIDFMYFERSPPQRSR

SEQ ID NO: 39665 - protein, 150 aa, Homo sapiens
MKELLRLKHCKHLLTTHVHSPWTPSLTLTPSLLTLDTLTHPRHRHSSPWTPHSAPWTPSLTLDTFTHPDTLTHPGHPHSPWIPSLLTLDTLTHPGYPHSSPWTLSLTLTPSILTLDSLTPHPGLPHSSPWTPSLLILDTLTQPGHPHSSP

SEQ ID NO: 39666 - protein, 202 aa, Homo sapiens
MCRTLAAFPTTCLERAKEFKTRLGIFLHKSELGCDTGSTGKFEWGSKHSKENRNFSEDVLGWRESFDLLLSSKNGVAAFHAFLKTEFSEENLEFWLACEEFKKIRSATKLASRAHQIFEEFICSEAPKEVNIDHETHELTRMNLQTATATCFDAAQGKTRTLMEKDSYPRFLKSPAYRDLAAQASAASATLSSCSLDEPSHT

SEQ ID NO: 39667 - protein, 611 aa, Homo sapiens
MGNSHCVPQAPRRLRASFSRKPSLKGNREDSARMSAGLPGPEAARSGDAAANKLFHYIPGTDILDLENQRENLEQPFLSVFKKGRRRVPVRNLGKVVHYAKVQLRFQHSQDVSDCYLELFPAHLYFQAHGSEGLTFQGLLPLTELSVCPLEGSREHAFQITGPLPAPLLVLCPSRAELDRWLYHLEKQTALLGGPRRCHSAPPQRRLTRLRTASGHEPGGSAVCASRVKLQHLPAQEQWDRLLVLYPTSLAIFSEELDGLCFKGELPLRAVHINLEEKEKQIRSFLIEGPLINTIRVVCASYEDYGHWLLCLRAVTHREGAPPLPGAESFPGSQVMGSGRGSLSSGGQTSWDSGCLAPPSTRTSHSLPESSVPSTVGCSSQHTPDQANSDRASIGRRRTELRRSGSSRSPGSKARAEGRGPVTPLHLDLTQLHRLSLESSPDAPDHTSETSHSPLYADPYTPPATSHRRVTDVRGLEEFLSAMQSARGPTPSSPLPSVPVSVPASDPRSCSSGPAGPYLLSKKGALQSRAAQRHRGSAKDGGPQPPDAPQLVSSAREGSPEPWLPLTDGRSPRRSRDPGYDHLWDETLSSSHQKCPQLGGPEASGGLVQWI

SEQ ID NO: 39668 - protein, 663 aa, Homo sapiens
MGNSHCVPQAPRRLRASFSRKPSLKGNREDSARMSAGLPGPEAARSGDAAANKLFHYIPGTDILDLENQRENLEQPFLSVFKKGRRRVPVRNLGKVVHYAKVQLRFQHSQDVSDCYLELFPAHLYFQAHGSEGLTFQGLLPLTELSVCPLEGSREHAFQITGVWDASRAPRGTPDPGLGEGPALWLRSTCVYVCALSALPAGPLPAPLLVLCPSRAELDRWLYHLEKQTALLGGPRRCHSAPPQGSCGDELPWTLQRRLTRLRTASGHEPGGSAVCASRVKLQHLPAQEQWDRLLVLYPTSLAIFSEELDGLCFKGELPLRAVHINLEEKEKQIRSFLIEGPLINTIRVVCASYEDYGHWLLCLRAVTHREGAPPLPGAESFPGSQVMGSGRGSLSSGGQTSWDSGCLAPPSTRTSHSLPESSVPSTVGCSSQHTPDQANSDRASIGRRRTELRRSGSSRSPGSKARAEGRGPVTPLHLDLTQLHRLSLESSPDAPDHTSETSHSPLYADPYTPPATSHRRVTDVRGLEEFLSAMQSARGPTPSSPLPSVPVSVPASDPRSCSSGPAGPYLLSKKGALQSRAAQRHRGSAKDGGPQPPDAPQLVSSAREGSPEPWLPLTDGRSPRRSRDPGYDHLWDETLSSSHQKCPQLGGPEASGGLVQWI

SEQ ID NO: 39669 - protein, 576 aa, Homo sapiens
MGNSHCVPQAPRRLRASFSRKPSLKGNREDSARMSAGLPGPEAARSGDAAANKLFHYIPGTDILDLENQRENLEQPFLSVFKKGRRRVPVRNLGKVVHYAKVQLRFQHSQDVSDCYLELFPAHLYFQAHGSEGLTFQGLLPLTELSVCPLEGSREHAFQITGPLPAPLLVLCPSRAELDRWLYHLEKQTALLGGPRRCHSAPPQGSCGDELPWTLQRRLTRLRTASGHEPGGSAVCASRVKLQHLPAQEQWDRLLVLYPTSLAIFSEELDGLCFKGELPLRAVHINLEEKEKQIRSFLIEGPLINTIRVVCASYEDYGHWLLCLRAVTHREGAPPLPGAESFPGSQVMGSGRGSLSSGGQTSWDSGCLAPPSTRTSHSLPESSVPSTVGCSSQHTPLHRLSLESSPDAPDHTSETSHSPLYADPYTPPATSHRRVTDVRGLEEFLSAMQSARGPTPSSPLPSVPVSVPASDPRSCSSGPAGPYLLSKKGALQSRAAQRHRGSAKDGGPQPPDAPQLVSSAREGSPEPWLPLTDGRSPRRSRDPGYDHLWDETLSSSHQKCPQLGGPEASGGLVQWI

SEQ ID NO: 39670 - protein, 793 aa, Homo sapiens
MPLPGGLWWLLCCRRGFTLLHRDYGDGELSGDGDEDEDEETFELRTPSPAGGGRGPLEVTLTQPVRSGPVSNRLQSWEETWSLIPEKGLPEDDPDIVVKGWLYREPRGGGARPWLPPRRAWFVLTRDSLDQFSSSGKGARRLGSLVLTSLCSVTGPERRRKETGLWSVTVSGRKHSVRLCSPRQAEAERWGVALREVIASKAPLETPTQLLLRDIQESCGDPEAVALIYLRNPILRHTSGALYAPLLPLPYGVSAPGPGYAPLREEAVRLFLALQALEGARRPGPLMQGVLQTCRDLPALRDELFLQLAKQTSGPAGPPGLPATQDPAALRYWQLLTCMSCTFRPGGAVRGHLLGHLERTEQALPDSELAEYARFIRKALGRTRGRELVPSLAEISALSQRQELLCTVHCPGAGACAVAIDSHTTAGEVARELVGRLGLARSRNAFALYEQRGAQERALAGGTLVADVLTRFENLAAEEAGLEDSPDSGWRLCLRLHGPLHPEGLSPDGHELPFLFEQAHALLLRGRPPPPDDTLRALAALRLQSLQRDFSPRVPLPRLDRLLPPPAPPREDPPRPTPRPPPSAALLAGALWSPGLAKRRAERARRGGAGRTAGSIAREGGGGAGTAAAVLGGWKRLRGMGRAEAMAAYLALAAQCPGFGAARYDVLELSTEPGRGAPQKLCLGLGAKAMSLSRPGETEPIHSVSYGHVAACQLMGPHTLALRVGESQLLLQSPQVEEIMQLVNAYLANPSPERPCSSSSPPCQDLPDTSPPSQRPGLDEPQGQSGCLGQLQD

SEQ ID NO: 39671 - protein, 733 aa, Homo sapiens
MPLPGGLWWLLCCRRGFTLLHRDYGDGELSGDGDEDEDEETFELRTPSPAGGGRGPLEVTLTQPVRSGPVSNRLQSWEETWSLIPEKGLPEDDPDIVVKGWLYREPRGGGARPWLPPRRAWFVLTRDSLDQFSSSGKGARRLGSLVLTSLCSVTGPERRRKETGLWSVTVSGRKHSVRLCSPRQAEAERWGVALREVIASKAPLETPTQLLLRDIQESCGDPEAVALIYLRNPILRHTSGALYAPLLPLPYGVSAPGPGYAPLREEAVRLFLALQALEGARRPGPLMQGVLQTCRDLPALRDELFLQLAKQTSGPAGPPGLPATQDPAALRYWQLLTCMSCTFRPGGAVRGHLLGHLERTEQALPDSELAEYARFIRKALGRTRGRELVPSLAEISALSQRQELLCTVHCPGAGACAVAIDSHTTAGEVARELVGRLGLARSRNAFALYEQRGAQERALAGGTLVADVLTSLAAEEAGLEDSPDSGWRLCLRLHGPLHPEGLSPDGHELPFLFEQAHALLLRGRPPPPDDTLRALAALRLQSLQRDFSPRVPLPRLDRLLPPPAPPREDPPRPTPRPPPSAALLAGALWSPGLAKRRAERARRGGAGRTAGSIAREGGGGAGTAAAVLGGWKRLRGMGRAEAMAAYLALAAQCPGFGAARYDVLELSTVRGRREKGTLAAQAPHLCPRATGPTECHVIPHIQNSYPSQTPGVTSPWALTSLEPQPPPHTCCES

SEQ ID NO: 39672 - protein, 705 aa, Homo sapiens
MPLPGGLWWLLCCRRGFTLLHRDYGDGELSGDGDEDEDEETFELRTPSPAGGGRGPLEVTLTQPVRSGPVSNRLQSWEETWSLIPEKGLPEDDPDIVVKGWLYREPRGGGARPWLPPRRAWFVLTRDSLDQFSSSGKGARRLGSLVLTSLCSVTGPERRRKETGLWSVTVSGRKHSVRLCSPRQAEAERWGVALREVIASKAPLETPTQLLLRDIQESCGDPEAVALIYLRNPILRHTSGALYAPLLPLPYGVSAPGPGYAPLREEAVRLFLALQALEGARRPGPLMQGVLQTCRDLPALRDELFLQLAKQTSGPAGPPGLPATQDPAALRYWQLLTCMSCTFRPGGAVRGHLLGHLERTEQALPDSELAEYARFIRKALGRTRGRELVPSLAEISALSQRQELLCTVHCPGAGACAVAIDSHTTAGEVARELVGRLGLARSRNAFALYEQRGAQERALAGGTLVADVLTRFENLAAEEAGLEDSPDSGWRLCLRLHGPLHPEGLSPDGHELPFLFEQAHALLLRGRPPPPDDTLRALAALRLQSLQRDFSPRVPLPRLDRLLPPPAPPREDPPRPTPRPPPSAALLAGALWSPGLAKRRAERARRGGAGRTAGSIAREGGGGAGTAAAVLGGWKRLRGMGRAEAMAAYLALAAQCPGFGAARSLVGVLHRSCAWAWEPRPCPSPGQGRRSPSTVSAMAMWPPAS

SEQ ID NO: 39673 - protein, 616 aa, Homo sapiens
MPLPGGLWWLLCCRRGFTLLHRDYGDGELSGDGDEDEDEETFELRTPSPAGGGRGPLEVTLTQPVRSGPVSNRLQSWEETWSLIPEKGLPEDDPDIVVKGWLYREPRGGGARPWLPPRRAWFVLTRDSLDQFSSSGKGARRLGSLVLTSLCSVTGPERRRKETGLWSVTVSGRKHSVRLCSPRQAEAERWGVALREVIASKAPLETPTQLLLRDIQESCGDPEAVALIYLRNPILRHTSGALYAPLLPLPYGVSAPGPGYAPLREEAVRLFLALQALEGARRPGPLMQGVLQTCRDLPALRDELFLQLAKQTSGPAGPPGLPATQDPAALRYWQLLTCMSCTFRPGGAVRGHLLGHLERTEQALPDSELAEYARFIRKALGRTRGRELVPSLAEISALSQRQELLCTVHCPGAGACAVAIDSHTTAGEVARELVGRLGLARSRNAFALYEQRGAQERALAGGTLVADVLTSLAAEEAGLEDSPDSGWRLCLRLHGPLHPEGLSPDGHELPRGHDFPPACSLGQDCSEIYGHVAACQLMGPHTLALRVGESQLLLQSPQVEEIMQLVNAYLANPSPERPCSSSSPPCQDLPDTSPPSQRPGLDEPQGQSGCLGQLQD

SEQ ID NO: 39674 - protein, 1364 aa, Homo sapiens
MAELKVEAPASVDWQKRCLTLETQLFRFRLQASKIRELLADKMQELEQRLLEAEQRAENAETQVGVMEEKVKLSNLKNVDSEGSLHRKYQELLKAIKGKDELISQLEAQLEKQKQMRAEEAKTVQEKAAKIKEWVTLKLAKLEMENQHLKSHNQRLVEQVGSLQDALEAIQIAPSRKLLVPPYGAAEQDSVPSEPGIQPMGQDSGSQAQGLKAAVLAPSPGALQSKDSVSEAASPLEDSSSSTVHSGETVEAKPLQPHLGRESPPHQPCMKLLTFRCSSASWGEGLVTAQRGMLPGTKTSAREGGPGSSLTLPKVRAPGTPRDSIQLAKRHHSQPQVGHGHFGRVVNIETEAFSALHPSGLPELESRARSREEPEKMEMEEPPPAGKNEERESPKALGAELEEVELGNKPPTPPLHQFSSWESRIYAVATSGMRLSDMSPRSNTACCASSPPALVSPGSFSGLVYKNVTVPVYTALKGRATQISNMPFMDESSGSDDDCSSQASFRISVPSSESRKTSGLGSPRAIKRGVSMSSLSSEGDYAIPPDACSLDSDYSEPEHKLQRTSSYSTDGLGLGGESLEKSGYLLKMGSQVKTWKRRWFVLRQGQIMYYKSPSDVIRKPQGQVDLNSRCQIVRGEGSQTFQLISEKKTYYLTADSPSLLEEWIRVLQSLLKVQATGPPALLRGGTKPTVKGWLTKVKHGHSKVVWCALVGKIFYYYRSHEDKRPLGCLPVRDAHIEEVDRSCDSDEDYEAGGTRRLLSSHCTLVIHPTEHSPTYLLIGTKHEKDTWLYHLTVAAGGSSAKVGTAYEQLIGKLMDGEGDPDSPLWRHPMLCYSKDGLYASLTTLPSEALQTEALKLFKSCQLFINVPVEAASVDYHVSLAQTALQVCLVHPELQSEIYCQLMKQTSCRPPQKYSLMQCWQLLALCAPLFLPQHHFLWYVKQQLQRHADPRSETGQYATYCQRAVERTLRTGEREARPSRMEVVSILLRNPFHHSLPFSIPVHFTNGTYHVVGFDGSSTVDEFLQRLNQEIGMRKPSHSGFALFTDDPSGRDLEHCLQGSVKICDAISKWEQAMKELHPGKSEGGTRVVKLMYKNRLYFRSQVKGETDRERLLLASQTSREIVAGRFPINKELALEMAALMAQVEYGDLEKPALPGPGGTSPAKAQHLLQQVLDRFHPRRYRHGAPAEQLRHLADMLTTKWATLQGCSPPECIRIYLTVARKWPFFGAKLFAAQPAQLSSKENALVWIAVNEDGVSILDHNTMQVHITYPYSSVTTFGGCRDDFMLVIRSIPDKSSGKSHIEKLIFRMAAPKIAEATFIMASYMNHCTTTVNPPTNPPGACQLWELDGRQFFSSVSCATKGPTLL

SEQ ID NO: 39675 - protein, 269 aa, Homo sapiens
MPFMDESSGSDDDCSSQASFRISVPSSESRKTSGLGSPRAIKRGVSMSSLSSEGDYAIPPDACSLDSDYSEPEHKLQRTSSYSTDGLGLGGESLEKSGYLLKMGSQVKTWKRRWFVLRQGQIMYYKSPSDVIRKPQGQVDLNSRCQIVRGEGSQTFQLISEKKTYYLTADSPSLLEEWIRVLQSLLKVQATGPPALLRGGTKPTVKGWLTKVKHGHSKVVWCALVGKIFYYYRSHEDKVLLSLLTIPTLLLPPKHMTATLCPDESPYPT

SEQ ID NO: 39676 - protein, 188 aa, Homo sapiens
MDVNIAPLRAWDDFFPGSDRFARPDFRDISKWNNRVVSNLLYYQTNYLVVAAMMISIVGFLSPFNMILGGIVVVLVFTGFVWAAHNKDVLRRMKKRYPTTFVMVVMLASYFLISMFGGVMVFVFGITFPLLLMFIHASLRLRNLKNKLENKMEGIGLKRTPMGIVLDALEQQEEGINRLTDYISKVKE

SEQ ID NO: 39677 - protein, 1023 aa, Homo sapiens
MAGNDCGALLDEELSSFFLNYLADTQGGGSGEEQLYADFPELDLSQLDASDFDSATCFGELQWCPENSETEPNQYSPDDSELFQIDSENEALLAELTKTLDDIPEDDVGLAAFPALDGGDALSCTSASPAPSSAPPSPAPEKPSAPAPEVDELSLLQKLLLATSYPTSSSDTQKEGTAWRQAGLRSKSQRPCVKADSTQDKKAPMMQSQSRSCTELHKHLTSAQCCLQDRGLQPPCLQSPRLPAKEDKEPGEDCPSPQPAPASPRDSLALGRADPGAPVSQEDMQAMVQLIRYMHTYCLPQRKLPPQTPEPLPKACSNPSQQVRSRPWSRHHSKASWAEFSILRELLAQDVLCDVSKPYRLATPVYASLTPRSRPRPPKDSQASPGRPSSVEEVRIAASPKSTGPRPSLRPLRLEVKREVRRPARLQQQEEEDEEEEEEEEEEEKEEEEEWGRKRPGRGLPWTKLGRKLESSVCPVRRSRRLNPELGPWLTFADEPLVPSEPQGALPSLCLAPKAYDVERELGSPTDEDSGQDQQLLRGPQIPALESPCESGCGDMDEDPSCPQLPPRDSPRCLMLALSQSDPTFGKKSFEQTLTVELCGTAGLTPPTTPPYKPTEEDPFKPDIKHSLGKEIALSLPSPEGLSLKATPGAAHKLPKKHPERSELLSHLRHATAQPASQAGQKRPFSCSFGDHDYCQVLRPEGVLQRKVLRSWEPSGVHLEDWPQQGAPWAEAQAPGREEDRSCDAGAPPKDSTLLRDHEIRASLTKHFGLLETALEEEDLASCKSPEYDTVFEDSSSSSGESSFLPEEEEEEGEEEEEDDEEEDSGVSPTCSDHCPYQSPPSKANRQLCSRSRSSSGSSPCHSWSPATRRNFRCESRGPCSDRTPSIRHARKRREKAIGEGRVVYIQNLSSDMSSRELKRRFEVFGEIEECEVLTRNRRGEKYGFITYRCSEHAALSLTKGAALRKRNEPSFQLSYGGLRHFCWPRYTDYDSNSEEALPASGKSKYEAMDFDSLLKEAQQSLH

SEQ ID NO: 39678 - protein, 1002 aa, Homo sapiens
MGVYKGGGSGEEQLYADFPELDLSQLDASDFDSATCFGELQWCPENSETEPNQYSPDDSELFQIDSENEALLAELTKTLDDIPEDDVGLAAFPALDGGDALSCTSASPAPSSAPPSPAPEKPSAPAPEVDELSLLQKLLLATSYPTSSSDTQKEGTAWRQAGLRSKSQRPCVKADSTQDKKAPMMQSQSRSCTELHKHLTSAQCCLQDRGLQPPCLQSPRLPAKEDKEPGEDCPSPQPAPASPRDSLALGRADPGAPVSQEDMQAMVQLIRYMHTYCLPQRKLPPQTPEPLPKACSNPSQQVRSRPWSRHHSKASWAEFSILRELLAQDVLCDVSKPYRLATPVYASLTPRSRPRPPKDSQASPGRPSSVEEVRIAASPKSTGPRPSLRPLRLEVKREVRRPARLQQQEEEDEEEEEEEEEEEKEEEEEWGRKRPGRGLPWTKLGRKLESSVCPVRRSRRLNPELGPWLTFADEPLVPSEPQGALPSLCLAPKAYDVERELGSPTDEDSGQDQQLLRGPQIPALESPCESGCGDMDEDPSCPQLPPRDSPRCLMLALSQSDPTFGKKSFEQTLTVELCGTAGLTPPTTPPYKPTEEDPFKPDIKHSLGKEIALSLPSPEGLSLKATPGAAHKLPKKHPERSELLSHLRHATAQPASQAGQKRPFSCSFGDHDYCQVLRPEGVLQRKVLRSWEPSGVHLEDWPQQGAPWAEAQAPGREEDRSCDAGAPPKDSTLLRDHEIRASLTKHFGLLETALEEEDLASCKSPEYDTVFEDSSSSSGESSFLPEEEEEEGEEEEEDDEEEDSGVSPTCSDHCPYQSPPSKANRQLCSRSRSSSGSSPCHSWSPATRRNFRCESRGPCSDRTPSIRHARKRREKAIGEGRVVYIQNLSSDMSSRELKRRFEVFGEIEECEVLTRNRRGEKYGFITYRCSEHAALSLTKGAALRKRNEPSFQLSYGGLRHFCWPRYTDYDSNSEEALPASGKSKYEAMDFDSLLKEAQQSLH

SEQ ID NO: 39679 - protein, 1017 aa, Homo sapiens
MAGNDCGALLDEELSSFFLNYLADTQGGGSGEEQLYADFPELDLSQLDASDFDSATCFGELQWCPENSETEPNQYSPDDSELFQIDSENEALLAELTKTLDDIPEDDVGLAAFPALDGGDALSCTSASPAPSSAPPSPAPEKPSAPAPEVDELSLLQKLLLATSYPTSSSDTQKEGTAWRQAGLRSKSQRPCVKADSTQDKKAPMMQSQSRSCTELHKHLTSAQCCLQDRGLQPPCLQSPRLPAKEDKEPGEDCPSPQPAPASPRDSLALGRADPGAPVSQEDMQAMVQLIRYMHTYCLPQRKLPPQTPEPLPKACSNPSQQVRSRPWSRHHSKASWAEFSILRELLAQDVLCDVSKPYRLATPVYASLTPRSRPRPPKDSQASPGRPSSVEEVRIAASPKSTGPRPSLRPLRLEVKREVRRPARLQQQEEEDEEEEEEEEEEEKEEEEEWGRKRPGRGLPWTKLGRKLESSVCPVRRSRRLNPELGPWLTFADEPLVPSEPQGALPSLCLAPKAYDVERELGSPTDEDSGQDQQLLRGPQIPALESPCESGCGDMDEDPSCPQLPPRDSPRCLMLALSQSDPTFGKKSFEQTLTVELCGTAGLTPPTTPPYKPTEEDPFKPDIKHSLGKEIALSLPSPEGLSLKATPGAAHKLPKKHPERSELLSHLRHATAQPASQAGQKRPFSCSFGDHDYCQVLRPEGVLQRKVLRSWEPSGVHLEDWPQQGAPWAEAQAPGREEDRSCDAGAPPKDSTLLRDHEIRASLTKHFGLLETALEEEDLASCKSPEYDTVFEDSSSSSGESSFLPEEEEEEGEEEEEDDEEEDSGVSPTCSDHCPYQSPPSKANRQLCSRSRSSSGSSPCHSWSPATRRNFRCESRGPCSDRTPSIRHARKRREKAIGEGRVVYIQNLSSDMSSRELKRRFEVFGEIEECEVLTRNRRGEKYGFITYRCSEHAALSLTKGAALRKRNEPSFQLSYGGLRHFCWPRYTDYGKPLKPSHSLVRLKAWEAVPSLNKTQS

SEQ ID NO: 39680 - protein, 996 aa, Homo sapiens
MGVYKGGGSGEEQLYADFPELDLSQLDASDFDSATCFGELQWCPENSETEPNQYSPDDSELFQIDSENEALLAELTKTLDDIPEDDVGLAAFPALDGGDALSCTSASPAPSSAPPSPAPEKPSAPAPEVDELSLLQKLLLATSYPTSSSDTQKEGTAWRQAGLRSKSQRPCVKADSTQDKKAPMMQSQSRSCTELHKHLTSAQCCLQDRGLQPPCLQSPRLPAKEDKEPGEDCPSPQPAPASPRDSLALGRADPGAPVSQEDMQAMVQLIRYMHTYCLPQRKLPPQTPEPLPKACSNPSQQVRSRPWSRHHSKASWAEFSILRELLAQDVLCDVSKPYRLATPVYASLTPRSRPRPPKDSQASPGRPSSVEEVRIAASPKSTGPRPSLRPLRLEVKREVRRPARLQQQEEEDEEEEEEEEEEEKEEEEEWGRKRPGRGLPWTKLGRKLESSVCPVRRSRRLNPELGPWLTFADEPLVPSEPQGALPSLCLAPKAYDVERELGSPTDEDSGQDQQLLRGPQIPALESPCESGCGDMDEDPSCPQLPPRDSPRCLMLALSQSDPTFGKKSFEQTLTVELCGTAGLTPPTTPPYKPTEEDPFKPDIKHSLGKEIALSLPSPEGLSLKATPGAAHKLPKKHPERSELLSHLRHATAQPASQAGQKRPFSCSFGDHDYCQVLRPEGVLQRKVLRSWEPSGVHLEDWPQQGAPWAEAQAPGREEDRSCDAGAPPKDSTLLRDHEIRASLTKHFGLLETALEEEDLASCKSPEYDTVFEDSSSSSGESSFLPEEEEEEGEEEEEDDEEEDSGVSPTCSDHCPYQSPPSKANRQLCSRSRSSSGSSPCHSWSPATRRNFRCESRGPCSDRTPSIRHARKRREKAIGEGRVVYIQNLSSDMSSRELKRRFEVFGEIEECEVLTRNRRGEKYGFITYRCSEHAALSLTKGAALRKRNEPSFQLSYGGLRHFCWPRYTDYGKPLKPSHSLVRLKAWEAVPSLNKTQS

SEQ ID NO: 39681 - protein, 984 aa, Homo sapiens
MAGNDCGALLDEELSSFFLNYLADTQGGGSGEEQLYADFPELDLSQLDASDFDSATCFGELQWCPENSETEPNQYSPDDSELFQIDSENEALLAELTKTLDDIPEDDVGLAAFPALDGGDALSCTSASPAPSSAPPSPAPEKPSAPAPEVDELSLADSTQDKKAPMMQSQSRSCTELHKHLTSAQCCLQDRGLQPPCLQSPRLPAKEDKEPGEDCPSPQPAPASPRDSLALGRADPGAPVSQEDMQAMVQLIRYMHTYCLPQRKLPPQTPEPLPKACSNPSQQVRSRPWSRHHSKASWAEFSILRELLAQDVLCDVSKPYRLATPVYASLTPRSRPRPPKDSQASPGRPSSVEEVRIAASPKSTGPRPSLRPLRLEVKREVRRPARLQQQEEEDEEEEEEEEEEEKEEEEEWGRKRPGRGLPWTKLGRKLESSVCPVRRSRRLNPELGPWLTFADEPLVPSEPQGALPSLCLAPKAYDVERELGSPTDEDSGQDQQLLRGPQIPALESPCESGCGDMDEDPSCPQLPPRDSPRCLMLALSQSDPTFGKKSFEQTLTVELCGTAGLTPPTTPPYKPTEEDPFKPDIKHSLGKEIALSLPSPEGLSLKATPGAAHKLPKKHPERSELLSHLRHATAQPASQAGQKRPFSCSFGDHDYCQVLRPEGVLQRKVLRSWEPSGVHLEDWPQQGAPWAEAQAPGREEDRSCDAGAPPKDSTLLRDHEIRASLTKHFGLLETALEEEDLASCKSPEYDTVFEDSSSSSGESSFLPEEEEEEGEEEEEDDEEEDSGVSPTCSDHCPYQSPPSKANRQLCSRSRSSSGSSPCHSWSPATRRNFRCESRGPCSDRTPSIRHARKRREKAIGEGRVVYIQNLSSDMSSRELKRRFEVFGEIEECEVLTRNRRGEKYGFITYRCSEHAALSLTKGAALRKRNEPSFQLSYGGLRHFCWPRYTDYDSNSEEALPASGKSKYEAMDFDSLLKEAQQSLH

SEQ ID NO: 39682 - protein, 959 aa, Homo sapiens
MGGGSGEEQLYADFPELDLSQLDASDFDSATCFGELQWCPENSETEPNQYSPDDSELFQIDSENEALLAELTKTLDDIPEDDVGLAAFPALDGGDALSCTSASPAPSSAPPSPAPEKPSAPAPEVDELSLADSTQDKKAPMMQSQSRSCTELHKHLTSAQCCLQDRGLQPPCLQSPRLPAKEDKEPGEDCPSPQPAPASPRDSLALGRADPGAPVSQEDMQAMVQLIRYMHTYCLPQRKLPPQTPEPLPKACSNPSQQVRSRPWSRHHSKASWAEFSILRELLAQDVLCDVSKPYRLATPVYASLTPRSRPRPPKDSQASPGRPSSVEEVRIAASPKSTGPRPSLRPLRLEVKREVRRPARLQQQEEEDEEEEEEEEEEEKEEEEEWGRKRPGRGLPWTKLGRKLESSVCPVRRSRRLNPELGPWLTFADEPLVPSEPQGALPSLCLAPKAYDVERELGSPTDEDSGQDQQLLRGPQIPALESPCESGCGDMDEDPSCPQLPPRDSPRCLMLALSQSDPTFGKKSFEQTLTVELCGTAGLTPPTTPPYKPTEEDPFKPDIKHSLGKEIALSLPSPEGLSLKATPGAAHKLPKKHPERSELLSHLRHATAQPASQAGQKRPFSCSFGDHDYCQVLRPEGVLQRKVLRSWEPSGVHLEDWPQQGAPWAEAQAPGREEDRSCDAGAPPKDSTLLRDHEIRASLTKHFGLLETALEEEDLASCKSPEYDTVFEDSSSSSGESSFLPEEEEEEGEEEEEDDEEEDSGVSPTCSDHCPYQSPPSKANRQLCSRSRSSSGSSPCHSWSPATRRNFRCESRGPCSDRTPSIRHARKRREKAIGEGRVVYIQNLSSDMSSRELKRRFEVFGEIEECEVLTRNRRGEKYGFITYRCSEHAALSLTKGAALRKRNEPSFQLSYGGLRHFCWPRYTDYDSNSEEALPASGKSKYEAMDFDSLLKEAQQSLH

SEQ ID NO: 39683 - protein, 263 aa, Homo sapiens
MEAGAGGAGSDTKGGGSPATPEDPRSPAKPAAPEDPQMPAQPALPQLPRRPRTLDEDGAPSEDGAAGGSEPAPEDAPAQAAGEAGPVSKAAAGGAPHIGFVGEPPPYAPPDPKAAPLLYPPFPQVPVVLQPAPSALFPPPAQLYPAAPTPPALFSPPAGAAFPFPVYNGPMAGVPGPATVEHRPLPKDYMMESVLVTLFCCLLTGLIAIVYSHEARAALGRGDLAQAEEASRKARSLVLFSLLFGVFVSTSWVIYVVVALYLP

SEQ ID NO: 39684 - protein, 509 aa, Homo sapiens
MEFSGRKWRKLRLAGDQRNASYPHCLQFYLQPPSENISLIEFENLAIDRVKLLKSVENLGVSYVKGTEQYQSKLESELRKLKFSYRENLEDEYEPRRRDHISHFILRLAYCQSEELRRWFIQQEMDLLRFRFSILPKDKIQDFLKDSQLQFEAISDEEKTLREQEIVASSPSLSGLKLGFESIYKIPFADALDLFRGRKVYLEDGFAYVPLKDIVAIILNEFRAKLSKALALTARSLPAVQSDERLQPLLNHLSHSYTGQDYSTQGNVGKISLDQIDLLSTKSFPPCMRQLHKALRENHHLRHGGRMQYGLFLKGIGLTLEQALQFWKQEFIKGKMDPDKFDKGYSYNIRHSFGKEGKRTDYTPFSCLKIILSNPPSQGDYHGCPFRHSDPELLKQKLQSYKISPGGISQILDLVKGTHYQVACQKYFEMIHNVDDCGFSLNHPNQFFCESQRILNGGKDIKKEPIQPETPQPKPSVQKTKDASSALASLNSSLEMDMEGLEDYFSEDS

SEQ ID NO: 39685 - protein, 158 aa, Homo sapiens
MEFSGRKWRKLRLAGDQRNASYPHCLQFYLQPPSENISLIEFENLAIDRVKLLKSVENLGVSYVKGTEQYQSKLESELRKLKFSYRENLEDEYEPRRRDHISHFILRLAYCQSEELRRWFIQQEMDLLRFRFSILPKDKIQDFLKDSQLQFEAVSIFL

SEQ ID NO: 39686 - protein, 1718 aa, Homo sapiens
MNQNTTEPVAATETLAEVPEHVLRGLPEEVRLFPSAVDKTRIGVWATKPILKGKKFGPFVGDKKKRSQVKNNVYMWEVYYPNLGWMCIDATDPEKGNWLRYVNWACSGEEQNLFPLEINRAIYYKTLKPIAPGEELLVWYNGEDNPEIAAAIEEERASARSKRSSPKSRKGKKKSQENKNKGNKIQDIQLKTSEPDFTSANMRDSAEGPKEDEEKPSASALEQPATLQEVASQEVPPELATPAPAWEPQPEPDERLEAAACEVNDLGEEEEEEEEEDEEEEEDDDDDELEDEGEEEASMPNENSVKEPEIRCDEKPEDLLEEPKTTSEETLEDCSEVTPAMQIPRTKEEANGDVFETFMFPCQHCERKFTTKQGLERHMHIHISTVNHAFKCKYCGKAFGTQINRRRHERRHEAGLKRKPSQTLQPSEDLADGKASGENVASKDDSSPPSLGPDCLIMNSEKASQDTINSSVVEENGEVKELHPCKYCKKVFGTHTNMRRHQRRVHERHLIPKGVRRKGGLEEPQPPAEQAQATQNVYVPSTEPEEEGEADDVYIMDISSNISENLNYYIDGKIQTNNNTSNCDVIEMESASADLYGINCLLTPVTVEITQNIKTTQVPVTEDLPKEPLGSTNSEAKKRRTASPPALPKIKAETDSDPMVPSCSLSLPLSISTTEAVSFHKEKSVYLSSKLKQLLQTQDKLTPAGISATEIAKLGPVCVSAPASMLPVTSSRFKRRTSSPPSSPQHSPALRDFGKPSDGKAAWTDAGLTSKKSKLESHSDSPAWSLSGRDERETVSPPCFDEYKMSKEWTASSAFSSVCNQQPLDLSSGVKQKAEGTGKTPVQWESVLDLSVHKKHCSDSEGKEFKESHSVQPTCSAVKKRKPTTCMLQKVLLNEYNGIDLPVENPADGTRSPSPCKSLEAQPDPDLGPGSGFPAPTVESTPDVCPSSPALQTPSLSSGQLPPLLIPTDPSSPPPCPPVLTVATPPPPLLPTVPLPAPSSSASPHPCPSPLSNATAQSPLPILSPTVSPSPSPIPPVEPLMSAASPGPPTLSSSSSSSSSSSSFSSSSSSSSPSPPPLSAISSVVSSGDNLEASLPMISFKQEELENEGLKPREEPQSAAEQDVVVQETFNKNFVCNVCESPFLSIKDLTKHLSIHAEEWPFKCEFCVQLFKDKTDLSEHRFLLHGVGNIFVCSVCKKEFAFLCNLQQHQRDLHPDKVCTHHEFESGTLRPQNFTDPSKAHVEHMQSLPEDPLETSKEEEELNDSSEELYTTIKIMASGIKTKDPDVRLGLNQHYPSFKPPPFQYHHRNPMGIGVTATNFTTHNIPQTFTTAIRCTKCGKGVDNMPELHKHILACASASDKKRYTPKKNPVPLKQTVQPKNGVVVLDNSGKNAFRRMGQPKRLNFSVELSKMSSNKLKLNALKKKNQLVQKAILQKNKSAKQKADLKNACESSSHICPYCNREFTYIGSLNKHAAFSCPKKPLSPPKKKVSHSSKKGGHSSPASSDKNSNSNHRRRTADAEIKMQSMQTPLGKTRARSSGPTQVPLPSSSFRSKQNVKFAASVKSKKPSSSSLRNSSPIRMAKITHVEGKKPKAVAKNHSAQLSSKTSRSLHVRVQKSKAVLQSKSTLASKKRTDRFNIKSRERSGGPVTRSLQLAAAADLSENKREDGSAKQELKDFSYSLRLASRCSPPAAPYITRQYRKVKAPAAAQFQGPFFKE

SEQ ID NO: 39687 - protein, 1682 aa, Homo sapiens
MNQNTTEPVAATETLAEVPEHVLRGLPEEVRLFPSAVDKTRIGVWATKPILKGKKFGPFVGDKKKRSQVKNNVYMWEVYYPNLGWMCIDATDPEKGNWLRYVNWACSGEEQNLFPLEINRAIYYKTLKPIAPGEELLVWYNGEDNPEIAAAIEEERASARSKRSSPKSRKGKKKSQENKNKGNKIQDIQLKTSEPDFTSANMRDSAEGPKEDEEKPSASALEQPATLQEVASQEVPPELATPAPAWEPQPEPDERLEAAACEVNDLGEEEEEEEEEDEEEEEDDDDDELEDEGEEEASMPNENSVKEPEIRCDEKPEDLLEEPKTTSEETLEDCSEVTPAMQIPRTKEEANGDVFETFMFPCQHCERKFTTKQGLERHMHIHISTVNHAFKCKYCGKAFGTQINRRRHERRHEAGLKRKPSQTLQPSEDLADGKASGENVASKDDSSPPSLGPDCLIMNSEKASQDTINSSVVEENGEVKELHPCKYCKKVFGTHTNMRRHQRRVHERHLIPKGVRRKGGLEEPQPPAEQAQATQNVYVPSTEPEEEGEADDVYIMDISSNISENLNYYIDGKIQTNNNTSNCDVIEMESASADLYGINCLLTPVTVEITQNIKTTQVPVTEDLPKEPLGSTNSEAKKRRTASPPALPKIKAETDSDPMVPSCSLSLPLSISTTEAVSFHKEKSVYLSSKLKQLLQTQDKLTPAGISATEIAKLGPVCVSAPASMLPVTSSRFKRRTSSPPSSPQHSPALRDFGKPSDGKAAWTDAGLTSKKSKLESHSDSPAWSLSGRDERETVSPPCFDEYKMSKEWTASSAFSSVCNQQPLDLSSGVKQKAEGTGKTPVQWESVLDLSVHKKHCSDSEGKEFKESHSVQPTCSAVKKRKPTTCMLQKVLLNEYNGIDLPVENPADGTRSPSPCKSLEAQPDPDLGPGSGFPAPTVESTPDVCPSSPALQTPSLSSGQLPPLLIPTDPSSPPPCPPVLTVATPPPPLLPTVPLPAPSSSASPHPCPSPLSNATAQSPLPILSPTVSPSPSPIPPVEPLMSAASPGPPTLSSSSSSSSSSSSFSSSSSSSSPSPPPLSAISSVVSSGDNLEASLPMISFKQEELENEGLKPREEPQSAAEQDVVVQETFNKNFVCNVCESPFLSIKDLTKHLSIHAEEWPFKCEFCVQLFKDKTDLSEHRFLLHGVGNIFVCSVCKKEFAFLCNLQQHQRDLHPDKVCTHHEFESGTLRPQNFTDPSKAHVEHMQSLPEDPLETSKEEEELNDSSEELYTTIKIMASGIKTKDPDVRLGLNQHYPSFKPPPFQYHHRNPMGIGVTATNFTTHNIPQTFTTAIRCTKCGKGVDNMPELHKHILACASASDKKRYTPKKNPVPLKQTVQPKNGVVVLDNSGKNAFRRMGQPKRLNFSVELSKMSSNKLKLNALKKKNQLVQKAILQKNKSAKQKADLKNACESSSHICPYCNREFTYIGSLNKHAAFSCPKKPLSPPKKKVSHSSKKGGHSSPASSDKNSNSNHRRRTADAEIKMQSMQTPLGKTRARSSGPTQVPLPSSSFRSKQNVKFAASVKSKKPSSSSLRNSSPIRMAKITHVEGKKPKAVAKNHSAQLSSKTSRSLHVRVQKSKAVLQSKSTLASKKRTDRFNIKSRERSGGPVTRSLQLAAAADLSENKREDGSAKQELKDFRNFL

SEQ ID NO: 39688 - protein, 1517 aa, Homo sapiens
MRDSAEGPKEDEEKPSASALEQPATLQEVASQEVPPELATPAPAWEPQPEPDERLEAAACEVNDLGEEEEEEEEEDEEEEEDDDDDELEDEGEEEASMPNENSVKEPEIRCDEKPEDLLEEPKTTSEETLEDCSEVTPAMQIPRTKEEANGDVFETFMFPCQHCERKFTTKQGLERHMHIHISTVNHAFKCKYCGKAFGTQINRRRHERRHEAGLKRKPSQTLQPSEDLADGKASGENVASKDDSSPPSLGPDCLIMNSEKASQDTINSSVVEENGEVKELHPCKYCKKVFGTHTNMRRHQRRVHERHLIPKGVRRKGGLEEPQPPAEQAQATQNVYVPSTEPEEEGEADDVYIMDISSNISENLNYYIDGKIQTNNNTSNCDVIEMESASADLYGINCLLTPVTVEITQNIKTTQVPVTEDLPKEPLGSTNSEAKKRRTASPPALPKIKAETDSDPMVPSCSLSLPLSISTTEAVSFHKEKSVYLSSKLKQLLQTQDKLTPAGISATEIAKLGPVCVSAPASMLPVTSSRFKRRTSSPPSSPQHSPALRDFGKPSDGKAAWTDAGLTSKKSKLESHSDSPAWSLSGRDERETVSPPCFDEYKMSKEWTASSAFSSVCNQQPLDLSSGVKQKAEGTGKTPVQWESVLDLSVHKKHCSDSEGKEFKESHSVQPTCSAVKKRKPTTCMLQKVLLNEYNGIDLPVENPADGTRSPSPCKSLEAQPDPDLGPGSGFPAPTVESTPDVCPSSPALQTPSLSSGQLPPLLIPTDPSSPPPCPPVLTVATPPPPLLPTVPLPAPSSSASPHPCPSPLSNATAQSPLPILSPTVSPSPSPIPPVEPLMSAASPGPPTLSSSSSSSSSSSSFSSSSSSSSPSPPPLSAISSVVSSGDNLEASLPMISFKQEELENEGLKPREEPQSAAEQDVVVQETFNKNFVCNVCESPFLSIKDLTKHLSIHAEEWPFKCEFCVQLFKDKTDLSEHRFLLHGVGNIFVCSVCKKEFAFLCNLQQHQRDLHPDKVCTHHEFESGTLRPQNFTDPSKAHVEHMQSLPEDPLETSKEEEELNDSSEELYTTIKIMASGIKTKDPDVRLGLNQHYPSFKPPPFQYHHRNPMGIGVTATNFTTHNIPQTFTTAIRCTKCGKGVDNMPELHKHILACASASDKKRYTPKKNPVPLKQTVQPKNGVVVLDNSGKNAFRRMGQPKRLNFSVELSKMSSNKLKLNALKKKNQLVQKAILQKNKSAKQKADLKNACESSSHICPYCNREFTYIGSLNKHAAFSCPKKPLSPPKKKVSHSSKKGGHSSPASSDKNSNSNHRRRTADAEIKMQSMQTPLGKTRARSSGPTQVPLPSSSFRSKQNVKFAASVKSKKPSSSSLRNSSPIRMAKITHVEGKKPKAVAKNHSAQLSSKTSRSLHVRVQKSKAVLQSKSTLASKKRTDRFNIKSRERSGGPVTRSLQLAAAADLSENKREDGSAKQELKDFSYSLRLASRCSPPAAPYITRQYRKVKAPAAAQFQGPFFKE

SEQ ID NO: 39689 - protein, 226 aa, Homo sapiens
MNQNTTEPVAATETLAEVPEHVLRGLPEEVRLFPSAVDKTRIGVWATKPILKGKKFGPFVGDKKKRSQVKNNVYMWEVYYPNLGWMCIDATDPEKGNWLRYVNWACSGEEQNLFPLEINRAIYYKTLKPIAPGEELLVWYNGEDNPEIAAAIEEERASARSKRSSPKSRKATASAWRPDALHQRPRTSPGSIGRSKLQLQPSSRDHSSKSRHSGCSLTAPEVTWNQ

SEQ ID NO: 39690 - protein, 1481 aa, Homo sapiens
MRDSAEGPKEDEEKPSASALEQPATLQEVASQEVPPELATPAPAWEPQPEPDERLEAAACEVNDLGEEEEEEEEEDEEEEEDDDDDELEDEGEEEASMPNENSVKEPEIRCDEKPEDLLEEPKTTSEETLEDCSEVTPAMQIPRTKEEANGDVFETFMFPCQHCERKFTTKQGLERHMHIHISTVNHAFKCKYCGKAFGTQINRRRHERRHEAGLKRKPSQTLQPSEDLADGKASGENVASKDDSSPPSLGPDCLIMNSEKASQDTINSSVVEENGEVKELHPCKYCKKVFGTHTNMRRHQRRVHERHLIPKGVRRKGGLEEPQPPAEQAQATQNVYVPSTEPEEEGEADDVYIMDISSNISENLNYYIDGKIQTNNNTSNCDVIEMESASADLYGINCLLTPVTVEITQNIKTTQVPVTEDLPKEPLGSTNSEAKKRRTASPPALPKIKAETDSDPMVPSCSLSLPLSISTTEAVSFHKEKSVYLSSKLKQLLQTQDKLTPAGISATEIAKLGPVCVSAPASMLPVTSSRFKRRTSSPPSSPQHSPALRDFGKPSDGKAAWTDAGLTSKKSKLESHSDSPAWSLSGRDERETVSPPCFDEYKMSKEWTASSAFSSVCNQQPLDLSSGVKQKAEGTGKTPVQWESVLDLSVHKKHCSDSEGKEFKESHSVQPTCSAVKKRKPTTCMLQKVLLNEYNGIDLPVENPADGTRSPSPCKSLEAQPDPDLGPGSGFPAPTVESTPDVCPSSPALQTPSLSSGQLPPLLIPTDPSSPPPCPPVLTVATPPPPLLPTVPLPAPSSSASPHPCPSPLSNATAQSPLPILSPTVSPSPSPIPPVEPLMSAASPGPPTLSSSSSSSSSSSSFSSSSSSSSPSPPPLSAISSVVSSGDNLEASLPMISFKQEELENEGLKPREEPQSAAEQDVVVQETFNKNFVCNVCESPFLSIKDLTKHLSIHAEEWPFKCEFCVQLFKDKTDLSEHRFLLHGVGNIFVCSVCKKEFAFLCNLQQHQRDLHPDKVCTHHEFESGTLRPQNFTDPSKAHVEHMQSLPEDPLETSKEEEELNDSSEELYTTIKIMASGIKTKDPDVRLGLNQHYPSFKPPPFQYHHRNPMGIGVTATNFTTHNIPQTFTTAIRCTKCGKGVDNMPELHKHILACASASDKKRYTPKKNPVPLKQTVQPKNGVVVLDNSGKNAFRRMGQPKRLNFSVELSKMSSNKLKLNALKKKNQLVQKAILQKNKSAKQKADLKNACESSSHICPYCNREFTYIGSLNKHAAFSCPKKPLSPPKKKVSHSSKKGGHSSPASSDKNSNSNHRRRTADAEIKMQSMQTPLGKTRARSSGPTQVPLPSSSFRSKQNVKFAASVKSKKPSSSSLRNSSPIRMAKITHVEGKKPKAVAKNHSAQLSSKTSRSLHVRVQKSKAVLQSKSTLASKKRTDRFNIKSRERSGGPVTRSLQLAAAADLSENKREDGSAKQELKDFRNFL

SEQ ID NO: 39691 - protein, 1276 aa, Homo sapiens
MRSKARARKLAKSDGDVVNNMYEPNRDLLASHSAEDEAEDSAMSPIPVGPPSPFPTSEDFTPKEGSPYEAPVYIPEDIPIPADFELRESSIPGAGLGVWAKRKMEAGERLGPCVVVPRAAAKETDFGWEQILTDVEVSPQEGCITKISEDLGSEKFCVDANQAGAGSWLKYIRVACSCDDQNLTMCQISEQIYYKVIKDIEPGEELLVHVKEGVYPLGTVPPGLDEEPTFRCDECDELFQSKLDLRRHKKYTCGSVGAALYEGLAEELKPEGLGGGSGQAHECKDCERMFPNKYSLEQHMVIHTEEREYKCDQCPKAFNWKSNLIRHQMSHDSGKRFECENCVKVFTDPSNLQRHIRSQHVGARAHACPDCGKTFATSSGLKQHKHIHSTVKPFICEVCHKSYTQFSNLCRHKRMHADCRTQIKCKDCGQMFSTTSSLNKHRRFCEGKNHYTPGGIFAPGLPLTPSPMMDKAKPSPSLNHASLGFNEYFPSRPHPGSLPFSTAPPTFPALTPGFPGIFPPSLYPRPPLLPPTSLLKSPLNHTQDAKLPSPLGNPALPLVSAVSNSSQGTTAAAGPEEKFESRLEDSCVEKLKTRSSDMSDGSDFEDVNTTTGTDLDTTTGTGSDLDSDVDSDPDKDKGKGKSAEGQPKFGGGLAPPGAPNSVAEVPVFYSQHSFFPPPDEQLLTATGAAGDSIKAIASIAEKYFGPGFMGMQEKKLGSLPYHSAFPFQFLPNFPHSLYPFTDRALAHNLLVKAEPKSPRDALKVGGPSAECPFDLTTKPKDVKPILPMPKGPSAPASGEEQPLDLSIGSRARASQNGGGREPRKNHVYGERKLGAGEGLPQVCPARMPQQPPLHYAKPSPFFMDPIYSRVEKRKVTDPVGALKEKYLRPSPLLFHPQMSAIETMTEKLESFAAMKADSGSSLQPLPHHPFNFRSPPPTLSDPILRKGKERYTCRYCGKIFPRSANLTRHLRTHTGEQPYRCKYCDRSFSISSNLQRHVRNIHNKEKPFKCHLCNRCFGQQTNLDRHLKKHEHENAPVSQHPGVLTNHLGTSASSPTSESDNHALLDEKEDSYFSEIRNFIANSEMNQASTRTEKRADMQIVDGSAQCPGLASEKQEDVEEEDDDDLEEDDEDSLAGKSQDDTVSPAPEPQAAYEDEEDEEPAASLAVGFDHTRRCAEDHEGGLLALEPMPTFGKGLDLRRAAEEAFEVKDVLNSTLDSEALKHTLCRQAKNQAYAMMLSLSEDTPLHTPSQGSLDAWLKVTGATSESGAFHPINHL

SEQ ID NO: 39692 - protein, 1257 aa, Homo sapiens
MRSKARARKLAKSDGDVVNNMYEPNRDLLASHSAEDEAEDSAMSPIPVGPPSPFPTSEDFTPKEGSPYEAPVYIPEDIPIPADFELRESSIPGAGLGVWAKRKMEAGERLGPCVVVPRAAAKETDFGWEQILTDVEVSPQEGCITKISEDLGSEKFCVDANQAGAGSWLKYIRVACSCDDQNLTMCQISEQIYYKVIKDIEPGEELLVHVKEGVYPLGTVPPGLDEEPTFRCDECDELFQSKLDLRRHKKYTCGSVGAALYEGLAEELKPEGLGGGSGQAHECKDCERMFPNKYSLEQHMVIHTEEREYKCDQCPKAFNWKSNLIRHQMSHDSGKRFECENCVKVFTDPSNLQRHIRSQHVGARAHACPDCGKTFATSSGLKQHKHIHSTVKPFICEVCHKSYTQFSNLCRHKRMHADCRTQIKCKDCGQMFSTTSSLNKHRRFCEGKNHYTPGGIFAPGLPLTPSPMMDKAKPSPSLNHASLGFNEYFPSRPHPGSLPFSTAPPTFPALTPGFPGIFPPSLYPRPPLLPPTSLLKSPLNHTQDAKLPSPLGNPALPLVSAVSNSSQGTTAAAGPEEKFESRLEDSCVEKLKTRSSDMSDGSDFEDVNTTTGTDLDTTTGTGSDLDSDVDSDPDKDKGKGKSAEGQPKFGGGLAPPGAPNSVAEVPVFYSQHSFFPPPDEQLLTATGAAGDSIKAIASIAEKYFGPGFMGMQEKKLGSLPYHSAFPFQFLPNFPHSLYPFTDRALAHNLLVKAEPKSPRDALKVGGPSAECPFDLTTKPKDVKPILPMPKGPSAPASGEEQPLDLSIGSRARASQNGGGREPRKNHVYGERKLGAGEGLPQVCPARMPQQPPLHYAKPSPFFMDPIYSRVEKRKVTDPVGALKEKYLRPSPLLFHPQMSAIETMTEKLESFAAMKADSGSSLQPLPHHPFNFRSPPPTLSDPILRKGKERYTCRYCGKIFPRSANLTRHLRTHTGEQPYRCKYCDRSFSISSNLQRHVRNIHNKEKPFKCHLCNRCFGQQTNLDRHLKKHEHENAPVSQHPGVLTNHLGTSASSPTSESDNHALLDEKEDSYFSEIRNFIANSEMNQASTRTEKRADMQIVDGSAQCPGLASEKQEDVEEEDDDDLEEDDEDSLAGKSQDDTVSPAPEPQAAYEDEEDEEPAASLAVGFDHTRRCAEDHEGGLLALEPMPTFGKGLDLRRAAEEAFEVKDVLNSTLDSEALKHTLCRQAKNQGSLDAWLKVTGATSESGAFHPINHL

SEQ ID NO: 39693 - protein, 1276 aa, Homo sapiens
MRSKARARKLAKSDGDVVNNMYEPNRDLLASHSAEDEAEDSAMSPIPVGPPSPFPTSEDFTPKEGSPYEAPVYIPEDIPIPADFELRESSIPGAGLGVWAKRKMEAGERLGPCVVVPRAAAKETDFGWEQILTDVEVSPQEGCITKISEDLGSEKFCVDANQAGAGSWLKYIRVACSCDDQNLTMCQISEQVIYYKVIKDIEPGEELLVHVKEGVYPLGTVPPGLDEEPTFRCDECDELFQSKLDLRRHKKYTCGSVGAALYEGLAEELKPEGLGGGSGQAHECKDCERMFPNKYSLEQHMVIHTEEREYKCDQCPKAFNWKSNLIRHQMSHDSGKRFECENCVKVFTDPSNLQRHIRSQHVGARAHACPDCGKTFATSSGLKQHKHIHSTVKPFICEVCHKSYTQFSNLCRHKRMHADCRTQIKCKDCGQMFSTTSSLNKHRRFCEGKNHYTPGGIFAPGLPLTPSPMMDKAKPSPSLNHASLGFNEYFPSRPHPGSLPFSTAPPTFPALTPGFPGIFPPSLYPRPPLLPPTSLLKSPLNHTQDAKLPSPLGNPALPLVSAVSNSSQGTTAAAGPEEKFESRLEDSCVEKLKTRSSDMSDGSDFEDVNTTTGTDLDTTTGTGSDLDSDVDSDPDKDKGKGKSAEGQPKFGGGLAPPGAPNSVAEVPVFYSQHSFFPPPDEQLLTATGAAGDSIKAIASIAEKYFGPGFMGMQEKKLGSLPYHSAFPFQFLPNFPHSLYPFTDRALAHNLLVKAEPKSPRDALKVGGPSAECPFDLTTKPKDVKPILPMPKGPSAPASGEEQPLDLSIGSRARASQNGGGREPRKNHVYGERKLGAGEGLPQVCPARMPQQPPLHYAKPSPFFMDPIYRVEKRKVTDPVGALKEKYLRPSPLLFHPQMSAIETMTEKLESFAAMKADSGSSLQPLPHHPFNFRSPPPTLSDPILRKGKERYTCRYCGKIFPRSANLTRHLRTHTGEQPYRCKYCDRSFSISSNLQRHVRNIHNKEKPFKCHLCNRCFGQQTNLDRHLKKHEHENAPVSQHPGVLTNHLGTSASSPTSESDNHALLDEKEDSYFSEIRNFIANSEMNQASTRTEKRADMQIVDGSAQCPGLASEKQEDVEEEDDDDLEEDDEDSLAGKSQDDTVSPAPEPQAAYEDEEDEEPAASLAVGFDHTRRCAEDHEGGLLALEPMPTFGKGLDLRRAAEEAFEVKDVLNSTLDSEALKHTLCRQAKNQAYAMMLSLSEDTPLHTPSQGSLDAWLKVTGATSESGAFHPINHL

SEQ ID NO: 39694 - protein, 1092 aa, Homo sapiens
MCQISEQIYYKVIKDIEPGEELLVHVKEGVYPLGTVPPGLDEEPTFRCDECDELFQSKLDLRRHKKYTCGSVGAALYEGLAEELKPEGLGGGSGQAHECKDCERMFPNKYSLEQHMVIHTEEREYKCDQCPKAFNWKSNLIRHQMSHDSGKRFECENCVKVFTDPSNLQRHIRSQHVGARAHACPDCGKTFATSSGLKQHKHIHSTVKPFICEVCHKSYTQFSNLCRHKRMHADCRTQIKCKDCGQMFSTTSSLNKHRRFCEGKNHYTPGGIFAPGLPLTPSPMMDKAKPSPSLNHASLGFNEYFPSRPHPGSLPFSTAPPTFPALTPGFPGIFPPSLYPRPPLLPPTSLLKSPLNHTQDAKLPSPLGNPALPLVSAVSNSSQGTTAAAGPEEKFESRLEDSCVEKLKTRSSDMSDGSDFEDVNTTTGTDLDTTTGTGSDLDSDVDSDPDKDKGKGKSAEGQPKFGGGLAPPGAPNSVAEVPVFYSQHSFFPPPDEQLLTATGAAGDSIKAIASIAEKYFGPGFMGMQEKKLGSLPYHSAFPFQFLPNFPHSLYPFTDRALAHNLLVKAEPKSPRDALKVGGPSAECPFDLTTKPKDVKPILPMPKGPSAPASGEEQPLDLSIGSRARASQNGGGREPRKNHVYGERKLGAGEGLPQVCPARMPQQPPLHYAKPSPFFMDPIYSRVEKRKVTDPVGALKEKYLRPSPLLFHPQMSAIETMTEKLESFAAMKADSGSSLQPLPHHPFNFRSPPPTLSDPILRKGKERYTCRYCGKIFPRSANLTRHLRTHTGEQPYRCKYCDRSFSISSNLQRHVRNIHNKEKPFKCHLCNRCFGQQTNLDRHLKKHEHENAPVSQHPGVLTNHLGTSASSPTSESDNHALLDEKEDSYFSEIRNFIANSEMNQASTRTEKRADMQIVDGSAQCPGLASEKQEDVEEEDDDDLEEDDEDSLAGKSQDDTVSPAPEPQAAYEDEEDEEPAASLAVGFDHTRRCAEDHEGGLLALEPMPTFGKGLDLRRAAEEAFEVKDVLNSTLDSEALKHTLCRQAKNQAYAMMLSLSEDTPLHTPSQGSLDAWLKVTGATSESGAFHPINHL

SEQ ID NO: 39695 - protein, 2896 aa, Homo sapiens
MSEKSGQSTKAKDGKKYATLSLFNTYKGKSLETQKTTARHGLQSLGKVGISRRMPPPANLPSLKAENKGNDPNVNIVPKDGTGWASKQEQHEEEKTPEVPPAQPKPGVAAPPEVAPAPKSWASNKQGGQGDGIQVNSQFQQEFPSLQAAGDQEKKEKETNDDNYGPGPSLRPPNVACWRDGGKAAGSPSSSDQDEKLPGQDESTAGTSEQNDILKVVEKRIACGPPQAKLNGQQAALASQYRAMMPPYMFQQYPRMTYPPLHGPMRFPPSLSETNKGLRGRGPPPSWASEPERPSILSASELKELDKFDNLDAEADEGWAGAQMEVDYTEQLNFSDDDEQGSNSPKENNSEDQGSKASENNENKKETDEVSNTKSSSQIPAQPSVAKVPYGKGPSFNQERGTSSHLPPPPKLLAQQHPPPDRQAVPGRPGPFPSKQQVADEDEIWKQRRRQQSEISAAVERARKRREEEERRMEEQRKAACAEKLKRLDEKLGILEKQPSPEEIREREREKEREREKELEKEQEQEREKEREKDRERQQEKEKELEKEQEKQREMEKERKQEKEKELERQKEKEKELQKMKEQEKECELEKEREKLEEKIEPREPNLEPMVEKQESENSCNKEEEPVFTRQDSNRSEKEATPVVHETEPESGSQPRPAVLSGYFKQFQKSLPPRFQRQQEQMKQQQWQQQQQQGVLPQTVPSQPSSSTVPPPPHRPLYQPMQPHPQHLASMGFDPRWLMMQSYMDPRMMSGRPAMDIPPIHPGMIPPKPLMRRDQMEGSPNSSESFEHIARSARDHAISLSEPRMLWGSDPYPHAEPQQATTPKATEEPEDVRSEAALDQEQITAAYSVEHNQLEAHPKADFIRESSEAQVQKFLSRSVEDVRPHHTDANNQSACFEAPDQKTLSAPQEERISAVESQPSRKRSVSHGSNHTQKPDEQRSEPSAGIPKVTSRCIDSKEPIERPEEKPKKEGFIRSSEGPKPEKVYKSKSETRWGPRPSSNRREEVNDRPVRRSGPIKKPVLRDMKEEREQRKEKEGEKAEKVTEKVVVKPEKTEKKDLPPPPPPPQPPAPIQPQSVPPPIQPEAEKFPSTETATLAQKPSQDTEKPLEPVSTVQVEPAVKTVNQQTMAAPVVKEEKQPEKVISKDLVIERPRPDSRPAVKKESTLPPRTYWKEARERDWFPDQGYRGRGRGEYYSRGRSYRGSYGGRGRGGRGHTRDYPQYRDNKPRAEHIPSGPLRQREESETRSESSDFEVVPKRRRQRGSETDTDSEIHESASDKDSLSKGKLPKREERPENKKPVKPHSSFKPDNHVRIDNRLLEKPYVRDDDKAKPGFLPKGEPTRRGRGGTFRRGGRDPGGRPSRPSTLRRPAYRDNQWNPRQSEVPKPEDGEPPRRHEQFIPIAADKRPPKFERKFDPARERPRRQRPTRPPRQDKPPRFRRLREREAASKSNEVVAVPTNGTVNNVAQEPVNTLGDISGNKTPDLSNQNSSDQANEEWETASESSDFNERRERDEKKNADLNAQTVVKVGENVLPPKREIAKRSFSSQRPVDRQNRRGNNGPPKSGRNFSGPRNERRSGPPSKSGKRGPFDDQPAGTTGVDLINGSSAHHQEGVPNGTGQKNSKDSTGKKREDPKPGPKKPKEKVDALSQFDLNNYASVVIIDDHPEVTVIEDPQSNLNDDGFTEVVSKKQQKRLQDEERRKKEEQVIQVWNKKNANEKGRSQTSKLPPRFAKKQATGIQQAQSSASVPPLASAPLPPSTSASVPASTSAPLPATLTPVPASTSAPVPASTLAPVLASTSAPVPASPLAPVSASASVSASVPASTSAAAITSSSAPASAPAPTPILASVSTPASVTILASASIPILASALASTSAPTPAPAASSPAAPVITAPTIPASAPTASVPLAPASASAPAPAPTPVSAPNPAPPAPAQTQAQTHKPVQNPLQTTSQSSKQPPPSIRLPSAQTPNGTDYVASGKSIQTPQSHGTLTAELWDNKVAPPAVLNDISKKLGPISPPQPPSVSAWNKPLTSFGSAPSSEGAKNGQESGLEIGTDTIQFGAPASNGNENEVVPVLSEKSADKIPEPKEQRQKQPRAGPIKAQKLPDLSPVENKEHKPGPIGKERSLKNRKVKDAQQVEPEGQEKPSPATVRSTDPVTTKETKAVSEMSTEIGTMISVSSAEYGTNAKESVTDYTTPSSSLPNTVATNNTKMEDTLVNNVPLPNTLPLPKRETIQQSSSLTSVPPTTFSLTFKMESARKAWENSPNVREKGSPVTSTAPPIATGVSSSASGPSTANYNSFSSASMPQIPVASVTPTASLSGAGTYTTSSLSTKSTTTSDPPNICKVKPQQLQTSSLPSASHFSQLSCMPSLIAQQQQNPQVYVSQSAAAQIPAFYMDTSHLFNTQHARLAPPSLAQQQGFQPGLSQPTSVQQIPIPIYAPLQGQHQAQLSLGAGPAVSQAQELFSSSLQPYRSQPAFMQSSLSQPSVVLSGTAIHNFPTVQHQELAKAQSGLAFQQTSNTQPIPILYEHQLGQASGLGGSQLIDTHLLQARANLTQASNLYSGQVQQPGQTNFYNTAQSPSALQQVTVPLPASQLSLPNFGSTGQPLIALPQTLQPPLQHTTPQAQAQSLSRPAQVSQPFRGLIPAGTQHSMIATTGKMSEMELKAFGSGIDIKPGTPPIAGRSTTPTSSPFRATSTSPNSQSSKMNSIVYQKQFQSAPATVRMTQPFPTQFAPQILSQPNLVPPLVRAPHTNTFPAPVQRPPMALASQMPPPLTTGLMSHARLPHVARGPCGSLSGVRGNQAQAALKAEQDMKAKQRAEVLQSTQRFFSEQQQSKQIGGGKAQKVDSDSSKPPETLTDPPGVCQEKVEEKPPPAPSIATKPVRTGPIKPQAIKTEETKS

SEQ ID NO: 39696 - protein, 2653 aa, Homo sapiens
MMPPYMFQQYPRMTYPPLHGPMRFPPSLSETNKGLRGRGPPPSWASEPERPSILSASELKELDKFDNLDAEADEGWAGAQMEVDYTEQLNFSDDDEQGSNSPKENNSEDQGSKASENNENKKETDEVSNTKSSSQIPAQPSVAKVPYGKGPSFNQERGTSSHLPPPPKLLAQQHPPPDRQAVPGRPGPFPSKQQVADEDEIWKQRRRQQSEISAAVERARKRREEEERRMEEQRKAACAEKLKRLDEKLGILEKQPSPEEIREREREKEREREKELEKEQEQEREKEREKDRERQQEKEKELEKEQEKQREMEKERKQEKEKELERQKEKEKELQKMKEQEKECELEKEREKLEEKIEPREPNLEPMVEKQESENSCNKEEEPVFTRQDSNRSEKEATPVVHETEPESGSQPRPAVLSGYFKQFQKSLPPRFQRQQEQMKQQQWQQQQQQGVLPQTVPSQPSSSTVPPPPHRPLYQPMQPHPQHLASMGFDPRWLMMQSYMDPRMMSGRPAMDIPPIHPGMIPPKPLMRRDQMEGSPNSSESFEHIARSARDHAISLSEPRMLWGSDPYPHAEPQQATTPKATEEPEDVRSEAALDQEQITAAYSVEHNQLEAHPKADFIRESSEAQVQKFLSRSVEDVRPHHTDANNQSACFEAPDQKTLSAPQEERISAVESQPSRKRSVSHGSNHTQKPDEQRSEPSAGIPKVTSRCIDSKEPIERPEEKPKKEGFIRSSEGPKPEKVYKSKSETRWGPRPSSNRREEVNDRPVRRSGPIKKPVLRDMKEEREQRKEKEGEKAEKVTEKVVVKPEKTEKKDLPPPPPPPQPPAPIQPQSVPPPIQPEAEKFPSTETATLAQKPSQDTEKPLEPVSTVQVEPAVKTVNQQTMAAPVVKEEKQPEKVISKDLVIERPRPDSRPAVKKESTLPPRTYWKEARERDWFPDQGYRGRGRGEYYSRGRSYRGSYGGRGRGGRGHTRDYPQYRDNKPRAEHIPSGPLRQREESETRSESSDFEVVPKRRRQRGSETDTDSEIHESASDKDSLSKGKLPKREERPENKKPVKPHSSFKPDNHVRIDNRLLEKPYVRDDDKAKPGFLPKGEPTRRGRGGTFRRGGRDPGGRPSRPSTLRRPAYRDNQWNPRQSEVPKPEDGEPPRRHEQFIPIAADKRPPKFERKFDPARERPRRQRPTRPPRQDKPPRFRRLREREAASKSNEVVAVPTNGTVNNVAQEPVNTLGDISGNKTPDLSNQNSSDQANEEWETASESSDFNERRERDEKKNADLNAQTVVKVGENVLPPKREIAKRSFSSQRPVDRQNRRGNNGPPKSGRNFSGPRNERRSGPPSKSGKRGPFDDQPAGTTGVDLINGSSAHHQEGVPNGTGQKNSKDSTGKKREDPKPGPKKPKEKVDALSQFDLNNYASVVIIDDHPEVTVIEDPQSNLNDDGFTEVVSKKQQKRLQDEERRKKEEQVIQVWNKKNANEKGRSQTSKLPPRFAKKQATGIQQAQSSASVPPLASAPLPPSTSASVPASTSAPLPATLTPVPASTSAPVPASTLAPVLASTSAPVPASPLAPVSASASVSASVPASTSAAAITSSSAPASAPAPTPILASVSTPASVTILASASIPILASALASTSAPTPAPAASSPAAPVITAPTIPASAPTASVPLAPASASAPAPAPTPVSAPNPAPPAPAQTQAQTHKPVQNPLQTTSQSSKQPPPSIRLPSAQTPNGTDYVASGKSIQTPQSHGTLTAELWDNKVAPPAVLNDISKKLGPISPPQPPSVSAWNKPLTSFGSAPSSEGAKNGQESGLEIGTDTIQFGAPASNGNENEVVPVLSEKSADKIPEPKEQRQKQPRAGPIKAQKLPDLSPVENKEHKPGPIGKERSLKNRKVKDAQQVEPEGQEKPSPATVRSTDPVTTKETKAVSEMSTEIGTMISVSSAEYGTNAKESVTDYTTPSSSLPNTVATNNTKMEDTLVNNVPLPNTLPLPKRETIQQSSSLTSVPPTTFSLTFKMESARKAWENSPNVREKGSPVTSTAPPIATGVSSSASGPSTANYNSFSSASMPQIPVASVTPTASLSGAGTYTTSSLSTKSTTTSDPPNICKVKPQQLQTSSLPSASHFSQLSCMPSLIAQQQQNPQVYVSQSAAAQIPAFYMDTSHLFNTQHARLAPPSLAQQQGFQPGLSQPTSVQQIPIPIYAPLQGQHQAQLSLGAGPAVSQAQELFSSSLQPYRSQPAFMQSSLSQPSVVLSGTAIHNFPTVQHQELAKAQSGLAFQQTSNTQPIPILYEHQLGQASGLGGSQLIDTHLLQARANLTQASNLYSGQVQQPGQTNFYNTAQSPSALQQVTVPLPASQLSLPNFGSTGQPLIALPQTLQPPLQHTTPQAQAQSLSRPAQVSQPFRGLIPAGTQHSMIATTGKMSEMELKAFGSGIDIKPGTPPIAGRSTTPTSSPFRATSTSPNSQSSKMNSIVYQKQFQSAPATVRMTQPFPTQFAPQILSQPNLVPPLVRAPHTNTFPAPVQRPPMALASQMPPPLTTGLMSHARLPHVARGPCGSLSGVRGNQAQAALKAEQDMKAKQRAEVLQSTQRFFSEQQQSKQIGGGKAQKVDSDSSKPPETLTDPPGVCQEKVEEKPPPAPSIATKPVRTGPIKPQAIKTEETKS

SEQ ID NO: 39697 - protein, 2700 aa, Homo sapiens
MSEKSGQSTKAKDGKKYATLSLFNTYKGKSLETQKTTARHGLQSLGKVGISRRMPPPANLPSLKAENKGNDPNVNIVPKDGTGWASKQEQHEEEKTPEVPPAQPKPGVAAPPEVAPAPKSWASNKQGGQGDGIQVNSQFQQEFPSLQAAGDQEKKEKETNDDNYGPGPSLRPPNVACWRDGGKAAGSPSSSDQDEKLPGQDESTAGTSEQNDILKVVEKRIACGPPQAKLNGQQAALASQYRAMMPPYMFQQYPRMTYPPLHGPMRFPPSLSETNKGLRGRGPPPSWASEPERPSILSASELKELDKFDNLDAEADEGWAGAQMEVDYTEQLNFSDDDEQGSNSPKENNSEDQGSKASENNENKKETDEVSNTKSSSQIPAQPSVAKVPYGKGPSFNQERGTSSHLPPPPKLLAQQHPPPDRQAVPGRPGPFPSKQQVADEDEIWKQRRRQQSEISAAVERARKRREEEERRMEEQRKAACAEKLKRLDEKLGILEKQPSPEEIREREREKEREREKELEKEQEQEREKEREKDRERQQEKEKELEKEQEKQREMEKERKQEKEKELERQKEKEKELQKMKEQEKECELEKEREKLEEKIEPREPNLEPMVEKQESENSCNKEEEPVFTRQDSNRSEKEATPVVHETEPESGSQPRPAVLSGYFKQFQKSLPPRFQRQQEQMKQQQWQQQQQQGVLPQTVPSQPSSSTVPPPPHRPLYQPMQPHPQHLASMGFDPRWLMMQSYMDPRMMSGRPAMDIPPIHPGMIPPKPLMRRDQMEGSPNSSESFEHIARSARDHAISLSEPRMLWGSDPYPHAEPQQATTPKATEEPEDVRSEAALDQEQITAAYSVEHNQLEAHPKADFIRESSEAQVQKFLSRSVEDVRPHHTDANNQSACFEAPDQKTLSAPQEERISAVESQPSRKRSVSHGSNHTQKPDEQRSEPSAGIPKVTSRCIDSKEPIERPEEKPKKEGFIRSSEGPKPEKVYKSKSETRWGPRPSSNRREEVNDRPVRRSGPIKKPVLRDMKEEREQRKEKEGEKAEKVTEKVVVKPEKTEKKDLPPPPPPPQPPAPIQPQSVPPPIQPEAEKFPSTETATLAQKPSQDTEKPLEPVSTVQVEPAVKTVNQQTMAAPVVKEEKQPEKVISKDLVIERPRPDSRPAVKKESTLPPRTYWKEARERDWFPDQGYRGRGRGEYYSRGRSYRGSYGGRGRGGRGHTRDYPQYRDNKPRAEHIPSGPLRQREESETRSESSDFEVVPKRRRQRGSETDTDSEIHESASDKDSLSKGKLPKREERPENKKPVKPHSSFKPDNHVRIDNRLLEKPYVRDDDKAKPGFLPKGEPTRRGRGGTFRRGGRDPGGRPSRPSTLRRPAYRDNQWNPRQSEVPKPEDGEPPRRHEQFIPIAADKRPPKFERKFDPARERPRRQRPTRPPRQDKPPRFRRLREREAASKSNEVVAVPTNGTVNNVAQEPVNTLGDISGNKTPDLSNQNSSDQANEEWETASESSDFNERRERDEKKNADLNAQTVVKVGENVLPPKREIAKRSFSSQRPVDRQNRRGNNGPPKSGRNFSGPRNERRSGPPSKSGKRGPFDDQPAGTTGVDLINGSSAHHQEGVPNGTGQKNSKDSTGKKREDPKPGPKKPKEKVDALSQFDLNNYASVVIIDDHPEVTVIEDPQSNLNDDGFTEVVSKKQQKRLQDEERRKKEEQVIQVWNKKNANEKGRSQTSKLPPRFAKKQATGIQQAQSSASVPPLASAPLPPSTSASVPASTSAPLPATLTPVPASTSAPVPASTLAPVLASTSAPVPASPLAPVSASASVSASVPASTSAAAITSSSAPASAPAPTPILASVSTPASVTILASASIPILASALASTSAPTPAPAASSPAAPVITAPTIPASAPTASVPLAPASASAPAPAPTPVSAPNPAPPAPAQTQAQTHKPVQNPLQTTSQSSKQPPPSIRLPSAQTPNGTDYVASGKSIQTPQSHGTLTAELWDNKVAPPAVLNDISKKLGPISPPQPPSVSAWNKPLTSFGSAPSSEGAKNGQESGLEIGTDTIQFGAPASNGNENEVVPVLSEKSADKIPEPKEQRQKQPRAGPIKAQKLPDLSPVENKEHKPGPIGKERSLKNRKVKDAQQVEPEGQEKPSPATVRSTDPVTTKETKAVSEMSTEIGTMISVSSAEYGTNAKESVTDYTTPSSSLPNTVATNNTKMEDTLVNNVPLPNTLPLPKRETIQQSSSLTSVPPTTFSLTFKMESARKAWENSPNVREKGSPVTSTAPPIATGVSSSASGPSTANYNSFSSASMPQIPVASVTPTASLSGAGTYTTSSLSTKSTTTSDPPNICKVKPQQLQTSSLPSASHFSQLSCMPSLIAQQQQNPQVYVSQSAAAQIPAFYMDTSHLFNTQHARLAPPSLAQQQGFQPGLSQPTSVQQIPIPIYAPLQGQHQAQLSLGAGPAVSQAQELFSSSLQPYRSQPAFMQSSLSQPSVVLSGTAIHNFPTVQHQELAKAQSGLAFQQTSNTQPIPILYEHQLGQASGLGGSQLIDTHLLQARANLTQASNLYSGQVQQPGQTNFYNTAQSPSALQQVTVPLPASQLSLPNFGSTGQPLIALPQTLQPPLQHTTPQAQAQSLSRPAQVSQPFRGLIPAGTQHSMIATTGKMSEMELKAFGSGIDIKPGTPPIAGRSTTPTSSSGLLLQVRTASPAK

SEQ ID NO: 39698 - protein, 2817 aa, Homo sapiens
MSEKSGQSTKAKDGKKYATLSLFNTYKGKSLETQKTTARHGLQSLGKVGISRRMPPPANLPSLKAENKGNDPNVNIVPKDGTGWASKQEQHEEEKTPEVPPAQPKPGVAAPPEVAPAPKSWASNKQGGQGDGIQVNSQFQQEFPSLQAAGDQEKKEKETNDDNYGPGPSLRPPNVACWRDGGKAAGSPSSSDQDEKLPGQDESTAGTSEQNDILKVVEKRIACGPPQAKLNGQQAALASQYRAMMPPYMFQQYPRMTYPPLHGPMRFPPSLSETNKGLRGRGPPPSWASEPERPSILSASELKELDKFDNLDAEADEGWAGAQMEVDYTEQLNFSDDDEQGSNSPKENNSEDQGSKASENNENKKETDEVSNTKSSSQIPAQPSVAKVPYGKGPSFNQERGTSSHLPPPPKLLAQQHPPPDRQAVPGRPGPFPSKQQVADEDEIWKQRRRQQSEISAAVERARKRREEEERRMEEQRKAACAEKLKRLDEKLGILEKQPSPEEIREREREKEREREKELEKEQEQEREKEREKDRERQQEKEKELEKEQEKQREMEKERKQEKEKELERQKEKEKELQKMKEQEKECELEKEREKLEEKIEPREPNLEPMVEKQESENSCNKEEEPVFTRQDSNRSEKEATPVVHETEPESGSQPRPAVLSGYFKQFQKSLPPRFQRQQEQMKQQQWQQQQQQGVLPQTVPSQPSSSTVPPPPHRPLYQPMQPHPQHLASMGFDPRWLMMQSYMDPRMMSGRPAMDIPPIHPGMIPPKPLMRRDQMEGSPNSSESFEHIARSARDHAISLSEPRMLWGSDPYPHAEPQQATTPKATEEPEDVRSEAALDQEQITAAYSVEHNQLEAHPKADFIRESSEAQVQKFLSRSVEDVRPHHTDANNQSACFEAPDQKTLSAPQEERISAVESQPSRKRSVSHGSNHTQKPDEQRSEPSAGIPKVTSRCIDSKEPIERPEEKPKKEGFIRSSEGPKPEKVYKSKSETRWGPRPSSNRREEVNDRPVRRSGPIKKPVLRDMKEEREQRKEKEGEKAEKVTEKVVVKPEKTEKKDLPPPPPPPQPPAPIQPQSVPPPIQPEAEKFPSTETATLAQKPSQDTEKPLEPVSTVQVEPAVKTVNQQTMAAPVVKEEKQPEKVISKDLVIERPRPDSRPAVKKESTLPPRTYWKEARERDWFPDQGYRGRGRGEYYSRGRSYRGSYGGRGRGGRGHTRDYPQYRDNKPRAEHIPSGPLRQREESETRSESSDFEVVPKRRRQRGSETDTDSEIHESASDKDSLSKGKLPKREERPENKKPVKPHSSFKPDNHVRIDNRLLEKPYVRDDDKAKPGFLPKGEPTRRGRGGTFRRGGRDPGGRPSRPSTLRRPAYRDNQWNPRQSEVPKPEDGEPPRRHEQFIPIAADKRPPKFERKFDPARERPRRQRPTRPPRQDKPPRFRRLREREAASKSNEVVAVPTNGTVNNVAQEPVNTLGDISGNKTPDLSNQNSSDQANEEWETASESSDFNERRERDEKKNADLNAQTVVKVGENVLPPKREIAKRSFSSQRPVDRQNRRGNNGPPKSGRNFSGPRNERRSGPPSKSGKRGPFDDQPAGTTGVDLINGSSAHHQEGVPNGTGQKNSKDSTGKKREDPKPGPKKPKEKVDALSQFDLNNYASVVIIDDHPEVTVIEDPQSNLNDDGFTEVVSKKQQKRLQDEERRKKEEQVIQVWNKKNANEKGRSQTSKLPPRFAKKQATGIQQAQSSASVPPLASAPLPPSTSASVPASTSAPLPATLTPVPASTSAPVPASTLAPVLASTSAPVPASPLAPVSASASVSASVPASTSAAAITSSSAPASAPAPTPILASVSTPASVTILASASIPILASALASTSAPTPAPAASSPAAPVITAPTIPASAPTASVPLAPASASAPAPAPTPVSAPNPAPPAPAQTQAQTHKPVQNPLQTTSQSSKQPPPSIRLPSAQTPNGTDYVASGKSIQTPQSHGTLTAELWDNKVAPPAVLNDISKKLGPISPPQPPSVSAWNKPLTSFGSAPSSEGAKNGQESGLEIGTDTIQFGAPASNGNENEVVPVLSEKSADKIPEPKEQRQKQPRAGPIKAQKLPDLSPVENKEHKPGPIGKERSLKNRKVKDAQQVEPEGQEKPSPATVRSTDPVTTKETKAVSEMSTEIGTMISVSSAEYGTNAKESVTDYTTPSSSLPNTVATNNTKMEDTLVNNVPLPNTLPLPKRETIQQSSSLTSVPPTTFSLTFKMESARKAWENSPNVREKGSPVTSTAPPIATGVSSSASGPSTANYNSFSSASMPQIPVASVTPTASLSGAGTYTTSSLSTKSTTTSDPPNICKVKPQQLQTSSLPSASHFSQLSCMPSLIAQQQQNPQVYVSQSAAAQIPAFYMDTSHLFNTQHARLAPPSLAQQQGFQPGLSQPTSVQQIPIPIYAPLQGQHQAQLSLGAGPAVSQAQELFSSSLQPYRSQPAFMQSSLSQPSVVLSGTAIHNFPTVQHQELAKAQSGLAFQQTSNTQPIPILYEHQLGQASGLGGSQLIDTHLLQARANLTQASNLYSGQVQQPGQTNFYNTAQSPSALQQVTVPLPASQLSLPNFGSTGQPLIALPQTLQPPLQHTTPQAQAQSLSRPAQVSQPFRGLIPAGTQHSMIATTGKMSEMELKAFGSGIDIKPGTPPIAGRSTTPTSSPFRATSTSPNSQSSKMNSIVYQKQFQSAPATVRMTQPFPTQFAPQAKQRAEVLQSTQRFFSEQQQSKQIGGGKAQKVDSDSSKPPETLTDPPGVCQEKVEEKPPPAPSIATKPVRTGPIKPQAIKTEETKS

SEQ ID NO: 39699 - protein, 2849 aa, Homo sapiens
MSEKSGQSTKAKDGKKYATLSLFNTYKGKSLETQKTTARHGLQSLGKVGISRRMPPPANLPSLKAENKGNDPNVNIVPKDGTGWASKQEQHEEEKTPEVPPAQPKPGVAAPPEVAPAPKSWASNKQGGQGDGIQVNSQFQQEFPSLQAAGDQEKKEKETNDDNYGPGPSLRPPNVACWRDGGKAAGSPSSSDQDEKLPGQDESTAGTSEQNDILKVVEKRIACGPPQAKLNGQQAALASQYRAMMPPYMFQQYPRMTYPPLHGPMRFPPSLSETNKGLRGRGPPPSWASEPERPSILSASELKELDKFDNLDAEADEGWAGAQMEVDYTEQLNFSDDDEQGSNSPKENNSEDQGSKASENNENKKETDEVSNTKSSSQIPAQPSVAKVPYGKGPSFNQERGTSSHLPPPPKLLAQQHPPPDRQAVPGRPGPFPSKQQVADEDEIWKQRRRQQSEISAAVERARKRREEEERRMEEQRKAACAEKLKRLDEKLGILEKQPSPEEIREREREKEREREKELEKEQEQEREKEREKDRERQQEKEKELEKEQEKQREMEKERKQEKEKELERQKEKEKELQKMKEQEKECELEKEREKLEEKIEPREPNLEPMVEKQESENSCNKEEEPVFTRQDSNRSEKEATPVVHETEPESGSQPRPAVLSGYFKQFQKSLPPRFQRQQEQMKQQQWQQQQQQGVLPQTVPSQPSSSTVPPPPHRPLYQPMQPHPQHLASMGFDPRWLMMQSYMDPRMMSGRPAMDIPPIHPGMIPPKPLMRRDQMEGSPNSSESFEHIARSARDHAISLSEPRMLWGSDPYPHAEPQQATTPKATEEPEDVRSEAALDQEQITAAYSVEHNQLEAHPKADFIRESSEAQVQKFLSRSVEDVRPHHTDANNQSACFEAPDQKTLSAPQEERISAVESQPSRKRSVSHGSNHTQKPDEQRSEPSAGIPKVTSRCIDSKEPIERPEEKPKKEGFIRSSEGPKPEKVYKSKSETRWGPRPSSNRREEVNDRPVRRSGPIKKPVLRDMKEEREQRKEKEGEKAEKVTEKVVVKPEKTEKKDLPPPPPPPQPPAPIQPQSVPPPIQPEAEKFPSTETATLAQKPSQDTEKPLEPVSTVQVEPAVKTVNQQTMAAPVVKEEKQPEKVISKDLVIERPRPDSRPAVKKESTLPPRTYWKEARERDWFPDQGYRGRGRGEYYSRGRSYRGSYGGRGRGGRGHTRDYPQYRDNKPRAEHIPSGPLRQREESETRSESSDFEVVPKRRRQRGSETDTDSEIHESASDKDSLSKGKLPKREERPENKKPVKPHSSFKPDNHVRIDNRLLEKPYVRDDDKAKPGFLPKGEPTRRGRGGTFRRGGRDPGGRPSRPSTLRRPAYRDNQWNPRQSEVPKPEDGEPPRRHEQFIPIAADKRPPKFERKFDPARERPRRQRPTRPPRQDKPPRFRRLREREAASKSNEVVAVPTNGTVNNVAQEPVNTLGDISGNKTPDLSNQNSSDQANEEWETASESSDFNERRERDEKKNADLNAQTVVKVGENVLPPKREIAKRSFSSQRPVDRQNRRGNNGPPKSGRNFSGPRNERRSGPPSKSGKRGPFDDQPAGTTGVDLINGSSAHHQEGVPNGTGQKNSKDSTGKKREDPKPGPKKPKEKVDALSQFDLNNYASVVIIDDHPEVTVIEDPQSNLNDDGFTEVVSKKQQKRLQDEERRKKEEQVIQVWNKKNANEKGRSQTSKLPPRFAKKQATGIQQAQSSASVPPLASAPLPPSTLAPVSASASVSASVPASTSAAAITSSSAPASAPAPTPILASVSTPASVTILASASIPILASALASTSAPTPAPAASSPAAPVITAPTIPASAPTASVPLAPASASAPAPAPTPVSAPNPAPPAPAQTQAQTHKPVQNPLQTTSQSSKQPPPSIRLPSAQTPNGTDYVASGKSIQTPQSHGTLTAELWDNKVAPPAVLNDISKKLGPISPPQPPSVSAWNKPLTSFGSAPSSEGAKNGQESGLEIGTDTIQFGAPASNGNENEVVPVLSEKSADKIPEPKEQRQKQPRAGPIKAQKLPDLSPVENKEHKPGPIGKERSLKNRKVKDAQQVEPEGQEKPSPATVRSTDPVTTKETKAVSEMSTEIGTMISVSSAEYGTNAKESVTDYTTPSSSLPNTVATNNTKMEDTLVNNVPLPNTLPLPKRETIQQSSSLTSVPPTTFSLTFKMESARKAWENSPNVREKGSPVTSTAPPIATGVSSSASGPSTANYNSFSSASMPQIPVASVTPTASLSGAGTYTTSSLSTKSTTTSDPPNICKVKPQQLQTSSLPSASHFSQLSCMPSLIAQQQQNPQVYVSQSAAAQIPAFYMDTSHLFNTQHARLAPPSLAQQQGFQPGLSQPTSVQQIPIPIYAPLQGQHQAQLSLGAGPAVSQAQELFSSSLQPYRSQPAFMQSSLSQPSVVLSGTAIHNFPTVQHQELAKAQSGLAFQQTSNTQPIPILYEHQLGQASGLGGSQLIDTHLLQARANLTQASNLYSGQVQQPGQTNFYNTAQSPSALQQVTVPLPASQLSLPNFGSTGQPLIALPQTLQPPLQHTTPQAQAQSLSRPAQVSQPFRGLIPAGTQHSMIATTGKMSEMELKAFGSGIDIKPGTPPIAGRSTTPTSSPFRATSTSPNSQSSKMNSIVYQKQFQSAPATVRMTQPFPTQFAPQILSQPNLVPPLVRAPHTNTFPAPVQRPPMALASQMPPPLTTGLMSHARLPHVARGPCGSLSGVRGNQAQAALKAEQDMKAKQRAEVLQSTQRFFSEQQQSKQIGGGKAQKVDSDSSKPPETLTDPPGVCQEKVEEKPPPAPSIATKPVRTGPIKPQAIKTEETKS

SEQ ID NO: 39700 - protein, 2752 aa, Homo sapiens
MSEKSGQSTKAKDGKKYATLSLFNTYKGKSLETQKTTARHGLQSLGKVGISRRMPPPANLPSLKAENKGNDPNVNIVPKDGTGWASKQEQHEEEKTPEVPPAQPKPGVAAPPEVAPAPKSWASNKQGGQGDGIQVNSQFQQEFPSLQAAGDQEKKEKETNDDNYGPGPSLRPPNVACWRDGGKAAGSPSSSDQDEKLPGQDESTAGTSEQNDILKVVEKRIACGPPQAKLNGQQAALASQYRAMMPPYMFQQYPRMTYPPLHGPMRFPPSLSETNKGLRGRGPPPSWASEPERPSILSASELKELDKFDNLDAEADEGWAGAQMEVDYTEQLNFSDDDEQGSNSPKENNSEDQGSKASENNENKKETDEVSNTKSSSQIPAQPSVAKVPYGKGPSFNQERGTSSHLPPPPKLLAQQHPPPDRQAVPGRPGPFPSKQQVADEDEIWKQRRRQQSEISAAVERARKRREEEERRMEEQRKAACAEKLKRLDEKLGILEKQPSPEEIREREREKEREREKELEKEQEQEREKEREKDRERQQEKEKELEKEQEKQREMEKERKQEKEKELERQKEKEKELQKMKEQEKECELEKEREKLEEKIEPREPNLEPMVEKQESENSCNKEEEPVFTRQDSNRSEKEATPVVHETEPESGSQPRPAVLSGYFKQFQKSLPPRFQRQQEQMKQQQWQQQQQQGVLPQTVPSQPSSSTVPPPPHRPLYQPMQPHPQHLASMGFDPRWLMMQSYMDPRMMSGRPAMDIPPIHPGMIPPKPLMRRDQMEGSPNSSESFEHIARSARDHAISLSEPRMLWGSDPYPHAEPQQATTPKATEEPEDVRSEAALDQEQITAAYSVEHNQLEAHPKADFIRESSEAQVQKFLSRSVEDVRPHHTDANNQSACFEAPDQKTLSAPQEERISAVESQPSRKRSVSHGSNHTQKPDEQRSEPSAGIPKVTSRCIDSKEPIERPEEKPKKEGFIRSSEGPKPEKVYKSKSETRWGPRPSSNRREEVNDRPVRRSGPIKKPVLRDMKEEREQRKEKEGEKAEKVTEKVVVKPEKTEKKDLPPPPPPPQPPAPIQPQSVPPPIQPEAEKFPSTETATLAQKPSQDTEKPLEPVSTVQVEPAVKTVNQQTMAAPVVKEEKQPEKVISKDLVIERPRPDSRPAVKKESTLPPRTYWKEARERDWFPDQGYRGRGRGEYYSRGRSYRGSYGGRGRGGRGHTRDYPQYRDNKPRAEHIPSGPLRQREESETRSESSDFEVVPKRRRQRGSETDTDSEIHESASDKDSLSKGKLPKREERPENKKPVKPHSSFKPDNHVRIDNRLLEKPYVRDDDKAKPGFLPKGEPTRRGRGGTFRRGGRDPGGRPSRPSTLRRPAYRDNQWNPRQSEVPKPEDGEPPRRHEQFIPIAADKRPPKFERKFDPARERPRRQRPTRPPRQDKPPRFRRLREREAASKSNEVVAVPTNGTVNNVAQEPVNTLGDISGNKTPDLSNQNSSDQANEEWETASESSDFNERRERDEKKNADLNAQTVVKVGENVLPPKREIAKRSFSSQRPVDRQNRRGNNGPPKSGRNFSGPRNERRSGPPSKSGKRGPFDDQPAGTTGVDLINGSSAHHQEGVPNGTGQKNSKDSTGKKREDPKPGPKKPKEKVDALSQFDLNNYASVVIIDDHPEVTVIEDPQSNLNDDGFTEVVSKKQQKRLQDEERRKKEEQVIQVWNKKNANEKGRSQTSKLPPRFAKKQATGIQQAQSSASVPPLASAPLPPSTSASVPASTSAPLPATLTPVPASTSAPVPASTLAPVLASTSAPVPASPLAPVSASASVSASVPASTSAAAITSSSAPASAPAPTPILASVSTPASVTILASASIPILASALASTSAPTPAPAASSPAAPVITAPTIPASAPTASVPLAPASASAPAPAPTPVSAPNPAPPAPAQTQAQTHKPVQNPLQTTSQSSKQPPPSIRLPSAQTPNGTDYVASGKSIQTPQSHGTLTAELWDNKVAPPAVLNDISKKLGPISPPQPPSVSAWNKPLTSFGSAPSSEGAKNGQESGLEIGTDTIQFGAPASNGNENEVVPVLSEKSADKIPEPKEQRQKQPRAGPIKAQKLPDLSPVENKEHKPGPIGKERSLKNRKVKDAQQVEPEGQEKPSPATVRSTDPVTTKETKAVSEMSTEIGTMISVSSAEYGTNAKMESARKAWENSPNVREKGSPVTSTAPPIATGVSSSASGPSTANYNSFSSASMPQIPVASVTPTASLSGAGTYTTSSLSTKSTTTSDPPNICKVKPQQLQTSSLPSASHFSQLSCMPSLIAQQQQNPQVYVSQSAAAQIPAFYMDTSHLFNTQHARLAPPSLAQQQGFQPGLSQPTSVQQIPIPIYAPLQGQHQAQLSLGAGPAVSQAQELFSSSLQPYRSQPAFMQSSLSQPSVVLSGTAIHNFPTVQHQELAKAQSGLAFQQTSNTQPIPILYEHQLGQASGLGGSQLIDTHLLQARANLTQASNLYSGQVQQPGQTNFYNTAQSPSALQQVTVPLPASQLSLPNFGSTGQPLIALPQTLQPPLQHTTPQAQAQSLSRPAQVSQPFRGLIPAGTQHSMIATTGKMSEMELKAFGSGIDIKPGTPPIAGRSTTPTSSPFRATSTSPNSQSSKMNSIVYQKQFQSAPATVRMTQPFPTQFAPQAKQRAEVLQSTQRFFSEQQQSKQIGGGKAQKVDSDSSKPPETLTDPPGVCQEKVEEKPPPAPSIATKPVRTGPIKPQAIKTEETKS

SEQ ID NO: 39701 - protein, 2898 aa, Homo sapiens
MSEKSGQSTKAKDGKKYATLSLFNTYKGKSLETQKTTVAARHGLQSLGKVGISRRMPPPANLPSLKAENKGNDPNVNIVPKDGTGWASKQEQHEEEKTPEVPPAQPKPGVAAPPEVAPAPKSWASNKQGGQGDGIQVNSQFQQEFPSLQAAGDQEKKEKETNDDNYGPGPSLRPPNVACWRDGGKAAGSPSSSDQDEKLPGQDESTAGTSEQNDILKVVEKRIACGPPQAKLNGQQAALASQYRAMMPPYMFQQYPRMTYPPLHGPMRFPPSLSETNKGLRGRGPPPSWASEPERPSILSASELKELDKFDNLDAEADEGWAGAQMEVDYTEQLNFSDDDEQGSNSPKENNSEDQGSKASENNENKKETDEVSNTKSSSQIPAQPSVAKVPYGKGPSFNQERGTSSHLPPPPKLLAQQHPPPDRQAVPGRPGPFPSKQQVADEDEIWKQRRRQQSEISAAVERARKRREEEERRMEEQRKAACAEKLKRLDEKLGILEKQPSPEEIREREREKEREREKELEKEQEQEREKEREKDRERQQEKEKELEKEQEKQREMEKERKQEKEKELERQKEKEKELQKMKEQEKECELEKEREKLEEKIEPREPNLEPMVEKQESENSCNKEEEPVFTRQDSNRSEKEATPVVHETEPESGSQPRPAVLSGYFKQFQKSLPPRFQRQQEQMKQQQWQQQQQQGVLPQTVPSQPSSSTVPPPPHRPLYQPMQPHPQHLASMGFDPRWLMMQSYMDPRMMSGRPAMDIPPIHPGMIPPKPLMRRDQMEGSPNSSESFEHIARSARDHAISLSEPRMLWGSDPYPHAEPQQATTPKATEEPEDVRSEAALDQEQITAAYSVEHNQLEAHPKADFIRESSEAQVQKFLSRSVEDVRPHHTDANNQSACFEAPDQKTLSAPQEERISAVESQPSRKRSVSHGSNHTQKPDEQRSEPSAGIPKVTSRCIDSKEPIERPEEKPKKEGFIRSSEGPKPEKVYKSKSETRWGPRPSSNRREEVNDRPVRRSGPIKKPVLRDMKEEREQRKEKEGEKAEKVTEKVVVKPEKTEKKDLPPPPPPPQPPAPIQPQSVPPPIQPEAEKFPSTETATLAQKPSQDTEKPLEPVSTVQVEPAVKTVNQQTMAAPVVKEEKQPEKVISKDLVIERPRPDSRPAVKKESTLPPRTYWKEARERDWFPDQGYRGRGRGEYYSRGRSYRGSYGGRGRGGRGHTRDYPQYRDNKPRAEHIPSGPLRQREESETRSESSDFEVVPKRRRQRGSETDTDSEIHESASDKDSLSKGKLPKREERPENKKPVKPHSSFKPDNHVRIDNRLLEKPYVRDDDKAKPGFLPKGEPTRRGRGGTFRRGGRDPGGRPSRPSTLRRPAYRDNQWNPRQSEVPKPEDGEPPRRHEQFIPIAADKRPPKFERKFDPARERPRRQRPTRPPRQDKPPRFRRLREREAASKSNEVVAVPTNGTVNNVAQEPVNTLGDISGNKTPDLSNQNSSDQANEEWETASESSDFNERRERDEKKNADLNAQTVVKVGENVLPPKREIAKRSFSSQRPVDRQNRRGNNGPPKSGRNFSGPRNERRSGPPSKSGKRGPFDDQPAGTTGVDLINGSSAHHQEGVPNGTGQKNSKDSTGKKREDPKPGPKKPKEKVDALSQFDLNNYASVVIIDDHPEVTVIEDPQSNLNDDGFTEVVSKKQQKRLQDEERRKKEEQVIQVWNKKNANEKGRSQTSKLPPRFAKKQATGIQQAQSSASVPPLASAPLPPSTSASVPASTSAPLPATLTPVPASTSAPVPASTLAPVLASTSAPVPASPLAPVSASASVSASVPASTSAAAITSSSAPASAPAPTPILASVSTPASVTILASASIPILASALASTSAPTPAPAASSPAAPVITAPTIPASAPTASVPLAPASASAPAPAPTPVSAPNPAPPAPAQTQAQTHKPVQNPLQTTSQSSKQPPPSIRLPSAQTPNGTDYVASGKSIQTPQSHGTLTAELWDNKVAPPAVLNDISKKLGPISPPQPPSVSAWNKPLTSFGSAPSSEGAKNGQESGLEIGTDTIQFGAPASNGNENEVVPVLSEKSADKIPEPKEQRQKQPRAGPIKAQKLPDLSPVENKEHKPGPIGKERSLKNRKVKDAQQVEPEGQEKPSPATVRSTDPVTTKETKAVSEMSTEIGTMISVSSAEYGTNAKESVTDYTTPSSSLPNTVATNNTKMEDTLVNNVPLPNTLPLPKRETIQQSSSLTSVPPTTFSLTFKMESARKAWENSPNVREKGSPVTSTAPPIATGVSSSASGPSTANYNSFSSASMPQIPVASVTPTASLSGAGTYTTSSLSTKSTTTSDPPNICKVKPQQLQTSSLPSASHFSQLSCMPSLIAQQQQNPQVYVSQSAAAQIPAFYMDTSHLFNTQHARLAPPSLAQQQGFQPGLSQPTSVQQIPIPIYAPLQGQHQAQLSLGAGPAVSQAQELFSSSLQPYRSQPAFMQSSLSQPSVVLSGTAIHNFPTVQHQELAKAQSGLAFQQTSNTQPIPILYEHQLGQASGLGGSQLIDTHLLQARANLTQASNLYSGQVQQPGQTNFYNTAQSPSALQQVTVPLPASQLSLPNFGSTGQPLIALPQTLQPPLQHTTPQAQAQSLSRPAQVSQPFRGLIPAGTQHSMIATTGKMSEMELKAFGSGIDIKPGTPPIAGRSTTPTSSPFRATSTSPNSQSSKMNSIVYQKQFQSAPATVRMTQPFPTQFAPQILSQPNLVPPLVRAPHTNTFPAPVQRPPMALASQMPPPLTTGLMSHARLPHVARGPCGSLSGVRGNQAQAALKAEQDMKAKQRAEVLQSTQRFFSEQQQSKQIGGGKAQKVDSDSSKPPETLTDPPGVCQEKVEEKPPPAPSIATKPVRTGPIKPQAIKTEETKS

SEQ ID NO: 39702 - protein, 1507 aa, Homo sapiens
MPRRRPPASGAAQFPERIATRSPDPIPLCTFQRQPRAAPVQPPCRLFFVTFAGCGHRWRSESKPGWISRSRSGIALRAARPPGSSPPRPAAPRPPPPGGVVAEAPGDVVIPRPRVQPMRVARGGPWTPNPAFREAESWSQIGNQRVSEQLLETSLGNEVSDTEPLSPASAGLRRNPALPPGPFAQNFSWGNQENLPPALGKIANGGGTGAGKAECGYETESHLLEPHEIPLNVNTHKFSDCEFPYEFCTVCFSPFKLLGMSGVEGVWNQHSRSASMHTFLNHSATGIREAGCRKDMPVSEMAEDGSEEIMFIWCEDCSQYHDSECPELGPVVMVKDSFVLSRARSWPASGHVHTQAGQGMRGYEDRDRADPQQLPEAVPAGLVRRLSGQQLPCRSTLTWGRLCHLVAQGRSSLPPNLEIRRLEDGAEGVFAITQLVKRTQFGPFESRRVAKWEKESAFPLKVFQKDGHPVCFDTSNEDDCNWMMLVRPAAEAEHQNLTAYQHGSDVYFTTSRDIPPGTELRVWYAAFYAKKMDKPMLKQAGSGVHAAGTPENSAPVESEPSQWACKVCSATFLELQLLNEHLLGHLEQAKSLPPGSQSEAAAPEKEQDTPRGEPPAVPESENVATKEQKKKPRRGRKPKVSKAEQPLVIVEDKEPTEQVAEIITEVPPDEPVSATPDERIMELVLGKLATTTTDTSSVPKFTHHQNNTITLKRSLILSSRHGIRRKLIKQLGEHKRVYQCNICSKIFQNSSNLSRHVRSHGDKLFKCEECAKLFSRKESLKQHVSYKHSRNEVDGEYRYRCGTCEKTFRIESALEFHNCRTDDKTFQCEMCFRFFSTNSNLSKHKKKHGDKKFACEVCSKMFYRKDVMLDHQRRHLEGVRRVKREDLEAGGENLVRYKKEPSGCPVCGKVFSCRSNMNKHLLTHGDKKYTCEICGRKFFRVDVLRDHIHVHFKDIALMDDHQREEFIGKIGISSEENDDNSDESADSEPHKYSCKRCQLTFGRGKEYLKHIMEVHKEKGYGCSICNRRFALKATYHAHMVIHRENLPDPNVQKYIHPCEICGRIFNSIGNLERHKLIHTGVKSHACEQCGKSFARKDMLKEHMRVHDNVREYLCAECGKGMKTKHALRHHMKLHKGIKEYECKECHRRFAQKVNMLKHCKRHTGIKDFMCELCGKTFSERNTMETHKLIHTVGKQWTCSVCDKKYVTEYMLQKHVQLTHDKVEAQSCQLCGTKVSTRASMSRHMRRKHPEVLAVRIDDLDHLPETTTIDASSIGIVQPELTLEQEDLAEGKHGKAAKRSHKRKQKPEEEAGAPVPEDATFSEYSEKETEFTGSVGDETNSAVQSIQQVVVTLGDPNVTTPSSSVGLTNITVTPITTAAATQFTNLQPVAVGHLTTPERQLQLDNSILTVTFDTVSGSAMLHNRQNDVQIHPQPEASNPQSVAHFINLTTLVNSITPLGSQLSDQHPLTWRAVPQTDVLPPSQPQAPPQQAAQPQVQAEQQQQQMYSY

SEQ ID NO: 39703 - protein, 1198 aa, Homo sapiens
MPRRRPPASGAAQFPERIATRSPDPIPLCTFQRQVSEMAEDGSEEIMFIWCEDCSQYHDSECPELGPVVMVKDSFVLSRARSSLPPNLEIRRLEDGAEGVFAITQLVKRTQFGPFESRRVAKWEKESAFPLKVFQKDGHPVCFDTSNEDDCNWMMLVRPAAEAEHQNLTAYQHGSDVYFTTSRDIPPGTELRVWYAAFYAKKMDKPMLKQAGSGVHAAGTPENSAPVESEPSQWACKVCSATFLELQLLNEHLLGHLEQAKSLPPGSQSEAAAPEKEQDTPRGEPPAVPESENVATKEQKKKPRRGRKPKVSKAEQPLVIVEDKEPTEQVAEIITEVPPDEPVSATPDERIMELVLGKLATTTTDTSSVPKFTHHQNNTITLKRSLILSSRHGIRRKLIKQLGEHKRVYQCNICSKIFQNSSNLSRHVRSHGDKLFKCEECAKLFSRKESLKQHVSYKHSRNEVDGEYRYRCGTCEKTFRIESALEFHNCRTGLIAHPGEGGPGGSRLRDLPDDKTFQCEMCFRFFSTNSNLSKHKKKHGDKKFACEVCSKMFYRKDVMLDHQRRHLEGVRRVKREDLEAGGENLVRYKKEPSGCPVCGKVFSCRSNMNKHLLTHGDKKYTCEICGRKFFRVDVLRDHIHVHFKDIALMDDHQREEFIGKIGISSEENDDNSDESADSEPHKYSCKRCQLTFGRGKEYLKHIMEVHKEKGYGCSICNRRFALKATYHAHMVIHRENLPDPNVQKYIHPCEICGRIFNSIGNLERHKLIHTGVKSHACEQCGKSFARKDMLKEHMRVHDNVREYLCAECGKGMKTKHALRHHMKLHKGIKEYECKECHRRFAQKVNMLKHCKRHTGIKDFMCELCGKTFSERNTMETHKLIHTVGKQWTCSVCDKKYVTEYMLQKHVQLTHDKVEAQSCQLCGTKVSTRASMSRHMRRKHPEVLAVRIDDLDHLPETTTIDASSIGIVQPELTLEQEDLAEGKHGKAAKRSHKRKQKPEEEAGAPVPEDATFSEYSEKETEFTGSVGDETNSAVQSIQQVVVTLGDPNVTTPSSSVGLTNITVTPITTAAATQFTNLQPVAVGHLTTPERQLQLDNSILTVTFDTVSGSAMLHNRQNDVQIHPQPEASNPQSVAHFINLTTLVNSITPLGSQLSDQHPLTWRAVPQTDVLPPSQPQAPPQQAAQPQVQAEQQQQQMYSY

SEQ ID NO: 39704 - protein, 1178 aa, Homo sapiens
MPRRRPPASGAAQFPERIATRSPDPIPLCTFQRQVSEMAEDGSEEIMFIWCEDCSQYHDSECPELGPVVMVKDSFVLSRARSSLPPNLEIRRLEDGAEGVFAITQLVKRTQFGPFESRRVAKWEKESAFPLKVFQKDGHPVCFDTSNEDDCNWMMLVRPAAEAEHQNLTAYQHGSDVYFTTSRDIPPGTELRVWYAAFYAKKMDKPMLKQAGSGVHAAGTPENSAPVESEPSQWACKVCSATFLELQLLNEHLLGHLEQAKSLPPGSQSEAAAPEKEQDTPRGEPPAVPESENVATKEQKKKPRRGRKPKVSKAEQPLVIVEDKEPTEQVAEIITEVPPDEPVSATPDERIMELVLGKLATTTTDTSSVPKFTHHQNNTITLKRSLILSSRHGIRRKLIKQLGEHKRVYQCNICSKIFQNSSNLSRHVRSHGDKLFKCEECAKLFSRKESLKQHVSYKHSRNEVDGEYRYRCGTCEKTFRIESALEFHNCRTDDKTFQCEMCFRFFSTNSNLSKHKKKHGDKKFACEVCSKMFYRKDVMLDHQRRHLEGVRRVKREDLEAGGENLVRYKKEPSGCPVCGKVFSCRSNMNKHLLTHGDKKYTCEICGRKFFRVDVLRDHIHVHFKDIALMDDHQREEFIGKIGISSEENDDNSDESADSEPHKYSCKRCQLTFGRGKEYLKHIMEVHKEKGYGCSICNRRFALKATYHAHMVIHRENLPDPNVQKYIHPCEICGRIFNSIGNLERHKLIHTGVKSHACEQCGKSFARKDMLKEHMRVHDNVREYLCAECGKGMKTKHALRHHMKLHKGIKEYECKECHRRFAQKVNMLKHCKRHTGIKDFMCELCGKTFSERNTMETHKLIHTVGKQWTCSVCDKKYVTEYMLQKHVQLTHDKVEAQSCQLCGTKVSTRASMSRHMRRKHPEVLAVRIDDLDHLPETTTIDASSIGIVQPELTLEQEDLAEGKHGKAAKRSHKRKQKPEEEAGAPVPEDATFSEYSEKETEFTGSVGDETNSAVQSIQQVVVTLGDPNVTTPSSSVGLTNITVTPITTAAATQFTNLQPVAVGHLTTPERQLQLDNSILTVTFDTVSGSAMLHNRQNDVQIHPQPEASNPQSVAHFINLTTLVNSITPLGSQLSDQHPLTWRAVPQTDVLPPSQPQAPPQQAAQPQVQAEQQQQQMYSY

SEQ ID NO: 39705 - protein, 555 aa, Homo sapiens
MPRRRPPASGAAQFPERIATRSPDPIPLCTFQRQVSEMAEDGSEEIMFIWCEDCSQYHDSECPELGPVVMVKDSFVLSRARSSLPPNLEIRRLEDGAEGVFAITQLVKRTQFGPFESRRVAKWEKESAFPLKVFQKDGHPVCFDTSNEDDCNWMMLVRPAAEAEHQNLTAYQHGSDVYFTTSRDIPPGTELRVWYAAFYAKKMDKPMLKQAGSGVHAAGTPENSAPVESEPSQWACKVCSATFLELQLLNEHLLGHLEQAKSLPPGSQSEAAAPEKEQDTPRGEPPAVPESENVATKEQKKKPRRGRKPKVSKAEQPLVIVEDKEPTEQVAEIITEVPPDEPVSATPDERIMELVLGKLATTTTDTSSVPKFTHHQNNTITLKRSLILSSRHGIRRKLIKQLGEHKRVYQCNICSKIFQNSSNLSRHVRSHGDKLFKCEECAKLFSRKESLKQHVSYKHSRNEVDGEYRYRCGTCEKTFRIESALEFHNCRTGLIAHPGEGGPGGSRLRDLPATSPSTRRSTATRSLPVRSAARCSTARTSCWTTSAGTWKECGE

SEQ ID NO: 39706 - protein, 515 aa, Homo sapiens
MPRRRPPASGAAQFPERIATRSPDPIPLCTFQRQVSEMAEDGSEEIMFIWCEDCSQYHDSECPELGPVVMVKDSFVLSRARSSLPPNLEIRRLEDGAEGVFAITQLVKRTQFGPFESRRVAKWEKESAFPLKVFQKDGHPVCFDTSNEDDCNWMMLVRPAAEAEHQNLTAYQHGSDVYFTTSRDIPPGTELRVWYAAFYAKKMDKPMLKQAGSGVHAAGTPENSAPVESEPSQWACKVCSATFLELQLLNEHLLGHLEQAKSLPPGSQSEAAAPEKEQDTPRGEPPAVPESENVATKEQKKKPRRGRKPKVSKAEQPLVIVEDKEPTEQVAEIITEVPPDEPVSATPDERIMELVLGKLATTTTDTSSVPKHGIRRKLIKQLGEHKRVYQCNICSKIFQNSSNLSRHVRSHGDKLFKCEECAKLFSRKESLKQHVSYKHSRNEVDGEYRYRCGTCEKTFRIESALEFHNCRTATSPSTRRSTATRSLPVRSAARCSTARTSCWTTSAGTWKECGE

SEQ ID NO: 39707 - protein, 825 aa, Homo sapiens
MLDICLEKRVGTTLAAPKCNSSTVRFQGLAEGTKGTMKMDMEDADMTLWTEAEFEEKCTYIVNDHPWDSGADGGTSVQAEASLPRNLLFKYATNSEEVIGVMSKEYIPKGTRFGPLIGEIYTNDTVPKNANRKYFWRIYSRGELHHFIDGFNEEKSNWMRYVNPAHSPREQNLAACQNGMNIYFYTIKPIPANQELLVWYCRDFAERLHYPYPGELTMMNLTQTQSSLKQPSTEKNELCPKNVPKREYSVKEILKLDSNPSKGKDLYRSNISPLTSEKDLDDFRRRGSPEMPFYPRVVYPIRAPLPEDFLKASLAYGIERPTYITRSPIPSSTTPSPSARSSPDQSLKSSSPHSSPGNTVSPVGPGSQEHRDSYAYLNASYGTEGLGSYPGYAPLPHLPPAFIPSYNAHYPKFLLPPYGMNCNGLSAVSSMNGINNFGLFPRLCPVYSNLLGGGSLPHPMLNPTSLPSSLPSDGARRLLQPEHPREVLVPAPHSAFSFTGAAASMKDKACSPTSGSPTAGTAATAEHVVQPKATSAAMAAPSSDEAMNLIKNKRNMTGYKTLPYPLKKQNGKIKYECNVCAKTFGQLSNLKVHLRVHSGERPFKCQTCNKGFTQLAHLQKHYLVHTGEKPHECQVCHKRFSSTSNLKTHLRLHSGEKPYQCKVCPAKFTQFVHLKLHKRLHTRERPHKCSQCHKNYIHLCSLKVHLKGNCAAAPAPGLPLEDLTRINEEIEKFDISDNADRLEDVEDDISVISVVEKEILAVVRKEKEETGLKVSLQRNMGNGLLSSGCSLYESSDLPLMKLPPSNPLPLVPVKVKQETVEPMDP

SEQ ID NO: 39708 - protein, 789 aa, Homo sapiens
MKMDMEDADMTLWTEAEFEEKCTYIVNDHPWDSGADGGTSVQAEASLPRNLLFKYATNSEEVIGVMSKEYIPKGTRFGPLIGEIYTNDTVPKNANRKYFWRIYSRGELHHFIDGFNEEKSNWMRYVNPAHSPREQNLAACQNGMNIYFYTIKPIPANQELLVWYCRDFAERLHYPYPGELTMMNLTQTQSSLKQPSTEKNELCPKNVPKREYSVKEILKLDSNPSKGKDLYRSNISPLTSEKDLDDFRRRGSPEMPFYPRVVYPIRAPLPEDFLKASLAYGIERPTYITRSPIPSSTTPSPSARSSPDQSLKSSSPHSSPGNTVSPVGPGSQEHRDSYAYLNASYGTEGLGSYPGYAPLPHLPPAFIPSYNAHYPKFLLPPYGMNCNGLSAVSSMNGINNFGLFPRLCPVYSNLLGGGSLPHPMLNPTSLPSSLPSDGARRLLQPEHPREVLVPAPHSAFSFTGAAASMKDKACSPTSGSPTAGTAATAEHVVQPKATSAAMAAPSSDEAMNLIKNKRNMTGYKTLPYPLKKQNGKIKYECNVCAKTFGQLSNLKVHLRVHSGERPFKCQTCNKGFTQLAHLQKHYLVHTGEKPHECQVCHKRFSSTSNLKTHLRLHSGEKPYQCKVCPAKFTQFVHLKLHKRLHTRERPHKCSQCHKNYIHLCSLKVHLKGNCAAAPAPGLPLEDLTRINEEIEKFDISDNADRLEDVEDDISVISVVEKEILAVVRKEKEETGLKVSLQRNMGNGLLSSGCSLYESSDLPLMKLPPSNPLPLVPVKVKQETVEPMDP

SEQ ID NO: 39709 - protein, 691 aa, Homo sapiens
MEKIYSRGELHHFIDGFNEEKSNWMRYVNPAHSPREQNLAACQNGMNIYFYTIKPIPANQELLVWYCRDFAERLHYPYPGELTMMNLTQTQSSLKQPSTEKNELCPKNVPKREYSVKEILKLDSNPSKGKDLYRSNISPLTSEKDLDDFRRRGSPEMPFYPRVVYPIRAPLPEDFLKASLAYGIERPTYITRSPIPSSTTPSPSARSSPDQSLKSSSPHSSPGNTVSPVGPGSQEHRDSYAYLNASYGTEGLGSYPGYAPLPHLPPAFIPSYNAHYPKFLLPPYGMNCNGLSAVSSMNGINNFGLFPRLCPVYSNLLGGGSLPHPMLNPTSLPSSLPSDGARRLLQPEHPREVLVPAPHSAFSFTGAAASMKDKACSPTSGSPTAGTAATAEHVVQPKATSAAMAAPSSDEAMNLIKNKRNMTGYKTLPYPLKKQNGKIKYECNVCAKTFGQLSNLKVHLRVHSGERPFKCQTCNKGFTQLAHLQKHYLVHTGEKPHECQVCHKRFSSTSNLKTHLRLHSGEKPYQCKVCPAKFTQFVHLKLHKRLHTRERPHKCSQCHKNYIHLCSLKVHLKGNCAAAPAPGLPLEDLTRINEEIEKFDISDNADRLEDVEDDISVISVVEKEILAVVRKEKEETGLKVSLQRNMGNGLLSSGCSLYESSDLPLMKLPPSNPLPLVPVKVKQETVEPMDP

SEQ ID NO: 39710 - protein, 461 aa, Homo sapiens
MWQLTSLLLFVATWGISGTPAPLDSVFSSSERAHQVLRIRKRANSFLEELRHSSLERECIEEICDFEEAKEIFQNVDDTLAFWSKHVDGDQCLVLPLEHPCASLCCGHGTCIDGIGSFSCDCRSGWEGRFCQREVSFLNCSLDNGGCTHYCLEEVGWRRCSCAPGYKLGDDLLQCHPAVKFPCGRPWKRMEKKRSHLKRDTEDQEDQVDPRLIDGKMTRRGDSPWQVVLLDSKKKLACGAVLIHPSWVLTAAHCMDESKKLLVRLGEYDLRRWEKWELDLDIKEVFVHPNYSKSTTDNDIALLHLAQPATLSQTIVPICLPDSGLAERELNQAGQETLVTGWGYHSSREKEAKRNRTFVLNFIKIPVVPHNECSEVMSNMVSENMLCAGILGDRQDACEGDSGGPMVASFHGTWFLVGLVSWGEGCGLLHNYGVYTKVSRYLDWIHGHIRDKEAPQKSWAP

SEQ ID NO: 39711 - protein, 516 aa, Homo sapiens
MAAGRRTCSISTTRPCASASRMWQLTSLLLFVATWGISGTPAPLDSVFSSSERAHQVLRIRKRANSFLEELRHSSLERECIEEICDFEEAKEIFQNVDDTLAFWSKHVDGDQCLVLPLEHPCASLCCGHGTCIDGIGSFSCDCRSGWEGRFCQRGEGERWMLAGGGAGLGPGWGRGTSTSCPRPPLPAEVSFLNCSLDNGGCTHYCLEEVGWRRCSCAPGYKLGDDLLQCHPAVKFPCGRPWKRMEKKRSHLKRDTEDQEDQVDPRLIDGKMTRRGDSPWQVVLLDSKKKLACGAVLIHPSWVLTAAHCMDESKKLLVRLGEYDLRRWEKWELDLDIKEVFVHPNYSKSTTDNDIALLHLAQPATLSQTIVPICLPDSGLAERELNQAGQETLVTGWGYHSSREKEAKRNRTFVLNFIKIPVVPHNECSEVMSNMVSENMLCAGILGDRQDACEGDSGGPMVASFHGTWFLVGLVSWGEGCGLLHNYGVYTKVSRYLDWIHGHIRDKEAPQKSWAP

SEQ ID NO: 39712 - protein, 683 aa, Homo sapiens
MALSKRELDELKPWIEKTVKRVLGFSEPTVVTAALNCVGKGMDKKKAADHLKPFLDDSTLRFVDKLFEAVEEGRSSRHSKSSSDRSRKRELKEVFGDDSEISKESSGVKKRRIPRFEEVEEEPEVIPGPPSESPGMLTKLQIKQMMEAATRQIEERKKQLSFISPPTPQPKTPSSSQPERLPIGNTIQPSQAATFMNDAIEKARKAAELQARIQAQLALKPGLIGNANMVGLANLHAMGIAPPKVELKDQTKPTPLILDEQGRTVDATGKEIELTHRMPTLKANIRAVKREQFKQQLKEKPSEDMESNTFFDPRVSIAPSQRQRRTFKFHDKGKFEKIAQRLRTKAQLEKLQAEISQAARKTGIHTSTRLALIAPKKELKEGDIPEIEWWDSYIIPNGFDLTEENPKREDYFGITNLVEHPAQLNPPVDNDTPVTLGVYLTKKEQKKLRRQTRREAQKELQEKVRLGLMPPPEPKVRISNLMRVLGTEAVQDPTKVEAHVRAQMAKRQKAHEEANAARKLTAEQRKVKKIKKLKEDISQGVHISVYRVRNLSNPAKKFKIEANAGQLYLTGVVVLHKDVNVVVVEGGPKAQKKFKRLMLHRIKWDEQTSNTKGDDDEESDEEAVKKTNKCVLVWEGTAKDRSFGEMKFKQCPTENMAREHFKKHGAEHYWDLALSESVLESTD

SEQ ID NO: 39713 - protein, 281 aa, Homo sapiens
MLTKLQIKQMMEAATRQIEERKKQLSFISPPTPQPKTPSSSQPERLPIGNTIQPSQAATFMNDAIEKARKAAELQARIQAQLALKPGLIGNANMVGLANLHAMGIAPPKVELKDQTKPTPLILDEQGRTVDATGKEIELTHRMPTLKANIRAVKREQFKQQLKEKPSEDMESNTFFDPRVSIAPSQRQRRTFKFHDKGKFEKIAQRLRTKAQLEKLQAEISQAARKTGIHTSTRLALIAPKKELKEGDIPEIEWWDSYIIPNGFDLGKSQERRLFWNHKSC

SEQ ID NO: 39714 - protein, 605 aa, Homo sapiens
MAGLYSLGVSVFSDQGGRKYMEDVTQIVVEPEPTAEEKPSPRRSLSQPLPPRPSPAALPGGEVSGKGPAVAAREARDPLPDAGASPAPSRCCRRRSSVAFFAVCDGHGGREAAQFAREHLWGFIKKQKGFTSSEPAKVCAAIRKGFLACHLAMWKKLAEWPKTMTGLPSTSGTTASVVIIRGMKMYVAHVGDSGVVLGIQDDPKDDFVRAVEVTQDHKPELPKERERIEGLGGSVMNKSGVNRVVWKRPRLTHNGPVRRSTVIDQIPFLAVARALGDLWSYDFFSGEFVVSPEPDTSVHTLDPQKHKYIILGSDGLWNMIPPQDAISMCQDQEEKKYLMGEHGQSCAKMLVNRALGRWRQRMLRADNTSAIVICISPEVDNQGNFTNEDELYLNLTDSPSYNSQETCVMTPSPCSTPPVKSLEEDPWPRVNSKDHIPALVRSNAFSENFLEVSAEIARENVQGVVIPSKDPEPLEENCAKALTLRIHDSLNNSLPIGLVPTNSTNTVMDQKNLKMSTPGQMKAQEIERTPPTNFKRTLEESNSGPLMKKHRRNGLSRSSGAQPASLPTTSQRKNSVKLTMRRRLRGQKKIGNPLLHQHRKTVCVC

SEQ ID NO: 39715 - protein, 430 aa, Homo sapiens
MAGLYSLGVSVFSDQGGRKYMEDVTQIVVEPEPTAEEKPSPRRSLSQPLPPRPSPAALPGGEVSGKGPAVAAREARDPLPDAGASPAPSRCCRRRSSVAFFAVCDGHGGREAAQFAREHLWGFIKKQKGFTSSEPAKVCAAIRKGFLACHLAMWKKLAEWPKTMTGLPSTSGTTASVVIIRGMKMYVAHVGDSGVVLGIQDDPKDDFVRAVEVTQDHKPELPKERERIEGLGGSVMNKSGVNRVVWKRPRLTHNGPVRRSTVIDQIPFLAVARALGDLWSYDFFSGEFVVSPEPDTSVHTLDPQKHKYIILGSDGLWNMIPPQDAISMCQDQEEKKYLMGEHGQSCAKMLVNRALGRWRQRMLRADNTSAIVICISPEVDNQGNFTNEDELYLNLTDSPSYNSQETCVMTPSPCSTPPVKDFGFELDSRK

SEQ ID NO: 39716 - protein, 423 aa, Homo sapiens
MAGKRSGWSRAALLQLLLGVNLVVMPPTRARSLRFVTLLYRHGDRSPVKTYPKDPYQEEEWPQGFGQLTKEGMLQHWELGQALRQRYHGFLNTSYHRQEVYVRSTDFDRTLMSAEANLAGLFPPNGMQRFNPNISWQPIPVHTVPITEDRLLKFPLGPCPRYEQLQNETRQTPEYQNESSRNAQFLDMVANETGLTDLTLETVWNVYDTLFCEQTHGLRLPPWASPQTMQRLSRLKDFSFRFLFGIYQQAEKARLQGGVLLAQIRKNLTLMATTSQLPKLLVYSAHDTTLVALQMALDVYNGEQAPYASCHIFELYQEDSGNFSVEMYFRNESDKAPWPLSLPGCPHRCPLQDFLRLTEPVVPKDWQQECQLASGPADTEVIVALAVCGSILFLLIVLLLTVLFRMQAQPPGYRHVADGEDHA

SEQ ID NO: 39717 - protein, 160 aa, Homo sapiens
MAGKRSGWSRAALLQLLLGVNLVVMPPTRARSLRFVTLLYRHGDRSPVKTYPKDPYQEEEWPQGFGQLTKEGMLQHWELGQALRQRYHGFLNTSYHRQEVYVRSTDFDRTLMSAEANLAGLFPPNGMQRFNPNISWQPIPVHTVPITEDRVRVASPSLGW

SEQ ID NO: 39718 - protein, 673 aa, Homo sapiens
MNRKDSKRKSHQECTGKIGGRGRPRQVRRHKTCPSPREISKVMASMNLGLLSEGGCSEDELLEKCIQSFDSAGSLCHEDHMLNMVLAMHSWVLPSADLAARLLTSYQKATGDTQELRRLQICHLVRYWLMRHPEVMHQDPQLEEVIGRFWATVAREGNSAQRRLGDSSDLLSPGGPGPPLPMSSPGLGKKRKVSLLFDHLETGELAQHLTYLEFRSFQAITPQDLRSYVLQGSVRGCPALEGSVGLSNSVSRWVQVMVLSRPGPLQRAQVLDKFIHVAQRLHQLQNFNTLMAVTGGLCHSAISRLKDSHAHLSPDSTKALLELTELLASHNNYARYRRTWAGCAGFRLPVLGVHLKDLVSLHEAQPDRLPDGRLHLPKLNNLYLRLQELVALQGQHPPCSANEDLLHLLTLSLDLFYTEDEIYELSYAREPRCPKSLPPSPFNAPLVVEWAPGVTPKPDRVTLGRHVEQLVESVFKNYDPEGRGTISQEDFERLSGNFPFACHGLHPPPRQGRGSFSREELTGYLLRASAICSKLGLAFLHTFHEVTFRKPTFCDSCSGFLWGVTKQGYRCRECGLCCHKHCRDQVKVECKKRPGAKGDAGPPGAPVPSTPAPHASCGSEENHSYTLSLEPETGCQLRHAWTQTESPHPSWETDTVPCPVMDPPSTASSKLDS

SEQ ID NO: 39719 - protein, 659 aa, Homo sapiens
MNRKDSKRKSHQECTGKIGGRGRPRQVRRHKTCPSPREISKVMASMNLGLLSEGGCSEDELLEKCIQSFDSAGSLCHEDHMLNMVLAMHSWVLPSADLAARLLTSYQKATGDTQELRRLQICHLVRYWLMRHPEVMHQDPQLEEVIGRFWATVAREGNSAQRRLGDSSDLPGLGKKRKVSLLFDHLETGELAQHLTYLEFRSFQAITPQDLRSYVLQGSVRGCPALEGSVGLSNSVSRWVQVMVLSRPGPLQRAQVLDKFIHVAQRLHQLQNFNTLMAVTGGLCHSAISRLKDSHAHLSPDSTKALLELTELLASHNNYARYRRTWAGCAGFRLPVLGVHLKDLVSLHEAQPDRLPDGRLHLPKLNNLYLRLQELVALQGQHPPCSANEDLLHLLTLSLDLFYTEDEIYELSYAREPRCPKSLPPSPFNAPLVVEWAPGVTPKPDRVTLGRHVEQLVESVFKNYDPEGRGTISQEDFERLSGNFPFACHGLHPPPRQGRGSFSREELTGYLLRASAICSKLGLAFLHTFHEVTFRKPTFCDSCSGFLWGVTKQGYRCRECGLCCHKHCRDQVKVECKKRPGAKGDAGPPGAPVPSTPAPHASCGSEENHSYTLSLEPETGCQLRHAWTQTESPHPSWETDTVPCPVMDPPSTASSKLDS

SEQ ID NO: 39720 - protein, 170 aa, Homo sapiens
MNRKDSKRKSHQECTGKIGGRGRPRQVRRHKTCPSPREISKVMASMNLGLLSEGGCSEDELLEKCIQSFDSAGSLCHEDHMLNMVLAMHSWVLPSADLAARLLTSYQKATGDTQELRRLQICHLVRYWLMRHPEVMHQDPQLEEVIGRFWATVAREGNSAQRRLGDSSDL

SEQ ID NO: 39721 - protein, 581 aa, Homo sapiens
MNRKDSKRKSHQECTGKIGGRGRPRQVRRHKTCPSPREISKVMASMNLGLLSEGGCSEDELLEKCIQSFDSAGSLCHEDHMLNMVLAMHSWVLPSADLAARLLTSYQKATGDTQELRRLQICHLVRYWLMRHPEVMHQDPQLEEVIGRFWATVAREGNSAQRRLGDSSDLLSPGGPGPPLPMSSPGLGKKRKVSLLFDHLETGELAQHLTYLEFRSFQAITPQDLRSYVLQGSVRGCPALEGSVGLSNSVSRWVQVMVLSRPGPLQRAQVLDKFIHVAQRLHQLQNFNTLMAVTGGLCHSAISRLKDSHAHLSPDSTKLSLDLFYTEDEIYELSYAREPRCPKSLPPSPFNAPLVVEWAPGVTPKPDRVTLGRHVEQLVESVFKNYDPEGRGTISQEDFERLSGNFPFACHGLHPPPRQGRGSFSREELTGYLLRASAICSKLGLAFLHTFHEVTFRKPTFCDSCSGFLWGVTKQGYRCRECGLCCHKHCRDQVKVECKKRPGAKGDAGPPGAPVPSTPAPHASCGSEENHSYTLSLEPETGCQLRHAWTQTESPHPSWETDTVPCPVMDPPSTASSKLDS

SEQ ID NO: 39722 - protein, 484 aa, Homo sapiens
MNRKDSKRKSHQECTGKIGGRGRPRQVRRHKTCPSPREISKVMASMNLGLLSEGGCSEDELLEKCIQSFDSAGSLCHEDHMLNMVLAMHSWVLPSADLAARLLTSYQKATGDTQELRRLQICHLVRYWLMRHPEVMHQDPQLEEVIGRFWATVAREGNSAQRRLGDSSDLLSPGGPGPPLPMSSPGLGKKRKVSLLFDHLETGELAQHLTYLEFRSFQAITLSLDLFYTEDEIYELSYAREPRCPKSLPPSPFNAPLVVEWAPGVTPKPDRVTLGRHVEQLVESVFKNYDPEGRGTISQEDFERLSGNFPFACHGLHPPPRQGRGSFSREELTGYLLRASAICSKLGLAFLHTFHEVTFRKPTFCDSCSGFLWGVTKQGYRCRECGLCCHKHCRDQVKVECKKRPGAKGDAGPPGAPVPSTPAPHASCGSEENHSYTLSLEPETGCQLRHAWTQTESPHPSWETDTVPCPVMDPPSTASSKLDS

SEQ ID NO: 39723 - protein, 576 aa, Homo sapiens
MNRKDSKRKSHQECTGKIGGRGRPRQVRRHKTCPSPREISKVMASMNLGLLSEGGCSEDELLEKCIQSFDSAGSLCHEDHMLNMVLAMHSWVLPSADLAARLLTSYQKATGDTQELRRLQICHLVRYWLMRHPEVMHQDPQLEEVIGRFWATVAREGNSAQRRLGDSSDLLSPGGPGPPLPMSSPGLGKKRKVSLLFDHLETGELAQHLTYLEFRSFQAITALLELTELLASHNNYARYRRTWAGCAGFRLPVLGVHLKDLVSLHEAQPDRLPDGRLHLPKLNNLYLRLQELVALQGQHPPCSANEDLLHLLTLSLDLFYTEDEIYELSYAREPRCPKSLPPSPFNAPLVVEWAPGVTPKPDRVTLGRHVEQLVESVFKNYDPEGRGTISQEDFERLSGNFPFACHGLHPPPRQGRGSFSREELTGYLLRASAICSKLGLAFLHTFHEVTFRKPTFCDSCSGFLWGVTKQGYRCRECGLCCHKHCRDQVKVECKKRPGAKGDAGPPGAPVPSTPAPHASCGSEENHSYTLSLEPETGCQLRHAWTQTESPHPSWETDTVPCPVMDPPSTASSKLDS

SEQ ID NO: 39724 - protein, 639 aa, Homo sapiens
MNRKDSKRKSHQECTGKIGGRGRPRQVRRHKTCPSPREISKVMASMNLGLLSEGGCSEDELLEKCIQSFDSAGSLCHEDHMLNMVLAMHSWVLPSADLAARLLTSYQKATGDTQELRRLQICHLVRYWLMRHPEVMHQDPQLEEVIGRFWATVAREGNSAQRRLGDSSDLLSPGGPGPPLPMSSPGLGKKRKVSLLFDHLETGELAQHLTYLEFRSFQAITVMVLSRPGPLQRAQVLDKFIHVAQRLHQLQNFNTLMAVTGGLCHSAISRLKDSHAHLSPDSTKALLELTELLASHNNYARYRRTWAGCAGFRLPVLGVHLKDLVSLHEAQPDRLPDGRLHLPKLNNLYLRLQELVALQGQHPPCSANEDLLHLLTLSLDLFYTEDEIYELSYAREPRCPKSLPPSPFNAPLVVEWAPGVTPKPDRVTLGRHVEQLVESVFKNYDPEGRGTISQEDFERLSGNFPFACHGLHPPPRQGRGSFSREELTGYLLRASAICSKLGLAFLHTFHEVTFRKPTFCDSCSGFLWGVTKQGYRCRECGLCCHKHCRDQVKVECKKRPGAKGDAGPPGAPVPSTPAPHASCGSEENHSYTLSLEPETGCQLRHAWTQTESPHPSWETDTVPCPVMDPPSTASSKLDS

SEQ ID NO: 39725 - protein, 604 aa, Homo sapiens
MNRKDSKRKSHQECTGKIGGRGRPRQVRRHKTCPSPREISKVMASMNLGLLSEGGCSEDELLEKCIQSFDSAGSLCHEDHMLNMVLAMHSWVLPSADLAARLLTSYQKATGDTQELRRLQICHLVRYWLMRHPEVMHQDPQLEEVIGRFWATVAREGNSAQRRLGDSSDLLSPGGPGPPLPMSSPGLGKKRKVSLLFDHLETGELAQHLTYLEFRSFQAITPQDLRSYVLQGSVRGCPALEGSVGLSNSVSRWVQVMVLSRPGPLQRAQVLDKFIHVAQRLHQLQNFNTLMAVTGGLCHSAISRLKDSHAHLSPDSTKELVALQGQHPPCSANEDLLHLLTLSLDLFYTEDEIYELSYAREPRCPKSLPPSPFNAPLVVEWAPGVTPKPDRVTLGRHVEQLVESVFKNYDPEGRGTISQEDFERLSGNFPFACHGLHPPPRQGRGSFSREELTGYLLRASAICSKLGLAFLHTFHEVTFRKPTFCDSCSGFLWGVTKQGYRCRECGLCCHKHCRDQVKVECKKRPGAKGDAGPPGAPVPSTPAPHASCGSEENHSYTLSLEPETGCQLRHAWTQTESPHPSWETDTVPCPVMDPPSTASSKLDS

SEQ ID NO: 39726 - protein, 912 aa, Homo sapiens
MPGKRGLGWWWARLPLCLLLSLYGPWMPSSLGKPKGHPHMNSIRIDGDITLGGLFPVHGRGSEGKPCGELKKEKGIHRLEAMLFALDRINNDPDLLPNITLGARILDTCSRDTHALEQSLTFVQALIEKDGTEVRCGSGGPPIITKPERVVGVIGASGSSVSIMVANILRLFKIPQISYASTAPDLSDNSRYDFFSRVVPSDTYQAQAMVDIVRALKWNYVSTVASEGSYGESGVEAFIQKSREDGGVCIAQSVKIPREPKAGEFDKIIRRLLETSNARAVIIFANEDDIRRVLEAARRANQTGHFFWMGSDSWGSKIAPVLHLEEVAEGAVTILPKRMSVRGFDRYFSSRTLDNNRRNIWFAEFWEDNFHCKLSRHALKKGSHVKKCTNRERIGQDSAYEQEGKVQFVIDAVYAMGHALHAMHRDLCPGRVGLCPRMDPVDGTQLLKYIRNVNFSGIAGNPVTFNENGDAPGRYDIYQYQLRNDSAEYKVIGSWTDHLHLRIERMHWPGSGQQLPRSICSLPCQPGERKKTVKGMPCCWHCEPCTGYQYQVDRYTCKTCPYDMRPTENRTGCRPIPIIKLEWGSPWAVLPLFLAVVGIAATLFVVITFVRYNDTPIVKASGRELSYVLLAGIFLCYATTFLMIAEPDLGTCSLRRIFLGLGMSISYAALLTKTNRIYRIFEQGKRSVSAPRFISPASQLAITFSLISLQLLGICVWFVVDPSHSVVDFQDQRTLDPRFARGVLKCDISDLSLICLLGYSMLLMVTCTVYAIKTRGVPETFNEAKPIGFTMYTTCIVWLAFIPIFFGTSQSADKLYIQTTTLTVSVSLSASVSLGMLYMPKVYIILFHPEQNVPKRKRSLKAVVTAATMSNKFTQKGNFRPNGEAKSELCENLEAPALATKQTYVTYTNHAI

SEQ ID NO: 39727 - protein, 772 aa, Homo sapiens
MVQTLPKLFPHDGAKRKKRTLRTSGPCFGGGGQIPQISYASTAPDLSDNSRYDFFSRVVPSDTYQAQAMVDIVRALKWNYVSTVASEGSYGESGVEAFIQKSREDGGVCIAQSVKIPREPKAGEFDKIIRRLLETSNARAVIIFANEDDIRRVLEAARRANQTGHFFWMGSDSWGSKIAPVLHLEEVAEGAVTILPKRMSVRGFDRYFSSRTLDNNRRNIWFAEFWEDNFHCKLSRHALKKGSHVKKCTNRERIGQDSAYEQEGKVQFVIDAVYAMGHALHAMHRDLCPGRVGLCPRMDPVDGTQLLKYIRNVNFSGIAGNPVTFNENGDAPGRYDIYQYQLRNDSAEYKVIGSWTDHLHLRIERMHWPGSGQQLPRSICSLPCQPGERKKTVKGMPCCWHCEPCTGYQYQVDRYTCKTCPYDMRPTENRTGCRPIPIIKLEWGSPWAVLPLFLAVVGIAATLFVVITFVRYNDTPIVKASGRELSYVLLAGIFLCYATTFLMIAEPDLGTCSLRRIFLGLGMSISYAALLTKTNRIYRIFEQGKRSVSAPRFISPASQLAITFSLISLQLLGICVWFVVDPSHSVVDFQDQRTLDPRFARGVLKCDISDLSLICLLGYSMLLMVTCTVYAIKTRGVPETFNEAKPIGFTMYTTCIVWLAFIPIFFGTSQSADKLYIQTTTLTVSVSLSASVSLGMLYMPKVYIILFHPEQNVPKRKRSLKAVVTAATMSNKFTQKGNFRPNGEAKSELCENLEAPALATKQTYVTYTNHAI

SEQ ID NO: 39728 - protein, 743 aa, Homo sapiens
MSCKIPQISYASTAPDLSDNSRYDFFSRVVPSDTYQAQAMVDIVRALKWNYVSTVASEGSYGESGVEAFIQKSREDGGVCIAQSVKIPREPKAGEFDKIIRRLLETSNARAVIIFANEDDIRRVLEAARRANQTGHFFWMGSDSWGSKIAPVLHLEEVAEGAVTILPKRMSVRGFDRYFSSRTLDNNRRNIWFAEFWEDNFHCKLSRHALKKGSHVKKCTNRERIGQDSAYEQEGKVQFVIDAVYAMGHALHAMHRDLCPGRVGLCPRMDPVDGTQLLKYIRNVNFSGIAGNPVTFNENGDAPGRYDIYQYQLRNDSAEYKVIGSWTDHLHLRIERMHWPGSGQQLPRSICSLPCQPGERKKTVKGMPCCWHCEPCTGYQYQVDRYTCKTCPYDMRPTENRTGCRPIPIIKLEWGSPWAVLPLFLAVVGIAATLFVVITFVRYNDTPIVKASGRELSYVLLAGIFLCYATTFLMIAEPDLGTCSLRRIFLGLGMSISYAALLTKTNRIYRIFEQGKRSVSAPRFISPASQLAITFSLISLQLLGICVWFVVDPSHSVVDFQDQRTLDPRFARGVLKCDISDLSLICLLGYSMLLMVTCTVYAIKTRGVPETFNEAKPIGFTMYTTCIVWLAFIPIFFGTSQSADKLYIQTTTLTVSVSLSASVSLGMLYMPKVYIILFHPEQNVPKRKRSLKAVVTAATMSNKFTQKGNFRPNGEAKSELCENLEAPALATKQTYVTYTNHAI

SEQ ID NO: 39729 - protein, 779 aa, Homo sapiens
MAVPLGAPCWASALPAWAPPGLPHRSLLTRLLSQHVKPAKIPQISYASTAPDLSDNSRYDFFSRVVPSDTYQAQAMVDIVRALKWNYVSTVASEGSYGESGVEAFIQKSREDGGVCIAQSVKIPREPKAGEFDKIIRRLLETSNARAVIIFANEDDIRRVLEAARRANQTGHFFWMGSDSWGSKIAPVLHLEEVAEGAVTILPKRMSVRGFDRYFSSRTLDNNRRNIWFAEFWEDNFHCKLSRHALKKGSHVKKCTNRERIGQDSAYEQEGKVQFVIDAVYAMGHALHAMHRDLCPGRVGLCPRMDPVDGTQLLKYIRNVNFSGIAGNPVTFNENGDAPGRYDIYQYQLRNDSAEYKVIGSWTDHLHLRIERMHWPGSGQQLPRSICSLPCQPGERKKTVKGMPCCWHCEPCTGYQYQVDRYTCKTCPYDMRPTENRTGCRPIPIIKLEWGSPWAVLPLFLAVVGIAATLFVVITFVRYNDTPIVKASGRELSYVLLAGIFLCYATTFLMIAEPDLGTCSLRRIFLGLGMSISYAALLTKTNRIYRIFEQGKRSVSAPRFISPASQLAITFSLISLQLLGICVWFVVDPSHSVVDFQDQRTLDPRFARGVLKCDISDLSLICLLGYSMLLMVTCTVYAIKTRGVPETFNEAKPIGFTMYTTCIVWLAFIPIFFGTSQSADKLYIQTTTLTVSVSLSASVSLGMLYMPKVYIILFHPEQNVPKRKRSLKAVVTAATMSNKFTQKGNFRPNGEAKSELCENLEAPALATKQTYVTYTNHAI

SEQ ID NO: 39730 - protein, 796 aa, Homo sapiens
MPAWEPGVAASCGWRAPPCSPLRLCIAPHPCTPPSSHQGNLTCRLPPRSFGFCRCVWVRTRGPSLPGEQVSLAAHESEGAAAQLGSSPEIDPRRPRCLLPESAQIPQISYASTAPDLSDNSRYDFFSRVVPSDTYQAQAMVDIVRALKWNYVSTVASEGSYGESGVEAFIQKSREDGGVCIAQSVKIPREPKAGEFDKIIRRLLETSNARAVIIFANEDDIRRVLEAARRANQTGHFFWMGSDSWGSKIAPVLHLEEVAEGAVTILPKRMSVRDRERIGQDSAYEQEGKVQFVIDAVYAMGHALHAMHRDLCPGRVGLCPRMDPVDGTQLLKYIRNVNFSGIAGNPVTFNENGDAPGRYDIYQYQLRNDSAEYKVIGSWTDHLHLRIERMHWPGSGQQLPRSICSLPCQPGERKKTVKGMPCCWHCEPCTGYQYQVDRYTCKTCPYDMRPTENRTGCRPIPIIKLEWGSPWAVLPLFLAVVGIAATLFVVITFVRYNDTPIVKASGRELSYVLLAGIFLCYATTFLMIAEPDLGTCSLRRIFLGLGMSISYAALLTKTNRIYRIFEQGKRSVSAPRFISPASQLAITFSLISLQLLGICVWFVVDPSHSVVDFQDQRTLDPRFARGVLKCDISDLSLICLLGYSMLLMVTCTVYAIKTRGVPETFNEAKPIGFTMYTTCIVWLAFIPIFFGTSQSADKLYIQTTTLTVSVSLSASVSLGMLYMPKVYIILFHPEQNVPKRKRSLKAVVTAATMSNKFTQKGNFRPNGEAKSELCENLEAPALATKQTYVTYTNHAI

SEQ ID NO: 39731 - protein, 626 aa, Homo sapiens
MAARPAATLAWSLLLLSSALLREGCRARFVAERDSEDDGEEPVVFPESPLQSPTVLVAVLARNAAHTLPHFLGCLERLDYPKSRMAIWAATDHNVDNTTEIFREWLKNVQRLYHYVEWRPMDEPESYPDEIGPKHWPTSRFAHVMKLRQAALRTAREKWSDYILFIDVDNFLTNPQTLNLLIAENKTIVAPMLESRGLYSNFWCGITPKGFYKRTPDYVQIREWKRTGCFPVPMVHSTFLIDLRKEASDKLTFYPPHQDYTWTFDDIIVFAFSSRQAGIQMYLCNREHYGYLPIPLKPHQTLQEDIENLIHVQIEAMIDRPPMEPSQYVSVVPKYPDKMGFDEIFMINLKRRKDRRDRMLRTLYEQEIEVKIVEAVDGKALNTSQLKALNIEMLPGYRDPYSSRPLTRGEIGCFLSHYSVWKEVIDRELEKTLVIEDDVRFEHQFKKKLMKLMDNIDQAQLDWELIYIGRKRMQVKEPEKAVPNVANLVEADYSYWTLGYVISLEGAQKLVGANPFGKMLPVDEFLPVMYNKHPVAEYKEYYESRDLKAFSAEPLLIYPTHYTGQPGYLSDTETSTIWDNETVATDWDRTHAWKSRKQSRIYSNAKNTEALPPPTSLDTVPSRDEL

SEQ ID NO: 39732 - protein, 959 aa, Homo sapiens
MALLGKRCDVPTNGCGPDRWNSAFTRKDEIITSLVSALDSMCSALSKLNAEVACVAVHDESAFVVGTEKGRMFLNARKELQSDFLRFCRGPPWKDPEAEHPKKVQRGEGGGRSLPRSSLEHGSDVYLLRKMVEEVFDVLYSEALGRASVVPLPYERLLREPGLLAVQGLPEGLAFRRPAEYDPKALMAILEHSHRIRFKLKRPLEDGGRDSKALVELNGVSLIPKGSRDCGLHGQAPKVPPQDLPPTATSSSMASFLYSTALPNHAIRELKQEAPSCPLAPSDLGLSRPMPEPKATGAQDFSDCCGQKPTGPGGPLIQNVHASKRILFSIVHDKSEKWDAFIKETEDINTLRECVQILFNSRYAEALGLDHMVPVPYRKIACDPEAVEIVGIPDKIPFKRPCTYGVPKLKRILEERHSIHFIIKRMFDERIFTGNKFTKDTTKLEPASPPEDTSAEVSRATVLDLAGNARSDKGSMSEDCGPGTSGELGGLRPIKIEPEDLDIIQVTVPDPSPTSEEMTDSMPGHLPSEDSGYGMEMLTDKGLSEDARPEERPVEDSHGDVIRPLRKQVELLFNTRYAKAIGISEPVKVPYSKFLMHPEELFVVGLPEGISLRRPNCFGIAKLRKILEASNSIQFVIKRPELLTEGVKEPIMDSQGTASSLGFSPPALPPERDSGDPLVDESLKRQGFQENYDARLSRIDIANTLREQVQDLFNKKYGEALGIKYPVQVPYKRIKSNPGSVIIEGLPPGIPFRKPCTFGSQNLERILAVADKIKFTVTRPFQGLIPKPDEDDANRLGEKVILREQVKELFNEKYGEALGLNRPVLVPYKLIRDSPDAVEVTGLPDDIPFRNPNTYDIHRLEKILKAREHVRMVIINQLQPFAEICNDAKVPAKDSSIPKRKRKRVSEGNSVSSSSSSSSSSSSNPDSVASANQISLVQWPMYMVDYAGLNVQLPGPLNY

SEQ ID NO: 39733 - protein, 944 aa, Homo sapiens
MALLGKRCDVPTNGCGPDRWNSAFTRKDEIITSLVSALDSMCSALSKLNAEVACVAVHDESAFVVGTEKGRMFLNARKELQSDFLRFCRGPPWKDPEAEHPKKVQRGEGGGRSLPRSSLEHGSDVYLLRKMVEEVFDVLYSEALGRASVVPLPYERLLREPGLLAVQGLPEGLAFRRPAEYDPKALMAILEHSHRIRFKLKRPLEDGGRDSKALVELNGVSLIPKGSRDCGLHGQAPKVPPQDLPPTATSSSMASFLYSTALPNHAIRELKQEAPSCPLAPSDLGLSRPMPEPKATGAQDFSDCCGQKPTGPGGPLIQNVHASKRILFSIVHDKSEKWDAFIKETEDINTLRECVQILFNSRYAEALGLDHMVPVPYRKIACDPEAVEIVGIPDKIPFKRPCTYGVPKLKRILEERHSIHFIIKRMFDERIFTGNKFTKDTTKLEPASPPEDTSAEVSRATVLDLAGNARSDKGSMSEDCGPGTSGELGGLRPIKIEPEDLDIIQVTVPDPSPTSEEMTDSMPGHLPSEDSGYGMEMLTDKGLSEDARPEERPVEDSHGDVIRPLRKQVELLFNTRYAKAIGISEPVKVPYSKFLMHPEELFVVGLPEGISLRRPNCFGIAKLRKILEASNSIQFVIKRPELLTEGVKEPIMDSQERDSGDPLVDESLKRQGFQENYDARLSRIDIANTLREQVQDLFNKKYGEALGIKYPVQVPYKRIKSNPGSVIIEGLPPGIPFRKPCTFGSQNLERILAVADKIKFTVTRPFQGLIPKPDEDDANRLGEKVILREQVKELFNEKYGEALGLNRPVLVPYKLIRDSPDAVEVTGLPDDIPFRNPNTYDIHRLEKILKAREHVRMVIINQLQPFAEICNDAKVPAKDSSIPKRKRKRVSEGNSVSSSSSSSSSSSSNPDSVASANQISLVQWPMYMVDYAGLNVQLPGPLNY

SEQ ID NO: 39734 - protein, 976 aa, Homo sapiens
MALLGKRCDVPTNGCGPDRWNSAFTRKDEIITSLVSALDSMCSALSKLNAEVACVAVHDESAFVVGTEKGRMFLNARKELQSDFLRFCLSAAQHRAATSQLEGRVVRRVLTVASRALCPTGGPPWKDPEAEHPKKVQRGEGGGRSLPRSSLEHGSDVYLLRKMVEEVFDVLYSEALGRASVVPLPYERLLREPGLLAVQGLPEGLAFRRPAEYDPKALMAILEHSHRIRFKLKRPLEDGGRDSKALVELNGVSLIPKGSRDCGLHGQAPKVPPQDLPPTATSSSMASFLYSTALPNHAIRELKQEAPSCPLAPSDLGLSRPMPEPKATGAQDFSDCCGQKPTGPGGPLIQNVHASKRILFSIVHDKSEKWDAFIKETEDINTLRECVQILFNSRYAEALGLDHMVPVPYRKIACDPEAVEIVGIPDKIPFKRPCTYGVPKLKRILEERHSIHFIIKRMFDERIFTGNKFTKDTTKLEPASPPEDTSAEVSRATVLDLAGNARSDKGSMSEDCGPGTSGELGGLRPIKIEPEDLDIIQVTVPDPSPTSEEMTDSMPGHLPSEDSGYGMEMLTDKGLSEDARPEERPVEDSHGDVIRPLRKQVELLFNTRYAKAIGISEPVKVPYSKFLMHPEELFVVGLPEGISLRRPNCFGIAKLRKILEASNSIQFVIKRPELLTEGVKEPIMDSQERDSGDPLVDESLKRQGFQENYDARLSRIDIANTLREQVQDLFNKKYGEALGIKYPVQVPYKRIKSNPGSVIIEGLPPGIPFRKPCTFGSQNLERILAVADKIKFTVTRPFQGLIPKPDEDDANRLGEKVILREQVKELFNEKYGEALGLNRPVLVPYKLIRDSPDAVEVTGLPDDIPFRNPNTYDIHRLEKILKAREHVRMVIINQLQPFAEICNDAKVPAKDSSIPKRKRKRVSEGNSVSSSSSSSSSSSSNPDSVASANQISLVQWPMYMVDYAGLNVQLPGPLNY

SEQ ID NO: 39735 - protein, 117 aa, Homo sapiens
MDMRVPAQLLGLLLLWLPGVRFDIQMTQSPSFLSASVGDRVSIICWASEGISSNLAWYLQKPGKSPKLFLYDAKDLHPGVSSRFSGRGSGTDFTLTIISLKPEDFAAYYCKQDFSYP

SEQ ID NO: 39736 - protein, 730 aa, Homo sapiens
MAAGVEAAAEVAATEIKMEEESGAPGVPSGNGAPGPKGEGERPAQNEKRKEKNIKRGGNRFEPYANPTKRYRAFITNIPFDVKWQSLKDLVKEKVGEVTYVELLMDAEGKSRGCAVVEFKMEESMKKAAEVLNKHSLSGRPLKVKEDPDGEHARRAMQKVMATTGGMGMGPGGPGMITIPPSILNNPNIPNEIIHALQAGRLGSTVFVANLDYKVGWKKLKEVFSMAGVVVRADILEDKDGKSRGIGTVTFEQSIEAVQAISMFNGQLLFDRPMHVKMDERALPKGDFFPPERPQQLPHGLGGIGMGLGPGGQPIDANHLNKGIGMGNIGPAGMGMEGIGFGINKMGGMEGPFGGGMENMGRFGSGMNMGRINEILSNALKRGEIIAKQGGGGGGGSVPGIERMGPGIDRLGGAGMERMGAGLGHGMDRVGSEIERMGLVMDRMGSVERMGSGIERMGPLGLDHMASSIERMGQTMERIGSGVERMGAGMGFGLERMAAPIDRVGQTIERMGSGVERMGPAIERMGLSMERMVPAGMGAGLERMGPVMDRMATGLERMGANNLERMGLERMGANSLERMGLERMGANSLERMGPAMGPALGAGIERMGLAMGGGGGASFDRAIEMERGNFGGSFAGSFGGAGGHAPGVARKACQIFVRNLPFDFTWKMLKDKFNECGHVLYADIKMENGKSKGCGVVKFESPEVAERACRMMNGMKLSGREIDVRIDRNA

SEQ ID NO: 39737 - protein, 691 aa, Homo sapiens
MAAGVEAAAEVAATEIKMEEESGAPGVPSGNGAPGPKGEGERPAQNEKRKEKNIKRGGNRFEPYANPTKRYRAFITNIPFDVKWQSLKDLVKEKVGEVTYVELLMDAEGKSRGCAVVEFKMEESMKKAAEVLNKHSLSGRPLKVKEDPDGEHARRAMQKAGRLGSTVFVANLDYKVGWKKLKEVFSMAGVVVRADILEDKDGKSRGIGTVTFEQSIEAVQAISMFNGQLLFDRPMHVKMDERALPKGDFFPPERPQQLPHGLGGIGMGLGPGGQPIDANHLNKGIGMGNIGPAGMGMEGIGFGINKMGGMEGPFGGGMENMGRFGSGMNMGRINEILSNALKRGEIIAKQGGGGGGGSVPGIERMGPGIDRLGGAGMERMGAGLGHGMDRVGSEIERMGLVMDRMGSVERMGSGIERMGPLGLDHMASSIERMGQTMERIGSGVERMGAGMGFGLERMAAPIDRVGQTIERMGSGVERMGPAIERMGLSMERMVPAGMGAGLERMGPVMDRMATGLERMGANNLERMGLERMGANSLERMGLERMGANSLERMGPAMGPALGAGIERMGLAMGGGGGASFDRAIEMERGNFGGSFAGSFGGAGGHAPGVARKACQIFVRNLPFDFTWKMLKDKFNECGHVLYADIKMENGKSKGCGVVKFESPEVAERACRMMNGMKLSGREIDVRIDRNA

SEQ ID NO: 39738 - protein, 993 aa, Homo sapiens
MDQSVAIQETLAEGEYCVIAVQGVLCEGDSRQSRLLGLVRYRLEHGGQEHALFLYTHRRMAITGDDVSLDQIVPVSRDFTLEEVSPDGELYILGSDVTVQLDTAELSLVFQLPFGSQTRMFLHEVARACPGFDSATRDPEFLWLSRYRCAELELEMPTPRGCNSALVTWPGYATIGGGRYPSRKKRWGLEEARPQGAGSVLFWGGAMEKTGFRLMERAHGGGFVWGRSARDGRRDEELEEAGREMSAAAGSRERNTAGGSNFDGLRPNGKGVPMDQSSRGQDKPESLQPRQNKSKSEITDMVRSSTITVSDKAHILSMQKFGLRDTIVKSHLLQKEEDYTYIQNFRFFAGTYNVNGQSPKECLRLWLSNGIQAPDVYCVGFQELDLSKEAFFFHDTPKEEEWFKAVSEGLHPDAKYAKVKLIRLVGIMLLLYVKQEHAAYISEVEAETVGTGIMGRMGNKGGVAIRFQFHNTSICVVNSHLAAHIEEYERRNQDYKDICSRMQFCQPDPSLPPLTISNHDVILWLGDLNYRIEELDVEKVKKLIEEKDFQMLYAYDQLKIQVAAKTVFEGFTEGELTFQPTYKYDTGSDDWDTSEKCRAPAWCDRILWKGKNITQLSYQSHMALKTSDHKPVSSVFDIGVRVVNDELYRKTLEEIVRSLDKMENANIPSVSLSKREFCFQNVKYMQLKVESFTIHNGQVPCHFEFINKPDEESYCKQWLNANPSRGFLLPDSDVEIDLELFVNKMTATKLNSGEDKIEDILVLHLDRGKDYFLSVSGNYLPSCFGSPIHTLCYMREPILDLPLETISELTLMPVWTGDDGSQLDSPMEIPKELWMMVDYLYRNAVQQEDLFQQPGLRSEFEHIRDCLDTGMIDNLSASNHSVAEALLLFLESLPEPVICYSTYHNCLECSGNYTASKQVISTLPIFHKNVFHYLMAFLRELLKNSAKNHLDENILASIFGSLLLRNPAGHQKLDMTEKKKAQEFIHQFLCNPL

SEQ ID NO: 39739 - protein, 913 aa, Homo sapiens
MDQSVAIQETLAEGEYCVIAVQGVLCEGDSRQSRLLGLVRYRLEHGGQEHALFLYTHRRMAITGDDVSLDQIVPVSRDFTLEEVSPDGELYILGSDVTVQLDTAELSLVFQLPFGSQTRMFLHEVARACPGFDSATRDPEFLWLSRYRCAELELEMPTPRGCNSALVTWPGYATIGGGGSNFDGLRPNGKGVPMDQSSRGQDKPESLQPRQNKSKSEITDMVRSSTITVSDKAHILSMQKFGLRDTIVKSHLLQKEEDYTYIQNFRFFAGTYNVNGQSPKECLRLWLSNGIQAPDVYCVGFQELDLSKEAFFFHDTPKEEEWFKAVSEGLHPDAKYAKVKLIRLVGIMLLLYVKQEHAAYISEVEAETVGTGIMGRMGNKGGVAIRFQFHNTSICVVNSHLAAHIEEYERRNQDYKDICSRMQFCQPDPSLPPLTISNHDVILWLGDLNYRIEELDVEKVKKLIEEKDFQMLYAYDQLKIQVAAKTVFEGFTEGELTFQPTYKYDTGSDDWDTSEKCRAPAWCDRILWKGKNITQLSYQSHMALKTSDHKPVSSVFDIGVRVVNDELYRKTLEEIVRSLDKMENANIPSVSLSKREFCFQNVKYMQLKVESFTIHNGQVPCHFEFINKPDEESYCKQWLNANPSRGFLLPDSDVEIDLELFVNKMTATKLNSGEDKIEDILVLHLDRGKDYFLSVSGNYLPSCFGSPIHTLCYMREPILDLPLETISELTLMPVWTGDDGSQLDSPMEIPKELWMMVDYLYRNAVQQEDLFQQPGLRSEFEHIRDCLDTGMIDNLSASNHSVAEALLLFLESLPEPVICYSTYHNCLECSGNYTASKQVISTLPIFHKNVFHYLMAFLRELLKNSAKNHLDENILASIFGSLLLRNPAGHQKLDMTEKKKAQEFIHQFLCNPL

SEQ ID NO: 39740 - protein, 749 aa, Homo sapiens
MSAAAGSRERNTAGGSNFDGLRPNGKGVPMDQSSRGQDKPESLQPRQNKSKSEITDMVRSSTITVSDKAHILSMQKFGLRDTIVKSHLLQKEEDYTYIQNFRFFAGTYNVNGQSPKECLRLWLSNGIQAPDVYCVGFQELDLSKEAFFFHDTPKEEEWFKAVSEGLHPDAKYAKVKLIRLVGIMLLLYVKQEHAAYISEVEAETVGTGIMGRMGNKGGVAIRFQFHNTSICVVNSHLAAHIEEYERRNQDYKDICSRMQFCQPDPSLPPLTISNHDVILWLGDLNYRIEELDVEKVKKLIEEKDFQMLYAYDQLKIQVAAKTVFEGFTEGELTFQPTYKYDTGSDDWDTSEKCRAPAWCDRILWKGKNITQLSYQSHMALKTSDHKPVSSVFDIGVRVVNDELYRKTLEEIVRSLDKMENANIPSVSLSKREFCFQNVKYMQLKVESFTIHNGQVPCHFEFINKPDEESYCKQWLNANPSRGFLLPDSDVEIDLELFVNKMTATKLNSGEDKIEDILVLHLDRGKDYFLSVSGNYLPSCFGSPIHTLCYMREPILDLPLETISELTLMPVWTGDDGSQLDSPMEIPKELWMMVDYLYRNAVQQEDLFQQPGLRSEFEHIRDCLDTGMIDNLSASNHSVAEALLLFLESLPEPVICYSTYHNCLECSGNYTASKQVISTLPIFHKNVFHYLMAFLRELLKNSAKNHLDENILASIFGSLLLRNPAGHQKLDMTEKKKAQEFIHQFLCNPL

SEQ ID NO: 39741 - protein, 828 aa, Homo sapiens
MDQSVAIQETLAEGEYCVIAVQGVLCEGDSRQSRLLGLVRYRLEHGGQEHALFLYTHRRMAITGDDVSLDQIVPVSRDFTLEEVSPDGELYILGSDVTVQLDTAELSLVFQLPFGSQTRMFLHEVARACPGFDSATRDPEFLWLSRYRCAELELEMPTPRGCNSALVTWPGYATIGGGRYPSRKKRWGLEEARPQGAGSVLFWGGAMEKTGFRLMERAHGGGFVWGRSARDGRRDEELEEAGREMSAAAGSRERNTAGGSNFDGLRPNGKGVPMDQSSRGQDKPESLQPRQNKSKSEITDMVRSSTITVSDKAHILSMQKFGLRDTIVKSHLLQKEEDYTYIQNFRFFAGTYNVNGQSPKECLRLWLSNGIQAPDVYCVGFQELDLSKEAFFFHDTPKEEEWFKAVSEGLHPDAKYAKVKLIRLVGIMLLLYVKQEHAAYISEVEAETVGTGIMGRMGNKGGVAIRFQFHNTSICVVNSHLAAHIEEYERRNQDYKDICSRMQFCQPDPSLPPLTISNHDVILWLGDLNYRIEELDVEKVKKLIEEKDFQMLYAYDQLKIQVAAKTVFEGFTEGELTFQPTYKYDTGSDDWDTSEKCRAPAWCDRILWKGKNITQLSYQSHMALKTSDHKPVSSVFDIGVRVVNDELYRKTLEEIVRSLDKMENANIPSVSLSKREFCFQNVKYMQLKVESFTIHNGQVPCHFEFINKPDEESYCKQWLNANPSRGFLLPDSDVEIDLELFVNKMTATKLNSGEDKIEDILVLHLDRGKDYFLSVSGNYLPSCFGSPIHTLCYMREPILDLPLETISELLAYLAAYCFETQLVTKSLI

SEQ ID NO: 39742 - protein, 130 aa, Homo sapiens
MMKRAAAAAVGGALAVGAVPVVLSAMGFTGAGIAASSIAAKMMSAAAIANGGGVSAGSLVATLQSVGAAGLSTSSNILLASVGSVLGACLGNSPSSSLPAEPEAKEDEARENVPQGEPPKPPLKSEKHEE

SEQ ID NO: 39743 - protein, 239 aa, Homo sapiens
MGNSALRAHVETAQKTGVFQLKDRGLTEFPADLQKLTSNLRTIDLSNNKIESLPPLLIGKFTLLKSLSLNNNKLTVLPDEICNLKKLETLSLNNNHLRELPSTFGQLSALKTLSLSGNQLGALPPQLCSLRHLDVMDLSKNQIRSIPDSVGELQVIELNLNQNQISQISVKISCCPRLKILRLEENCLELSMLPQSILSDSQICLLAVEGNLFEIKKLRELEGYDKYMERFTATKKKFA

SEQ ID NO: 39744 - protein, 876 aa, Homo sapiens
MASDASHALEAALEQMDGIIAGTKTGADLSDGTCEPGLASPASYMNPFPVLHLIEDLRLALEMLELPQERAALLSQIPGPTAAYIKEWFEESLSQVNHHSAASNETYQERLARLEGDKESLILQVSVLTDQVEAQGEKIRDLEVCLEGHQVKLNAAEEMLQQELLSRTSLETQKLDLMTEVSELKLKLVGMEKEQREQEEKQRKAEELLQELRHLKIKVEELENERNQYEWKLKATKAEVAQLQEQVALKDAEIERLHSQLSRTAALHSESHTERDQEIQRLKMGMETLLLANEDKDRRIEELTGLLNQYRKVKEIVMVTQGPSERTLSINEEEPEGGFSKWNATNKDPEELFKQEMPPRCSSPTVGPPPLPQKSLETRAQKKLSCSLEDLRSESVDKCMDGNQPFPVLEPKDSPFLAEHKYPTLPGKLSGATPNGEAAKSPPTICQPDATGSSLLRLRDTESGWDDTAVVNDLSSTSSGTESGPQSPLTPDGKRNPKGIKKFWGKIRRTQSGNFYTDTLGMAEFRRGGLRATAGPRLSRTRDSKGQKSDANAPFAQWSTERVCAWLEDFGLAQYVIFARQWVSSGHTLLTATPQDMEKELGIKHPLHRKKLVLAVKAINTKQEEKSALLDHIWVTRWLDDIGLPQYKDQFHESRVDRRMLQYLTVNDLLFLKVTSQLHHLSIKCAIHVLHVNKFNPHCLHRRPADESNLSPSEVVQWSNHRVMEWLRSVDLAEYAPNLRGSGVHGGLIILEPRFTGDTLAMLLNIPPQKTLLRRHLTTKFNALIGPEAEQEKREKMASPAYTPLTTTAKVRPRKLGFSHFGNIRKKKFDESTDYICPMEPSDGVSDSHRVYSGYRGLSPLDAPELDGLDQVGQIS

SEQ ID NO: 39745 - protein, 764 aa, Homo sapiens
MSSEQWPRLPGKVSVLTDQVEAQGEKIRDLEVCLEGHQVKLNAAEEMLQQELLSRTSLETQKLDLMTEVSELKLKLVGMEKEQREQEEKQRKAEELLQELRHLKIKVEELENERNQYEWKLKATKAEVAQLQEQVALKDAEIERLHSQLSRTAALHSESHTERDQEIQRLKMGMETLLLANEDKDRRIEELTGLLNQYRKVKEIVMVTQGPSERTLSINEEEPEGGFSKWNATNKDPEELFKQEMPPRCSSPTVGPPPLPQKSLETRAQKKLSCSLEDLRSESVDKCMDGNQPFPVLEPKDSPFLAEHKYPTLPGKLSGATPNGEAAKSPPTICQPDATGSSLLRLRDTESGWDDTAVVNDLSSTSSGTESGPQSPLTPDGKRNPKGIKKFWGKIRRTQSGNFYTDTLGMAEFRRGGLRATAGPRLSRTRDSKGQKSDANAPFAQWSTERVCAWLEDFGLAQYVIFARQWVSSGHTLLTATPQDMEKELGIKHPLHRKKLVLAVKAINTKQEEKSALLDHIWVTRWLDDIGLPQYKDQFHESRVDRRMLQYLTVNDLLFLKVTSQLHHLSIKCAIHVLHVNKFNPHCLHRRPADESNLSPSEVVQWSNHRVMEWLRSVDLAEYAPNLRGSGVHGGLIILEPRFTGDTLAMLLNIPPQKTLLRRHLTTKFNALIGPEAEQEKREKMASPAYTPLTTTAKVRPRKLGFSHFGNIRKKKFDESTDYICPMEPSDGVSDSHRVYSGYRGLSPLDAPELDGLDQVGQIS

SEQ ID NO: 39746 - protein, 733 aa, Homo sapiens
MGKLITRMWKLLRRRSAPKELLSRTSLETQKLDLMTEVSELKLKLVGMEKEQREQEEKQRKAEELLQELRHLKIKVEELENERNQYEWKLKATKAEVAQLQEQVALKDAEIERLHSQLSRTAALHSESHTERDQEIQRLKMGMETLLLANEDKDRRIEELTGLLNQYRKVKEIVMVTQGPSERTLSINEEEPEGGFSKWNATNKDPEELFKQEMPPRCSSPTVGPPPLPQKSLETRAQKKLSCSLEDLRSESVDKCMDGNQPFPVLEPKDSPFLAEHKYPTLPGKLSGATPNGEAAKSPPTICQPDATGSSLLRLRDTESGWDDTAVVNDLSSTSSGTESGPQSPLTPDGKRNPKGIKKFWGKIRRTQSGNFYTDTLGMAEFRRGGLRATAGPRLSRTRDSKGQKSDANAPFAQWSTERVCAWLEDFGLAQYVIFARQWVSSGHTLLTATPQDMEKELGIKHPLHRKKLVLAVKAINTKQEEKSALLDHIWVTRWLDDIGLPQYKDQFHESRVDRRMLQYLTVNDLLFLKVTSQLHHLSIKCAIHVLHVNKFNPHCLHRRPADESNLSPSEVVQWSNHRVMEWLRSVDLAEYAPNLRGSGVHGGLIILEPRFTGDTLAMLLNIPPQKTLLRRHLTTKFNALIGPEAEQEKREKMASPAYTPLTTTAKVRPRKLGFSHFGNIRKKKFDESTDYICPMEPSDGVSDSHRVYSGYRGLSPLDAPELDGLDQVGQIS

SEQ ID NO: 39747 - protein, 467 aa, Homo sapiens
MLGIWIVAFLFFGTSRGKEVCYERLGCFKDGLPWTRTFSTELVGLPWSPEKINTRFLLYTIHNPNAYQEISAVNSSTIQASYFGTDKITRINIAGWKTDGKWQRDMCNVLLQLEDINCINLDWINGSREYIHAVNNLRVVGAEVAYFIDVLMKKFEYSPSKVHLIGHSLGAHLAGEAGSRIPGLGRITGLDPAGPFFHNTPKEVRLDPSDANFVDVIHTNAARILFELGVGTIDACGHLDFYPNGGKHMPGCEDLITPLLKFNFNAYKKEMASFFDCNHARSYQFYAESILNPDAFIAYPCRSYTSFKAGNCFFCSKEGCPTMGHFADRFHFKNMKTNGSHYFLNTGSLSPFARWRHKLSVKLSGSEVTQGTVFLRVGGAVRKTGEFAIVSGKLEPGMTYTKLIDADVNVGNITSVQFIWKKHLFEDSQNKLGAEMVINTSGKYGYKSTFCSQDIMGPNILQNLKPC

SEQ ID NO: 39748 - protein, 517 aa, Homo sapiens
MARMGLAGAAGRWWGLALGLTAFFLPGVHSQVVQVNDSMYGFIGTDVVLHCSFANPLPSVKITQVTWQKSTNGSKQNVAIYNPSMGVSVLAPYRERVEFLRPSFTDGTIRLSRLELEDEGVYICEFATFPTGNRESQLNLTVMAKPTNWIEGTQAVLRAKKGQDDKVLVATCTSANGKPPSVVSWETRLKGEAEYQEIRNPNGTVTVISRYRLVPSREAHQQSLACIVNYHMDRFKESLTLNVQYEPEVTIEGFDGNWYLQRMDVKLTCKADANPPATEYHWTTLNGSLPKGVEAQNRTLFFKGPINYSLAGTYICEATNPIGTRSGQVEVNITEFPYTPSPPEHGRRAGPVPTAIIGGVAGSILLVLIVVGGIVVALRRRRHTFKGDYSTKKHVYGNGYSKAGIPQHHPPMAQNLQYPDDSDDEKKAGPLGGSSYEEEEEEEEGGGGGERKVGGPHPKYDEDAKRPYFTVDEAEARQDGYGDRTLGYQYDPEQLDLAENMVSQNDGSFISKKEWYV

SEQ ID NO: 39749 - protein, 458 aa, Homo sapiens
MARMGLAGAAGRWWGLALGLTAFFLPGVHSQVVQVNDSMYGFIGTDVVLHCSFANPLPSVKITQVTWQKSTNGSKQNVAIYNPSMGVSVLAPYRERVEFLRPSFTDGTIRLSRLELEDEGVYICEFATFPTGNRESQLNLTVMAKPTNWIEGTQAVLRAKKGQDDKVLVATCTSANGKPPSVVSWETRLKGEAEYQEIRNPNGTVTVISRYRLVPSREAHQQSLACIVNYHMDRFKESLTLNVQYEPEVTIEGFDGNWYLQRMDVKLTCKADANPPATEYHWTTLNGSLPKGVEAQNRTLFFKGPINYSLAGTYICEATNPIGTRSGQVEVNITEKPRPQRGLGSAARLLAGTVAVFLILVAVLTVFFLYNRQQKSPPETDGAGTDQPLSQKPEPSPSRQSSLVPEDIQVVHLDPGRQQQQEEEDLQKLSLQPPYYDLGVSPSYHPSVRTTEPRGECP

SEQ ID NO: 39750 - protein, 352 aa, Homo sapiens
MARMGLAGAAGRWWGLALGLTAFFLPGVHSQVVQVNDSMYGFIGTDVVLHCSFANPLPSVKITQVTWQKSTNGSKQNVAIYNPSMGVSVLAPYRERVEFLRPSFTDGTIRLSRLELEDEGVYICEFATFPTGNRESQLNLTVMAKPTNWIEGTQAVLRAKKGQDDKVLVATCTSANGKPPSVVSWETRLKGEAEYQEIRNPNGTVTVISRYRLVPSREAHQQSLACIVNYHMDRFKESLTLNVQYEPEVTIEGFDGNWYLQRMDVKLTCKADANPPATEYHWTTLNGSLPKGVEAQNRTLFFKGPINYSLAGTYICEATNPIGTRSGQVEVNITAFCQLIYPGKGRTRARMF

SEQ ID NO: 39751 - protein, 3801 aa, Homo sapiens
MSTDSNSLAREFLTDVNRLCNAVVQRVEAREEEEEETHMATLGQYLVHGRGFLLLTKLNSIIDQALTCREELLTLLLSLLPLVWKIPVQEEKATDFNLPLSADIILTKEKNSSSQRSTQEKLHLEGSALSSQVSAKVNVFRKSRRQRKITHRYSVRDARKTQLSTSDSEANSDEKGIAMNKHRRPHLLHHFLTSFPKQDHPKAKLDRLATKEQTPPDAMALENSREIIPRQGSNTDILSEPAALSVISNMNNSPFDLCHVLLSLLEKVCKFDVTLNHNSPLAASVVPTLTEFLAGFGDCCSLSDNLESRVVSAGWTEEPVALIQRMLFRTVLHLLSVDVSTAEMMPENLRKNLTELLRAALKIRICLEKQPDPFAPRQKKTLQEVQEDFVFSKYRHRALLLPELLEGVLQILICCLQSAASNPFYFSQAMDLVQEFIQHHGFNLFETAVLQMEWLVLRDGVPPEASEHLKALINSVMKIMSTVKKVKSEQLHHSMCTRKRHRRCEYSHFMHHHRDLSGLLVSAFKNQVSKNPFEETADGDVYYPERCCCIAVCAHQCLRLLQQASLSSTCVQILSGVHNIGICCCMDPKSVIIPLLHAFKLPALKNFQQHILNILNKLILDQLGGAEISPKIKKAACNICTVDSDQLAQLEETLQGNLCDAELSSSLSSPSYRFQGILPSSGSEDLLWKWDALKAYQNFVFEEDRLHSIQIANHICNLIQKGNIVVQWKLYNYIFNPVLQRGVELAHHCQHLSVTSAQSHVCSHHNQCLPQDVLQIYVKTLPILLKSRVIRDLFLSCNGVSQIIELNCLNGIRSHSLKAFETLIISLGEQQKDASVPDIDGIDIEQKELSSVHVGTSFHHQQAYSDSPQSLSKFYAGLKEAYPKRRKTVNQDVHINTINLFLCVAFLCVSKEAESDRESANDSEDTSGYDSTASEPLSHMLPCISLESLVLPSPEHMHQAADIWSMCRWIYMLSSVFQKQFYRLGGFRVCHKLIFMIIQKLFRSHKEEQGKKEGDTSVNENQDLNRISQPKRTMKEDLLSLAIKSDPIPSELGSLKKSADSLGKLELQHISSINVEEVSATEAAPEEAKLFTSQESETSLQSIRLLEALLAICLHGARTSQQKMELELPNQNLSVESILFEMRDHLSQSKVIETQLAKPLFDALLRVALGNYSADFEHNDAMTEKSHQSAEELSSQPGDFSEEAEDSQCCSFKLLVEEEGYEADSESNPEDGETQDDGVDLKSETEGFSASSSPNDLLENLTQGEIIYPEICMLELNLLSASKAKLDVLAHVFESFLKIIRQKEKNVFLLMQQGTVKNLLGGFLSILTQDDSDFQACQRVLVDLLVSLMSSRTCSEELTLLLRIFLEKSPCTKILLLGILKIIESDTTMSPSQYLTFPLLHAPNLSNGVSSQKYPGILNSKAMGLLRRARVSRSKKEADRESFPHRLLSSWHIAPVHLPLLGQNCWPHLSEGFSVSLWFNVECIHEAESTTEKGKKIKKRNKSLILPDSSFDGTESDRPEGAEYINPGERLIEEGCIHIISLGSKALMIQVWADPHNATLIFRVCMDSNDDMKAVLLAQVESQENIFLPSKWQHLVLTYLQQPQGKRRIHGKISIWVSGQRKPDVTLDFMLPRKTSLSSDSNKTFCMIGHCLSSQEEFLQLAGKWDLGNLLLFNGAKVGSQEAFYLYACGPNHTSVMPCKYGKPVNDYSKYINKEILRCEQIRELFMTKKDVDIGLLIESLSVVYTTYCPAQYTIYEPVIRLKGQMKTQLSQRPFSSKEVQSILLEPHHLKNLQPTEYKTIQGILHEIGGTGIFVFLFARVVELSSCEETQALALRVILSLIKYNQQRVHELENCNGLSMIHQVLIKQKCIVGFYILKTLLEGCCGEDIIYMNENGEFKLDVDSNAIIQDVKLLEELLLDWKIWSKAEQGVWETLLAALEVLIRADHHQQMFNIKQLLKAQVVHHFLLTCQVLQEYKEGQLTPMPREVCRSFVKIIAEVLGSPPDLELLTIIFNFLLAVHPPTNTYVCHNPTNFYFSLHIDGKIFQEKVRSIMYLRHSSSGGRSLMSPGFMVISPSGFTASPYEGENSSNIIPQQMAAHMLRSRSLPAFPTSSLLTQSQKLTGSLGCSIDRLQNIADTYVATQSKKQNSLGSSDTLKKGKEDAFISSCESAKTVCEMEAVLSAQVSVSDVPKGVLGFPVVKADHKQLGAEPRSEDDSPGDESCPRRPDYLKGLASFQRSHSTIASLGLAFPSQNGSAAVGRWPSLVDRNTDDWENFAYSLGYEPNYNRTASAHSVTEDCLVPICCGLYELLSGVLLILPDVLLEDVMDKLIQADTLLVLVNHPSPAIQQGVIKLLDAYFARASKEQKDKFLKNRGFSLLANQLYLHRGTQELLECFIEMFFGRHIGLDEEFDLEDVRNMGLFQKWSVIPILGLIETSLYDNILLHNALLLLLQILNSCSKVADMLLDNGLLYVLCNTVAALNGLEKNIPMSEYKLLACDIQQLFIAVTIHACSSSGSQYFRVIEDLIVMLGYLQNSKNKRTQNMAVALQLRVLQAAMEFIRTTANHDSENLTDSLQSPSAPHHAVVQKRKSIAGPRKFPLAQTESLLMKMRSVANDELHVMMQRRMSQENPSQATETELAQRLQRLTVLAVNRIIYQEFNSDIIDILRTPENVTQSKTSVFQTEISEENIHHEQSSVFNPFQKEIFTYLVEGFKVSIGSSKASGSKQQWTKILWSCKETFRMQLGRLLVHILSPAHAAQERKQIFEIVHEPNHQEILRDCLSPSLQHGAKLVLYLSELIHNHQGELTEEELGTAELLMNALKLCGHKCIPPSASTKADLIKMIKEEQKKYETEEGVNKAAWQKTVNNNQQSLFQRLDSKSKDISKIAADITQAVSLSQGNERKKVIQHIRGMYKVDLSASRHWQELIQQLTHDRAVWYDPIYYPTSWQLDPTEGPNRERRRLQRCYLTIPNKYLLRDRQKSEDVVKPPLSYLFEDKTHSSFSSTVKDKAASESIRVNRRCISVAPSRETAGELLLGKCGMYFVEDNASDTVESSSLQGELEPASFSWTYEEIKEVHKRWWQLRDNAVEIFLTNGRTLLLAFDNTKVRDDVYHNILTNNLPNLLEYGNITALTNLWYTGQITNFEYLTHLNKHAGRSFNDLMQYPVFPFILADYVSETLDLNDLLIYRNLSKPIAVQYKEKEDRYVDTYKYLEEEYRKGAREDDPMPPVQPYHYGSHYSNSGTVLHFLVRMPPFTKMFLAYQDQSFDIPDRTFHSTNTTWRLSSFESMTDVKELIPEFFYLPEFLVNREGFDFGVRQNGERVNHVNLPPWARNDPRLFILIHRQALESDYVSQNICQWIDLVFGYKQKGKASVQAINVFHPATYFGMDVSAVEDPVQRRALETMIKTYGQTPRQLFHMAHVSRPGAKLNIEGELPAAVGLLVQFAFRETREQVKEITYPSPLSWIKGLKWGEYVGSPSAPVPVVCFSQPHGERFGSLQALPTRAICGLSRNFCLLMTYSKEQGVRSMNSTDIQWSAILSWGYADNILRLKSKQSEPPVNFIQSSQQYQVTSCAWVPDSCQLFTGSKCGVITAYTNRFTSSTPSEIEMETQIHLYGHTEEITSLFVCKPYSILISVSRDGTCIIWDLNRLCYVQSLAGHKSPVTAVSASETSGDIATVCDSAGGGSDLRLWTVNGDLVGHVHCREIICSVAFSNQPEGVSINVIAGGLENGIVRLWSTWDLKPVREITFPKSNKPIISLTFSCDGHHLYTANSDGTVIAWCRKDQQRLKQPMFYSFLSSYAAG

SEQ ID NO: 39752 - protein, 2001 aa, Homo sapiens
MSTDSNSLAREFLTDVNRLCNAVVQRVEAREEEEEETHMATLGQYLVHGRGFLLLTKLNSIIDQALTCREELLTLLLSLLPLVWKIPVQEEKATDFNLPLSADIILTKEKNSSSQRSTQEKLHLEGSALSSQVSAKVNVFRKSRRQRKITHRYSVRDARKTQLSTSDSEANSDEKGIAMNKHRRPHLLHHFLTSFPKQDHPKAKLDRLATKEQTPPDAMALENSREIIPRQGSNTDILSEPAALSVISNMNNSPFDLCHVLLSLLEKVCKFDVTLNHNSPLAASVVPTLTEFLAGFGDCCSLSDNLESRVVSAGWTEEPVALIQRMLFRTVLHLLSVDVSTAEMMPENLRKNLTELLRAALKIRICLEKQPDPFAPRQKKTLQEVQEDFVFSKYRHRALLLPELLEGVLQILICCLQSAASNPFYFSQAMDLVQEFIQHHGFNLFETAVLQMEWLVLRDGVPPEASEHLKALINSVMKIMSTVKKVKSEQLHHSMCTRKRHRRCEYSHFMHHHRDLSGLLVSAFKNQVSKNPFEETADGDVYYPERCCCIAVCAHQCLRLLQQASLSSTCVQILSGVHNIGICCCMDPKSVIIPLLHAFKLPALKNFQQHILNILNKLILDQLGGAEISPKIKKAACNICTVDSDQLAQLEETLQGNLCDAELSSSLSSPSYRFQGILPSSGSEDLLWKWDALKAYQNFVFEEDRLHSIQIANHICNLIQKGNIVVQWKLYNYIFNPVLQRGVELAHHCQHLSVTSAQSHVCSHHNQCLPQDVLQIYVKTLPILLKSRVIRDLFLSCNGVSQIIELNCLNGIRSHSLKAFETLIISLGEQQKDASVPDIDGIDIEQKELSSVHVGTSFHHQQAYSDSPQSLSKFYAGLKEAYPKRRKTVNQDVHINTINLFLCVAFLCVSKEAESDRESANDSEDTSGYDSTASEPLSHMLPCISLESLVLPSPEHMHQAADIWSMCRWIYMLSSVFQKQFYRLGGFRVCHKLIFMIIQKLFRSHKEEQGKKEGDTSVNENQDLNRISQPKRTMKEDLLSLAIKSDPIPSELGSLKKSADSLGKLELQHISSINVEEVSATEAAPEEAKLFTSQESETSLQSIRLLEALLAICLHGARTSQQKMELELPNQNLSVESILFEMRDHLSQSKVIETQLAKPLFDALLRVALGNYSADFEHNDAMTEKSHQSAEELSSQPGDFSEEAEDSQCCSFKLLVEEEGYEADSESNPEDGETQDDGVDLKSETEGFSASSSPNDLLENLTQGEIIYPEICMLELNLLSASKAKLDVLAHVFESFLKIIRQKEKNVFLLMQQGTVKNLLGGFLSILTQDDSDFQACQRVLVDLLVSLMSSRTCSEELTLLLRIFLEKSPCTKILLLGILKIIESDTTMSPSQYLTFPLLHAPNLSNGVSSQKYPGILNSKAMGLLRRARVSRSKKEADRESFPHRLLSSWHIAPVHLPLLGQNCWPHLSEGFSVSLWFNVECIHEAESTTEKGKKIKKRNKSLILPDSSFDGTESDRPEGAEYINPGERLIEEGCIHIISLGSKALMIQVWADPHNATLIFRVCMDSNDDMKAVLLAQVESQENIFLPSKWQHLVLTYLQQPQGKRRIHGKISIWVSGQRKPDVTLDFMLPRKTSLSSDSNKTFCMIGHCLSSQEEFLQLAGKWDLGNLLLFNGAKVGSQEAFYLYACGPNHTSVMPCKYGKPVNDYSKYINKEILRCEQIRELFMTKKDVDIGLLIESLSVVYTTYCPAQYTIYEPVIRLKGQMKTQLSQRPFSSKEVQSILLEPHHLKNLQPTEYKTIQGILHEIGGTGIFVFLFARVVELSSCEETQALALRVILSLIKYNQQRVHELENCNGLSMIHQVLIKQKCIVGFYILKTLLEGCCGEDIIYMNENGEFKLDVDSNAIIQDVKLLEELLLDWKIWSKAEQGVWETLLAALEVLIRADHHQQMFNIKQLLKAQVVHHFLLTCQVLQEYKEGQLTPMPREMARSFRRKCGQSCT

SEQ ID NO: 39753 - protein, 1531 aa, Homo sapiens
MSTDSNSLAREFLTDVNRLCNAVVQRVEAREEEEEETHMATLGQYLVHGRGFLLLTKLNSIIDQALTCREELLTLLLSLLPLVWKIPVQEEKATDFNLPLSADIILTKEKNSSSQRSTQEKLHLEGSALSSQVSAKVNVFRKSRRQRKITHRYSVRDARKTQLSTSDSEANSDEKGIAMNKHRRPHLLHHFLTSFPKQDHPKAKLDRLATKEQTPPDAMALENSREIIPRQGSNTDILSEPAALSVISNMNNSPFDLCHVLLSLLEKVCKFDVTLNHNSPLAASVVPTLTEFLAGFGDCCSLSDNLESRVVSAGWTEEPVALIQRMLFRTVLHLLSVDVSTAEMMPENLRKNLTELLRAALKIRICLEKQPDPFAPRQKKTLQEVQEDFVFSKYRHRALLLPELLEGVLQILICCLQSAASNPFYFSQAMDLVQEFIQHHGFNLFETAVLQMEWLVLRDGVPPEASEHLKALINSVMKIMSTVKKVKSEQLHHSMCTRKRHRRCEYSHFMHHHRDLSGLLVSAFKNQVSKNPFEETADGDVYYPERCCCIAVCAHQCLRLLQQASLSSTCVQILSGVHNIGICCCMDPKSVIIPLLHAFKLPALKNFQQHILNILNKLILDQLGGAEISPKIKKAACNICTVDSDQLAQLEETLQGNLCDAELSSSLSSPSYRFQGILPSSGSEDLLWKWDALKAYQNFVFEEDRLHSIQIANHICNLIQKGNIVVQWKLYNYIFNPVLQRGVELAHHCQHLSVTSAQSHVCSHHNQCLPQDVLQIYVKTLPILLKSRVIRDLFLSCNGVSQIIELNCLNGIRSHSLKAFETLIISLGEQQKDASVPDIDGIDIEQKELSSVHVGTSFHHQQAYSDSPQSLSKFYAGLKEAYPKRRKTVNQDVHINTINLFLCVAFLCVSKEAESDRESANDSEDTSGYDSTASEPLSHMLPCISLESLVLPSPEHMHQAADIWSMCRWIYMLSSVFQKQFYRLGGFRVCHKLIFMIIQKLFRSHKEEQGKKEGDTSVNENQDLNRISQPKRTMKEDLLSLAIKSDPIPSELGSLKKSADSLGKLELQHISSINVEEVSATEAAPEEAKLFTSQESETSLQSIRLLEALLAICLHGARTSQQKMELELPNQNLSVESILFEMRDHLSQSKVIETQLAKPLFDALLRVALGNYSADFEHNDAMTEKSHQSAEELSSQPGDFSEEAEDSQCCSFKLLVEEEGYEADSESNPEDGETQDDGVDLKSETEGFSASSSPNDLLENLTQGEIIYPEICMLELNLLSASKAKLDVLAHVFESFLKIIRQKEKNVFLLMQQGTVKNLLGGFLSILTQDDSDFQACQRVLVDLLVSLMSSRTCSEELTLLLRIFLEKSPCTKILLLGILKIIESDTTMSPSQYLTFPLLHAPNLSNGVSSQKYPGILNSKAMGLLRRARVSRSKKEADRESFPHRLLSSWHIAPVHLPLLGQNCWPHLSEGFSVSLWFNVECIHEAESTTEKGKKIKKRNKSLILPDSSFDGTGMMTGLSDLYTKIVFRL

SEQ ID NO: 39754 - protein, 165 aa, Homo sapiens
MAKMNLSSYILILTFSLFSQGILLSASKSIRNLDDDMVFNTFRLGKGFQKEDTAEKSVIAPSLEQYKNDESSFMNEEENKVSKNTGSKHNFLNHGLPLNLAIKPYLALKGSVAFPAENGVQNTESTQEKREIGDEENSAKFPIGRRDFDMLRCMLGRVYRPCWQV

SEQ ID NO: 39755 - protein, 472 aa, Homo sapiens
MSPEEWTYLVVLLISIPIGFLFKKAGPGLKRWGAAAVGLGLTLFTCGPHTLHSLVTILGTWALIQAQPCSCHALALAWTFSYLLFFRALSLLGLPTPTPFTNAVQLLLTLKLVSLASEVQDLHLAQRKEMASGFSKGPTLGLLPDVPSLMETLSYSYCYVGIMTGPFFRYRTYLDWLEQPFPGAVPSLRPLLRRAWPAPLFGLLFLLSSHLFPLEAVREDAFYARPLPARLFYMIPVFFAFRMRFYVAWIAAECGCIAAGFGAYPVAAKARAGGGPTLQCPPPSSPEKAASLEYDYETIRNIDCYSTDFCVRVRDGMRYWNMTVQWWLAQYIYKSAPARSYVLRSAWTMLLSAYWHGLHPGYYLSFLTIPLCLAAEGRLESALRGRLSPGGQKAWDWVHWFLKMRAYDYMCMGFVLLSLADTLRYWASIYFCIHFLALAALGLGLALGGGSPSRRKAASQPTSLAPEKLREE

SEQ ID NO: 39756 - protein, 399 aa, Homo sapiens
MGSSRCGPGAHPVHLWPPHFAFSGHHPRDLGPHSGPALLVSLASEVQDLHLAQRKEMASGFSKGPTLGLLPDVPSLMETLSYSYCYVGIMTGPFFRYRTYLDWLEQPFPGAVPSLRPLLRRAWPAPLFGLLFLLSSHLFPLEAVREDAFYARPLPARLFYMIPVFFAFRMRFYVAWIAAECGCIAAGFGAYPVAAKARAGGGPTLQCPPPSSPEKAASLEYDYETIRNIDCYSTDFCVRVRDGMRYWNMTVQWWLAQYIYKSAPARSYVLRSAWTMLLSAYWHGLHPGYYLSFLTIPLCLAAEGRLESALRGRLSPGGQKAWDWVHWFLKMRAYDYMCMGFVLLSLADTLRYWASIYFCIHFLALAALGLGLALGGGSPSRRKAASQPTSLAPEKLREE

SEQ ID NO: 39757 - protein, 344 aa, Homo sapiens
MSPEEWTYLVVLLISIPIGFLFKKAGPGLKRWGAAAVGLGLTLFTCGPHTLHSLVTILGTWALIQAQPCSCHALALAWTFSYLLFFRALSLLGLPTPTPFTNAVQLLLTLKLVSLASEVQDLHLAQRKEMASGFSKGPTLGLLPDVPSLMETLSYSYCYVGIMTGPFFRYRTYLDWLEQPFPGAVPSLRPLLRRAWPAPLFGLLFLLSSHLFPLEAVREDAFYARPLPARLFYMIPVFFAFRMRFYVAWIAAECGCIAAGFGAYPVAAKARAGGGPTLQCPPPSSPEKAASLEYDYETIRNIDCYSTDFCVRVRDGMRYWNMTVQWWLAQYIYKSAPARSYVLR

SEQ ID NO: 39758 - protein, 5596 aa, Homo sapiens
MEHFLLEVAAAPLRLIAAKNEKSRSELGRFLAKQVWTPQDRQCVLSTLAQLLLDKDCTVLVGRQLRPLLLDLLERNAEAIKAGGQINHDLHERLCVSMSKLIGNHPDVLPFALRYFKDTSPVFQRLFLESSDANPVRYGRRRMKLRDLMEAAFKFLQQEQSVFRELWDWSVCVPLLRSHDTLVRWYTANCLALVTCMNEEHKLSFLKKIFNSDELIHFRLRLLEEAQLQDLEKALVLANPEVSLWRKQKELQYLQGHLVSSDLSPRVTAVCGVVLPGQLPAPGELGGNRSSSREQELALRSYVLVESVCKSLQTLAMAVASQNAVLLEGPIGCGKTSLVEYLAAVTGRTKPPQLLKVQLGDQTDSKMLLGMYRCTDVPGEFVWQPGTLTQAATMGHWILLEDIDYAPLDVVSVLIPLLENGELLIPGRGDCLKVAPGFQFFATRRLLSCGGNWYRPLNSHATLLDKYWTKIHLDNLDKRELNEVLQSRYPSLLAVVDHLLDIYIQLTGEKHHSWSDSSVGCEQAPEEVSEARRENKRPTLEGRELSLRDLLNWCNRIAHSFDSSSLSASLNIFQEALDCFTAMLSEHTSKLKMAEVIGSKLNISRKKAEFFCQLYKPEIVINELDLQVGRVRLLRKQSEAVHLQREKFTFAATRPSSVLIEQLAVCVSKGEPVLLVGETGTGKTSTIQYLAHITGHRLRVVNMNQQSDTADLLGGYKPVDHKLIWLPLREAFEELFAQTFSKKQNFTFLGHIQTCYRQKRWHDLLRLMQHVHKSAVNKDGKDSETGLLIKEKWEAFGLRLNHAQQQMKMTENTLLFAFVEGTLAQAVKKGEWILLDEINLAAPEILECLSGLLEGSSGSLVLLDRGDTEPLVRHPDFRLFACMNPATDVGKRNLPPGIRNRFTELYVEELESKEDLQVLIVDYLKGLSVNKNTVQGIINFYTALRKESGTKLVDGTGHRPHYSLRTLCRALRFAASNPCGNIQRSLYEGFCLGFLTQLDRASHPIVQKLICQHIVPGNVKSLLKQPIPEPKGGRLIQVEGYWIAVGDKEPTIDETYILTSSVKLNLRDIVRVVSAGTYPVLIQGETSVGKTSLIQWLAAATGNHCVRINNHEHTDIQEYIGCYTSDSSGKLVFKEGVLIDAMRKGYWIILDELNLAPTDVLEALNRLLDDNRELLVTETQEVVKAHPRFMLFATQNPPGLYGGRKVLSRAFRNRFVELHFDELPSSELETILHKRCSLPPSYCSKLVKVMLDLQSYRRSSSVFAGKQGFITLRDLFRWAERYRLAEPTEKEYDWLQHLANDGYMLLAGRVRKQEEIDVIQEVLEKHFKKKLCPQSLFSKENVLKLLGKLSTQISTLECNFGHIVWTEGMRRLAMLVGRALEFGEPVLLVGDTGCGKTTICQVFAALANQKLYSVSCHLHMETSDFLGGLRPVRQKPNDKEEIDTSRLFEWHDGPLVQAMKEDGFFLLDEISLADDSVLERLNSVLEVEKSLVLAEKGSPEDKDSEIELLTAGKKFRILATMNPGGDFGKKELSPALRNRFTEIWCPQSTSREDLIQIISHNLRPGLCLGRIDPKGSDIPEVMLDFIDWLTHQEFGRKCVVSIRDILSWVNFMNKMGEEAALKRPEIISTVTSFVHAACLVYIDGIGSGVTSSGFGTALLARKECLKFLIKRLAKIVRLTEYQKNELKIYDRMKAKEFTGIDNLWGIHPFFIPRGPVLHRNNIADYALSAGTTAMNAQRLLRATKLKKPILLEGSPGVGKTSLVGALAKASGNTLVRINLSEQTDITDLFGADLPVEGGKGGEFAWRDGPLLAALKAGHWVVLDELNLASQSVLEGLNACFDHRGEIYVPELGMSFQVQHEKTKIFGCQNPFRQGGGRKGLPRSFLNRFTQVFVDPLTVIDMEFIASTLFPAIEKNIVKKMVAFNNQIDHEVTVEKKWGQKGGPWEFNLRDLFRWCQLMLVDQSPGCYDPGQHVFLVYGERMRTEEDKKKVIAVFKDVFGSNSNPYMGTRLFRITPYDVQLGYSVLSRGSCVPHPSRHPLLLLHQSFQPLESIMKCVQMSWMVILVGPASVGKTSLVQLLAHLTGHTLKIMAMNSAMDTTELLGGFEQVDLIRPWRRLLEKVEGTVRALLRDSLLISADDAEVVLRAWSHFLLTYKPKCLGEGGKAITMEIVNKLEAVLLLMQRLNNKINSYCKAEFAKLVEEFRSFGVKLTQLASGHSHGTFEWVDSMLVQALKSGDWLLMDNVNFCNPSVLDRLNALLEPGGVLTISERGMIDGSTPTITPNPNFRLFLSMDPVHGDISRAMRNRGLEIYISGEGDASTPDNLDLKVLLHSLGLVGNSVCDILLALHTETRSTVVGSPTSSVSTLIQTAILIVQYLQRGLSLDRAFSEACWEVYVCSQHSPANRKLVQALLEKHVSSLRAHETWGDSILGMGLWPDSVPSALFATEDSHLSTVRRDGQILVYCLNRMSMKTSSWTRSQPFTLQDLEKIMQSPSPENLKFNAVEVNTYWIDEPDVLVMAVKLLIERATNQDWMLRVKWLYHLAKNIPQGLESIQIHLEASAASLRNFYSHSLSGAVSNVFKILQPNTTDEFVIPLDPRWNMQALDMIRNLMDFDPQTDQPDQLFALLESAANKTIIYLDREKRVFTEANLVSVGSKKLRESVLRMSFEFHQDPESYHTLPHEIVVNLAAFFELCDALVLLWVQSSQGMVSDASANEILGSLRWRDRFWTVADTVKVDAPGLALLALHWHWVLKHLVHQIPRLLMNYEDKYYKEVQTVSEHIQNCLGSQTGGFAGIKKLQKFLGRPFPFKDKLVVECFSQLKVLNKVLAIREQMSALGESGWQEDINRLQVVASQWTLKKSLLQAWGLILRANILEDVSLDELKNFVHAQCLELKAKGLSLGFLEKKHDEASSLSHPDLTSVIHLTRSVQLWPAMEYLAMLWRYKVTADFMAQACLRRCSKNQQPQINEEISHLISFCLYHTPVTPQELRDLWSLLHHQKVSPEEITSLWSELFNSMFMSFWSSTVTTNPEYWLMWNPLPGMQQREAPKSVLDSTLKGPGNLNRPIFSKCCFEVLTSSWRASPWDVSGLPILSSSHVTLGEWVERTQQLQDISSMLWTNMAISSVAEFRRTDSQLQGQVLFRHLAGLAELLPESRRQEYMQNCEQLLLGSSQAFQHVGQTLGDMAGQEVLPKELLCQLLTSLHHFVGEGESKRSLPEPAQRGSLWVSLGLLQIQTWLPQARFDPAVKREYKLNYVKEELHQLQCEWKTRNLSSQLQTGRDLEDEVVVSYSHPHVRLLRQRMDRLDNLTCHLLKKQAFRPQLPAYESLVQEIHHYVTSIAKAPAVQDLLTRLLQALHIDGPRSAQVAQSLLKEEASWQQSHHQFRKRLSEEYTFYPDAVSPLQASILQLQHGMRLVASELHTSLHSSMVGADRLGTLATALLAFPSVGPTFPTYYAHADTLCSVKSEEVLRGLGKLILKRSGGKELEGKGQKACPTREQLLMNALLYLRSHVLCKGELDQRALQLFRHVCQEIISEWDEQERIAQEKAEQESGLYRYRSRNSRTALSEEEEEEREFRKQFPLHEKDFADILVQPTLEENKGTSDGQEEEAGTNPALLSQNSMQAVMLIHQQLCLNFARSLWYQQTLPPHEAKHYLSLFLSCYQTGASLVTHFYPLMGVELNDRLLGSQLLACTLSHNTLFGEAPSDLMVKPDGPYDFYQHPNVPEARQCQPVLQGFSEAVSHLLQDWPEHPALEQLLVVMDRIRSFPLSSPISKFLNGLEILLAKAQDWEENASRALSLRKHLDLISQMIIRWRKLELNCWSMSLDNTMKRHTEKSTKHWFSIYQMLEKHMQEQTEEQEDDKQMTLMLLVSTLQAFIEGSSLGEFHVRLQMLLVFHCHVLLMPQVEGKDSLCSVLWNLYHYYKQFFDRVQAKIVELRSPLEKELKEFVKISKWNDVSFWSIKQSVEKTHRTLFKFMKKFEAVLSEPCRSSLVESDKEEQPDFLPRPTDGAASELSSIQNLNRALRETLLAQPAAGQATIPEWCQGAAPSGLEGELLRRLPKLRKRMRKMCLTFMKESPLPRLVEGLDQFTGEVISSVSELQSLKVEPSAEKEKQRSEAKHILMQKQRALSDLFKHLAKIGLSYRKGLAWARSKNPQEMLHLHPLDLQSALSIVSSTQEADSRLLTEISSSWDGCQKYFYRSLARHARLNAALATPAKEMGMGNVERCRGFSAHLMKMLVRQRRSLTTLSEQWIILRNLLSCVQEIHSRLMGPQAYPVAFPPQDGVQQWTERLQHLAMQCQILLEQLSWLLQCCPSVGPAPGHGNVQVLGQPPGPCLEGPELSKGQLCGVVLDLIPSNLSYPSPIPGSQLPSGCRMRKQDHLWQQSTTRLTEMLKTIKTVKADVDKIRQQSCETLFHSWKDFEVCSSALSCLSQVSVHLQGLESLFILPGMEVEQRDSQMALVESLEYVRGEISKAMADFTTWKTHLLTSDSQGGNQMLDEGFVEDFSEQMEIAIRAILCAIQNLEERKNEKAEENTDQASPQEDYAGFERLQSGHLTKLLEDDFWADVSTLHVQKIISAISELLERLKSYGEDGTAAKHLFFSQSCSLLVRLVPVLSSYSDLVLFFLTMSLATHRSTAKLLSVLAQVFTELAQKGFCLPKEFMEDSAGEGATEFHDYEGGGIGEGEGMKDVSDQIGNEEQVEDTFQKGQEKDKEDPDSKSDIKGEDNAIEMSEDFDGKMHDGELEEQEEDDEKSDSEGGDLDKHMGDLNGEEADKLDERLWGDDDEEEDEEEEDNKTEETGPGMDEEDSELVAKDDNLDSGNSNKDKSQQDKKEEKEEAEADDGGQGEDKINEQIDERDYDENEVDPYHGNQEKVPEPEALDLPDDLNLDSEDKNGGEDTDNEEGEEENPLEIKEKPEEAGHEAEERGETETDQNESQSPQEPEEGPSEDDKAEGEEEMDTGADDQDGDAAQHPEEHSEEQQQSVEEKDKEADEEGGENGPADQGFQPQEEEEREDSDTEEQVPEALERKEHASCGQTGVENMQNTQAMELAGAAPEKEQGKEEHGSGAADANQAEGHESNFIAQLASQKHTRKNTQSFKRKPGQADNERSMGDHNERVHKRLRTVDTDSHAEQGPAQQPQAQVEDADAFEHIKQGSDAYDAQTYDVASKEQQQSAKDSGKDQEEEEIEDTLMDTEEQEEFKAADVEQLKPEEIKSGTTAPLGFDEMEVEIQTVKTEEDQDPRTDKAHKETENEKPERSRESTIHTAHQFLMDTIFQPFLKDVNELRQELERQLEMWQPRESGNPEEEKVAAEMWQSYLILTAPLSQRLCEELRLILEPTQAAKLKGDYRTGKRLNIRKVIPYIASQFRKDKIWLRRTKPSKRQYQICLAIDDSSSMVDNHTKQLAFESLAVIGNALTLLEVGQIAVCSFGESVKLLHPFHEQFSDYSGSQILRLCKFQQKKTKIAQFLESVANMFAAAQQLSQNISSETAQLLLVVSDGRGLFLEGKERVLAAVQAARNANIFVIFVVLDNPSSRDSILDIKVPIFKGPGEMPEIRSYMEEFPFPYYIILRDVNALPETLSDALRQWFELVTASDHP

SEQ ID NO: 39759 - protein, 78 aa, Homo sapiens
MAPLPGAELVRRPLQLYRYLLRCCQQLPTKGIQQHYKHAVRQSFRVHSDEDNPERIQQIIKRAIEDADWIMNKYKKQN

SEQ ID NO: 39760 - protein, 124 aa, Homo sapiens
MAAAMTFCRLLNRCGEAARSLPLGARCFGVRVSPTGEKVTHTGQVYDDKDYRRIRFVGRQKEVNENFAIDLIAEQPVSEVETRVIACDGGGGALGHPKVYINLDKETKTGTCGYCGLQFRQHHH

SEQ ID NO: 39761 - protein, 124 aa, Homo sapiens
MLCPRAAFLVGSFHGVFPGPPASSHWEFWVPSTPVGAYFCPPQPQLTPPNTPKLVSEVEELYKSITALREKLLQAEQSLRNLKDIHMSLEKDVTAMTNSVFIDRQKCMAHRTCYPTILQLAGYQ

SEQ ID NO: 39762 - protein, 124 aa, Homo sapiens
MSLEQKSQHCKPEEGLDTQEEALGLVGVQAATTEEQEAVSSSSPLVPGTLGEVPAAGSPGPLKSPQGASAIPTAIDFTLWRQSIKGSSNQEEEGPSTSPDPESVFRAALSKKVADLIHFLLLKY

SEQ ID NO: 39763 - protein, 314 aa, Homo sapiens
MPLEQRSQHCKPEEGLEARGEALGLVGAQAPATEEQEAASSSSTLVEVTLGEVPAAESPDPPQSPQGASSLPTTMNYPLWSQSYEDSSNQEEEGPSTFPDLESEFQAALSRKVAKLVHFLLLKYRAREPVTKAEMLGSVVGNWQYFFPVIFSKASDSLQLVFGIELMEVDPIGHVYIFATCLGLSYDGLLGDNQIMPKTGFLIIILAIIAKEGDCAPEEKIWEELSVLEVFEGREDSIFGDPKKLLTQYFVQENYLEYRQVPGSDPACYEFLWGPRALIETSYVKVLHHMVKISGGPRISYPLLHEWALREGEE

SEQ ID NO: 39764 - protein, 318 aa, Homo sapiens
MLLGQKSQRYKAEEGLQAQGEAPGLMDVQIPTAEEQKAASSSSTLIMGTLEEVTDSGSPSPPQSPEGASSSLTVTDSTLWSQSDEGSSSNEEEGPSTSPDPAHLESLFREALDEKVAELVRFLLRKYQIKEPVTKAEMLESVIKNYKNHFPDIFSKASECMQVIFGIDVKEVDPAGHSYILVTCLGLSYDGLLGDDQSTPKTGLLIIVLGMILMEGSRAPEEAIWEALSVMGLYDGREHSVYWKLRKLLTQEWVQENYLEYRQAPGSDPVRYEFLWGPRALAETSYVKVLEHVVRVNARVRISYPSLHEEALGEEKGV

SEQ ID NO: 39765 - protein, 894 aa, Homo sapiens
MNPGFDLSRRNPQEDFELIQRIGSGTYGDVYKARNVNTGELAAIKVIKLEPGEDFAVVQQEIIMMKDCKHPNIVAYFGSYLRRDKLWICMEFCGGGSLQDIYHVTGPLSELQIAYVSRETLQGLYYLHSKGKMHRDIKGANILLTDNGHVKLADFGVSAQITATIAKRKSFIGTPYWMAPEVAAVERKGGYNQLCDLWAVGITAIELAELQPPMFDLHPMRALFLMTKSNFQPPKLKDKMKWSNSFHHFVKMALTKNPKKRPTAEKLLQHPFVTQHLTRSLAIELLDKVNNPDHSTYHDFDDDDPEPLVAVPHRIHSTSRNVREEKTRSEITFGQVKFDPPLRKETEPHHELPDSDGFLDSSEEIYYTARSNLDLQLEYGQGHQGGYFLGANKSLLKSVEEELHQRGHVAHLEDDEGDDDESKHSTLKAKIPPPLPPKPKSIFIPQEMHSTEDENQGTIKRCPMSGSPAKPSQVPPRPPPPRLPPHKPVALGNGMSSFQLNGERDGSLCQQQNEHRGTNLSRKEKKDVPKPISNGLPPTPKVHMGACFSKVFNGCPLKIHCASSWINPDTRDQYLIFGAEEGIYTLNLNELHETSMEQLFPRRCTWLYVMNNCLLSISGKASQLYSHNLPGLFDYARQMQKLPVAIPAHKLPDRILPRKFSVSAKIPETKWCQKCCVVRNPYTGHKYLCGALQTSIVLLEWVEPMQKFMLIKHIDFPIPCPLRMFEMLVVPEQEYPLVCVGVSRGRDFNQVVRFETVNPNSTSSWFTESDTPQTNVTHVTQLERDTILVCLDCCIKIVNLQGRLKSSRKLSSELTFDFQIESIVCLQDSVLAFWKHGMQGRSFRSNEVTQEISDSTRIFRLLGSDRVVVLESRPTDNPTANSNLYILAGHENSY

SEQ ID NO: 39766 - protein, 884 aa, Homo sapiens
MAQEDFELIQRIGSGTYGDVYKARNVNTGELAAIKVIKLEPGEDFAVVQQEIIMMKDCKHPNIVAYFGSYLRRDKLWICMEFCGGGSLQDIYHVTGPLSELQIAYVSRETLQGLYYLHSKGKMHRDIKGANILLTDNGHVKLADFGVSAQITATIAKRKSFIGTPYWMAPEVAAVERKGGYNQLCDLWAVGITAIELAELQPPMFDLHPMRALFLMTKSNFQPPKLKDKMKWSNSFHHFVKMALTKNPKKRPTAEKLLQHPFVTQHLTRSLAIELLDKVNNPDHSTYHDFDDDDPEPLVAVPHRIHSTSRNVREEKTRSEITFGQVKFDPPLRKETEPHHELPDSDGFLDSSEEIYYTARSNLDLQLEYGQGHQGGYFLGANKSLLKSVEEELHQRGHVAHLEDDEGDDDESKHSTLKAKIPPPLPPKPKSIFIPQEMHSTEDENQGTIKRCPMSGSPAKPSQVPPRPPPPRLPPHKPVALGNGMSSFQLNGERDGSLCQQQNEHRGTNLSRKEKKDVPKPISNGLPPTPKVHMGACFSKVFNGCPLKIHCASSWINPDTRDQYLIFGAEEGIYTLNLNELHETSMEQLFPRRCTWLYVMNNCLLSISGKASQLYSHNLPGLFDYARQMQKLPVAIPAHKLPDRILPRKFSVSAKIPETKWCQKCCVVRNPYTGHKYLCGALQTSIVLLEWVEPMQKFMLIKHIDFPIPCPLRMFEMLVVPEQEYPLVCVGVSRGRDFNQVVRFETVNPNSTSSWFTESDTPQTNVTHVTQLERDTILVCLDCCIKIVNLQGRLKSSRKLSSELTFDFQIESIVCLQDSVLAFWKHGMQGRSFRSNEVTQEISDSTRIFRLLGSDRVVVLESRPTDNPTANSNLYILAGHENSY

SEQ ID NO: 39767 - protein, 873 aa, Homo sapiens
MNPGFDLSRRNPQEDFELIQRIGSGTYGDVYKARNVNTGELAAIKVIKLEPGEDFAVVQQEIIMMKDCKHPNIVAYFGSYLRRDKLWICMEFCGGGSLQDIYHVTGPLSELQIAYVSRETLQGLYYLHSKGKMHRDIKGANILLTDNGHVKLADFGVSAQITATIAKRKSFIGTPYWMAPEVAAVERKGGYNQLCDLWAVGITAIELAELQPPMFDLHPMRALFLMTKSNFQPPKLKDKMKWSNSFHHFVKMALTKNPKKRPTAEKLLQHPFVTQHLTRSLAIELLDKVNNPDHSTYHDFDDDDPEPLVAVPHRIHSTSRNVREEKTRSEITFGQVKFDPPLRKETEPHHELDLQLEYGQGHQGGYFLGANKSLLKSVEEELHQRGHVAHLEDDEGDDDESKHSTLKAKIPPPLPPKPKSIFIPQEMHSTEDENQGTIKRCPMSGSPAKPSQVPPRPPPPRLPPHKPVALGNGMSSFQLNGERDGSLCQQQNEHRGTNLSRKEKKDVPKPISNGLPPTPKVHMGACFSKVFNGCPLKIHCASSWINPDTRDQYLIFGAEEGIYTLNLNELHETSMEQLFPRRCTWLYVMNNCLLSISGKASQLYSHNLPGLFDYARQMQKLPVAIPAHKLPDRILPRKFSVSAKIPETKWCQKCCVVRNPYTGHKYLCGALQTSIVLLEWVEPMQKFMLIKHIDFPIPCPLRMFEMLVVPEQEYPLVCVGVSRGRDFNQVVRFETVNPNSTSSWFTESDTPQTNVTHVTQLERDTILVCLDCCIKIVNLQGRLKSSRKLSSELTFDFQIESIVCLQDSVLAFWKHGMQGRSFRSNEVTQEISDSTRIFRLLGSDRVVVLESRPTDNPTANSNLYILAGHENSY

SEQ ID NO: 39768 - protein, 176 aa, Homo sapiens
MARVLKAAAANAVGLFSRLQAPIPTVRASSTSQPLDQVTGSVWNLGRLNHVAIAVPDLEKAAAFYKNILGAQVSEAVPLPEHGVSVVFVNLGNTKMELLHPLGRDSPIAGFLQKNKAGGMHHICIEVDNINAAVMDLKKKKIRSLSEEVKIGAHGKPVIFLHPKDCGGVLVELEQA

SEQ ID NO: 39769 - protein, 478 aa, Homo sapiens
MAGVEEVAASGSHLNGDLDPDDREEGAASTAEEAAKKKRRKKKKSKGPSAAGEQEPDKESGASVDEVARQLERSALEDKERDEDDEDGDGDGDGATGKKKKKKKKKRGPKVQTDPPSVPICDLYPNGVFPKGQECEYPPTQDGRTAAWRTTSEEKKALDQASEEIWNDFREAAEAHRQVRKYVMSWIKPGMTMIEICEKLEDCSRKLIKENGLNAGLAFPTGCSLNNCAAHYTPNAGDTTVLQYDDICKIDFGTHISGRIIDCAFTVTFNPKYDTLLKAVKDATNTGIKCAGIDVRLCDVGEAIQEVMESYEVEIDGKTYQVKPIRNLNGHSIGQYRIHAGKTVPIVKGGEATRMEEGEVYAIETFGSTGKGVVHDDMECSHYMKNFDVGHVPIRLPRTKHLLNVINENFGTLAFCRRWLDRLGESKYLMALKNLCDLGIVDPYPPLCDIKGSYTAQFEHTILLRPTCKEVVSRGDDY

SEQ ID NO: 39770 - protein, 455 aa, Homo sapiens
MAGVEEVAASGSHLNGDLDPDDREEGAASTAEEAAKKKRRKKKKSKGPSAGEQEPDKESGASVDEVARQLERSALEDKERDEDDEAKVQTDPPSVPICDLYPNGVFPKGQECEYPPTQDGRTAAWRTTSEEKKALDQASEEIWNDFREAAEAHRQVRKYVMSWIKPGMTMIEICEKLEDCSRKLIKENGLNAGLAFPTGCSLNNCAAHYTPNAGDTTVLQYDDICKIDFGTHISGRIIDCAFTVTFNPKYDTLLKAVKDATNTGIKCAGIDVRLCDVGEAIQEVMESYEVEIDGKTYQVKPIRNLNGHSIGQYRIHAGKTVPIVKGGEATRMEEGEVYAIETFGSTGKGVVHDDMECSHYMKNFDVGHVPIRLPRTKHLLNVINENFGTLAFCRRWLDRLGESKYLMALKNLCDLGIVDPYPPLCDIKGSYTAQFEHTILLRPTCKEVVSRGDDY

SEQ ID NO: 39771 - protein, 455 aa, Homo sapiens
MAGVEEVAASGSHLNGDLDPDDREEGAASTAEEAAKKKRRKKKKSKGPSAAGEQEPDKESGASVDEVARQLERSALEDKERDEDDEDGDGDGDGATGKKKKKKKKKRGRQECEYPPTQDGRTAAWRTTSEEKKALDQASEEIWNDFREAAEAHRQVRKYVMSWIKPGMTMIEICEKLEDCSRKLIKENGLNAGLAFPTGCSLNNCAAHYTPNAGDTTVLQYDDICKIDFGTHISGRIIDCAFTVTFNPKYDTLLKAVKDATNTGIKCAGIDVRLCDVGEAIQEVMESYEVEIDGKTYQVKPIRNLNGHSIGQYRIHAGKTVPIVKGGEATRMEEGEVYAIETFGSTGKGVVHDDMECSHYMKNFDVGHVPIRLPRTKHLLNVINENFGTLAFCRRWLDRLGESKYLMALKNLCDLGIVDPYPPLCDIKGSYTAQFEHTILLRPTCKEVVSRGDDY

SEQ ID NO: 39772 - protein, 151 aa, Homo sapiens
MERPEPELIRQSWRAVSRSPLEHGTVLFARLFALEPDLLPLFQYNCRQFSSPEDCLSSPEFLDHIRKVMLVIDAAVTNVEDLSSLEEYLASLGRKHRAVGVKLSSFSTVGESLLYMLEKCLGPAFTPATRAAWSQLYGAVVQAMSRGWDGE

SEQ ID NO: 39773 - protein, 999 aa, Homo sapiens
MEPRAAAAGEPEPPAASSSFQARLWKNLQLGVGRSKGGGGGRAGGPERRTADTPSPSPPPPVGTGNAPARGSGAGSRWSGFKKRKQVLDRVFSSSQPNLCCSSPEPLEPGGAGRAEQGSTLRRRIREHLLPAVKGPAAASGAAGGTPPGGRSPDSAPSSSSASSSLSSSPQPPPRGDRARDEGARRQGPGAHLCHQKSSSLPGTACLEQLLEPPPPPAEPARSPAESRAPETGEEHGSSQKIINTAGTSNAEVPLADPGMYQLDITLRRGQSLAARDRGGTSDPYVKFKIGGKEVFRSKIIHKNLNPVWEEKACILVDHLREPLYIKVFDYDFGLQDDFMGSAFLDLTQLELNRPTDVTLTLKDPHYPDHDLGIILLSVILTPKEGESRDVTMLMRKSWKRSSKELSENEVVGSYFSVKSLFWRTCGRPALPVLGFCRAELQNPYCKNVQFQTQSLRLSDLHRKSHLWRGIVSITLIEGRDLKAMDSNGLSDPYVKFRLGHQKYKSKIMPKTLNPQWREQFDFHLYEERGGVIDITAWDKDAGKRDDFIGRCQVDLSALSREQTHKLELQLEEGEGHLVLLVTLTASATVSISDLSVNSLEDQKEREEILKRYSPLRIFHNLKDVGFLQVKVIRAEGLMAADVTGKSDPFCVVELNNDRLLTHTVYKNLNPEWNKVFTFNIKDIHSVLEVTVYDEDRDRSADFLGKVAIPLLSIQNGEQKAYVLKNKQLTGPTKGVIYLEIDVIFNAVKASLRTLIPKEQKYIEEENRLSKQLLLRNFIRMKRCVMVLVNAAYYVNSCFDWDSPPRSLAAFVLFLFVVWNFELYMIPLVLLLLLTWNYFLIISGKDNRQRDTVVEDMLEDEEEEDDKDDKDSEKKGFINKIYAIQEVCVSVQNILDEVASFGERIKNTFNWTVPFLSWLAIVALCVFTAILYCIPLRYIVLVWGINKFTKKLRSPYAIDNNELLDFLSRVPSDVQVVQYQELKPDPSHSPYKRKKNNLG

SEQ ID NO: 39774 - protein, 778 aa, Homo sapiens
MLDSCKLKSACNLPFICNKKIINTAGTSNAEVPLADPGMYQLDITLRRGQSLAARDRGGTSDPYVKFKIGGKEVFRSKIIHKNLNPVWEEKACILVDHLREPLYIKVFDYDFGLQDDFMGSAFLDLTQLELNRPTDVTLTLKDPHYPDHDLGIILLSVILTPKEGESRDVTMLMRKSWKRSSKELSENEVVGSYFSVKSLFWRTCGRPALPVLGFCRAELQNPYCKNVQFQTQSLRLSDLHRKSHLWRGIVSITLIEGRDLKAMDSNGLSDPYVKFRLGHQKYKSKIMPKTLNPQWREQFDFHLYEERGGVIDITAWDKDAGKRDDFIGRCQVDLSALSREQTHKLELQLEEGEGHLVLLVTLTASATVSISDLSVNSLEDQKEREEILKRYSPLRIFHNLKDVGFLQVKVIRAEGLMAADVTGKSDPFCVVELNNDRLLTHTVYKNLNPEWNKVFTFNIKDIHSVLEVTVYDEDRDRSADFLGKVAIPLLSIQNGEQKAYVLKNKQLTGPTKGVIYLEIDVIFNAVKASLRTLIPKEQKYIEEENRLSKQLLLRNFIRMKRCVMVLVNAAYYVNSCFDWDSPPRSLAAFVLFLFVVWNFELYMIPLVLLLLLTWNYFLIISGKDNRQRDTVVEDMLEDEEEEDDKDDKDSEKKGFINKIYAIQEVCVSVQNILDEVASFGERIKNTFNWTVPFLSWLAIVALCVFTAILYCIPLRYIVLVWGINKFTKKLRSPYAIDNNELLDFLSRVPSDVQVVQYQELKPDPSHSPYKRKKNNLG

SEQ ID NO: 39775 - protein, 692 aa, Homo sapiens
MLDSCKLKSACNLPFICNKKIINTAGTSNAEVPLADPGMYQLDITLRRGQSLAARDRGGTSDPYVKFKIGGKEVFRSKIIHKNLNPVWEEKACILVDHLREPLYIKVFDYDFGLQDDFMGSAFLDLTQLELNRPTDVTLTLKDPHYPDHDLGIILLSVILTPKEGESRDVTMLMRKSWKRSSKFQTQSLRLSDLHRKSHLWRGIVSITLIEGRDLKAMDSNGLSDPYVKFRLGHQKYKSKIMPKTLNPQWREQFDFHLYEERGGVIDITAWDKDAGKRDDFIGRCQVDLSALSREQTHKLELQLEEGEGHLVLLVTLTASATVSISDLSVNSLEDQKEREEILKRYSPLRIFHNLKDVGFLQVKVIRAEGLMAADVTGKSDPFCVVELNNDRLLTHTVYKNLNPEWNKVFTFNIKDIHSVLEVTVYDEDRDRSADFLGKVAIPLLSIQNGEQKAYVLKNKQLTGPTKGVIYLEIDVIFNAVKASLRTLIPKEQKYIEEENRLSKQLLLRNFIRMKRCVMVLVNAAYYVNSCFDWDSPPRSLAAFVVVEDMLEDEEEEDDKDDKDSEKKGFINKIYAIQEVCVSVQNILDEVASFGERIKNTFNWTVPFLSWLAIVALCVFTAILYCIPLRYIVLVWGINKFTKKLRSPYAIDNNELLDFLSRVPSDVQVVQYQELKPDPSHSPYKRKKNNLG

SEQ ID NO: 39776 - protein, 600 aa, Homo sapiens
MLDSCKLKSACNLPFICNKKIINTAGTSNAEVPLADPGMYQLDITLRRGQSLAARDRGGTSDPYVKFKIGGKEVFRSKIIHKNLNPVWEEKACILVDHLREPLYIKVFDYDFGLQDDFMGSAFLDLTQLELNRPTDVTLTLKDPHYPDHDLGIILLSVILTPKEGESRDVTMLMRKSWKRSSKELSENEVVGSYFSVKSLFWRTCGRPALPVLGFCRAELQNPYCKNVQFQTQSLRLSDLHRKSHLWRGIVSITLIEGRDLKAMDSNGLSDPYVKFRLGHQKYKSKIMPKTLNPQWREQFDFHLYEERGGVIDITAWDKDAGKRDDFIGRCQVDLSALSREQTHKLELQLEEGEGHLVLLVTLTASATVSISDLSVNSLEDQKEREEILKRYSPLRIFHNLKDVGFLQVKVIRAEGLMAADVTGKSDPFCVVELNNDRLLTHTVYKNLNPEWNKVFTFNIKDIHSVLEVTVYDEDRDRSADFLGKVAIPLLSIQNGEQKAYVLKNKQLTGPTKGVIYLEIDVIFNAVKASLRTLIPKEQKYIEEENRLSKQLLLRNFIRMKRCVMVLVNAAYYVNSCFDWDSPPRSLAAFVALYGTFINV

SEQ ID NO: 39777 - protein, 515 aa, Homo sapiens
MDSNGLSDPYVKFRLGHQKYKSKIMPKTLNPQWREQFDFHLYEERGGVIDITAWDKDAGKRDDFIGRCQVDLSALSREQTHKLELQLEEGEGHLVLLVTLTASATVSISDLSVNSLEDQKEREEILKRYSPLRIFHNLKDVGFLQVKVIRAEGLMAADVTGKSDPFCVVELNNDRLLTHTVYKNLNPEWNKVFTFNIKDIHSVLEVTVYDEDRDRSADFLGKVAIPLLSIQNGEQKAYVLKNKQLTGPTKGVIYLEIDVIFNAVKASLRTLIPKEQKYIEEENRLSKQLLLRNFIRMKRCVMVLVNAAYYVNSCFDWDSPPRSLAAFVLFLFVVWNFELYMIPLVLLLLLTWNYFLIISGKDNRQRDTVVEDMLEDEEEEDDKDDKDSEKKGFINKIYAIQEVCVSVQNILDEVASFGERIKNTFNWTVPFLSWLAIVALCVFTAILYCIPLRYIVLVWGINKFTKKLRSPYAIDNNELLDFLSRVPSDVQVVQYQELKPDPSHSPYKRKKNNLG

SEQ ID NO: 39778 - protein, 1152 aa, Homo sapiens
MADLSLADALTEPSPDIEGEIKRDFIATLEAEAFDDVVGETVGKTDYIPLLDVDEKTGNSESKKKPCSETSQIEDTPSSKPTLLANGGHGVEGSDTTGSPTEFLEEKMAYQEYPNSQNWPEDTNFCFQPEQVVDPIQTDPFKMYHDDDLADLVFPSSATADTSIFAGQNDPLKDSYGMSPCNTAVVPQGWSVEALNSPHSESFVSPEAVAEPPQPTAVPLELAKEIEMASEERPPAQALEIMMGLKTTDMAPSKETEMALAKDMALATKTEVALAKDMESPTKLDVTLAKDMQPSMESDMALVKDMELPTEKEVALVKDVRWPTETDVSSAKNVVLPTETEVAPAKDVTLLKETERASPIKMDLAPSKDMGPPKENKKETERASPIKMDLAPSKDMGPPKENKIVPAKDLVLLSEIEVAQANDIISSTEISSAEKVALSSETEVALARDMTLPPETNVILTKDKALPLEAEVAPVKDMAQLPETEIAPAKDVAPSTVKEVGLLKDMSPLSETEMALGKDVTPPPETEVVLIKNVCLPPEMEVALTEDQVPALKTEAPLAKDGVLTLANNVTPAKDVPPLSETEATPVPIKDMEIAQTQKGISEDSHLESLQDVGQSAAPTFMISPETVTGTGKKCSLPAEEDSVLEKLGERKPCNSQPSELSSETSGIARPEEGRPVVSGTGNDITTPPNKELPPSPEKKTKPLATTQPAKTSTSKAKTQPTSLPKQPAPTTIGGLNKKPMSLASGLVPAAPPKRPAVASARPSILPSKDVKPKPIADAKAPEKRASPSKPASAPASRSGSKSTQTVAKTTTAAAVASTGPSSRSPSTLLPKKPTAIKTEGKPAEVKKMTAKSVPADLSRPKSTSTSSMKKTTTLSGTAPAAGVVPSRVKATPMPSRPSTTPFIDKKPTSAKPSSTTPRLSRLATNTSAPDLKNVRSKVGSTENIKHQPGGGRAKVEKKTEAAATTRKPESNAVTKTAGPIASAQKQPAGKVQIVSKKVSYSHIQSKCGSKDNIKHVPGGGNVQIQNKKVDISKVSSKCGSKANIKHKPGGGDVKIESQKLNFKEKAQAKVGSLDNVGHLPAGGAVKTEGGGSEAPLCPGPPAGEEPAISEAAPEAGAPTSASGLNGHPTLSGGGDQREAQTLDSQIQETSI

SEQ ID NO: 39779 - protein, 979 aa, Homo sapiens
MADLSLADALTEPSPDIEGEIKRDFIATLEAEAFDDVVGETVGKTDYIPLLDVDEKTGNSESKKKPCSETSQIEDTPSSKPTLLANGGHGVEGSDTTGSPTEFLEEKMAYQEYPNSQNWPEDTNFCFQPEQVVDPIQTDPFKMYHDDDLADLVFPSSATADTSIFAGQNDPLKDSYGMSPCNTAVVPQGWSVEALNSPHSESFVSPEAVAEPPQPTAVPLELAKEIEMASEERPPAQALEIMMGLKTTDMAPSKETEMALAKDMALATKTEVALAKDMESPTKLDVTLAKDMQPSMESDMALVKDMELPTEKEVALVKDVRWPTETDVSSAKNVVLPTETEVAPAKDVTLLKETERASPIKMDLAPSKDMGPPKENKKETERASPIKMDLAPSKDMGPPKENKIVPAKDLVLLSEIEVAQANDIISSTEISSAEKVALSSETEVALARDMTLPPETNVILTKDKALPLEAEVAPVKDMAQLPETEIAPAKDVAPSTVKEVGLLKDMSPLSETEMALGKDVTPPPETEVVLIKNVCLPPEMEVALTEDQVPALKTEAPTTIGGLNKKPMSLASGLVPAAPPKRPAVASARPSILPSKDVKPKPIADAKAPEKRASPSKPASAPASRSGSKSTQTVAKTTTAAAVASTGPSSRSPSTLLPKKPTAIKTEGKPAEVKKMTAKSVPADLSRPKSTSTSSMKKTTTLSGTAPAAGVVPSRVKATPMPSRPSTTPFIDKKPTSAKPSSTTPRLSRLATNTSAPDLKNVRSKVGSTENIKHQPGGGRAKVEKKTEAAATTRKPESNAVTKTAGPIASAQKQPAGKVQIVSKKVSYSHIQSKCGSKDNIKHVPGGGNVQIQNKKVDISKVSSKCGSKANIKHKPGGGDVKIESQKLNFKEKAQAKVGSLDNVGHLPAGGAVKTEGGGSEAPLCPGPPAGEEPAISEAAPEAGAPTSASGLNGHPTLSGGGDQREAQTLDSQIQETSI

SEQ ID NO: 39780 - protein, 539 aa, Homo sapiens
MSLSDKQTASLTAAYGQLSKGKPAECRMDSPKEISQAGFEWQRTEGKLNEIGLNVSMDGQPKDGLVKNASFLEQNKLCFFEGKLDKELSIEMQDKDCQEASGHLESRYVISETCHPLEGNSVHQKTSEFHLGLIEGPDKNKTIPVQGKVAGKNGLETKSQSDLDFPGAADIPTRYVKEQETSVWNPSFHPVAQGSLGSREATPGEMENSITPGCPVIGVVNDNSEQLKCESPLLVSLAHPAPIIEHSPTTIPPITMVFTQEHLNASCHIRDHDKELEKLSSTEEAVLNQAPQQKKAVRRALSECSHLSVPPAVNLADKYPELPAREEPSSGLLPPPSSPMPSPTPGKLGAPAMKRSMTVGEEQTASYKLSPGKLPILSTKEIPPFICEEPVAKKREELAHFSNSSSNSGKKELGTAGLYLHSKLEQIPEGSSKEKGQEDFSETRIDSCSQVCQRGEKQPGQTALAGKKEIEVTATQSTPSFLFEKPPRDGIARPEEGRPVVSGTGNDITTPPNKELPPSPEKKTKVGARMVVIFYCHNF

SEQ ID NO: 39781 - protein, 872 aa, Homo sapiens
METTGDQGIEGMAYMDENRNITFTCPRTPSELINKSSPLEVLGSAACEKLPTPTPQVVKEGDSFPDTLAKNGQEIAPAQISKSLMVDNYTKDGVPGQERPKGPSAVVPSTSTGGVALPITTAIETVNIHGDHSLKNKAELADSMKNEAGIDEGHVIGESESVHSGASKHSVEKVTELAKGHLLPGVPVEDQSLPGEARALEGYADRGNFPAHPVNEEKETKEGSVAVQIPDLLEDKAQKLSFCEDQNAQDRNSKGSDSLNKKVDLTLLSPKSENDKLKEISLACKITELESVSLPTPEIQSDFLHSKVEAPPSEVADTLVIMTASKGVRLPEPKDKILETPQKMTEKSESKTPGEGKKEDKSRMAEPMKGYMRPTKSRGLTPLLPKSTIQEQERHKQLKSAGIARPEEGRPVVSGTGNDITTPPNKELPPSPEKKTKPLATTQPAKTSTSKAKTQPTSLPKQPAPTTIGGLNKKPMSLASGLVPAAPPKRPAVASARPSILPSKDVKPKPIADAKAPEKRASPSKPASAPASRSGSKSTQTVAKTTTAAAVASTGPSSRSPSTLLPKKPTAIKTEGKPAEVKKMTAKSVPADLSRPKSTSTSSMKKTTTLSGTAPAAGVVPSRVKATPMPSRPSTTPFIDKKPTSAKPSSTTPRLSRLATNTSAPDLKNVRSKAKVEKKTEAAATTRKPESNAVTKTAGPIASAQKQPAGKVQIVSKKVSYSHIQSKCGSKDNIKHVPGGGNVQIQNKKVDISKVSSKCGSKANIKHKPGGGDVKIESQKLNFKEKAQAKVGSLDNVGHLPAGGAVKTEGGGSEAPLCPGPPAGEEPAISEAAPEAGAPTSASGLNGHPTLSGGGDQREAQTLDSQIQETSI

SEQ ID NO: 39782 - protein, 809 aa, Homo sapiens
MADLSLADALTEPSPDIEGEIKRDFIATLEAEAFDDVVGETVGKTDYIPLLDVDEKTGNSESKKKPCSETSQIEDTPSSKPTLLANGGHGVEGSDTTGSPTEFLEEKMAYQEYPNSQNWPEDTNFCFQPEQVVDPIQTDPFKMYHDDDLADLVFPSSATADTSIFAGQNDPLKDSYGMSPCNTAVVPQGWSVEALNSPHSESFVSPEAVAEPPQPTAVPLELAKEIEMASEERPPAQALEIMMGLKTTDMAPSKETEMALAKDMALATKTEVALAKDMESPTKLDVTLAKDMQPSMESDMALVKDMELPTEKEVALVKDVRLPEPKDKILETPQKMTEKSESKTPGEGKKEDKSRMAEPMKGYMRPTKSRGLTPLLPKSTIQEQERHKQLKSAGIARPEEGRPVVSGTGNDITTPPNKELPPSPEKKTKPLATTQPAKTSTSKAKTQPTSLPKQPAPTTIGGLNKKPMSLASGLVPAAPPKRPAVASARPSILPSKDVKPKPIADAKAPEKRASPSKPASAPASRSGSKSTQTVAKTTTAAAVASTGPSSRSPSTLLPKKPTAIKTEGKPAEVKKMTAKSVPADLSRPKSTSTSSMKKTTTLSGTAPAAGVVPSRVKATPMPSRPSTTPFIDKKPTSAKPSSTTPRLSRLATNTSAPDLKNVRSKVGSTENIKHQPGGGRVQIQNKKVDISKVSSKCGSKANIKHKPGGGDVKIESQKLNFKEKAQAKVGSLDNVGHLPAGGAVKTEGGGSEAPLCPGPPAGEEPAISEAAPEAGAPTSASGLNGHPTLSGGGDQREAQTLDSQIQETN

SEQ ID NO: 39783 - protein, 1135 aa, Homo sapiens
MADLSLADALTEPSPDIEGEIKRDFIATLEAEAFDDVVGETVGKTDYIPLLDVDEKTGNSESKKKPCSETSQIEDTPSSKPTLLANGGHGVEGSDTTGSPTEFLEEKMAYQEYPNSQNWPEDTNFCFQPEQVVDPIQTDPFKMYHDDDLADLVFPSSATADTSIFAGQNDPLKDSYGMSPCNTAVVPQGWSVEALNSPHSESFVSPEAVAEPPQPTAVPLELAKEIEMASEERPPAQALEIMMGLKTTDMAPSKETEMALAKDMALATKTEVALAKDMESPTKLDVTLAKDMQPSMESDMALVKDMELPTEKEVALVKDVRWPTETDVSSAKNVVLPTETEVAPAKDVTLLKETERASPIKMDLAPSKDMGPPKENKKETERASPIKMDLAPSKDMGPPKENKIVPAKDLVLLSEIEVAQANDIISSTEISSAEKVALSSETEVALARDMTLPPETNVILTKDKALPLEAEVAPVKDMAQLPETEIAPAKDVAPSTVKEVGLLKDMSPLSETEMALGKDVTPPPETEVVLIKNVCLPPEMEVALTEDQVPALKTEAPLAKDGVLTLANNVTPAKDVPPLSETEATPVPIKDMEIAQTQKGISEDSHLESLQDVGQSAAPTFMISPETVTGTGKKCSLPAEEDSVLEKLGERKPCNSQPSELSSETSGIARPEEGRPVVSGTGNDITTPPNKELPPSPEKKTKPLATTQPAKTSTSKAKTQPTSLPKQPAPTTIGGLNKKPMSLASGLVPAAPPKRPAVASARPSILPSKDVKPKPIADAKAPEKRASPSKPASAPASRSGSKSTQTVAKTTTAAAVASTGPSSRSPSTLLPKKPTAIKTEGKPAEVKKMTAKSVPADLSRPKSTSTSSMKKTTTLSGTAPAAGVVPSRVKATPMPSRPSTTPFIDKKPTSAKPSSTTPRLSRLATNTSAPDLKNVRSKVGSTENIKHQPGGGRAKVEKKTEAAATTRKPESNAVTKTAGPIASAQKQPAGKVQIVSKKVSYSHIQSKCGSKDNIKHVPGGGNVQIQNKKVDISKVSSKCGSKANIKHKPGGGDVKIESQKLNFKEKAQAKVGSLDNVGHLPAGGAVKIETYRLTFRANARARTDHGADIVSRPPHFPGGPNSGSRVLGPLSRAVH

SEQ ID NO: 39784 - protein, 99 aa, Homo sapiens
MADLSLADALTEPSPDIEGEIKRDFIATLEAEAFDDVVGETVGKTDYIPLLDVDEKTGNSESKKKPCSETSQIEDTPSSKPTLLANGGHGVEGSDTTEA

SEQ ID NO: 39785 - protein, 359 aa, Homo sapiens
MDCGSVGGQRTQRLPGRQRLLFLPVGLSGRPGGSETSARRCLSALSDGLGALRPRAPAARGGVSRASPLLLLLLVPSPRLAAAAPRRQLGDWERSRLGYAAPPAGRSSAWRCSPGVAAAAGALPQYHGPAPALVSCRRELSLSAGSLQLERKRRDFTSSGSRKLYFDTHALVCLLEDNGFATQQAEIIVSALVKILEANMDIVYKDMVTKMQQEITFQQVMSQIANVKKDMIILEKSEFSALRAENEKIKLELHQLKQQVMDEVIKVRTDTKLDFNLEKSRVKELYSLNEKKLLELRTEIVALHAQQDRALTQTDRKIETEVAGLKTMLESHKLDNIKYLAGSIFTCLTVALGFYRLWI

SEQ ID NO: 39786 - protein, 257 aa, Homo sapiens
MDCGSVGGQRTQRLPGRQRLLFLPVGLSGRPGGSETSARRCLSALSDGLGALRPRAPAARGGVSRASPLLLLLLVPSPRLAAAAPRRQLGDWERSRLGYAAPPAGRSSAWRCSPGVAAAAGALPQYHGPAPALVSCRRELSLSAGSLQLERKRRDFTSSGSRKLYFDTHALVCLLEDNESHSFIQAGVQWHSLGLLQPPPPGFKRSSHLILLSSWDYRHAPPHLDNFSVFLLETGFHHVGQAGLKLLTSSDPPTLAS

SEQ ID NO: 39787 - protein, 401 aa, Homo sapiens
MEDPSGAREPRARPRERDPGRRPHPDQGRTHDRPRDRPGDPRRKRSSDGNRRRDGDRDPERDQERDGNRDRNRDRERERERERDPDRGPRRDTHRDAGPRAGEHGVWEKPRQSRTRDGARGLTWDAAAPPGPAPWEAPEPPQPQRKGDPGRRRPESEPPSERYLPSTPRPGREEVEYYQSEAEGLLECHKCKYLCTGRACCQMLEVLLNLLILACSSVSYSSTGGYTGITSLGGIYYYQFGGAYSGFDGADGEKAQQLDVQFYQLKLPMVTVAMACSGALTALCCLFVAMGVLRVPWHCPLLLVTEGLLDMLIAGGYIPALYFYFHYLSAAYGSPVCKERQALYQSKGYSGFGCSFHGADIGAGIFAALGIVVFALGAVLAIKGYRKVRKLKEKPAEMFEF

SEQ ID NO: 39788 - protein, 410 aa, Homo sapiens
MEDPSGAREPRARPRERDPGRRPHPDQGRTHDRPRDRPGDPRRKRSSDGNRRRDGDRDPERDQERDGNRDRNRDRERERERERDPDRGPRRDTHRDAGPRAGEHGVWEKPRQSRTRDGARGLTWDAAAPPGPAPWEAPEPPQPQRKGDPGRRRPESEPPSERYLPSTPRPGREEVEYYQSEAEGLLECHKCKYLCTGRGVVQIVEVVLNGMVLICIVASYFVLAGFSASFSSGGGFGNNYYSPFEGTELEQVRQLDQQYTILRSPLIYGGVAVSLGLGVLTMGVLLQGAKSRTMLSGKWLLTEAAFSLLAAVGYCTGIGVYLHVALQINSTDTCKTRERLYARKGLTWMDCQLAGTDGAAATFACLLVIMYGASVVLALRSYREQKRYKGSREQPGSYSDAPEYLWSGTL

SEQ ID NO: 39789 - protein, 148 aa, Homo sapiens
MEDPSGAREPRARPRERDPGRRPHPDQGRTHDRPRDRPGDPRRKRSSDGNRRRDGDRDPERDQERDGNRDRNRDRERERERERDPDRGPRRDTHRDAGPRAVNPLRRDICPRPPGLDERRWNITSQRRKDSWNATNANTCALGEVWCR

SEQ ID NO: 39790 - protein, 360 aa, Homo sapiens
MSQGRGKYDFYIGLGLAMSSSIFIGGSFILKKKGLLRLARKGSMRAGQGGHAYLKEWLWWAGLLSMGAGEVANFAAYAFAPATLVTPLGALSVLVSAILSSYFLNERLNLHGKIGCLLSILGSTVMVIHAPKEEEIETLNEMSHKLGDPGFVVFATLVVIVALILIFVVGPRHGQTNILVYITICSVIGAFSVSCVKGLGIAIKELFAGKPVLRHPLAWILLLSLIVCVSTQINYLNRALDIFNTSIVTPIYYVFFTTSVLTCSAILFKEWQDMPVDDVIGTLSGFFTIIVGIFLLHAFKDVSFSLASLPVSFRKDEKAMNGNLSNMYEVLNNNEESLTCGIEQHTGENVSRRNGNLTAF

SEQ ID NO: 39791 - protein, 341 aa, Homo sapiens
MSQGRGKYDFYIGLGLAMSSSIFIGGSFILKKKGLLRLARKGSMRAVGAGEVANFAAYAFAPATLVTPLGALSVLVSAILSSYFLNERLNLHGKIGCLLSILGSTVMVIHAPKEEEIETLNEMSHKLGDPGFVVFATLVVIVALILIFVVGPRHGQTNILVYITICSVIGAFSVSCVKGLGIAIKELFAGKPVLRHPLAWILLLSLIVCVSTQINYLNRALDIFNTSIVTPIYYVFFTTSVLTCSAILFKEWQDMPVDDVIGTLSGFFTIIVGIFLLHAFKDVSFSLASLPVSFRKDEKAMNGNLSNMYEVLNNNEESLTCGIEQHTGENVSRRNGNLTAF

SEQ ID NO: 39792 - protein, 159 aa, Homo sapiens
MKAWGTVVVTLATLMVVTVDAKIYERCELAARLERAGLNGYKGYGVGDWLCMAHYESGFDTAFVDHNPDGSSEYGIFQLNSAWWCDNGITPTKNLCHMDCHDLLNRHILDDIRCAKQIVSSQNGLSAWTSWRLHCSGHDLSEWLKGCDMHVKIDPKIHP

SEQ ID NO: 39793 - protein, 322 aa, Homo sapiens
MARCFSLVLLLTSIWTTRLLVQGSLRAEELSIQVSCRIMGITLVSKKANQQLNFTEAKEACRLLGLSLAGKDQVETALKASFETCSYGWVGDGFVVISRISPNPKCGKNGVGVLIWKVPVSRQFAAYCYNSSDTWTNSCIPEIITTKDPIFNTQTATQTTEFIVSDSTYSVASPYSTIPAPTTTPPAPASTSIPRRKKLICVTEVFMETSTMSTETEPFVENKAAFKNEAAGFGGVPTALLVLALLFFGAAAGLGFCYVKRYVKAFPFTNKNQQKEMIETKVVKEEKANDSNPNEESKKTDKNPEESKSPSKTTVRCLEAEV

SEQ ID NO: 39794 - protein, 148 aa, Homo sapiens
MKAAGILTLIGCLVTGAESKIYTRCKLAKIFSRAGLDNYWGFSLGNWICMAYYESGYNTTAQTVLDDGSIDYGIFQINSFAWCRRGKLKENNHCHVACSALVTDDLTDAIICAKKIVKETQGMNYWQGWKKHCEGRDLSDWKKDCEVS

SEQ ID NO: 39795 - protein, 194 aa, Homo sapiens
MQDAPLSCLSPTKWSSVSSADSTEKSASAAGTRNLPFQFCLRQALRMKAAGILTLIGCLVTGAESKIYTRCKLAKIFSRAGLDNYWGFSLGNWICMAYYESGYNTTAQTVLDDGSIDYGIFQINSFAWCRRGKLKENNHCHVACSALVTDDLTDAIICAKKIVKETQGMNYWQGWKKHCEGRDLSDWKKDCEVS

SEQ ID NO: 39796 - protein, 146 aa, Homo sapiens
MKASVVLSLLGYLVVPSGAYILGRCTVAKKLHDGGLDYFEGYSLENWVCLAYFESKFNPMAIYENTREGYTGFGLFQMRGSDWCGDHGRNRCHMSCSALLNPNLEKTIKCAKTIVKGKEGMGAWPTWSRYCQYSDTLARWLDGCKL

SEQ ID NO: 39797 - protein, 274 aa, Homo sapiens
MAAPEAEVLSSAAVPDLEWYEKSEETHASQIELLETSSTQEPLNASEAFCPRDCMVPVVFPGPVSQEGCCQFTCELLKHIMYQRQQLPLPYEQLKHFYRKPSPQAEEMLKKKPRATTEVSSRKCQQALAELESVLSHLEDFFARTLVPRVLILLGGNALSPKEFYELDLSLLAPYSVDQSLSTAACLRRLFRAIFMADAFSELQAPPLMGTVVMAQGHRNCGEDWFRPKLNYRVPSRGHKLTVTLSCGRPSIRTTAWEDYIWFQAPVTFKGFRE

SEQ ID NO: 39798 - protein, 306 aa, Homo sapiens
MARVPLGRSLTLSPRLEHNGMTSAHHNFRLPGSRDSPASASQVAEIIDLEWYEKSEETHASQIELLETSSTQEPLNASEAFCPRDCMVPVVFPGPVSQEGCCQFTCELLKHIMYQRQQLPLPYEQLKHFYRKPSPQAEEMLKKKPRATTEVSSRKCQQALAELESVLSHLEDFFARTLVPRVLILLGGNALSPKEFYELDLSLLAPYSVDQSLSTAACLRRLFRAIFMADAFSELQAPPLMGTVVMAQGHRNCGEDWFRPKLNYRVPSRGHKLTVTLSCGRPSIRTTAWEDYIWFQAPVTFKGFRE

SEQ ID NO: 39799 - protein, 821 aa, Homo sapiens
MDLAAAAEPGAGSQHLEVRDEVAEKCQKLFLDFLEEFQSSDGEIKYLQLAEELIRPERNTLVVSFVDLEQFNQQLSTTIQEEFYRVYPYLCRALKTFVKDRKEIPLAKDFYVAFQDLPTRHKIRELTSSRIGLLTRISGQVVRTHPVHPELVSGTFLCLDCQTVIRDVEQQFKYTQPNICRNPVCANRRRFLLDTNKSRFVDFQKVRIQETQAELPRGSIPRSLEVILRAEAVESAQAGDKCDFTGTLIVVPDVSKLSTPGARAETNSRVSGVDGYETEGIRGLRALGVRDLSYRLVFLACCVAPTNPRFGGKELRDEEQTAESIKNQMTVKEWEKVFEMSQDKNLYHNLCTSLFPTIHGNDEVKRGVLLMLFGGVPKTTGEGTSLRGDINVCIVGDPSTAKSQFLKHVEEFSPRAVYTSGKASSAAGLTAAVVRDEESHEFVIEAGALMLADNGVCCIDEFDKMDVRDQVAIHEAMEQQTISITKAGVKATLNARTSILAAANPISGHYDRSKSLKQNINLSAPIMSRFDLFFILVDECNEVTDYAIARRIVDLHSRIEESIDRVYSLDDIRRYLLFARQFKPKISKESEDFIVEQYKHLRQRDGSGVTKSSWRITVRQLESMIRLSEAMARMHCCDEVQPKHVKEAFRLLNKSIIRVETPDVNLDQEEEIQMEVDEGAGGINGHADSPAPVNGINGYNEDINQESAPKASLRLGFSEYCRISNLIVLHLRKVEEEEDESALKRSELVNWYLKEIESEIDSEEELINKKRIIEKVIHRLTHYDHVLIELTQAGLKGSTEGSESYEEDPYLVVNPNYLLED

SEQ ID NO: 39800 - protein, 211 aa, Homo sapiens
MTTLTRQDLNFGQVVADVLCEFLEVAVHLILYVREVYPVGIFQKRKKYNVPVQMSCHPELNQYIQDTLHCVKPLLEKNDVEKVVVVILDKEHRPVEKFVFEITQPPLLSISSDSLLSHVEQLLRAFILKISVCDAVLDHNPPGCTFTVLVHTREAATRNMEKIQVIKDFPWILADEQDVHMHDPRLIPLKTMTSDILKMQLYVEERAHKGS

SEQ ID NO: 39801 - protein, 562 aa, Homo sapiens
MALSKSMHARNRYKDKPPDFAYLASKYPDFKQHVQINLNGRVSLNFKDPEAVRALTCTLLREDFGLSIDIPLERLIPTVPLRLNYIHWVEDLIGHQDSDKSTLRRGIDIGTGASCIYPLLGATLNGWYFLATEVDDMCFNYAKKNVEQNNLSDLIKVVKVPQKTLLMDALKEESEIIYDFCMCNPPFFANQLEAKGVNSRNPRRPPPSSVNTGGITEIMAEGGELEFVKRIIHDSLQLKKRLRWYSCMLGKKCSLAPLKEELRIQGVPKVTYTEFCQGRTMRWALAWSFYDDVTVPSPPSKRRKLEKPRKPITFVVLASVMKELSLKASPLRSETAEGIVVVTTWIEKILTDLKVQHKRVPCGKEEVSLFLTAIENSWIHLRRKKRERVRQLREVPRAPEDVIQALEEKKPTPKESGNSQELARGPQERTPCGPALREGEAAAVEGPCPSQESLSQEENPEPTEDERSEEKGGVEVLESCQGSSNGAQDQEASEQFGSPVAERGKRLPGVAGQYLFKCLINVKKEVDDALVEMHWVEGQNRDLMNQLCTYIRNQIFRLVAVN

SEQ ID NO: 39802 - protein, 224 aa, Homo sapiens
MALSKSMHARNRYKDKPPDFAYLASKYPDFKQHVQINLNGRVSLNFKDPEAVRALTCTLLREDFGLSIDIPLERLIPTVPLRLNYIHWVEDLIGHQDSDKSTLRRGIDIGTGASCIYPLLGATLNGWYFLATEVDDMCFNYAKKNVEQNNLSDLIKVVKVPQKTLLMDALKEESEIIYDFCMCNPPFFANQLEAKGVNSRNPRRPPPSSVNTGDSLEPGRWRLQ

SEQ ID NO: 39803 - protein, 117 aa, Homo sapiens
MATYSLANERLRALEDIEREIGAILQNAGTVILELSKEKTNERLLDRQAAAFTASVQHVEAELSAQIRYLTQVATGQPHEGSSYSSRKDCQMALKRVDYARLKLSDVARTCEQMLEN

SEQ ID NO: 39804 - protein, 244 aa, Homo sapiens
MELTIFILRLAIYILTFPLYLLNFLGLWSWICKKWFPYFLVRFTVIYNEQMASKKRELFSNLQEFAGPSGKLSLLEVGCGTGANFKFYPPGCRVTCIDPNPNFEKFLIKSIAENRHLQFERFVVAAGENMHQVADGSVDVVVCTLVLCSVKNQERILREVCRVLRPGGAFYFMEHVAAECSTWNYFWQQVLDPAWHLLFDGCNLTRESWKALERASFSKLKLQHIQAPLSWELVRPHIYGYAVK

SEQ ID NO: 39805 - protein, 214 aa, Homo sapiens
MNLSSASSTEEKAVTTVLWGCELSQERRTWTFRPQLEGKQSCRLLLHTICLGEKAKEEMHRVEILPPANQEDKKMQPVTIASLQASVLPMVSMVGVQLSPPVTFQLRAGSGPVFLSGQERYEASDLTWEEEEEEEGEEEEEEEEDDEDEDADISLEEQSPVKQVKRLVPQKQASVAKKKKLEKEEEEIRASVRDKSPVKKAKATARAKKPGFKK

SEQ ID NO: 39806 - protein, 136 aa, Homo sapiens
MNLSSASSTEEKAVTTVLWGCELSQERRTWTFRPQLEGKQSCRLLLHTICLGEKAKEEMHRVEILPPANQEDKKMQPVTIASLQASVLPMVSMVGVQLSPPVTFQLRAGSGPVFLSGQERYEKKAGKRRRGNKSQR

SEQ ID NO: 39807 - protein, 400 aa, Homo sapiens [sequence omitted]

SEQ ID NO: 39808 - protein, 781 aa, Homo sapiens
MAKTPSDHLLSTLEELVPYDFEKFKFKLQNTSVQKEHSRIPRSQIQRARPVKMATLLVTYYGEEYAVQLTLQVLRAINQRLLAEELHRAAIQEYSTQENGTDDSAASSSLGENKPRSLKTPDHPEGNEGNGPRPYGGGAASLRCSQPEAGRGLSRKPLSKRREKASEGLDAQGKPRTRSPALPGGRSPGPCRALEGGQAEVRLRRNASSAGRLQGLAGGAPGQKECRPFEVYLPSGKMRPRSLEVTISTGEKAPANPEILLTLEEKTAANLDSATEPRARPTPDGGASADLKEGPGNPEHSVTGRPPDTAASPRCHAQEGDPVDGTCVRDSCSFPEAVSGHPQASGSRSPGCPRCQDSHERKSPGSLSPQPLPQCKRHLKQVQLLFCEDHDEPICLICSLSQEHQGHRVRPIEEVALEHKKKIQKQLEHLKKLRKSGEEQRSYGEEKAVSFLKQTEALKQRVQRKLEQVYYFLEQQEHFFVASLEDVGQMVGQIRKAYDTRVSQDIALLDALIGELEAKECQSEWELLQDIGDILHRAKTVPVPEKWTTPQEIKQKIQLLHQKSEFVEKSTKYFSETLRSEMEMFNVPELIGAQAHAVNVILDAETAYPNLIFSDDLKSVRLGNKWERLPDGPQRFDSCIIVLGSPSFLSGRRYWEVEVGDKTAWILGACKTSISRKGNMTLSPENGYWVVIMMKENEYQASSVPPTRLLIKEPPKRVGIFVDYRVGSISFYNVTARSHIYTFASCSFSGPLQPIFSPGTRDGGKNTAPLTICPVGGQGPD

SEQ ID NO: 39809 - protein, 570 aa, Homo sapiens
MAKTPSDHLLSTLEELVPYDFEKFKFKLQNTSVQKEHSRIPRSQIQRARPVKMATLLVTYYGEEYAVQLTLQVLRAINQRLLAEELHRAAIQGRPPDTAASPRCHAQEGDPVDGTCVRDSCSFPEAVSGHPQASGSRSPGCPRCQDSHERKSPGSLSPQPLPQCKRHLKQVQLLFCEDHDEPICLICSLSQEHQGHRVRPIEEVALEHKKKIQKQLEHLKKLRKSGEEQRSYGEEKAVSFLKQTEALKQRVQRKLEQVYYFLEQQEHFFVASLEDVGQMVGQIRKAYDTRVSQDIALLDALIGELEAKECQSEWELLQDIGDILHRAKTVPVPEKWTTPQEIKQKIQLLHQKSEFVEKSTKYFSETLRSEMEMFNVPELIGAQAHAVNVILDAETAYPNLIFSDDLKSVRLGNKWERLPDGPQRFDSCIIVLGSPSFLSGRRYWEVEVGDKTAWILGACKTSISRKGNMTLSPENGYWVVIMMKENEYQASSVPPTRLLIKEPPKRVGIFVDYRVGSISFYNVTARSHIYTFASCSFSGPLQPIFSPGTRDGGKNTAPLTICPVGGQGPD

SEQ ID NO: 39810 - protein, 445 aa, Homo sapiens
MAKTPSDHLLSTLEELVPYDFEKFKFKLQNTSVQKEHSRIPRSQIQRARPVKMATLLVTYYGEEYAVQLTLQVLRAINQRLLAEELHRAAIQGRPPDTAASPRCHAQEGDPVDGTCVRDSCSFPEAVSGHPQASGSRSPGCPRCQDSHERKSPGSLSPQPLPQCKRHLKQVQLLFCEDHDEPICLICSLSQEHQGHRVRPIEEVALEHKKKIQKQLEHLKKLRKSGEEQRSYGEEKAVSFLKQTEALKQRVQRKLEQVYYFLEQQEHFFVASLEDVGQMVGQIRKAYDTRVSQDIALLDALIGELEAKECQSEWELLQDIGDILHRAKTVPVPEKWTTPQEIKQKIQLLHQKSEFVEKSTKYFSETLRSEMEMFNDHSPQHGLGSWEERDYTQHSMQGPKQGVPCLSLLSGQCNLAPLNANAQDFFPYLIFLRSSGADWRSGTCC

SEQ ID NO: 39811 - protein, 312 aa, Homo sapiens
MMEPREAGQHVGAANGAQEDVAFNLIILSLTEGLGLGGLLGNGAVLWLLSSNVYRNPFAIYLLDVACADLIFLGCHMVAIVPDLLQGRLDFPGFVQTSLATLRFFCYIVGLSLLAAVSVEQCLAALFPAWYSCRRPRHLTTCVCALTWALCLLLHLLLSGACTQFFGEPSRHLCRTLWLVAAVLLALLCCTMCGASLMLLLRVERGPQRPPPRGFPGLILLTVLLFLFCGLPFGIYWLSRNLLWYIPHYFYHFSFLMAAVHCAAKPVVYFCLGSAQGRRLPLRLVLQRALGDEAELGAVRETSRRGLVDIAA

SEQ ID NO: 39812 - protein, 235 aa, Homo sapiens
MQQRGAAGSRGCALFPLLGVLFFQGVYIVFSLEIRADAHVRGYVGEKIKLKCTFKSTSDVTDKLTIDWTYRPPSSSHTVSIFHYQSFQYPTTAGTFRDRISWVGNVYKGDASISISNPTIKDNGTFSCAVKNPPDVHHNIPMTELTVTERGFGTMLSSVALLSILVFVPSAVVVALLLVRMGRKAAGLKKRSRSGYKKSSIEVSDDTDQEEEEACMARLCVRCAECLDSDYEETY

SEQ ID NO: 39813 - protein, 223 aa, Homo sapiens
MQQRGAAGSRGCALFPLLGVLFFQDAHVRGYVGEKIKLKCTFKSTSDVTDKLTIDWTYRPPSSSHTVSIFHYQSFQYPTTAGTFRDRISWVGNVYKGDASISISNPTIKDNGTFSCAVKNPPDVHHNIPMTELTVTERGFGTMLSSVALLSILVFVPSAVVVALLLVRMGRKAAGLKKRSRSGYKKSSIEVSDDTDQEEEEACMARLCVRCAECLDSDYEETY

SEQ ID NO: 39814 - protein, 108 aa, Homo sapiens
MQQRGAAGSRGCALFPLLGVLFFQGVYIVFSLEIRADAHVRGYVGEKIKLKCTFKSTSDVTDKLTIDWTYRPPSSSHTVSVLAPCFPLWPFFPSLSLCPQPWWLLCCW

SEQ ID NO: 39815 - protein, 115 aa, Homo sapiens
MVSRKAVAALLVVHVAAMLASQTEAFVPIFTYGELQRMQEKERNKGQKKSLSVWQRSGEEGPVDPAEPIREEENEMIKLTAPLEIGMRMNSRQLEKYPATLEGLLSEMLPQHAAK

SEQ ID NO: 39816 - protein, 108 aa, Homo sapiens
MVSRKAVAALLVVHVAAMLASQTEAFVPIFTYGELQRMQEKERNKGQKKSLSVWQRSGEEGPVDPAEPIREEENEMIKLTAPLEIGMRMNSRQLEKYPATLEGLLTAK

SEQ ID NO: 39817 - protein, 114 aa, Homo sapiens
MVSRKAVAALLVVHVAAMLASQTEAFVPIFTYGELQRMQEKERNKGQKKSLSVWQRSGEEGPVDPAEPIREEENEMIKLTAPLEIGMRMNSRQLEKYPATLEGLLSEMLPQHAK

SEQ ID NO: 39818 - protein, 163 aa, Homo sapiens
MAEDRPQQPQLDMPLVLDQGLTRQMRLRVESLKQRGEKRQDGEKLLQPAESVYRLNFTQQQRLQFERWNVVLDKPGKVTITGTSQNWTPDLTNLMTRQLLDPTAIFWRKEDSDAIDWNEADALEFGERLSDLAKIRKVMYFLVTFGEGVEPANLKASVVFNQL

SEQ ID NO: 39819 - protein, 331 aa, Homo sapiens
MSGENVTRVGTFILVGFPTAPGLQYLLFLLFLLTYLFVLVENLAIILTVWSSTSLHRPMYYFLSSMSFLEIWYVSDITPKMLEGFLLQQKRISFVGCMTQLYFFSSLVCTECVLLASMAYDRYVAICHPLRYHVLVTPGLCLQLVGFSFVSGFTISMIKVCFISSVTFCGSNVLNHFFCDISPILKLACTDFSTAELVDFILAFIILVFPLLATMLSYAHITLAVLRIPSATGCWRAFFTCASHLTVVTVFYTALLFMYVRPQAIDSRSSNKLISVLYTVITPILNPLIYCLRNKEFKNALKKAFGLTSCAVEGRLSSLLELHLQIHSQPL

SEQ ID NO: 39820 - protein, 380 aa, Homo sapiens
MGSGCRIECIFFSEFHPTLGPKITYQVPEDFISRELFDTVQVYIITKPELQNKLITVTAMEKKLIGCPVCIEHKKYSRNALLFNLGFVCDAQAKTCALEPIVKKLAGYLTTLELESSFVSMEESKQKLVPIMTILLEELNASGRCTLPIDESNTIHLKVIEQRPDPPVAQEYDVPVFTKDKEDFFNSQWDLTTQQILPYIDGFRHIQKISAEADVELNLVRIAIQNLLYYGVVTLVSILQYSNVYCPTPKVQDLVDDKSLQEACLSYVTKQGHKRASLRDVFQLYCSLSPGTTVRDLIGRHPQQLQHVDERKLIQFGLMKNLIRRLQKYPVRVTREEQSHPARLYTGCHSYDEICCKTGMSYHELDERLENDPNIIICWK

SEQ ID NO: 39821 - protein, 203 aa, Homo sapiens
MEESKQKLVPIMTILLEELNASGRCTLPIDESNTIHLKVIEQRPDPPVAQEYDVPVFTKDKEDFFNSQWDLTTQQILPYIDGFRHIQKISAEADVELNLVRIAIQNLLYYGVVTLVSILQYSNVYCPTPKVQDLVDDKSLQEACLSYVTKQGHKRASLRDVFQLYCSLSPGTTVRDLIGRHPQQLQHVDERSEENLLGHLGVT

SEQ ID NO: 39822 - protein, 279 aa, Homo sapiens
MKIIILLGFLGATLSAPLIPQRLMSASNSNELLLNLNNGQLLPLQLQGPLNSWIPPFSGILQQQQQAQIPGLSQFSLSALDQFAGLLPNQIPLTGEASFAQGAQAGQVDPLQLQTPPQTQPGPSHVMPYVFSFKMPQEQGQMFQYYPVYMVLPWEQPQQTVPRSPQQTRQQQYEEQIPFYAQFGYIPQLAEPAISGGQQQLAFDPQLGTAPEIAVMSTGEEIPYLQKEAINFRHDSAGVFMPSTSPKPSTTNVFTSAVDQTITPELPEEKDKTDSLREP

SEQ ID NO: 39823 - protein, 314 aa, Homo sapiens
MAERNYTVVTEFFLTAFTEHLQWRVPLFLIFLSFYLATMLGNTGMILLIRGDRRLHTPMYFFLSHLSLVDICYSSAIIPQMLAVLWEHGTTISQARCAAQFFLFTFFASIDCYLLAIMAYDRYTAVCQPLLYVTIITEKARWGLVTGAYVAGFFSAFVRTVTAFTLSFCGNNEINFIFCDLPPLLKLSCGDSYTQEVVIIVFALFVMPACILVILVSYLFIIVAILQIHSAGGRAKTFSTCASHLTAVALFFGTLIFMYLRDNTGQSSEGDRVVSVLYTVVTPMLNPLIYSLRNKEVKEATRKALSKSKPARRP

SEQ ID NO: 39824 - protein, 273 aa, Homo sapiens
MRLPGVPLARPALLLLLPLLAPLLGTGAPAELRVRVRLPDGQVTEESLQADSDADSISLELRKPDGTLVSFTADFKKDVKVFRALILGELEKGQSQFQALCFVTQLQHNEIIPSEAMAKLRQKNPRAVRQAEEVRGLEHLHMDVAVNFSQGALLSPHLHNVCAEAVDAIYTRQEDVRFWLEQGVDSSVFEALPKASEQAELPRCRQVGDHGKPCVCRYGLSLAWYPCMLKYCHSRDRPTPYKCGIRSCQKSYSFDFYVPQRQLCLWDEDPYPG

SEQ ID NO: 39825 - protein, 312 aa, Homo sapiens
MMGRRNDTNVADFILTGLSDSEEVQMALFMLFLLIYLITMLGNVGMLLIIRLDLQLHTPMYFFLTHLSFIDLSYSTVVTPKTLANLLTSNYISFTGCFAQMFCFVFLGTAECYLLSSMAYDRYAAICSPLHYTVIMPKRLCLALITGPYVIGFMDSFVNVVSMSRLHFCDSNIIHHFFCDTSPILALSCTDTDNTEMLIFIIAGSTLMVSLITISASYVSILSTILKINSTSGKQKAFSTCVSHLLGVTIFYGTMIFTYLKPRKSYSLGRDQVAPVFYTIVIPMLNPLIYSLRNREVKNALIRVMQRRQDSR

SEQ ID NO: 39826 - protein, 364 aa, Homo sapiens; identical to SEQ ID NO: 2869

SEQ ID NO: 39827 - protein, 314 aa, Homo sapiens
MMGQNQTSISDFLLLGLPIQPEQQNLCYALFLAMYLTTLLGNLLIIVLIRLDSHLHTPMYLFLSNLSFSDLCFSSVTIPKLLQNMQNQDPSIPYADCLTQMYFFLLFGDLESFLLVAMAYDRYVAICFPLHYTAIMSPMLCLALVALSWVLTTFHAMLHTLLMARLCFCADNVIPHFFCDMSALLKLAFSDTRVNEWVIFIMGGLILVIPFLLILGSYARIVSSILKVPSSKGICKAFSTCGSHLSVVSLFYGTVIGLYLCSSANSSTLKDTVMAMMYTVVTPMLNPFIYSLRNRDMKGALSRVIHQKKTFFSL

SEQ ID NO: 39828 - protein, 326 aa, Homo sapiens
MAAFAVEPQGPALGSEPMMLGSPTSPKPGVNAQFLPGFLMGDLPAPVTPQPRSISGPSVGVMEMRSPLLAGGSPPQPVVPAHKDKSGAPPVRSIYDDISSPGLGSTPLTSRRQPNISVMQSPLVGVTSTPGTGQSMFSPASIGQPRKTTLSPAQLDPFYTQGDSLTSEDHLDDSWVTVFGFPQASASYILLQFAQYGNILKHVMSNTGNWMHIRYQSKLQARKALSKDGRIFGESIMIGVKPCIDKSVMESSDRCALSSPSLAFTPPIKTLGTPTQPGSTPRISTMRPLATAYKASTSDYQVISDRQTPKKDESLVSKAMEYMFGW

SEQ ID NO: 39829 - protein, 309 aa, Homo sapiens
MMLGSPTSPKPGVNAQFLPGFLMGDLPAPVTPQPRSISGPSVGVMEMRSPLLAGGSPPQPVVPAHKDKSGAPPVRSIYDDISSPGLGSTPLTSRRQPNISVMQSPLVGVTSTPGTGQSMFSPASIGQPRKTTLSPAQLDPFYTQGDSLTSEDHLDDSWVTVFGFPQASASYILLQFAQYGNILKHVMSNTGNWMHIRYQSKLQARKALSKDGRIFGESIMIGVKPCIDKSVMESSDRCALSSPSLAFTPPIKTLGTPTQPGSTPRISTMRPLATAYKASTSDYQVISDRQTPKKDESLVSKAMEYMFGW

SEQ ID NO: 39830 - protein, 191 aa, Homo sapiens
MFSPASIGQPRKTTLSPAQLDPFYTQGDSLTSEDHLDDSWVTVFGFPQASASYILLQFAQYGNILKHVMSNTGNWMHIRYQSKLQARKALSKDGRIFGESIMIGVKPCIDKSVMESSDRCALSSPSLAFTPPIKTLGTPTQPGSTPRISTMRPLATAYKASTSDYQVISDRQTPKKDESLVSKAMEYMFGW

SEQ ID NO: 39831 - protein, 332 aa, Homo sapiens
MLEGVEHLLLLLLLTDVNSKELQSGNQTSVSHFILVGLHHPPQLGAPLFLAFLVIYLLTVSGNGLIILTVLVDIRLHRPMCLFLCHLSFLDMTISCAIVPKMLAGFLLGSRIISFGGCVIQLFSFHFLGCTECFLYTLMAYDRFLAICKPLHYATIMTHRVCNSLALGTWLGGTIHSLFQTSFVFRLPFCGPNRVDYIFCDIPAMLRLACADTAINELVTFADIGFLALTCFMLILTSYGYIVAAILRIPSADGRRNAFSTCAAHLTVVIVYYVPCTFIYLRPCSQEPLDGVVAVFYTVITPLLNSIIYTLCNKEMKAALQRLGGHKEVQPH

SEQ ID NO: 39832 - protein, 347 aa, Homo sapiens
MSYFYRLKLMKEAVLVKLPFTSLPLLLQTLSRKSRDMEIKNYSSSTSGFILLGLSSNPQLQKPLFAIFLIMYLLAAVGNVLIIPAIYSDPRLHTPMYFFLSNLSFMDICFTTVIVPKMLVNFLSETKVISYVGCLAQMYFFMAFGNTDSYLLASMAIDRLVAICNPLHYDVVMKPRHCLLMLLGSCSISHLHSLFRVLLMSRLSFCASHIIKHFFCDTQPVLKLSCSDTSSSQMVVMTETLAVIVTPFLCIIFSYLRIMVTVLRIPSAAGKWKAFSTCGSHLTAVALFYGSIIYVYFRPLSMYSVVRDRVATVMYTVVTPMLNPFIYSLRNKDMKRGLKKLQDRIYR

SEQ ID NO: 39833 - protein, 317 aa, Homo sapiens
MVDPNGNESSATYFILIGLPGLEEAQFWLAFPLCSLYLIAVLGNLTIIYIVRTEHSLHEPMYIFLCMLSGIDILISTSSMPKMLAIFWFNSTTIQFDACLLQMFAIHSLSGMESTVLLAMAFDRYVAICHPLRHATVLTLPRVTKIGVAAVVRGAALMAPLPVFIKQLPFCRSNILSHSYCLHQDVMKLACDDIRVNVVYGLIVIISAIGLDSLLISFSYLLILKTVLGLTREAQAKAFGTCVSHVCAVFIFYVPFIGLSMVHRFSKRRDSPLPVILANIYLLVPPVLNPIVYGVKTKEIRQRILRLFHVATHASEP

SEQ ID NO: 39834 - protein, 326 aa, Homo sapiens
MVLNVYCCFFQISDIQTMKINQTILKEFILVGFSVYPHVQTFLFVVFFCLYLLTLAGNLIIMGLTWVDRSLHTPMYLFLSALSFSETCYTLTIVPKMLEDLLAKDRSISVTGCSLQMCFFLGLGGTNCIILTLMGYDRFLAICNPLRYPLLMTNIVCGQLVASACTAGFFISLTETALIFRDSFCRPNLVKHFFCHMLAVIRLSCIDSNHTEFIITLISVSGLLGTLLLIILTDVFIISTVLRIPSAEGKQKAFTTCASHLTVVIIHFGFASIVYLKPEASGDDTLIAVPYTVITPFLSPIIFSLRNKDMKNAFRRMMGNTVALKK

SEQ ID NO: 39835 - protein, 207 aa, Homo sapiens
MLALRCGSRWLGLLSVPRSVPLRLPAARACSKGSGDPSSSSSSGNPLVYLDVDANGKPLGRVVLELKADVVPKTAENFRALCTGEKGFGYKGSTFHRVIPSFMCQAGDFTNHNGTGGKSIYGSRFPDENFTLKHVGPGVLSMANAGPNTNGSQFFICTIKTDWLDGKHVVFGHVKEGMDVVKKIESFGSKSGRTSKKIVITDCGQLS

SEQ ID NO: 39836 - protein, 155 aa, Homo sapiens
MLALRCGSRWLGLLSVPRSVPLRLPAARACSKGSGDPSSSSSSGNPLVYLDVDANGKPLGRVVLELKADVVPKTAENFRALCTGEKGFGYKGSTFHRVIPSFMCQAGDFTNHNGTGGKSIYGSRFPDENFTLKHVGPGWMASMLCSVTSKRAWTS

SEQ ID NO: 39837 - protein, 1441 aa, Homo sapiens
MASLAALALSLLLRLQLPPLPGARAQSAAGGCSFDEHYSNCGYSVALGTNGFTWEQINTWEKPMLDQAVPTGSFMMVNSSGRASGQKAHLLLPTLKENDTHCIDFHYYFSSRDRSSPGALNVYVKVNGGPQGNPVWNVSGVVTEGWVKAELAISTFWPHFYQVIFESVSLKGHPGYIAVDEVRVLAHPCRKAPHFLRLQNVEVNVGQNATFQCIAGGKWSQHDKLWLQQWNGRDTALMVTRVVNHRRFSATVSVADTAQRSVSKYRCVIRSDGGSGVSNYAELIVKEPPTPIAPPELLAVGATYLWIKPNANSIIGDGPIILKEVEYRTTTGTWAETHIVDSPNYKLWHLDPDVEYEIRVLLTRPGEGGTGPPGPPLTTRTKCADPVHGPQNVEIVDIRARQLTLQWEPFGYAVTRCHSYNLTVQYQYVFNQQQYEAEEVIQTSSHYTLRGLRPFMTIRLRLLLSNPEGRMESEELVVQTEEDVPGAVPLESIQGGPFEEKIYIQWKPPNETNGVITLYEINYKAVGSLDPSADLSSQRGKVFKLRNETHHLFVGLYPGTTYSFTIKASTAKGFGPPVTTRIATKISAPSMPEYDTDTPLNETDTTITVMLKPAQSRGAPVSVYQLVVKEERLQKSRRAADIIECFSVPVSYRNASSLDSLHYFAAELKPANLPVTQPFTVGDNKTYNGYWNPPLSPLKSYSIYFQALSKANGETKINCVRLATKGASTQNSNTVEPEKQVDNTVKMAGVIAGLLMFIIILLGVMLTIKRRRNAYSYSYYLKLAKKQKETQSGAQREMGPVASADKPTTKLSASRNDEGFSSSSQDVNGFTDGSRGELSQPTLTIQTHPYRTCDPVEMSYPRDQFQPAIRVADLLQHITQMKRGQGYGFKEEYEALPEGQTASWDTAKEDENRNKNRYGNIISYDHSRVRLLVLDGDPHSDYINANYIDGYHRPRHYIATQGPMQETVKDFWRMIWQENSASIVMVTNLVEVGRVKCVRYWPDDTEVYGDIKVTLIETEPLAEYVIRTFTVQKKGYHEIRELRLFHFTSWPDHGVPCYATGLLGFVRQVKFLNPPEAGPIVVHCSAGAGRTGCFIAIDTMLDMAENEGVVDIFNCVRELRAQRVNLVQTEEQYVFVHDAILEACLCGNTAIPVCEFRSLYYNISRLDPQTNSSQIKDEFQTLNIVTPRVRPEDCSIGLLPRNHDKNRSMDVLPLDRCLPFLISVDGESSNYINAALMDSHKQPAAFVVTQHPLPNTVADFWRLVFDYNCSSVVMLNEMDTAQFCMQYWPEKTSGCYGPIQVEFVSADIDEDIIHRIFRICNMARPQDGYRIVQHLQYIGWPAYRDTPPSKRSLLKVVRRLEKWQEQYDGREGRTVVHCLNGGGRSGTFCAICSVCEMIQQQNIIDVFHIVKTLRNNKSNMVETLEQYKFVYEVALEYLSSF

SEQ ID NO: 39838 - protein, 1463 aa, Homo sapiens
MASLAALALSLLLRLQLPPLPGARAQSAAGGCSFDEHYSNCGYSVALGTNGFTWEQINTWEKPMLDQAVPTGSFMMVNSSGRASGQKAHLLLPTLKENDTHCIDFHYYFSSRDRSSPGALNVYVKVNGGPQGNPVWNVSGVVTEGWVKAELAISTFWPHFYQVIFESVSLKGHPGYIAVDEVRVLAHPCRKAPHFLRLQNVEVNVGQNATFQCIAGGKWSQHDKLWLQQWNGRDTALMVTRVVNHRRFSATVSVADTAQRSVSKYRCVIRSDGGSGVSNYAELIVKEPPTPIAPPELLAVGATYLWIKPNANSIIGDGPIILKEVEYRTTTGTWAETHIVDSPNYKLWHLDPDVEYEIRVLLTRPGEGGTGPPGPPLTTRTKCADPVHGPQNVEIVDIRARQLTLQWEPFGYAVTRCHSYNLTVQYQYVFNQQQYEAEEVIQTSSHYTLRGLRPFMTIRLRLLLSNPEGRMESEELVVQTEEDVPGAVPLESIQGGPFEEKIYIQWKPPNETNGVITLYEINYKAVGSLDPSADLSSQRGKVFKLRNETHHLFVGLYPGTTYSFTIKASTAKGFGPPVTTRIATKISAPSMPEYDTDTPLNETDTTITVMLKPAQSRGAPVSVYQLVVKEERLQKSRRAADIIECFSVPVSYRNASSLDSLHYFAAELKPANLPVTQPFTVGDNKTYNGYWNPPLSPLKSYSIYFQALSKANGETKINCVRLATKAPMGSAQVTPGTPLCLLTTGASTQNSNTVEPEKQVDNTVKMAGVIAGLLMFIIILLGVMLTIKRRRNAYSYSYYLSQRKLAKKQKETQSGAQREMGPVASADKPTTKLSASRNDEGFSSSSQDVNGFTDGSRGELSQPTLTIQTHPYRTCDPVEMSYPRDQFQPAIRVADLLQHITQMKRGQGYGFKEEYEALPEGQTASWDTAKEDENRNKNRYGNIISYDHSRVRLLVLDGDPHSDYINANYIDGYHRPRHYIATQGPMQETVKDFWRMIWQENSASIVMVTNLVEVGRVKCVRYWPDDTEVYGDIKVTLIETEPLAEYVIRTFTVQKKGYHEIRELRLFHFTSWPDHGVPCYATGLLGFVRQVKFLNPPEAGPIVVHCSAGAGRTGCFIAIDTMLDMAENEGVVDIFNCVRELRAQRVNLVQTEEQYVFVHDAILEACLCGNTAIPVCEFRSLYYNISRLDPQTNSSQIKDEFQTLNIVTPRVRPEDCSIGLLPRNHDKNRSMDVLPLDRCLPFLISVDGESSNYINAALMDSHKQPAAFVVTQHPLPNTVADFWRLVFDYNCSSVVMLNEMDTAQFCMQYWPEKTSGCYGPIQVEFVSADIDEDIIHRIFRICNMARPQDGYRIVQHLQYIGWPAYRDTPPSKRSLLKVVRRLEKWQEQYDGREGRTVVHCLNGGGRSGTFCAICSVCEMIQQQNIIDVFHIVKTLRNNKSNMVETLEQYKFVYEVALEYLSSF

SEQ ID NO: 39839 - protein, 1446 aa, Homo sapiens
MARAQALVLALTFQLCAPETETPAAGCTFEEASDPAVPCEYSQAQYDDFQWEQVRIHPGTRAPADLPHGSYLMVNTSQHAPGQRAHVIFQSLSENDTHCVQFSYFLYSRDGHSPGTLGVYVRVNGGPLGSAVWNMTGSHGRQWHQAELAVSTFWPNEYQVLFEALISPDRRGYMGLDDILLLSYPCAKAPHFSRLGDVEVNAGQNASFQCMAAGRAAEAERFLLQRQSGALVPAAGVRHISHRRFLATFPLAAVSRAEQDLYRCVSQAPRGAGVSNFAELIVKEPPTPIAPPQLLRAGPTYLIIQLNTNSIIGDGPIVRKEIEYRMARGPWAEVHAVSLQTYKLWHLDPDTEYEISVLLTRPGDGGTGRPGPPLISRTKCAEPMRAPKGLAFAEIQARQLTLQWEPLGYNVTRCHTYTVSLCYHYTLGSSHNQTIRECVKTEQGVSRYTIKNLLPYRNVHVRLVLTNPEGRKEGKEVTFQTDEDVPSGIAAESLTFTPLEDMIFLKWEEPQEPNGLITQYEISYQSIESSDPAVNVPGPRRTISKLRNETYHVFSNLHPGTTYLFSVRARTGKGFGQAALTEITTNISAPSFDYADMPSPLGESENTITVLLRPAQGRGAPISVYQVIVEEERARRLRREPGGQDCFPVPLTFEAALARGLVHYFGAELAASSLPEAMPFTVGDNQTYRGFWNPPLEPRKAYLIYFQAASHLKGETRLNCIRIARKAACKESKRPLEVSQRSEEMGLILGICAGGLAVLILLLGAIIVIIRKGRDHYAYSYYPKPVNMTKATVNYRQEKTHMMSAVDRSFTDQSTLQEDERLGLSFMDTHGYSTRGDQRSGGVTEASSLLGGSPRRPCGRKGSPYHTGQLHPAVRVADLLQHINQMKTAEGYGFKQEYESFFEGWDATKKKDKVKGSRQEPMPAYDRHRVKLHPMLGDPNADYINANYIDGYHRSNHFIATQGPKPEMVYDFWRMVWQEHCSSIVMITKLVEVGRVKCSRYWPEDSDTYGDIKIMLVKTETLAEYVVRTFALERRGYSARHEVRQFHFTAWPEHGVPYHATGLLAFIRRVKASTPPDAGPIVIHCSAGTGRTGCYIVLDVMLDMAECEGVVDIYNCVKTLCSRRVNMIQTEEQYIFIHDAILEACLCGETTIPVSEFKATYKEMIRIDPQSNSSQLREEFQTLNSVTPPLDVEECSIALLPRNRDKNRSMDVLPPDRCLPFLISTDGDSNNYINAALTDSYTRSAAFIVTLHPLQSTTPDFWRLVYDYGCTSIVMLNQLNQSNSAWPCLQYWPEPGRQQYGLMEVEFMSGTADEDLVARVFRVQNISRLQEGHLLVRHFQFLRWSAYRDTPDSKKAFLHLLAEVDKWQAESGDGRTIVHCLNGGGRSGTFCACATVLEMIRCHNLVDVFFAAKTLRNYKPNMVETMDQYHFCYDVALEYLEGLESR

SEQ ID NO: 39840 - protein, 1436 aa, Homo sapiens
MARAQALVLALTFQLCAPETETPAAGCTFEEASDPAVPCEYSQAQYDDFQWEQVRIHPGTRAPADLPHGSYLMVNTSQHAPGQRAHVIFQSLSENDTHCVQFSYFLYSRDGHSPGTLGVYVRVNGGPLGSAVWNMTGSHGRQWHQAELAVSTFWPNEYQVLFEALISPDRRGYMGLDDILLLSYPCAKAPHFSRLGDVEVNAGQNASFQCMAAGRAAEAERFLLQRQSGALVPAAGVRHISHRRFLATFPLAAVSRAEQDLYRCVSQAPRGAGVSNFAELIVKEPPTPIAPPQLLRAGPTYLIIQLNTNSIIGDGPIVRKEIEYRMARGPWAEVHAVSLQTYKLWHLDPDTEYEISVLLTRPGDGGTGRPGPPLISRTKCAEPMRAPKGLAFAEIQARQLTLQWEPLGYNVTRCHTYTVSLCYHYTLGSSHNQTIRECVKTEQGVSRYTIKNLLPYRNVHVRLVLTNPEGRKEGKEVTFQTDEDVPSGIAAESLTFTPLEDMIFLKWEEPQEPNGLITQYEISYQSIESSDPAVNVPGPRRTISKLRNETYHVFSNLHPGTTYLFSVRARTGKGFGQAALTEITTNISAPSFDYADMPSPLGESENTITVLLRPAQGRGAPISVYQVIVEEERARRLRREPGGQDCFPVPLTFEAALARGLVHYFGAELAASSLPEAMPFTVGDNQTYRGFWNPPLEPRKAYLIYFQAASHLKGETRLNCIRIARKAACKESKRPLEVSQRSEEMGLILGICAGGLAVLILLLGAIIVIIRKGKPVNMTKATVNYRQEKTHMMSAVDRSFTDQSTLQEDERLGLSFMDTHGYSTRGDQRSGGVTEASSLLGGSPRRPCGRKGSPYHTGQLHPAVRVADLLQHINQMKTAEGYGFKQEYESFFEGWDATKKKDKVKGSRQEPMPAYDRHRVKLHPMLGDPNADYINANYIDGYHRSNHFIATQGPKPEMVYDFWRMVWQEHCSSIVMITKLVEVGRVKCSRYWPEDSDTYGDIKIMLVKTETLAEYVVRTFALERRGYSARHEVRQFHFTAWPEHGVPYHATGLLAFIRRVKASTPPDAGPIVIHCSAGTGRTGCYIVLDVMLDMAECEGVVDIYNCVKTLCSRRVNMIQTEEQYIFIHDAILEACLCGETTIPVSEFKATYKEMIRIDPQSNSSQLREEFQTLNSVTPPLDVEECSIALLPRNRDKNRSMDVLPPDRCLPFLISTDGDSNNYINAALTDSYTRSAAFIVTLHPLQSTTPDFWRLVYDYGCTSIVMLNQLNQSNSAWPCLQYWPEPGRQQYGLMEVEFMSGTADEDLVARVFRVQNISRLQEGHLLVRHFQFLRWSAYRDTPDSKKAFLHLLAEVDKWQAESGDGRTIVHCLNGGGRSGTFCACATVLEMIRCHNLVDVFFAAKTLRNYKPNMVETMDQYHFCYDVALEYLEGLESR

SEQ ID NO: 39841 - protein, 1433 aa, Homo sapiens
MARAQALVLALTFQLCAPETETPAAGCTFEEASDPAVPCEYSQAQYDDFQWEQVRIHPGTRAPADLPHGSYLMVNTSQHAPGQRAHVIFQSLSENDTHCVQFSYFLYSRDGHSPGTLGVYVRVNGGPLGSAVWNMTGSHGRQWHQAELAVSTFWPNEYQVLFEALISPDRRGYMGLDDILLLSYPCAKAPHFSRLGDVEVNAGQNASFQCMAAGRAAEAERFLLQRQSGALVPAAGVRHISHRRFLATFPLAAVSRAEQDLYRCVSQAPRGAGVSNFAELIVKEPPTPIAPPQLLRAGPTYLIIQLNTNSIIGDGPIVRKEIEYRMARGPWAEVHAVSLQTYKLWHLDPDTEYEISVLLTRPGDGGTGRPGPPLISRTKCAEPMRAPKGLAFAEIQARQLTLQWEPLGYNVTRCHTYTVSLCYHYTLGSSHNQTIRECVKTEQGVSRYTIKNLLPYRNVHVRLVLTNPEGRKEGKEVTFQTDEDVPSGIAAESLTFTPLEDMIFLKWEEPQEPNGLITQYEISYQSIESSDPAVNVPGPRRTISKLRNETYHVFSNLHPGTTYLFSVRARTGKGFGQAALTEITTNISAPSFDYADMPSPLGESENTITVLLRPAQGRGAPISVYQVIVEEERARRLRREPGGQDCFPVPLTFEAALARGLVHYFGAELAASSLPEAMPFTVGDNQTYRGFWNPPLEPRKAYLIYFQAASHLKGETRLNCIRIARKAACKESKRPLEVSQRSEEMGLILGICAGGLAVLILLLGAIIVIIRKGKPVNMTKATVNYRQEKTHMMSAVDRSFTDQSTLQEDERLGLSFMDTHGYSTRGDQRSGGVTEASSLLGGSPRRPCGRKGSPYHTGQLHPAVRVADLLQHINQMKTAEGYGFKQEYESFFEGWDATKKKDKVKGSRQEPMPAYDRHRVKLHPMLGDPNADYINANYIDGYHRSNHFIATQGPKPEMVYDFWRMVWQEHCSSIVMITKLVEVKCSRYWPEDSDTYGDIKIMLVKTETLAEYVVRTFALERRGYSARHEVRQFHFTAWPEHGVPYHATGLLAFIRRVKASTPPDAGPIVIHCSAGTGRTGCYIVLDVMLDMAECEGVVDIYNCVKTLCSRRVNMIQTEEQYIFIHDAILEACLCGETTIPVSEFKATYKEMIRIDPQSNSSQLREEFQTLNSVTPPLDVEECSIALLPRNRDKNRSMDVLPPDRCLPFLISTDGDSNNYINAALTDSYTRSAAFIVTLHPLQSTTPDFWRLVYDYGCTSIVMLNQLNQSNSAWPCLQYWPEPGRQQYGLMEVEFMSGTADEDLVARVFRVQNISRLQEGHLLVRHFQFLRWSAYRDTPDSKKAFLHLLAEVDKWQAESGDGRTIVHCLNGGGRSGTFCACATVLEMIRCHNLVDVFFAAKTLRNYKPNMVETMDQYHFCYDVALEYLEGLESR

SEQ ID NO: 39842 - protein, 1440 aa, Homo sapiens
MARAQALVLALTFQLCAPETETPAAGCTFEEASDPAVPCEYSQAQYDDFQWEQVRIHPGTRAPADLPHGSYLMVNTSQHAPGQRAHVIFQSLSENDTHCVQFSYFLYSRDGHSPGTLGVYVRVNGGPLGSAVWNMTGSHGRQWHQAELAVSTFWPNEYQVLFEALISPDRRGYMGLDDILLLSYPCAKAPHFSRLGDVEVNAGQNASFQCMAAGRAAEAERFLLQRQSGALVPAAGVRHISHRRFLATFPLAAVSRAEQDLYRCVSQAPRGAGVSNFAELIVKEPPTPIAPPQLLRAGPTYLIIQLNTNSIIGDGPIVRKEIEYRMARGPWAEVHAVSLQTYKLWHLDPDTEYEISVLLTRPGDGGTGRPGPPLISRTKCAEPMRAPKGLAFAEIQARQLTLQWEPLGYNVTRCHTYTVSLCYHYTLGSSHNQTIRECVKTEQGVSRYTIKNLLPYRNVHVRLVLTNPEGRKEGKEVTFQTDEDVPSGIAAESLTFTPLEDMIFLKWEEPQEPNGLITQYEISYQSIESSDPAVNVPGPRRTISKLRNETYHVFSNLHPGTTYLFSVRARTGKGFGQAALTEITTNISAPSFDYADMPSPLGESENTITVLLRPAQGRGAPISVYQVIVEEERARRLRREPGGQDCFPVPLTFEAALARGLVHYFGAELAASSLPEAMPFTVGDNQTYRGFWNPPLEPRKAYLIYFQAASHLKGETRLNCIRIARKAACKESKRPLEVSQRSEEMGLILGICAGGLAVLILLLGAIIVIIRKGKPVNMTKATVNYRQEKTHMMSAVDRSFTDQSTLQEDERLGLSFMDTHGYSTRGDQRSGGVTEASSLLGGSPRRPCGRKGSPYHTGQLHPAVRVADLLQHINQMKTAEGYGFKQEYESFFEGWDATKKKDKVKGSRQEPMPAYDRHRVKLHPMLGDPNADYINANYIDIRINREGYHRSNHFIATQGPKPEMVYDFWRMVWQEHCSSIVMITKLVEVGRVKCSRYWPEDSDTYGDIKIMLVKTETLAEYVVRTFALERRGYSARHEVRQFHFTAWPEHGVPYHATGLLAFIRRVKASTPPDAGPIVIHCSAGTGRTGCYIVLDVMLDMAECEGVVDIYNCVKTLCSRRVNMIQTEEQYIFIHDAILEACLCGETTIPVSEFKATYKEMIRIDPQSNSSQLREEFQTLNSVTPPLDVEECSIALLPRNRDKNRSMDVLPPDRCLPFLISTDGDSNNYINAALTDSYTRSAAFIVTLHPLQSTTPDFWRLVYDYGCTSIVMLNQLNQSNSAWPCLQYWPEPGRQQYGLMEVEFMSGTADEDLVARVFRVQNISREGHLLVRHFQFLRWSAYRDTPDSKKAFLHLLAEVDKWQAESGDGRTIVHCLNGGGRSGTFCACATVLEMIRCHNLVDVFFAAKTLRNYKPNMVETMDQYHFCYDVALEYLEGLESR

SEQ ID NO: 39843 - protein, 185 aa, Homo sapiens
MDAAEVEFLAEKELVTIIPNFSLDKIYLIGGDLGPFNPGLPVEVPLWLAINLKQRQKCRLLPPEWMDVEKLEKMRDHERKEETFTPMPSPYYMELTKLLLNHASDNIPKADEIRTLVKDMWDTRIAKLRVSADSFVRQQEAHAKLDNLTLMEINTSGTFLTQALNHMYKLRTNLQPLESTQSQDF

SEQ ID NO: 39844 - protein, 145 aa, Homo sapiens
MSTEGGGRRCQAQVSRRISFSASHRLYSKFLSDEENLKLFGKCNNPNGHGHNYKVVVTVHGEIDPATGMVMNLADLKKYMEEAIMQPLDHKNLDMDVPYFADVVSTTENVAVYIWDNLQKVLPVGVLYKVKVYETDNNIVVYKGE

SEQ ID NO: 39845 - protein, 329 aa, Homo sapiens
MVRTKTWTLKKHFVGYPTNSDFELKTAELPPLKNGEVLLEALFLTVDPYMRVAAKRLKEGDTMMGQQVAKVVESKNVALPKGTIVLASPGWTTHSISDGKDLEKLLTEWPDTIPLSLALGTVGMPGLTAYFGLLEICGVKGGETVMVNAAAGAVGSVVGQIAKLKGCKVVGAVGSDEKVAYLQKLGFDVVFNYKTVESLEETLKKASPDGYDCYFDNVGGEFSNTVIGQMKKFGRIAICGAISTYNRTGPLPPGPPPEIVIYQELRMEAFVVYRWQGDARQKALKDLLKWVLEGKIQYKEYIIEGFENMPAAFMGMLKGDNLGKTIVKA

SEQ ID NO: 39846 - protein, 301 aa, Homo sapiens
MVRTKTWTLKKHFVGYPTNSDFELKTAELPPLKNGEVLLEALFLTVDPYMRVAAKRLKEGDTMMGQQVAKVVESKNVALPKGTIVLASPGWTTHSISDGKDLEKLLTEWPDTIPLSLALGTVGMPGLTAYFGLLEICGVKGGETVMVNAAAGAVGSVVGQIAKLKGCKVVGAVGSDEKVAYLQKLGFDVVFNYKTVESLEETLKKASPDGYDCYFDNVGGEFSNTVIGQMKKFGRIAICGAISTYNRTGPLPPGPPPEIVIYQELRMEAFVVYRWQGDARQKALKDLLKWVLEIKRENEED

SEQ ID NO: 39847 - protein, 1186 aa, Homo sapiens
MSVACVLKRKAVLWQDSFSPHLKHHPQEPANPNMPVVLTSGTGSQAQPQPAANQALAAGTHSSPVPGSIGVAGRSQDDAMVDYFFQRQHGEQLGGGGSGGGGYNNSKHRWPTGDNIHAEHQVRSMDELNHDFQALALEGRAMGEQLLPGKKFWETDESSKDGPKGIFLGDQWRDSAWGTSDHSVSQPIMVQRRPGQSFHVNSEVNSVLSPRSESGGLGVSMVEYVLSSSPGDSCLRKGGFGPRDADSDENDKGEKKNKGTFDGDKLGDLKEEGDVMDKTNGLPVQNGIDADVKDFSRTPGNCQNSANEVDLLGPNQNGSEGLAQLTSTNGAKPVEDFSNMESQSVPLDPMEHVGMEPLQFDYSGTQVPVDSAAATVGLFDYNSQQQLFQRPNALAVQQLTAAQQQQYALAAAHQPHIGLAPAAFVPNPYIISAAPPGTDPYTAGLAAAATLGPAVVPHQYYGVTPWGVYPASLFQQQAAAAAAATNSANQQTTPQAQQGQQQVLRGGASQRPLTPNQNQQGQQTDPLVAAAAVNSALAFGQGLAAGMPGYPVLAPAAYYDQTGALVVNAGARNGLGAPVRLVAPAPVIISSSAAQAAVAAAAASANGAAGGLAGTTNGPFRPLGTQQPQPQPQQQPNNNLASSSFYGNNSLNSNSQSSSLFSQGSAQPANTSLGFGSSSSLGATLGSALGGFGTAVANSNTGSGSRRDSLTGSSDLYKRTSSSLTPIGHSFYNGLSFSSSPGPVGMPLPSQGPGHSQTPPPSLSSHGSSSSLNLGGLTNGSGRYISAAPGAEAKYRSASSASSLFSPSSTLFSSSRLRYGMSDVMPSGRSRLLEDFRNNRYPNLQLREIAGHIMEFSQDQHGSRFIQLKLERATPAERQLVFNEILQAAYQLMVDVFGNYVIQKFFEFGSLEQKLALAERIRGHVLSLALQMYGCRVIQKALEFIPSDQQNEMVRELDGHVLKCVKDQNGNHVVQKCIECVQPQSLQFIIDAFKGQVFALSTHPYGCRVIQRILEHCLPDQTLPILEELHQHTEQLVQDQYGNYVIQHVLEHGRPEDKSKIVAEIRGNVLVLSQHKFASNVVEKCVTHASRTERAVLIDEVCTMNDGPHSALYTMMKDQYANYVVQKMIDVAEPGQRKIVMHKIRPHIATLRKYTYGKHILAKLEKYYMKNGVDLGPICGPPNGII

SEQ ID NO: 39848 - protein, 1162 aa, Homo sapiens
MSVACVLKRKAVLWQDSFSPHLKHHPQEPANPNMPVVLTSGTGSQAQPQPAANQALAAGTHSSPVPGSIGVAGRSQDDAMVDYFFQRQHGEQLGGGGSGGGGYNNSKHRWPTGDNIHAEHQVRSMDELNHDFQALALEGRAMGEQLLPGKKFWETDESSKDGPKGIFLGDQWRDSAWGTSDHSVSQPIMVQRRPGQSFHVNSEVNSVLSPRSESGGLGVSMVEYVLSSSPGDSCLRKGGFGPRDADSDENDKGEKKNKGTFDGDKLGDLKEEGDVMDKTNGLPVQNGIDADVKDFSRTPGNCQNSANEVDLLGPNQNGSEGLAQLTSTNGAKPVEDFSNMESQSVPLDPMEHVGMEPLQFDYSGTQVPVDSAAATVGLFDYNSQQQLFQRPNALAVQQLTAAQQQQYALAAAHQPHIAGLAPAAFVPNPYIISAAPPGTDPYTAGLAAAATLGPAVVPHQYYGVTPWGVYPASLFQQQAAAAAAATNSANQQTTPQAQQGQQQVLRGGASQRPLTPNQNQQGQQTDPLVAAAAVNSALAFGQGLAAGMPGYPVLAPAAYYDQTGALVVNAGARNGLGAPVRLVAPAPVIISSSAAQAGTQQPQPQPQQQPNNNLASSSFYGNNSLNSNSQSSSLFSQGSAQPANTSLGFGSSSSLGATLGSALGGFGTAVANSNTGSGSRRDSLTGSSDLYKRTSSSLTPIGHSFYNGLSFSSSPGPVGMPLPSQGPGHSQTPPPSLSSHGSSSSLNLGGLTNGSGRYISAAPGAEAKYRSASSASSLFSPSSTLFSSSRLRYGMSDVMPSGRSRLLEDFRNNRYPNLQLREIAGHIMEFSQDQHGSRFIQLKLERATPAERQLVFNEILQAAYQLMVDVFGNYVIQKFFEFGSLEQKLALAERIRGHVLSLALQMYGCRVIQKALEFIPSDQQVINEMVRELDGHVLKCVKDQNGNHVVQKCIECVQPQSLQFIIDAFKGQVFALSTHPYGCRVIQRILEHCLPDQTLPILEELHQHTEQLVQDQYGNYVIQHVLEHGRPEDKSKIVAEIRGNVLVLSQHKFASNVVEKCVTHASRTERAVLIDEVCTMNDGPHSALYTMMKDQYANYVVQKMIDVAEPGQRKIVMHKIRPHIATLRKYTYGKHILAKLEKYYMKNGVDLGPICGPPNGII

SEQ ID NO: 39849 - protein, 1188 aa, Homo sapiens
MSVACVLKRKAVLWQDSFSPHLKHHPQEPANPNMPVVLTSGTGSQAQPQPAANQALAAGTHSSPVPGSIGVAGRSQDDAMVDYFFQRQHGEQLGGGGSGGGGYNNSKHRWPTGDNIHAEHQVRSMDELNHDFQALALEGRAMGEQLLPGKKFWETDESSKDGPKGIFLGDQWRDSAWGTSDHSVSQPIMVQRRPGQSFHVNSEVNSVLSPRSESGGLGVSMVEYVLSSSPGDSCLRKGGFGPRDADSDENDKGEKKNKGTFDGDKLGDLKEEGDVMDKTNGLPVQNGIDADVKDFSRTPGNCQNSANEVDLLGPNQNGSEGLAQLTSTNGAKPVEDFSNMESQSVPLDPMEHVGMEPLQFDYSGTQVPVDSAAATVGLFDYNSQQQLFQRPNALAVQQLTAAQQQQYALAAAHQPHIGLAPAAFVPNPYIISAAPPGTDPYTAGLAAAATLGPAVVPHQYYGVTPWGVYPASLFQQQAAAAAAATNSANQQTTPQAQQGQQQVLRGGASQRPLTPNQNQQGQQTDPLVAAAAVNSALAFGQGLAAGMPGYPVLAPAAYYDQTGALVVNAGARNGLGAPVRLVAPAPVIISSSAAQAAVAAAAASANGAAGGLAGTTNGPFRPLGTQQPQPQPQQQPNNNLASSSFYGNNSLNSNSQSSSLFSQGSAQPANTSLGFGSSSSLGATLGSALGGFGTAVANSNTGSGSRRDSLTGSSDLYKRTSSSLTPIGHSFYNGLSFSSSPGPVGMPLPSQGPGHSQTPPPSLSSHGSSSSLNLGGLTNGSGRYISAAPGAEAKYRSASSASSLFSPSSTLFSSSRLRYGMSDVMPSGRSRLLEDFRNNRYPNLQLREIAGHIMEFSQDQHGSRFIQLKLERATPAERQLVFNEILQAAYQLMVDVFGNYVIQKFFEFGSLEQKLALAERIRGHVLSLALQMYGCRVIQKALEFIPSDQQVINEMVRELDGHVLKCVKDQNGNHVVQKCIECVQPQSLQFIIDAFKGQVFALSTHPYGCRVIQRILEHCLPDQTLPILEELHQHTEQLVQDQYGNYVIQHVLEHGRPEDKSKIVAEIRGNVLVLSQHKFASNVVEKCVTHASRTERAVLIDEVCTMNDGPHSALYTMMKDQYANYVVQKMIDVAEPGQRKIVMHKIRPHIATLRKYTYGKHILAKLEKYYMKNGVDLGPICGPPNGII

SEQ ID NO: 39850 - protein, 1127 aa, Homo sapiens
MPLPPPGPGPEPIPGCTAPTQSPVGRHVVGVKGVGGMSVACVLKRKAVLWQDSFSPHLKHHPQEPANPNMPVVLTSGTGSQAQPQPAANQALAAGTHSSPVPGSIGVAGRSQDDAMVDYFFQRQHGEQLGGGGSGGGGYNNSKHRWPTGDNIHAEHQVRSMDELNHDFQALALEGRAMGEGPRDADSDENDKGEKKNKGTFDGDKLGDLKEEGDVMDKTNGLPVQNGIDADVKDFSRTPGNCQNSANEVDLLGPNQNGSEGLAQLTSTNGAKPVEDFSNMESQSVPLDPMEHVGMEPLQFDYSGTQVPVDSAAATVGLFDYNSQQQLFQRPNALAVQQLTAAQQQQYALAAAHQPHIAGLAPAAFVPNPYIISAAPPGTDPYTAGLAAAATLGPAVVPHQYYGVTPWGVYPASLFQQQAAAAAAATNSANQQTTPQAQQGQQQVLRGGASQRPLTPNQNQQGQQTDPLVAAAAVNSALAFGQGLAAGMPGYPVLAPAAYYDQTGALVVNAGARNGLGAPVRLVAPAPVIISSSAAQAAVAAAAASANGAAGGLAGTTNGPFRPLGTQQPQPQPQQQPNNNLASSSFYGNNSLNSNSQSSSLFSQGSAQPANTSLGFGSSSSLGATLGSALGGFGTAVANSNTGSGSRRDSLTGSSDLYKRTSSSLTPIGHSFYNGLSFSSSPGPVGMPLPSQGPGHSQTPPPSLSSHGSSSSLNLGGLTNGSGRYISAAPGAEAKYRSASSASSLFSPSSTLFSSSRLRYGMSDVMPSGRSRLLEDFRNNRYPNLQLREIAGHIMEFSQDQHGSRFIQLKLERATPAERQLVFNEILQAAYQLMVDVFGNYVIQKFFEFGSLEQKLALAERIRGHVLSLALQMYGCRVIQKALEFIPSDQQNEMVRELDGHVLKCVKDQNGNHVVQKCIECVQPQSLQFIIDAFKGQVFALSTHPYGCRVIQRILEHCLPDQTLPILEELHQHTEQLVQDQYGNYVIQHVLEHGRPEDKSKIVAEIRGNVLVLSQHKFASNVVEKCVTHASRTERAVLIDEVCTMNDGPHSALYTMMKDQYANYVVQKMIDVAEPGQRKIVMHKIRPHIATLRKYTYGKHILAKLEKYYMKNGVDLGPICGPPNGII

SEQ ID NO: 39851 - protein, 111 aa, Homo sapiens
MAGKQAVSASGKWLDGIRKWYYNAAGFNKLGLMRDDTIYEDEDVKEAIRRLPENLYNDRMFRIKRALDLNLKHQILPKEQWTKYEEENFYLEPYLKEVIRERKEREEWAKK

SEQ ID NO: 39852 - protein, 140 aa, Homo sapiens
MAGKQAVSASGKWLDGIRKWYYNAAGFNKLGLMRDDTIYEDEDVKEAIRRLPENLYNDRMFRIKRALDLNLKHQILPKEQWTKYEEVFAVPALHSASYLDEKISPLSVPPDPKKSFCEANSHPLNCIETRQRKISTLNRI

SEQ ID NO: 39853 - protein, 97 aa, Homo sapiens
MVFVRRPWPALTTVLLALLVCLGALVDAYPIKPEAPREDASPEELNRYYASLRHYLNLVTRQRYGKRDGPDTLLSKTFFPDGEDRPVRSRSEGPDLW

SEQ ID NO: 39854 - protein, 90 aa, Homo sapiens
MVFVRRPWPALTTVLLALLVCLGALVDAYPIKPEAPREDASPEELNRYYASLRHYLNLVTRQRYGKRDGPDTLLSKTFFPDGEDRPVRSR

SEQ ID NO: 39855 - protein, 439 aa, Homo sapiens
MASDDFDIVIEAMLEAPYKKEEDEQQRKEVKKDYPSNTTSSTSNSGNETSGSSTIGETSKKKRSRSHNKSRDRKRSRSRDRDRYRRRNSRSRSPGRQCRHRSRSWDRRHGSESRSRDHRREDRVHYRSPPLATGYRYGHSKSPHFREKSPVREPVDNLSPEERDARTVFCMQLAARIRPRDLEDFFSAVGKVRDVRIISDRNSRRSKGIAYVEFCEIQSVPLAIGLTGQRLLGVPIIVQASQAEKNRLAAMANNLQKGNGGPMRLYVGSLHFNITEDMLRGIFEPFGKIDNIVLMKDSDTGRSKGYGFITFSDSECARRALEQLNGFELAGRPMRVGHVTERLDGGTDITFPDGDQELDLGSAGGRFQLMAKLAEGAGIQLPSTAAAAAAAAAQAAALQLNGAVPLGALNPAALTALSPALNLASQCFQLSSLFTPQTM

SEQ ID NO: 39856 - protein, 423 aa, Homo sapiens
MASDDFDIVIEAMLEAPYKKEEDEQQRKEVKKDYPSNTTSSTSNSGNETSGSSTIGETSNRSRDRDRYRRRNSRSRSPGRQCRHRSRSWDRRHGSESRSRDHRREDRVHYRSPPLATGYRYGHSKSPHFREKSPVREPVDNLSPEERDARTVFCMQLAARIRPRDLEDFFSAVGKVRDVRIISDRNSRRSKGIAYVEFCEIQSVPLAIGLTGQRLLGVPIIVQASQAEKNRLAAMANNLQKGNGGPMRLYVGSLHFNITEDMLRGIFEPFGKIDNIVLMKDSDTGRSKGYGFITFSDSECARRALEQLNGFELAGRPMRVGHVTERLDGGTDITFPDGDQELDLGSAGGRFQLMAKLAEGAGIQLPSTAAAAAAAAAQAAALQLNGAVPLGALNPAALTALSPALNLASQCFQLSSLFTPQTM

SEQ ID NO: 39857 - protein, 319 aa, Homo sapiens
MASDDFDIVIEAMLEAPYKKEEDEQQRKEVKKDYPSNTTSSTSNSGNETSGSSTIGETSKKKRSRSHNKSRDRKRSRSRDRDRYRRRNSRSRSPGRQCRHRSRSWDRRHGSESRSRDHRREDRVHYRSPPLATGYRYGHSKSPHFREKSPVREPVDNLSPEERDARTVFCMQLAARIRPRDLEDFFSAVGKVRDVRIISDRNSRRSKGIAYVEFCEIQSVPLAIGLTGQRLLGVPIIVQASQAEKNRLAAMANNLQKGNGGPMRLYVGSLHFNITEDMLRGIFEPFGKIDNIVLMKDSDTGRSKGYGFITLHPPPLGTV

SEQ ID NO: 39858 - protein, 405 aa, Homo sapiens
MASDDFDIVIEAMLEAPYKKEEDEQQRKEVKKDYPSNTTSSTSNSGNETSGSSTIGETSNRSRDRDRYRRRNSRSRSPGRQCRHRSRSWDRRHGSESRSRDHRREDRVHYRSPPLATGEPVDNLSPEERDARTVFCMQLAARIRPRDLEDFFSAVGKVRDVRIISDRNSRRSKGIAYVEFCEIQSVPLAIGLTGQRLLGVPIIVQASQAEKNRLAAMANNLQKGNGGPMRLYVGSLHFNITEDMLRGIFEPFGKIDNIVLMKDSDTGRSKGYGFITFSDSECARRALEQLNGFELAGRPMRVGHVTERLDGGTDITFPDGDQELDLGSAGGRFQLMAKLAEGAGIQLPSTAAAAAAAAAQAAALQLNGAVPLGALNPAALTALSPALNLASQCFQLSSLFTPQTM

SEQ ID NO: 39859 - protein, 417 aa, Homo sapiens
MSNKGKKLKRIILAIPPAAPATVAMRPVEAAPSGRQARRRGVGAIIKAGIESAVVVEIGIGIDGEIVGAEVQVGSVVTRSRSWDRRHGSESRSRDHRREDRVHYRSPPLATGYRYGHSKSPHFREKSPVREPVDNLSPEERDARTVFCMQLAARIRPRDLEDFFSAVGKVRDVRIISDRNSRRSKGIAYVEFCEIQSVPLAIGLTGQRLLGVPIIVQASQAEKNRLAAMANNLQKGNGGPMRLYVGSLHFNITEDMLRGIFEPFGKIDNIVLMKDSDTGRSKGYGFITFSDSECARRALEQLNGFELAGRPMRVGHVTERLDGGTDITFPDGDQELDLGSAGGRFQLMAKLAEGAGIQLPSTAAAAAAAAAQAAALQLNGAVPLGALNPAALTALSPALNLASQCFQLSSLFTPQTM

SEQ ID NO: 39860 - protein, 322 aa, Homo sapiens [sequence omitted]

SEQ ID NO: 39861 - protein, 286 aa, Homo sapiens
MAASGEPQRQWQEEVAAVVVVGSCMTDLVSLTSRLPKTGETIHGHKFFIGFGGKGANQCVQAARLGAMTSMVCKVGKDSFGNDYIENLKQNDISTEFTYQTKDAATGTASIIVNNEGQNIIVIVAGANLLLNTEDLRAAANVISRAKVMVCQLEITPATSLEALTMARRSGVKTLFNPAPAIADLDPQFYTLSDVFCCNESEAEILTGLTVGSAADAGEAALVLLKRGCQVVIITLGAEGCVVLSQTEPEPKHIPTEKVKAVDTTCRPGSRPKSEAASVKKQKHYK

SEQ ID NO: 39862 - protein, 317 aa, Homo sapiens
MRLGPRTAALGLLLLCAAAAGAGKAEELHYPLGERRSDYDREALLGVQEDVDEYVKLGHEEQQKRLQAIIKKIDLDSDGFLTESELSSWIQMSFKHYAMQEAKQQFVEYDKNSDDTVTWDEYNIQMYDRVIDFDENTALDDAEEESFRKLHLKDKKRFEKANQDSGPGLSLEEFIAFEHPEEVDYMTEFVIQEALEEHDKNGDGFVSLEEFLGDYRWDPTANEDPEWILVEKDRFVNDYDKDNDGRLDPQELLPWVVPNNQGIAQEEALHLIDEMDLNGDKKLSEEEILENPDLFLTSEATDYGRQLHDDYFYHDEL

SEQ ID NO: 39863 - protein, 335 aa, Homo sapiens
MRLGPRTAALGLLLLCAAAAGAGKAEELHYPLGERRSDYDREALLGVQEDVDEYVKLGHEEQQKRLQAIIKKIDLDSDGFLTESELSSWIQMSFKHYAMQEAKQQFVEYDKNSDDTVTWDEYNIQMYDRVIDFDENTALDDAEEESFRKEFAICKKQSFCFWLLRFNLHLKDKKRFEKANQDSGPGLSLEEFIAFEHPEEVDYMTEFVIQEALEEHDKNGDGFVSLEEFLGDYRWDPTANEDPEWILVEKDRFVNDYDKDNDGRLDPQELLPWVVPNNQGIAQEEALHLIDEMDLNGDKKLSEEEILENPDLFLTSEATDYGRQLHDDYFYHDEL

SEQ ID NO: 39864 - protein, 254 aa, Homo sapiens
MSAGGDFGNPLRKFKLVFLGEQSVAKTSLITRFRYDSFDNTYQAIIGIDFLSKTMYLEDGTIGLRLWDTAGQERLRSLIPRYIRDSAAAVVVYDITNVNSFQQTTKWIDDVRTERGSDVIITLVGNRTDLADKRQVSVEEGERKAKGLNVTFIETRAKAGYNVKQLFRRVAAALPGMESTQDGSREDMSDIKLEKPQEQTVSEGGCSCYSPMSSSTLPQKPPYSFIDCSVNIGLNLFPSLITFCNSSLLPVSWR

SEQ ID NO: 39865 - protein, 254 aa, Homo sapiens
MSAGGDFGNPLRKFKLVFLGEQSVAKTSLITRFRYDSFDNTYQAIIGIDFLSKTMYLEDGTIGLRLWDTAGQERLRSLIPRYIRDSAAAVVVYDITNVNSFQQTTKWIDDVRTEGGSDVIITLVGNKTDLADKRQVSIEEGERKAKGLNVTFIETRAKAGYNVKQLFRRVAAALPGMESTQDGSREDMSDIKLEKPQEQTVSEGGCSCYSPMSSSTLPQKPPYSFIDCSVNIGLNLFPSLITFCNSSLLPVSWR

SEQ ID NO: 39866 - protein, 207 aa, Homo sapiens
MTSRKKVLLKVIILGDSGVGKTSLMNQYVNKKFSNQYKATIGADFLTKEVMVDDRLVTMQIWDTAGQERFQSLGVAFYRGADCCVLVFDVTAPNTFKTLDSWRDEFLIQASPRDPENFPFVVLGNKIDLENRQVATKRAQAWCYSKNNIPYFETSAKEAINVEQAFQTIARNALKQETEVELYNEFPEPIKLDKNDRAKASAESCSC

SEQ ID NO: 39867 - protein, 496 aa, Homo sapiens
MVEADHPGKLFIGGLNRETNEKMLKAVFGKHGPISEVLLIKDRTSKSRGFAFITFENPADAKNAAKDMNGTSLHGKAIKVEQAKKPSFQSGGRRRPPASSRNRSPSGSLRSARGSSGGTRGWLPSHEGHLDDGGYTPDLKMSYSRGLIPVKRGPSSRSGGPPPKKSAPSAVARSNSWMGSQGPMSQRRENYGVPPRRATISSWRNDRMSTRHDGYATNDGNHPSCQETRDYAPPSRGYAYRDNGHSNRDEHSSRGYRNHRSSRETRDYAPPSRGHAYRDYGHSRRDESYSRGYRNHRSSRETREYAPPSRGHGYRDYGHSRRHESYSRGYRNHPSSRETRDYAPPHRDYAYRDYGHSSWDEHSSRGYSYHDGYGEALGRDHSEHLSGSSYRDALQRYGTSHGAPPARGPRMSYGGSTCHAYSNTRDRYGRSWESYSSCGDFHYCDREHVCRKDQRNPPSLGRVLPDPREAYGSSSYVASIVDGGESRSEKGDSSRY

SEQ ID NO: 39868 - protein, 419 aa, Homo sapiens
MVEADHPGKLFIGGLNRETNEKMLKAVFGKHGPISEVLLIKDRTSKSRGFAFITFENPADAKNAAKDMNGTSLHGKAIKVEQAKKPSFQSGGRRRPPASSRNRSPSGSLRSARGSSGGTRGWLPSHEGHLDDGGYTPDLKMSYSRGLIPVKRGPSSRSGGPPPKKSAPSAVARSNSWMGSQGPMSQRRENYGVPPRRATISSWRNDRMSTRHDGYATNDGNHPSCQETRDYAPPSRGYAYRDNGHSNRDEHSSRGYRNHRSSRETRDYAPPSRGHAYRDYGHSRRDESYSRGYRNHRSSRETREYAPPSRGHGYRDYGHSRRHESYSRGYRNHPSSRETRDYAPPHRDYAYRDYGHSSWDEHSSRGYSYHDGYGEALGRDHSEHLSGSSYRDALQRDLSWCTTCKRASDVLWWKHLPRI

SEQ ID NO: 39869 - protein, 235 aa, Homo sapiens
MAREECKALLDGLNKTTACYHHLVLTVGGSADSQNLRQELQKTRQKAQELAVSTCARLTAVLRDRGLAADERAEFERLWVAFSGCLDLLEADMRRALELGAAFPLHAPRRPLVRTGVAGASSGVAARALSTRSLRLEAEGDFDVADLRELEREVLQVGEMIDNMEMKVNVPRWTVQARQAAGAELLSTVSAGPSSVVSLQERGGGCDPRKALAAILFGAVLLAAVALAVCVAKLS

SEQ ID NO: 39870 - protein, 1139 aa, Homo sapiens
MPSGGDQSPPPPPPPPAAAASDEEEEDDGEAEDAAPPAESPTPQIQQRFDELCSRLNMDEAARAEAWDSYRSMSESYTLEGNDLHWLACALYVACRKSVPTVSKGTVEGNYVSLTRILKCSEQSLIEFFNKMKKWEDMANLPPHFRERTERLERNFTVSAVIFKKYEPIFQDIFKYPQEEQPRQQRGRKQRRQPCTVSEIFHFCWVLFIYAKGNFPMISDDLVNSYHLLLCALDLVYGNALQCSNRKELVNPNFKGLSEDFHAKDSKPSSDPPCIIEKLCSLHDGLVLEAKGIKEHFWKPYIRKLYEKKLLKGKEENLTGFLEPGNFGESFKAINKAYEEYVLSVGNLDERIFLGEDAEEEIGTLSRCLNAGSGTETAERVQMKNILQQHFDKSKALRISTPLTGVRYIKENSPCVTPVSTATHSLSRLHTMLTGLRNAPSEKLEQILRTCSRDPTQAIANRLKEMFEIYSQHFQPDEDFSNCAKEIASKHFRFAEMLYYKVLESVIEQEQKRLGDMDLSGILEQDAFHRSLLACCLEVVTFSYKPPGNFPFITEIFDVPLYHFYKVIEVFIRAEDGLCREVVKHLNQIEEQILDHLAWKPESPLWEKIRDNENRVPTCEEVMPPQNLERADEICIAGSPLTPRRVTEVRADTGGLGRSITSPTTLYDRYSSPPASTTRRRLFVENDSPSDGGTPGRMPPQPLVNAVPVQNVSGETVSVTPVPGQTLVTMATATVTANNGQTVTIPVQGIANENGGITFFPVQVNVGGQAQAVTGSIQPLSAQALAGSLSSQQVTGTTLQVPGQVAIQQISPGGQQQKQGQSVTSSSNRPRKTSSLSLFFRKVYHLAAVRLRDLCAKLDISDELRKKIWTCFEFSIIQCPELMMDRHLDQLLMCAIYVMAKVTKEDKSFQNIMRCYRTQPQARSQVYRSVLIKGKRKRRNSGSSDSRSHQNSPTELNKDRTSRDSSPVMRSSSTLPVPQPSSAPPTPTRLTGANSDMEEEERGDLIQFYNNIYIKQIKTFAMKYSQANMDAPPLSPYPFVRTGSPRRIQLSQNHPVYISPHKNETMLSPREKIFYYFSNSPSKRLREINSMIRTGETPTKKRGILLEDGSESPAKRICPENHSALLRRLQDVANDRGSH

SEQ ID NO: 39871 - protein, 518 aa, Homo sapiens
MISDDLVNSYHLLLCALDLVYGNALQCSNRKELVNPNFKGLSEDFHAKDSKPSSDPPCIIEKLCSLHDGLVLEAKGIKEHFWKPYIRKLYEKKLLKGKEENLTGFLEPGNFGESFKAINKAYEEYVLSVGNLDERIFLGEDAEEEIGTLSRCLNAGSGTETAERVQMKNILQQHFDKSKALRISTPLTGVRYIKENSPCVTPVSTATHSLSRLHTMLTGLRNAPSEKLEQILRTCSRDPTQAIANRLKEMFEIYSQHFQPDEDFSNCAKEIASKHFRFAEMLYYKVLESVIEQEQKRLGDMDLSGILEQDAFHRSLLACCLEVVTFSYKPPGNFPFITEIFDVPLYHFYKVIEVFIRAEDGLCREVVKHLNQIEEQILDHLAWKPESPLWEKIRDNENRVPTCEEVMPPQNLERADEICIAGSPRRIQLSQNHPVYISPHKNETMLSPREKIFYYFSNSPSKRLREINSMIRTGETPTKKRGILLEDGSESPAKRICPENHSALLRRLQDVANDRGSH

SEQ ID NO: 39872 - protein, 420 aa, Homo sapiens
MLPGLRRLLQAPASACLLLMLLALPLAAPSCPMLCTCYSSPPTVSCQANNFSSVPLSLPPSTQRLFLQNNLIRTLRPGTFGSNLLTLWLFSNNLSTIYPGTFRHLQALEELDLGDNRHLRSLEPDTFQGLERLQSLHLYRCQLSSLPGNIFRGLVSLQYLYLQENSLLHLQDDLFADLANLSHLFLHGNRLRLLTEHVFRGLGSLDRLLLHGNRLQGVHRAAFRGLSRLTILYLFNNSLASLPGEALADLPSLEFLRLNANPWACDCRARPLWAWFQRARVSSSDVTCATPPERQGRDLRALREADFQACPPAAPTRPGSRARGNSSSNHLYGVAEAGAPPADPSTLYRDLPAEDSRGRQGGDAPTEDDYWGGYGGEDQRGEQMCPGAACQAPPDSRGPALSAGLPSPLLCLLLLVPHHL

SEQ ID NO: 39873 - protein, 193 aa, Homo sapiens
MLPGLRRLLQAPASACLLLMLLALPLAAPSCPMLCTCYSSPPTVSCQANNFSSVPLSLPPSTQRLFLQNNLIRTLRPGTFGSNLLTLWLFSNNLSTIYPGTFRHLQALEELDLGDNRHLRSLEPDTFQGLERLQSLHLYRCQLSSLPGNIFRGLVSLQYLYLQENSLLHLQGPLPKGLCSCFSHPPSSLPTSR

SEQ ID NO: 39874 - protein, 384 aa, Homo sapiens
MGSKKLKRVGLSQELCDRLSRHQILTCQDFLCLSPLELMKVTGLSYRGVHELLCMVSRACAPKMQTAYGIKAQRSADFSPAFLSTTLSALDEALHGGVACGSLTEITGPPGCGKTQFCIMMSILATLPTNMGGLEGAVVYIDTESAFSAERLVEIAESRFPRYFNTEEKLLLTSSKVHLYRELTCDEVLQRIESLEEEIISKGIKLVILDSVASVVRKEFDAQLQGNLKERNKFLAREASSLKYLAEEFSIPVILTNQITTHLSGALASQADLVSPADDLSLSEGTSGSSCVIAALGNTWSHSVNTRLILQYLDSERRQILIAKSPLAPFTSFVYTIKEEGLVLQETTFCSVTQAELNWAPEILPPQPPEQLGLQMCHHTQLIF

SEQ ID NO: 39875 - protein, 350 aa, Homo sapiens
MGSKKLKRVGLSQELCDRLSRHQILTCQDFLCLSPLELMKVTGLSYRGVHELLCMVSRACAPKMQTAYGIKAQRSADFSPAFLSTTLSALDEALHGGVACGSLTEITGPPGCGKTQFCIMMSILATLPTNMGGLEGAVVYIDTESAFSAERLVEIAESRFPRYFNTEEKLLLTSSKVHLYRELTCDEVLQRIESLEEEIISKGIKLVILDSVASVVRKEFDAQLQGNLKERNKFLAREASSLKYLAEEFSIPVILTNQITTHLSGALASQADLVSPADDLSLSEGTSGSSCVIAALGNTWSHSVNTRLILQYLDSERRQILIAKSPLAPFTSFVYTIKEEGLVLQAYGNS

SEQ ID NO: 39876 - protein, 350 aa, Homo sapiens
MGSKKLKRVGLSQELCDRLSRHQILTCQDFLCLSPLELMKVTGLSYRGVHELLCMVSRACAPKMQTAYGIKAQRSADFSPAFLSTTLSALDEALHGGVACGSLTEITGPPGCGKTQFCIMMSILATLPTNMGGLEGAVVYIDTESAFSAERLVEIAESRFPRYFNTEEKLLLTSSKVHLYRELTCDEVLQRIESLEEEIISKGIKLVILDSVASVVRKEFDAQLQGNLKERNKFLAREASSLKYLAEEFSIPVILTNQITTHLSGALASQADLVSPADDLSLSEGTSGSSCVIAALGNTWSHSVNTRLILQYLDSERRQILIAKSPLAPFTSFVYTIKEEGLVLQGQEKP

SEQ ID NO: 39877 - protein, 366 aa, Homo sapiens
MGSKKLKRVGLSQELCDRLSRHQILTCQDFLCLSPLELMKVTGLSYRGVHELLCMVSRACAPKMQTAYGIKAQRSADFSPAFLSTTLSALDEALHGGVACGSLTEITGPPGCGKTQFCIMMSILATLPTNMGGLEGAVVYIDTESAFSAERLVEIAESRFPRYFNTEEKLLLTSSKVHLYRELTCDEVLQRIESLEEEIISKGIKLVILDSVASVVRKEFDAQLQGNLKERNKFLAREASSLKYLAEEFSIPVILTNQITTHLSGALASQADLVSPADDLSLSEGTSGSSCVIAALGNTWSHSVNTRLILQYLDSERRQILIAKSPLAPFTSFVYTIKEEGLVLQEFWHICISGFSIQNRLKENES

SEQ ID NO: 39878 - protein, 231 aa, Homo sapiens
MMSILATLPTNMGGLEGAVVYIDTESAFSAERLVEIAESRFPRYFNTEEKLLLTSSKVHLYRELTCDEVLQRIESLEEEIISKGIKLVILDSVASVVRKEFDAQLQGNLKERNKFLAREASSLKYLAEEFSIPVILTNQITTHLSGALASQADLVSPADDLSLSEGTSGSSCVIAALGNTWSHSVNTRLILQYLDSERRQILIAKSPLAPFTSFVYTIKEEGLVLQGQEKP

SEQ ID NO: 39879 - protein, 206 aa, Homo sapiens
MDEDVLTTLKILIIGESGVGKSSLLLRFTDDTFDPELAATIGVDFKVKTISVDGNKAKLAIWDTAGQERFRTLTPSYYRGAQGVILVYDVTRRDTFVKLDNWLNELETYCTRNDIVNMLVGNKIDKENREVDRNEGLKFARKHSMLFIEASAKTCDGVQCAFEELVEKIIQTPGLWESENQNKGVKLSHREEGQGGGACGGYCSVL

SEQ ID NO: 39880 - protein, 235 aa, Homo sapiens
MDEDVLTTLKILIIGESGVGKSSLLLRFTDDTFDPELAATIGVDFKVKTISVDGNKAKLAIWVTLHQQTANFFLKSQIGNSPILKWAMWQYDTAGQERFRTLTPSYYRGAQGVILVYDVTRRDTFVKLDNWLNELETYCTRNDIVNMLVGNKIDKENREVDRNEGLKFARKHSMLFIEASAKTCDGVQCAFEELVEKIIQTPGLWESENQNKGVKLSHREEGQGGGACGGYCSVL

SEQ ID NO: 39881 - protein, 142 aa, Homo sapiens
MDEDVLTTLKILIIGESGVGKSSLLLRFTDDTFDPELAATIGVDFKVKTISVDGNKAKLAIWENREVDRNEGLKFARKHSMLFIEASAKTCDGVQCAFEELVEKIIQTPGLWESENQNKGVKLSHREEGQGGGACGGYCSVL

SEQ ID NO: 39882 - protein, 192 aa, Homo sapiens
MQAIKCVVVGDGAVGKTCLLISYTTNAFPGEYIPTVFDNYSANVMVDGKPVNLGLWDTAGQEDYDRLRPLSYPQTDVFLICFSLVSPASFENVRAKWYPEVRHHCPHTPILLVGTKLDLRDDKDTIERLRDKKLAPITYPQGLAMAREIGSVKYLECSALTQRGLKTVFDEAIRAVLCPPPVKKPGKKCTVF

SEQ ID NO: 39883 - protein, 216 aa, Homo sapiens
MTYAYLFKYIIIGDTGVGKSCLLLQFTDKRFQPVHDLTIGVEFGARMVNIDGKQIKLQIWDTAGQESFRSITRSYYRGAAGALLVYDITRRETFNHLTSWLEDARQHSSSNMVIMLIGNKSDLESRRDVKREEGEAFAREHGLIFMETSAKTACNVEEAFINTAKEIYRKIQQGLFDVHNEANGIKIGPQQSISTSVGPSASQRNSRDIGSNSGCC

SEQ ID NO: 39884 - protein, 151 aa, Homo sapiens
MENKSNCKSGIRGAAGALLVYDITRRETFNHLTSWLEDARQHSSSNMVIMLIGNKSDLESRRDVKREEGEAFAREHGLIFMETSAKTACNVEEAFINTAKEIYRKIQQGLFDVHNEANGIKIGPQQSISTSVGPSASQRNSRDIGSNSGCC

SEQ ID NO: 39885 - protein, 856 aa, Homo sapiens
MASADKNGGSVSSVSSSRLQSRKPPNLSITIPPPEKETQAPGEQDSMLPEGFQNRRLKKSQPRTWAAHTTACPPSFLPKRKNPAYLKSVSLQEPRSRWQESSEKRPGFRRQASLSQSIRKGAAQWFGVSGDWEGQRQQWQRRSLHHCSMRYGRLKASCQRDLELPSQEAPSFQGTESPKPCKMPKIVDPLARGRAFRHPEEMDRPHAPHPPLTPGVLSLTSFTSVRSGYSHLPRRKRMSVAHMSLQAAAALLKGRSVLDATGQRCRVVKRSFAFPSFLEEDVVDGADTFDSSFFSKEEMSSMPDDVFESPPLSASYFRGIPHSASPVSPDGVQIPLKEYGRAPVPGPRRGKRIASKVKHFAFDRKKRHYGLGVVGNWLNRSYRRSISSTVQRQLESFDSHRPYFTYWLTFVHVIITLLVICTYGIAPVGFAQHVTTQLVLRNKGVYESVKYIQQENFWVGPSSIDLIHLGAKFSPCIRKDGQIEQLVLRERDLERDSGCCVQNDHSGCIQTQRKDCSETLATFVKWQDDTGPPMDKSDLGQKRTSGAVCHQDPRTCEEPASSGAHIWPDDITKWPICTEQARSNHTGFLHMDCEIKGRPCCIGTKGSCEITTREYCEFMHGYFHEEATLCSQVHCLDKVCGLLPFLNPEVPDQFYRLWLSLFLHAGVVHCLVSVVFQMTILRDLEKLAGWHRIAIIFILSGITGNLASAIFLPYRAEVGPAGSQFGLLACLFVELFQSWPLLERPWKAFLNLSAIVLFLFICGLLPWIDNIAHIFGFLSGLLLAFAFLPYITFGTSDKYRKRALILVSLLAFAGLFAALVLWLYIYPINWPWIEHLTCFPFTSRFCEKYELDQVLH

SEQ ID NO: 39886 - protein, 827 aa, Homo sapiens
MASADKNGGSVSSVSSSRLQSRKPPNLSITIPPPEKETQAPGEQDSMLPERKNPAYLKSVSLQEPRSRWQESSEKRPGFRRQASLSQSIRKGAAQWFGVSGDWEGQRQQWQRRSLHHCSMRYGRLKASCQRDLELPSQEAPSFQGTESPKPCKMPKIVDPLARGRAFRHPEEMDRPHAPHPPLTPGVLSLTSFTSVRSGYSHLPRRKRMSVAHMSLQAAAALLKGRSVLDATGQRCRVVKRSFAFPSFLEEDVVDGADTFDSSFFSKEEMSSMPDDVFESPPLSASYFRGIPHSASPVSPDGVQIPLKEYGRAPVPGPRRGKRIASKVKHFAFDRKKRHYGLGVVGNWLNRSYRRSISSTVQRQLESFDSHRPYFTYWLTFVHVIITLLVICTYGIAPVGFAQHVTTQLVLRNKGVYESVKYIQQENFWVGPSSIDLIHLGAKFSPCIRKDGQIEQLVLRERDLERDSGCCVQNDHSGCIQTQRKDCSETLATFVKWQDDTGPPMDKSDLGQKRTSGAVCHQDPRTCEEPASSGAHIWPDDITKWPICTEQARSNHTGFLHMDCEIKGRPCCIGTKGSCEITTREYCEFMHGYFHEEATLCSQVHCLDKVCGLLPFLNPEVPDQFYRLWLSLFLHAGVVHCLVSVVFQMTILRDLEKLAGWHRIAIIFILSGITGNLASAIFLPYRAEVGPAGSQFGLLACLFVELFQSWPLLERPWKAFLNLSAIVLFLFICGLLPWIDNIAHIFGFLSGLLLAFAFLPYITFGTSDKYRKRALILVSLLAFAGLFAALVLWLYIYPINWPWIEHLTCFPFTSRFCEKYELDQVLH

SEQ ID NO: 39887 - protein, 211 aa, Homo sapiens
MDAPGALAQTAAPGPGRKELKIVIVGDGGCGKTSLLMVYSQGSFPEHYAPSVFEKYTASVTVGSKEVTLNLYDTAGQEDYDRLRPLSYQNTHLVLICYDVMNPTSYDNVLIKWFPEVTHFCRGIPMVLIGCKTDLRKDKEQLRKLRAAQLEPITYMQGLSACEQIRAALYLECSAKFRENVEDVFREAAKVALSALKKAQRQKKRRLCLLL

SEQ ID NO: 39888 - protein, 170 aa, Homo sapiens
MDAPGALAQTAAPGPGRKELKIVIVGDGGCGKTSLLMVYSQGSFPEHYAPSVFEKYTASVTVGSKEVTLNLYDTAGQEDYDRLRPLSYQNTHLVLICYDVMNPTSYDNVLIKWFPEVTHFCRGIPMVLIGCKTDLRKDKEQLRKLRAAQLEPITYMQVGRGQDPGAQPWL

SEQ ID NO: 39889 - protein, 445 aa, Homo sapiens
MNRHLCVWLFRHPSLNGYLQCHIQLHSHQFRQIHLDTRLQVFRQNRNCILHLLSKNWSRRYCHQDTKMLWKHKALQKYMENLSKEYQTLEQCLQHIPVNEENRRSLNRRHAELAPLAAIYQEIQETEQAIEELESMCKSLNKQDEKQLQELALEERQTIDQKINMLYNELFQSLVPKEKYDKNDVILEVTAGRTTGGDICQQFTREIFDMYQNYSCYKHWQFELLNYTPADYGGLHHAAARISGDGVYKHLKYEGGIHRVQRIPEVGLSSRMQRIHTGTMSVIVLPQPDEVDVKLDPKDLRIDTFRAKGAGGQHVNKTDSAVRLVHIPTGLVVECQQERSQIKNKEIAFRVLRARLYQQIIEKDKRQQQSARKLQVGTRAQSERIRTYNFTQDRVSDHRIAYEVRDIKEFLCGGKGLDQLIQRLLQSADEEAIAELLDEHLKSAK

SEQ ID NO: 39890 - protein, 468 aa, Homo sapiens
MGNGEVVLFSDAEMNRHLCVWLFRHPSLNGYLQCHIQLHSHQFRQIHLDTRLQVFRQNRNCILHLLSKNWSRRYCHQDTKMLWKHKALQKYMENLSKEYQTLEQCLQHIPVNEENRRSLNRRHAELAPLAAIYQEIQETEQAIEELESMCKSLNKQDEKQLQELALEERQTIDQKINMLYNELFQSLVPKEKYDKNDVILEVTAGRTTGGDICQQFTREIFDMYQNYSCYKHWQFELLNYTPADYGGLHHAAARISGDGVYKHLKYEGGIHRVQRIPEVGLSSRMQRIHTGTMSVIVLPQPDEVDVKLDPKDLRIDTFRAKGAGGQHVNKTDSAVRLVHIPTGLVVECQQERSQIKNKEIAFRVLRARLYQQIIEKDKRQQQSARKLQVGTRAQSERIRTYNFTQDRVSDHRIAYEVRDIKAQSHSTGGSRDPAHSTFLSLDSVRSPGILIMTSSVRNFYVVGRAWIS

SEQ ID NO: 39891 - protein, 266 aa, Homo sapiens
MMKTLSSGNCTLSVPAKNSYRMVVLGASRVGKSSIVSRFLNGRFEDQYTPTIEDFHRKVYNIRGDMYQLDILDTSGNHPFPAMRRLSILTGDVFILVFSLDNRESFDEVKRLQKQILEVKSCLKNKTKEAAELPMVICGNKNDHGELCRQVPTTEAELLVSGDENCAYFEVSAKKNTNVDEMFYVLFSMAKLPHEMSPALHRKISVQYGDAFHPRPFCMRRVKEMDAYGMVSPFARRPSVNSDLKYIKAKVLREGQARERDKCTIQ

SEQ ID NO: 39892 - protein, 420 aa, Homo sapiens
MWWRDLTRLRLWLKREAIPGEGRKAAKVNAGVGEKGIYTASSRGGPPSARSKAVTVVAEGAASRSWLSMDAPELGPGLVERLEQLATCPLCGGSFEDPVLLACEHSFCRACLARRWGTPPATGTEASPTACPCCGLPCPRRSLRSNVRLAVEVRISRELREKLAEPGARAGRRRGGRIPTMGCLDLPGEDMRKTWRRFEVPTSKSSNSEDDLPEDYPVVKKMLHRLTADLTLDPGTAHRRLLISADRRSVQLAPPGTPAPPDGPKRFDQLPAVLGAQGFGAGRHCWEVETADAASCRDSSGEDADDEESHYAVGAAGESVQRKGCVRLCPAGAVWAVEGRGGRLWALTAPEPTLLGGVEPPPRRIRVDLDWERGRVAFYDGRSLDLLYAFQAPGPLGERIFPLFCTCDPRAPLRIVPAES

SEQ ID NO: 39893 - protein, 354 aa, Homo sapiens
MWWRDLTRLRLWLKREAIPGEGRKAAKVNAGVGEKGIYTASSRGGPPSARSKAVTVVAEGAASRSWLSMDAPELGPGLVERLEQLATCPLCGGSFEDPVLLACEHSFCRACLARRWGTPPATGTEASPTACPCCGLPCPRRSLRSNVRLAVEVRISRELREKLAEPGARAGRRRGGRIPTMGCLDLPGEDMRKTWRRFEVPTSKSSNSEDDLPEDYPVVKKMLHRLTADLTLDPGTAHRRLLISADRRSVQLAPPGTPAPPDGPKRFDQLPAVLGAQGFGAGRHCWEVETADAASCRDSSGEDADDEESHYAVGAAGESVQRKGCAPGPLGERIFPLFCTCDPRAPLRIVPAES

SEQ ID NO: 39894 - protein, 251 aa, Homo sapiens
MWWRDLTRLRLWLKREAIPGEGRKAAKVNAGVGEKGIYTASSRGGPPSARSKAVTVVAEGAASRSWLSMDAPELGPGLVERLEQLATCPLCGGSFEDPVLLACEHSFCRACLARRWGTPPATGTEASPTACPCCGLPCPRRSLRSNVRLAVEVRISRELLFGGGIPHSFLGTHSHAHCRSINSNPHFRPKIMRPHLVSTFPRPCSKPNPFLPSGSQNLLSPTATTVLPDFSHSNHSRPAMGNRPSPSVLVK

SEQ ID NO: 39895 - protein, 1765 aa, Homo sapiens
MRRSKADVERYVASVLGLTPSPRQKSMKGFYFAKLYYEAKEYDLAKKYICTYINVQERDPKAHRFLGLLYELEENTEKAVECYRRSVELNPTQKDLVLKIAELLCKNDVTDGRAKYWVERAAKLFPGSPAIYKLKEQLLDCEGEDGWNKLFDLIQSELYVRPDDVHVNIRLVELYRSTKRLKDAVAHCHEAERNIALRSSLEWNSCVVQTLKEYLESLQCLESDKSDWQATNTDLLLAYANLMLLTLSTRDVQENRELLESFDSALQSAKSSLGGNDELSATFLEMKGHFYMYAGSLLLKMGQHGNNVQWRALSELAALCYLIAFQVPRPKIKLREGKAGQNLLEMMACDRLSQSGHMLLSLSRGKQDFLKEVVETFANKIGQSALYDALFSSQSPKDTSFLGSDDIGKIDVQEPELEDLARYDVGAIRAHNGSLQHLTWLGLQWNSLPALPGIRKWLKQLFHRLPHETSRLETNAPESICILDLEVFLLGVVYTSHLQLKEKCNSHHSSYQPLCLPFPVCKQLCTERQKSWWDAVCTLIHRKAVPGNLAKLRLLVQHEINTLRAQEKHGLQPALLVHWAKYLQKTGSGLNSFYGQLEYIGRSVHYWKKVLPLLKIIKKNSIPEPIDPLFKHFHSVDIQASEIVEYEEDAHITFAMLDAVNGNIEDAVTAFESIKSVVSYWNLALIFHRKAEDIENDALSPEEQEECRNYLTKTRDYLIKIIDDGDSNLSVVKKLPVPLESVKQMLNSVMQELEDYSEGGPLYKNGSLRNADSEIKHSTPSPTKYSLSPSKSYKYSPETPPRWTEDRNSLLNMICQQVEAIKKEMQELKLNSSKSASRHRWPTENYGPDSVPDGYQGSQTFHGAPLTVATTGPSVYYSQSPAYNSQYLLRPAANVTPTKGSSNTEFKSTKEGFSIPVSADGFKFGISEPGNQEKKREKPLENDTGFQAQDISGRKKGRGVIFGQTSSTFTFADVAKSTSGEGFQFGKKDLNFKGFSGAGEKLFSSRYGKMANKANTSGDFEKDDDAYKTEDSDDIHFEPVVQMPEKVELVTGEEGEKVLYSQGVKLFRFDAEVRQWKERGLGNLKILKNEVNGKLRMLMRREQVLKVCANHWITTTMNLKPLSGSDRAWMWSASDFSDGDAKLERLAAKFKTPELAEEFKQKFEECQRLLLDIPLQTPHKLVDTGRAAKLIQRAEEMKSGLKDFKTFLTNDQTKVTEEENKGSGTGAAGASDTTIKPNAENTGPTLEWDNYDLREDALDDSVSSSSVHASPLASSPVRKNLFRFDESTTGSNFSFKSALSLSKSPAKLNQSGTSVGTDEESVVTQEEERDGQYFEPVVPLPDLVEVSSGEENEQVVFSHRAEIYRYDKDVGQWKERGIGDIKILQNYDNKQVRIVMRRDQVLKLCANHRITPDMSLQNMKGTERVWVWTACDFADGERKVEHLAVRFKLQDVADSFKKIFDEAKTAQEKDSLITPHVSRSSTPRESPCGKIAVAILEETTRERTDVIQGDDVADAASEVEVSSTSETTTKAVVSPPKFVFVSESVKRIFSSEKSKPFVFGNSSATGSLFGFSFNAPLKSNNSETSSVAQSGSESKVEPKKCELSKNSDIEQSSDSKVKNLSASFPTEESSINYTFKTPEKEPPLWHAEFTKEELVQKLRSTTKSADHLNGLLREIEATNAVLMEQIKLLKSEIRRLERNQEREKSAANLEYLKNVLLQFIFLKPGSERERLLPVINTMLQLSPEEKGKLAAVAQDEEENASRSSG

SEQ ID NO: 39896 - protein, 904 aa, Homo sapiens
MRRSKADVERYVASVLGLTPSPRQKSMKGFYFAKLYYEAKEYDLAKKYICTYINVQERDPKAHRFLGLLYELEENTEKAVECYRRSVELNPTQKDLVLKIAELLCKNDVTDGRAKYWVERAAKLFPGSPAIYKLKEQLLDCEGEDGWNKLFDLIQSELYVRPDDVHVNIRLVELYRSTKRLKDAVAHCHEAERNIALRSSLEWNSCVVQTLKEYLESLQCLESDKSDWQATNTDLLLAYANLMLLTLSTRDVQENRELLESFDSALQSAKSSLGGNDELSATFLEMKGHFYMYAGSLLLKMGQHGNNVQWRALSELAALCYLIAFQVPRPKIKLREGKAGQNLLEMMACDRLSQSGHMLLSLSRGKQDFLKEVVETFANKIGQSALYDALFSSQSPKDTSFLGSDDIGKIDVQEPELEDLARYDVGAIRAHNGSLQHLTWLGLQWNSLPALPGIRKWLKQLFHRLPHETSRLETNAPESICILDLEVFLLGVVYTSHLQLKEKCNSHHSSYQPLCLPFPVCKQLCTERQKSWWDAVCTLIHRKAVPGNLAKLRLLVQHEINTLRAQEKHGLQPALLVHWAKYLQKTGSGLNSFYGQLEYIGRSVHYWKKVLPLLKIIKKNSIPEPIDPLFKHFHSVDIQASEIVEYEEDAHITFAMLDAVNGNIEDAVTAFESIKSVVSYWNLALIFHRKAEDIENDALSPEEQEECRNYLTKTRDYLIKIIDDGDSNLSVVKKLPVPLESVKQMLNSVMQELEDYSEGGPLYKNGSLRNADSEIKHSTPSPTKYSLSPSKSYKYSPETPPRWTEDRNSLLNMICQQVEAIKKEMQELKLNSSKSASRHRWPTENYGPDSVPDGYQGSQTFHGAPLTEAAHRHFTIEKHGDSKWIIYRFTKQLCGTERARAKIS

SEQ ID NO: 39897 - protein, 317 aa, Homo sapiens
MGYDVTRFQGDVDEDLICPICSGVLEEPVQAPHCEHAFCNACITQWFSQQQTCPVDRSVVTVAHLRPVPRIMRNMLSKLQIACDNAVFGCSAVVRLDNLMSHLSDCEHNPKRPVTCEQGCGLEMPKDELPNHNCIKHLRSVVQQQQTRIAELEKTSAEHKHQLAEQKRDIQLLKAYMRAIRSVNPNLQNLEETIEYNEILEWVNSLQPARVTRWGGMISTPDAVLQAVIKRSLVESGCPASIVNELIENAHERSWPQGLATLETRQMNRRYYENYVAKRIPGKQAVVVMACENQHMGDDMVQEPGLVMIFAHGVEEI

SEQ ID NO: 39898 - protein, 246 aa, Homo sapiens
MRNMLSKLQIACDNAVFGCSAVVRLDNLMSHLSDCEHNPKRPVTCEQGCGLEMPKDELPNHNCIKHLRSVVQQQQTRIAELEKTSAEHKHQLAEQKRDIQLLKAYMRAIRSVNPNLQNLEETIEYNEILEWVNSLQPARVTRWGGMISTPDAVLQAVIKRSLVESGCPASIVNELIENAHERSWPQGLATLETRQMNRRYYENYVAKRIPGKQAVVVMACENQHMGDDMVQEPGLVMIFAHGVEEI

SEQ ID NO: 39899 - protein, 1502 aa, Homo sapiens
MMAKNKEPRPPSYTISIVGLSGTEKDKGNCGVGKSCLCNRFVRSKADEYYPEHTSVLSTIDFGGRVVNNDHFLYWGDIIQNSEDGVECKIHVIEQTEFIDDQTFLPHRSTNLQPYIKRAAASKLQSAEKLMYICTDQLGLEQDFEQKQMPEGKLNVDGFLLCIDVSQGCNRKFDDQLKFVNNLFVQLSKSKKPVIIAATKCDECVDHYLREVQAFASNKKNLLVVETSARFNVNIETCFTALVQMLDKTRSKPKIIPYLDAYKTQRQLVVTATDKFEKLVQTVRDYHATWKTVSNKLKNHPDYEEYINLEGTRKARNTFSKHIEQLKQEHIRKRREEYINTLPRAFNTLLPNLEEIEHLNWSEALKLMEKRADFQLCFVVLEKTPWDETDHIDKINDRRIPFDLLSTLEAEKVYQNHVQHLISEKRRVEMKEKFKKTLEKIQFISPGQPWEEVMCFVMEDEAYKYITEADSKEVYGRHQREIVEKAKEEFQEMLFEHSELFYDLDLNATPSSDKMSEIHTVLSEEPRYKALQKLAPDRESLLLKHIGFVYHPTKETCLSGQNCTDIKVEQLLASSLLQLDHGRLRLYHDSTNIDKVNLFILGKDGLAQELANEIRTQSTDDEYALDGKIYELDLRPVDAKSPYFLSQLWTAAFKPHGCFCVFNSIESLSFIGEFIGKIRTEASQIRKDKYMANLPFTLILANQRDSISKNLPILRHQGQQLANKLQCPFVDVPAGTYPRKFNETQIKQALRGVLESVKHNLDVVSPIPANKDLSEADLRIVMCAMCGDPFSVDLILSPFLDSHSCSAAQAGQNNSLMLDKIIGEKRRRIQITILSYHSSIGVRKDELVHGYILVYSAKRKASMGMLRAFLSEVQDTIPVQLVAVTDSQADFFENEAIKELMTEGEHIATEITAKFTALYSLSQYHRQTEVFTLFFSDVLEKKNMIENSYLSDNTRESTHQSEDVFLPSPRDCFPYNNYPDSDDDTEAPPPYSPIGDDVQLLPTPSDRSRYRLDLEGNEYPIHSTPNCHDHERNHKVPPPIKPKPVVPKTNVKKLDPNLLKTIEAGIGKNPRKQTSRVPLAHPEDMDPSDNYAEPIDTIFKQKGYSDEIYVVPDDSQNRIKIRNSFVNNTQGDEENGFSDRTSKSHGERRPSKYKYKSKTLFSKAKSYYRRTHSDASDDEAFTTSKTKRKGRHRGSEEDPLLSPVETWKGGIDNPAITSDQELDDKKMKKKTHKVKEDKKQKKKTKNFNPPTRRNWESNYFGMPLQDLVTAEKPIPLFVEKCVEFIEDTGLCTEGLYRVSGNKTDQDNIQKQFDQDHNINLVSMEVTVNAVAGALKAFFADLPDPLIPYSLHPELLEAAKIPDKTERLHALKEIVKKFHPVNYDVFRYVITHLNRVSQQHKINLMTADNLSICFWPTLMRPDFENREFLSTTKIHQSVVETFIQQCQFFFYNGEIVETTNIVAPPPPSNPGQLVEPMVPLQLPPPLQPQLIQPQLQTDPLGII

SEQ ID NO: 39900 - protein, 1501 aa, Homo sapiens
MMAKNKEPRPPSYTISIVGLSGTEKDKGNCGVGKSCLCNRFVRSKADEYYPEHTSVLSTIDFGGRVVNNDHFLYWGDIIQNSEDGVECKIHVIEQTEFIDDQTFLPHRSTNLQPYIKRAAASKLQSAEKLMYICTDQLGLEQDFEQKQMPEGKLNVDGFLLCIDVSQGCNRKFDDQLKFVNNLFVQLSKSKKPVIIAATKCDECVDHYLREVQAFASNKKNLLVVETSARFNVNIETCFTALVQMLDKTRSKPKIIPYLDAYKTQRQLVVTATDKFEKLVQTVRDYHATWKTVSNKLKNHPDYEEYINLEGTRKARNTFSKHIEQLKQEHIRKRREEYINTLPRAFNTLLPNLEEIEHLNWSEALKLMEKRADFQLCFVVLEKTPWDETDHIDKINDRRIPFDLLSTLEAEKVYQNHVQHLISEKRRVEMKEKFKKTLEKIQFISPGQPWEEVMCFVMEDEAYKYITEADSKEVYGRHQREIVEKAKEEFQEMLFEHSELFYDLDLNATPSSDKMSEIHTVLSEEPRYKALQKLAPDRESLLLKHIGFVYHPTKETCLSGQNCTDIKVEQLLASSLLQLDHGRLRLYHDSTNIDKVNLFILGKDGLAQELANEIRTQSTDDEYALDGKIYELDLRPVDAKSPYFLSQLWTAAFKPHGCFCVFNSIESLSFIGEFIGKIRTEASQIRKDKYMANLPFTLILANQRDSISKNLPILRHQGQQLANKLQCPFVDVPAGTYPRKFNETQIKQALRGVLESVKHNLDVVSPIPANKDLSEADLRIVMCAMCGDPFSVDLILSPFLDSHSCSAAQAGQNNSLMLDKIIGEKRRRIQITILSYHSSIGVRKDELVHGYILVYSAKRKASMGMLRAFLSEVQDTIPVQLVAVTDSQADFFENEAIKELMTEGEHIATEITAKFTALYSLSQYHRQTEVFTLFFSDVLEKKNMIENSYLSDNTRESTHQSEDVFLPSPRDCFPYNNYPDSDDDTEAPPPYSPIGDDVQLLPTPSDRSRYRLDLEGNEYPIHSTPNCHDHERNHKVPPPIKPKPVVPKTNVKKLDPNLLKTIEAGIGKNPRKQTSRVPLAHPEDMDPSDNYAEPIDTIFKQKGYSDEIYVVPDDSQNRIKIRNSFVNNTQGDEENGFSDRTSKSHGERRPSKYKYKSKTLFSKAKSYYRRTHSDASDDEAFTTSKTKRKGRHRGSEEDPLLSPVETWKGGIDNPAITSDQELDDKKMKKKTHKVKEDKKKKKTKNFNPPTRRNWESNYFGMPLQDLVTAEKPIPLFVEKCVEFIEDTGLCTEGLYRVSGNKTDQDNIQKQFDQDHNINLVSMEVTVNAVAGALKAFFADLPDPLIPYSLHPELLEAAKIPDKTERLHALKEIVKKFHPVNYDVFRYVITHLNRVSQQHKINLMTADNLSICFWPTLMRPDFENREFLSTTKIHQSVVETFIQQCQFFFYNGEIVETTNIVAPPPPSNPGQLVEPMVPLQLPPPLQPQLIQPQLQTDPLGII

SEQ ID NO: 39901 - protein, 237 aa, Homo sapiens
MSLPPPPPGPLPLRRRRRRPTLLGLCTEGLYRVSGNKTDQDNIQKQFDQDHNINLVSMEVTVNAVAGALKAFFADLPDPLIPYSLHPELLEAAKIPDKTERLHALKEIVKKFHPVNYDVFRYVITHLNRVSQQHKINLMTADNLSICFWPTLMRPDFENREFLSTTKIHQSVVETFIQQCQFFFYNGEIVETTNIVAPPPPSNPGQLVEPMVPLQLPPPLQPQLIQPQLQTDPLGII

SEQ ID NO: 39902 - protein, 241 aa, Homo sapiens
MPLQDLVTAEKPIPLFVEKCVEFIEDTGLCTEGLYRVSGNKTDQDNIQKQFDQDHNINLVSMEVTVNAVAGALKAFFADLPDPLIPYSLHPELLEAAKIPDKTERLHALKEIVKKFHPVNYDVFRYVITHLNRVSQQHKINLMTADNLSICFWPTLMRPDFENREFLSTTKIHQSVVETFIQQCQFFFYNGEIVETTNIVAPPPPSNPGQLVEPMVPLQLPPPLQPQLIQPQLQTDPLGII

SEQ ID NO: 39903 - protein, 221 aa, Homo sapiens
MSSRPGREDVGAAGARRPREPPEQELQRRREQKRRRHDAQQLQQLKHLESFYEKPPPGLIKEDETKPEDCIPDVPGNEHAREFLAHAPTKGLWMPLGKEVKVMQCWRCKRYGHRTGDKECPFFIKGNQKLEQFRVAHEDPMYDIIRDNKRHEKDVRIQQLKQLLEDSTSDEDRSSSSSSEGKEKHKKKKKKEKHKKRKKEKKKKKKRKHKSSKSNEGSDSE

SEQ ID NO: 39904 - protein, 974 aa, Homo sapiens
MSAQSLLHSVFSCSSPASSSAASAKGFSKRKLRQTRSLDPALIGGCGSDEAGAEGSARGATAGRLYSPSLPAESLGPRLASSSRGPPPRATRLPPPGPLCSSFSTPSTPQEKSPSGSFHFDYEVPLGRGGLKKSMAWDLPSVLAGPASSRSASSILCSSGGGPNGIFASPRRWLQQRKFQSPPDSRGHPYVVWKSEGDFTWNSMSGRSVRLRSVPIQSLSELERARLQEVAFYQLQQDCDLSCQITIPKDGQKRKKSLRKKLDSLGKEKNKDKEFIPQAFGMPLSQVIANDRAYKLKQDLQRDEQKDASDFVASLLPFGNKRQNKELSSSNSSLSSTSETPNESTSPNTPEPAPRARRRGAMSVDSITDLDDNQSRLLEALQLSLPAEAQSKKEKARDKKLSLNPIYRQVPRLVDSCCQHLEKHGLQTVGIFRVGSSKKRVRQLREEFDRGIDVSLEEEHSVHDVAALLKEFLRDMPDPLLTRELYTAFINTLLLEPEEQLGTLQLLIYLLPPCNCDTLHRLLQFLSIVARHADDNISKDGQEVTGNKMTSLNLATIFGPNLLHKQKSSDKEFSVQSSARAEESTAIIAVVQKMIENYEALFMVPPDLQNEVLISLLETDPDVVDYLLRRKASQSSSPDMLQSEVSFSVGGRHSSTDSNKASSGDISPYDNNSPVLSERSLLAMQEDAAPGGSEKLYRVPGQFMLVGHLSSSKSRESSPGPRLGKDLSEEPFDIWGTWHSTLKSGSKDPGMTGSSGDIFESSSLRAGPCSLSQGNLSPNWPRWQGSPAELDSDTQGARRTQAAAPATEGRAHPAVSRACSTPHVQVAGKAERPTARSEQYLTLSGAHDLSESELDVAGLQSRATPQCQRPHGSGRDDKRPPPPYPGPGKPAAAAAWIQGPPEGVETPTDQGGQAAEREQQVTQKKLSSANSLPAGEQDSPRLGDAGWLDWQRERWQIWELLSTDNPDALPETLV

SEQ ID NO: 39905 - protein, 765 aa, Homo sapiens
MSAQSLLHSVFSCSSPASSSAASAKGFSKRKLRQTRSLDPALIGGCGSDEAGAEGSARGATAGRLYSPSLPAESLGPRLASSSRGPPPRATRLPPPGPLCSSFSTPSTPQEKSPSGSFHFDYEVPLGRGGLKKSMAWDLPSVLAGPASSRSASSILCSSGGGPNGIFASPRRWLQQRKFQSPPDSRGHPYVVWKSEGDFTWNSMSGRSVRLRSVPIQSLSELERARLQEVAFYQLQQDCDLSCQITIPKDGQKRKKSLRKKLDSLGKEKNKDKEFIPQAFGMPLSQVIANDRAYKLKQDLQRDEQKDASDFVASLLPFGNKRQNKELSSSNSSLSSTSETPNESTSPNTPEPAPRARRRGAMSVDSITDLDDNQSRLLEALQLSLPAEAQSKKEKARDKKLSLNPIYRQVPRLVDSCCQHLEKHGLQTVGIFRVGSSKKRVRQLREEFDRGIDVSLEEEHSVHDVAALLKEFLRDMPDPLLTRELYTAFINTLLLEPEEQLGTLQLLIYLLPPCNCDTLHRLLQFLSIVARHADDNISKDGQEVTGNKMTSLNLATIFGPNLLHKQKSSDKEFSVQSSARAEESTAIIAVVQKMIENYEALFMVPPDLQNEVLISLLETDPDVVDYLLRRKASQSSSPDMLQSEVSFSVGGRHSSTDSNKASSGDISPYDNNSPVLSERSLLAMQEDAAPGGSEKLYRVPGQFMLVGHLSSSKSRESSPGPRLGKGNWSLASRRWPKQATLLLLHVAWCGALRTFSSSLPYLMFL

SEQ ID NO: 39906 - protein, 690 aa, Homo sapiens
MSAQSLLHSVFSCSSPASSSAASAKGFSKRKLRQTRSLDPALIGGCGSDEAGAEGSARGATAGRLYSPSLPAESLGPRLASSSRGPPPRATRLPPPGPLCSSFSTPSTPQEKSPSGSFHFDYEVPLGRGGLKKSMAWDLPSVLAGPASSRSASSILCSSGGGPNGIFASPRRWLQQRKFQSPPDSRGHPYVVWKSELELYDLQILGTKPPMNSDTHRNFDPTATLRNQGDFTWNSMSGRSVRLRSVPIQSLSELERARLQEVAFYQLQQDCDLSCQITIPKDGQKRKKSLRKKLDSLGKEKNKDKEFIPQAFGMPLSQVIANDRAYKLKQDLQRDEQKDASDFVASLLPFGNKRQNKELSSSNSSLSSTSETPNESTSPNTPEPAPRARRRGAMSVDSITDLDDNQSRLLEALQLSLPAEAQSKKEKARDKKLSLNPIYRQVPRLVDSCCQHLEKHGLQTVGIFRVGSSKKRVRQLREEFDRGIDVSLEEEHSVHDVAALLKEFLRDMPDPLLTRELYTAFINTLLLEPEEQLGTLQLLIYLLPPCNCDTLHRLLQFLSIVARHADDNISKDGQEVTGNKMTSLNLATIFGPNLLHKQKSSDKEFSVQSSARAEESTAIIAVVQKMIENYEALFMVPPDLQNEVLISLLETDPDVVDYLLRRKASQSSTSSVLPAAVQACPQYPASMFTP

SEQ ID NO: 39907 - protein, 771 aa, Homo sapiens
MSGRSVRLRSVPIQSLSELERARLQEVAFYQLQQDCDLSCQITIPKDGQKRKKSLRKKLDSLGKEKNKDKEFIPQAFGMPLSQVIANDRAYKLKQDLQRDEQKDASDFVASLLPFGNKRQNKELSSSNSSLSSTSETPNESTSPNTPEPAPRARRRGAMSVDSITDLDDNQSRLLEALQLSLPAEAQSKKEKARDKKLSLNPIYRQVPRLVDSCCQHLEKHGLQTVGIFRVGSSKKRVRQLREEFDRGIDVSLEEEHSVHDVAALLKEFLRDMPDPLLTRELYTAFINTLLLEPEEQLGTLQLLIYLLPPCNCDTLHRLLQFLSIVARHADDNISKDGQEVTGNKMTSLNLATIFGPNLLHKQKSSDKEFSVQSSARAEESTAIIAVVQKMIENYEALFMVPPDLQNEVLISLLETDPDVVDYLLRRKASQSSSPDMLQSEVSFSVGGRHSSTDSNKASSGDISPYDNNSPVLSERSLLAMQEDAAPGGSEKLYRVPGQFMLVGHLSSSKSRESSPGPRLGKDLSEEPFDIWGTWHSTLKSGSKDPGMTGSSGDIFESSSLRAGPCSLSQGNLSPNWPRWQGSPAELDSDTQGARRTQAAAPATEGRAHPAVSRACSTPHVQVAGKAERPTARSEQYLTLSGAHDLSESELDVAGLQSRATPQCQRPHGSGRDDKRPPPPYPGPGKPAAAAAWIQGPPEGVETPTDQGGQAAEREQQVTQKKLSSANSLPAGEQDSPRLGDAGWLDWQRERWQIWELLSTDNPDALPETLV

SEQ ID NO: 39908 - protein, 562 aa, Homo sapiens
MSGRSVRLRSVPIQSLSELERARLQEVAFYQLQQDCDLSCQITIPKDGQKRKKSLRKKLDSLGKEKNKDKEFIPQAFGMPLSQVIANDRAYKLKQDLQRDEQKDASDFVASLLPFGNKRQNKELSSSNSSLSSTSETPNESTSPNTPEPAPRARRRGAMSVDSITDLDDNQSRLLEALQLSLPAEAQSKKEKARDKKLSLNPIYRQVPRLVDSCCQHLEKHGLQTVGIFRVGSSKKRVRQLREEFDRGIDVSLEEEHSVHDVAALLKEFLRDMPDPLLTRELYTAFINTLLLEPEEQLGTLQLLIYLLPPCNCDTLHRLLQFLSIVARHADDNISKDGQEVTGNKMTSLNLATIFGPNLLHKQKSSDKEFSVQSSARAEESTAIIAVVQKMIENYEALFMVPPDLQNEVLISLLETDPDVVDYLLRRKASQSSSPDMLQSEVSFSVGGRHSSTDSNKASSGDISPYDNNSPVLSERSLLAMQEDAAPGGSEKLYRVPGQFMLVGHLSSSKSRESSPGPRLGKGNWSLASRRWPKQATLLLLHVAWCGALRTFSSSLPYLMFL

SEQ ID NO: 39909 - protein, 1491 aa, Homo sapiens
MNGVAFCLVGIPPRPEPRPPQLPLGPRDGCSPRRPFPWQGPRTLLLYKSPQDGFGFTLRHFIVYPPESAVHCSLKEEENGGRGGGPSPRYRLEPMDTIFVKNVKEDGPAHRAGLRTGDRLVKVNGESVIGKTYSQVIALIQNSDDTLELSIMPKDEDILQLAYSQDAYLKGNEPYSGEARSIPEPPPICYPRKTYAPPARASTRATMVPEPTSALPSDPRSPAAWSDPGLRVPPAARAHLDNSSLGMSQPRPSPGAFPHLSSEPRTPRAFPEPGSRVPPSRLECQQALSHWLSNQVPRRAGERRCPAMAPRARSASQDRLEEVAAPRPWPCSTSQDALSQLGQEGWHRARSDDYLSRATRSAEALGPGALVSPRFERCGWASQRSSARTPACPTRDLPGPQAPPPSGLQGLDDLGYIGYRSYSPSFQRRTGLLHALSFRDSPFGGLPTFNLAQSPASFPPEASEPPRVVRPEPSTRALEPPAEDRGDEVVLRQKPPTGRKVQLTPARQMNLGFGDESPEPEASGRGERLGRKVAPLATTEDSLASIPFIDEPTSPSIDLQAKHVPASAVVSSAMNSAPVLGTSPSSPTFTFTLGRHYSQDCSSIKAGRRSSYLLAITTERSKSCDDGLNTFRDEGRVLRRLPNRIPSLRMLRSFFTDGSLDSWGTSEDADAPSKRHSTSDLSDATFSDIRREGWLYYKQILTKKGKKAGSGLRQWKRVYAALRARSLSLSKERREPGPAAAGAAAAGAGEDEAAPVCIGSCLVDISYSETKRRHVFRLTTADFCEYLFQAEDRDDMLGWIRAIRENSRAEGEDPGCANQALISKKLNDYRKVSHSSGPKADSSPKGSRGLGGLKSEFLKQSAARGLRTQDLPAGSKDDSAAAPKTPWGINIIKKNKKAAPRAFGVRLEECQPATENQRVPLIVAACCRIVEARGLESTGIYRVPGNNAVVSSLQEQLNRGPGDINLQDERWQDLNVISSLLKSFFRKLPEPLFTDDKYNDFIEANRIEDARERMRTLRKLIRDLPGHYYETLKFLVGHLKTIADHSEKNKMEPRNLALVFGPTLVRTSEDNMTDMVTHMPDRYKIVETLIQHSDWFFSDEEDKGERTPVGDKEPQAVPNIEYLLPNIGRTVPPGDPGSDSTTCSSAKSKGSWAPKKEPYAREMLAISFISAVNRKRKKRREARGLGSSTDDDSEQEAHKPGAGATAPGTQERPQGPLPGAVAPEAPGRLSPPAAPEERPAADTRSIVSGYSTLSTMDRSVCSGASGRRAGAGDEADDERSELSHVETDTEGAAGAGPGGRLTRRPSFSSHHLMPCDTLARRRLARGRPDGEGAGRGGPRAPEPPGSASSSSQESLRPPAAALASRPSRMEALRLRLRGTADDMLAVRLRRPLSPETRRRRSSWRRHTVVVQSPLTDLNFNEWKELGGGGPPEPAGARAHSDNKDSGLSSLESTKARAPSSAASQPPAPGDTGSLQSQPPRRSAASRLHQCL

SEQ ID NO: 39910 - protein, 1144 aa, Homo sapiens
MNGVAFCLVGIPPRPEPRPPQLPLGPRDGCSPRRPFPWQGPRTLLLYKSPQDGFGFTLRHFIVYPPESAVHCSLKEEENGGRGGGPSPRYRLEPMDTIFVKNVKEDGPAHRAGLRTGDRLVKVNGESVIGKTYSQVIALIQNSDDTLELSIMPKDEDILQLAYSQDAYLKGNEPYSGEARSIPEPPPICYPRKTYAPPARASTRATMVPEPTSALPSDPRSPAAWSDPGLRVPPAARAHLDNSSLGMSQPRPSPGAFPHLSSEPRTPRAFPEPGSRVPPSRLECQQALSHWLSNQVPRRAGERRCPAMAPRARSASQDRLEEVAAPRPWPCSTSQDALSQLGQEGWHRARSDDYLSRATRSAEALGPGALVSPRFERCGWASQRSSARTPACPTRDLPGPQAPPPSGLQGLDDLGYIGYRSYSPSFQRRTGLLHALSFRDSPFGGLPTFNLAQSPASFPPEASEPPRVVRPEPSTRALEPPAEDRGDEVVLRQKPPTGRKVQLTPARQMNLGFGDESPEPEASGRGERLGRKVAPLATTEDSLASIPFIDEPTSPSIDLQAKHVPASAVVSSAMNSAPVLGTSPSSPTFTFTLGRHYSQDCSSIKAGRRSSYLLAITTERSKSCDDGLNTFRDEGRVLRRLPNRIPSLRMLRSFFTDGSLDSWGTSEDADAPSKRHSTSDLSDATFSDIRREGWLYYKQILTKKGKKAGSGLRQWKRVYAALRARSLSLSKERREPGPAAAGAAAAGAGEDEAAPVCIGSCLVDISYSETKRRHVFRLTTADFCEYLFQAEDRDDMLGWIRAIRENSRAEGEDPGCANQALISKKLNDYRKVSHSSGPKADSSPKGSRGLGGLKSEFLKQSAARGLRTQDLPAGSKDDSAAAPKTPWGINIIKKNKKAAPRAFGVRLEECQPATENQRVPLIVAACCRIVEARGLESTGIYRVPGNNAVVSSLQEQLNRGPGDINLQDERWQDLNVISSLLKSFFRKLPEPLFTDDKYNDFIEANRIEDARERMRTLRKLIRDLPGHYYETLKFLVGHLKTIADHSEKNKMEPRNLALVFGPTLVRTSEDNMTDMVTHMPDRYKIVETLIQHSDWFFSDEEDKGERTPVGDKEPQAVPNIEYLLPNIGRTVPPGDPGSADLLEI

SEQ ID NO: 39911 - protein, 466 aa, Homo sapiens
MAEAEGVPTTPGPASGSTFRGRRDVSGSWERDQQVEAAQRALVEVLGPYEPLLSRVQAALVWERPARSALWCLGLNAAFWFFALTSLRLVFLLAFGLMIIVCIDQWKNKIWPEIKVPRPDALDNESWGFVHPRLLSVPELCHHVAEVWVSGTIFIRNVLLFKKQNPGKFCLLSCGILTFLAVLGRYVPGLLLSYLMLVTVMMWPLAVYHRLWDRAYVRLKPALQRLDFSVRGYMMSKQRERQLRRRALHPERAMDNHSDSEEELAAFCPQLDDSTVARELAITDSEHSDAEVSCTDNGTFNLSRGQTPLTEGSEDLDGHSDPEESFARDLPDFPSINMDPAGLDDEDDTSIGMPSLMYRSPPGAEEPQAPPASRDEAALPELLLGALPVGSNLTSNLASLVSQGMIQLALSGASQPGPSGAPAQRATRGFLRSPSSDLDTDAEGDDFELLDQSELSQLDPASSRSH

SEQ ID NO: 39912 - protein, 271 aa, Homo sapiens
MLVTVMMWPLAVYHRLWDRAYVRLKPALQRLDFSVRGYMMSKQRERQLRRRALHPERAMDNHSDSEEELAAFCPQLDDSTVARELAITDSEHSDAEVSCTDNGTFNLSRGQTPLTEGSEDLDGHSDPEESFARDLPDFPSINMDPAGLDDEDDTSIGMPSLMYRSPPGAEEPQAPPASRDEAALPELLLGALPVGSNLTSNLASLVSQGMIQLALSGASQPGPSGAPAQRATRGFLRSPSSDLDTDAEGDDFELLDQSELSQLDPASSRSH

SEQ ID NO: 39913 - protein, 211 aa, Homo sapiens
MQSAMFLAVQHDCRPMDKSAGSGHKSEEKREKMKRTLLKDWKTRLSYFLQNSSTPGKPKTGKKSKQQAFIKPSPEEAQLWSEAFDELLASKYGLAAFRAFLKSEFCEENIEFWLACEDFKKTKSPQKLSSKARKIYTDFIEKEAPKEINIDFQTKTLIAQNIQEATSGCFTTAQKRVYSLMENNSYPRFLESEFYQDLCKKPQITTEPHAT

SEQ ID NO: 39914 - protein, 207 aa, Homo sapiens
MFLAVQHDCRPMDKSAGSGHKSEEKREKMKRTLLKDWKTRLSYFLQNSSTPGKPKTGKKSKQQAFIKPSPEEAQLWSEAFDELLASKYGLAAFRAFLKSEFCEENIEFWLACEDFKKTKSPQKLSSKARKIYTDFIEKEAPKEINIDFQTKTLIAQNIQEATSGCFTTAQKRVYSLMENNSYPRFLESEFYQDLCKKPQITTEPHAT

SEQ ID NO: 39915 - protein, 196 aa, Homo sapiens
MDKSAGSGHKSEEKREKMKRTLLKDWKTRLSYFLQNSSTPGKPKTGKKSKQQAFIKPSPEEAQLWSEAFDELLASKYGLAAFRAFLKSEFCEENIEFWLACEDFKKTKSPQKLSSKARKIYTDFIEKEAPKEINIDFQTKTLIAQNIQEATSGCFTTAQKRVYSLMENNSYPRFLESEFYQDLCKKPQITTEPHAT

SEQ ID NO: 39916 - protein, 179 aa, Homo sapiens
MKRTLLKDWKTRLSYFLQNSSTPGKPKTGKKSKQQAFIKPSPEEAQLWSEAFDELLASKYGLAAFRAFLKSEFCEENIEFWLACEDFKKTKSPQKLSSKARKIYTDFIEKEAPKEINIDFQTKTLIAQNIQEATSGCFTTAQKRVYSLMENNSYPRFLESEFYQDLCKKPQITTEPHAT

SEQ ID NO: 39917 - protein, 180 aa, Homo sapiens
MAALLMPRRNKGMRTRLGCLSHKSDSCSDFTAILPDKPNRALKRLSTEEATRWADSFDVLLSHKYGVAAFRAFLKTEFSEENLEFWLACEEFKKTRSTAKLVSKAHRIFEEFVDVQAPREVNIDFQTREATRKNLQEPSLTCFDQAQGKVHSLMEKDSYPRFLRSKMYLDLLSQSQRRLS

SEQ ID NO: 39918 - protein, 198 aa, Homo sapiens
MWNTLTRSLSDHPVGKDPQAMRTGQRQNKGMRTRLGCLSHKSDSCSDFTAILPDKPNRALKRLSTEEATRWADSFDVLLSHKYGVAAFRAFLKTEFSEENLEFWLACEEFKKTRSTAKLVSKAHRIFEEFVDVQAPREVNIDFQTREATRKNLQEPSLTCFDQAQGKVHSLMEKDSYPRFLRSKMYLDLLSQSQRRLS

SEQ ID NO: 39919 - protein, 388 aa, Homo sapiens
MPQLSQDNQECLQKHFSRPSIWTQFLPLFRAQRYNTDIHQITENEGDLRAVPDIKSFPPAQLPDSPAAPKLFGLLSSPLSSLARFFSHLLRRPPPEAPRRRLDFSPLLPALPAARLSRGHEELPGRLSLLLGAALALPGRPSGGRPLRPPHPVAKPREEDATAGQSSPMPQMGSERMEMRKRQMPAAQDTPGAAPGQPGAGSRGSNACCFCWCCCCSCSCLTVRNQEDQRPTIASHELRADLPTWEESPAPTLEEVNAWAQSFDKLMVTPAGRNAFREFLRTEFSEENMLFWMACEELKKEANKNIIEEKARIIYEDYISILSPKEVSLDSRVREVINRNMVEPSQHIFDDAQLQIYTLMHRDSYPRFMNSAVYKDLLQSLSEKSIEA

SEQ ID NO: 39920 - protein, 273 aa, Homo sapiens
MPQLSQDNQECLQKHFSRPSIWTQFLPLFRAQRYNTDIHQITENEGDLRAVPDIKQMGSERMEMRKRQMPAAQDTPGAAPGQPGAGSRGSNACCFCWCCCCSCSCLTVRNQEDQRPTIASHELRADLPTWEESPAPTLEEVNAWAQSFDKLMVTPAGRNAFREFLRTEFSEENMLFWMACEELKKEANKNIIEEKARIIYEDYISILSPKEVSLDSRVREVINRNMVEPSQHIFDDAQLQIYTLMHRDSYPRFMNSAVYKDLLQSLSEKSIEA

SEQ ID NO: 39921 - protein, 180 aa, Homo sapiens
MKETSGLFLISSLTVRNQEDQRPTIASHELRADLPTWEESPAPTLEEVNAWAQSFDKLMVTPAGRNAFREFLRTEFSEENMLFWMACEELKKEANKNIIEEKARIIYEDYISILSPKEVSLDSRVREVINRNMVEPSQHIFDDAQLQIYTLMHRDSYPRFMNSAVYKDLLQSLSEKSIEA

SEQ ID NO: 39922 - protein, 152 aa, Homo sapiens
MKETSGLFLISSPAPTLEEVNAWAQSFDKLMVTPAGRNAFREFLRTEFSEENMLFWMACEELKKEANKNIIEEKARIIYEDYISILSPKEVSLDSRVREVINRNMVEPSQHIFDDAQLQIYTLMHRDSYPRFMNSAVYKDLLQSLSEKSIEA

SEQ ID NO: 39923 - protein, 220 aa, Homo sapiens
MPQMGSERMEMRKRQMPAAQDTPGAAPGQPGAGSRGSNACCFCWCCCCSCSCLTVRNQEDQRPTIASHELRADLPTWEESPAPTLEEVNAWAQSFDKLMVTPAGRNAFREFLRTEFSEENMLFWMACEELKKEANKNIIEEKARIIYEDYISILSPKEVSLDSRVREVINRNMVEPSQHIFDDAQLQIYTLMHRDSYPRFMNSAVYKDLLQSLSEKSIEA

SEQ ID NO: 39924 - protein, 241 aa, Homo sapiens
MRTADGGEPAGASSPAGRVDGGLQMGSERMEMRKRQMPAAQDTPGAAPGQPGAGSRGSNACCFCWCCCCSCSCLTVRNQEDQRPTIASHELRADLPTWEESPAPTLEEVNAWAQSFDKLMVTPAGRNAFREFLRTEFSEENMLFWMACEELKKEANKNIIEEKARIIYEDYISILSPKEVSLDSRVREVINRNMVEPSQHIFDDAQLQIYTLMHRDSYPRFMNSAVYKDLLQSLSEKSIEA

SEQ ID NO: 39925 - protein, 671 aa, Homo sapiens
MQPDMSLNVIKMKSSDFLESAELDSGGFGKVSLCFHRTQGLMIMKTVYKGPNCIEHNEALLEEAKMMNRLRHSRVVKLLGVIIEEGKYSLVMEYMEKGNLMHVLKAEMSTPLSVKGRIILEIIEGMCYLHGKGVIHKDLKPENILVDNDFHIKIADLGLASFKMWSKLNNEEHNELREVDGTAKKNGGTLYYMAPEHLNDVNAKPTEKSDVYSFAVVLWAIFANKEPYENAICEQQLIMCIKSGNRPDVDDITEYCPREIISLMKLCWEANPEARPTFPGIEEKFRPFYLSQLEESVEEDVKSLKKEYSNENAVVKRMQSLQLDCVAVPSSRSNSATEQPGSLHSSQGLGMGPVEESWFAPSLEHPQEENEPSLQSKLQDEANYHLYGSRMDRQTKQQPRQNVAYNREEERRRRVSHDPFAQQRPYENFQNTEGKGTAYSSAASHGNAVHQPSGLTSQPQVLYQNNGLYSSHGFGTRPLDPGTAGPRVWYRPIPSHMPSLHNIPVPETNYLGNTPTMPFSSLPPTDESIKYTIYNSTGIQIGAYNYMEIGGTSSSLLDSTNTNFKEEPAAKYQAIFDNTTSLTDKHLDPIRENLGKHWKNCARKLGFTQSQIDEIDHDYERDGLKEKVYQMLQKWVMREGIKGATVGKLAQALHQCSRIDLLSSLIYVSQN

SEQ ID NO: 39926 - protein, 625 aa, Homo sapiens
MQPDMSLNVIKMKSSDFLESAELDSGGFGKVSLCFHRTQGLMIMKTVYKGPNCIEHNEALLEEAKMMNRLRHSRVVKLLGVIIEEGKYSLVMEYMEKGNLMHVLKAEIADLGLASFKMWSKLNNEEHNELREVDGTAKKNGGTLYYMAPEHLNDVNAKPTEKSDVYSFAVVLWAIFANKEPYENAICEQQLIMCIKSGNRPDVDDITEYCPREIISLMKLCWEANPEARPTFPGIEEKFRPFYLSQLEESVEEDVKSLKKEYSNENAVVKRMQSLQLDCVAVPSSRSNSATEQPGSLHSSQGLGMGPVEESWFAPSLEHPQEENEPSLQSKLQDEANYHLYGSRMDRQTKQQPRQNVAYNREEERRRRVSHDPFAQQRPYENFQNTEGKGTAYSSAASHGNAVHQPSGLTSQPQVLYQNNGLYSSHGFGTRPLDPGTAGPRVWYRPIPSHMPSLHNIPVPETNYLGNTPTMPFSSLPPTDESIKYTIYNSTGIQIGAYNYMEIGGTSSSLLDSTNTNFKEEPAAKYQAIFDNTTSLTDKHLDPIRENLGKHWKNCARKLGFTQSQIDEIDHDYERDGLKEKVYQMLQKWVMREGIKGATVGKLAQALHQCSRIDLLSSLIYVSQN

SEQ ID NO: 39927 - protein, 217 aa, Homo sapiens
MEVENEASCSPGSASGGSREYKVVMLGAGGVGKSAMTMQFISHQFPDYHDPTIEDAYKTQVRIDNEPAYLDILDTAGQAEFTAMREQYMRGGEGFIICYSVTDRQSFQEAAKFKELIFQVRHTYEIPLVLVGNKIDLEQFRQVSTEEGLSLAQEYNCGFFETSAALRFCIDDAFHGLVREIRKKESMPSLMEKKLKRKDSLWKKLKGSLKKKRENMT

SEQ ID NO: 39928 - protein, 153 aa, Homo sapiens
MEVENEASCSPGSASGGSREYKVVMLGAGGVGKSAMTMQFISHQFPDYHDPTIEDAYKTQVRIDNEPAYLDILDTAGQAEFTAMREQYMRGGEGFIICYSVTDRQSFQEAAKFKELIFQVRHTYEIPLVLVGNKIDLEQFRQPTLKEFGREEF

SEQ ID NO: 39929 - protein, 308 aa, Homo sapiens
MFNGEPGPASSGASRNVVRSSSISGEICGSQQAGGGAGTTTAKKRRSSLGAKMVAIVGLTQWSKSTLQLPQPEGATKKLRSNIRRSTETGIAVEMRSRVTRQGSRESTDGSTNSNSSDGTFIFPTTRLGAESQFSDFLDGLGPAQIVGRQTLATPPMGDVHIAIMDRSGQLEVEVIEARGLTPKPGSKSLPATYIKVYLLENGACLAKKKTKMTKKTCDPLYQQALLFDEGPQGKVLQVIVWGDYGRMDHKCFMGMAQIMLDELDLSAAVTGWYKLFPTSSVADSTLGSLTRRLSQSSLESATSPSCS

SEQ ID NO: 39930 - protein, 153 aa, Homo sapiens
MFNGEPGPASSGASRNVVRSSSISGEICGSQQAGGGAGTTTAKKRRSSLGAKMVAIVGLTQWSKSTLQLPQPEGATKKLRSNIRRSTETGIAVEMRSRVTRQGSRESTDGSTNSNSSDGTCVQPRAVVPSLLLGPPVTEPLGRVHLPHYPARG

SEQ ID NO: 39931 - protein, 406 aa, Homo sapiens
MTTPANAQNASKTWELSLYELHRTPQEAIMDGTEIAVSPRSLHSELMCPICLDMLKNTMTTKECLHRFCSDCIVTALRSGNKECPTCRKKLVSKRSLRPDPNFDALISKIYPSREEYEAHQDRVLIRLSRLHNQQALSSSIEEGLRMQAMHRAQRVRRPIPGSDQTTTMSGGEGEPGEGEGDGEDVSSDSAPDSAPGPAPKRPRGGGAGGSSVGTGGGGTGGVGGGAGSEDSGDRGGTLGGGTLGPPSPPGAPSPPEPGGEIELVFRPHPLLVEKGEYCQTRYVKTTGNATVDHLSKYLALRIALERRQQQEAGEPGGPGGGASDTGGPDGCGGEGGGAGGGDGPEEPALPSLEGVSEKQYTIYIAPGGGAFTTLNGSLTLELVNEKFWKVSRPLELCYAPTKDPK

SEQ ID NO: 39932 - protein, 377 aa, Homo sapiens
MDGTEIAVSPRSLHSELMCPICLDMLKNTMTTKECLHRFCSDCIVTALRSGNKECPTCRKKLVSKRSLRPDPNFDALISKIYPSREEYEAHQDRVLIRLSRLHNQQALSSSIEEGLRMQAMHRAQRVRRPIPGSDQTTTMSGGEGEPGEGEGDGEDVSSDSAPDSAPGPAPKRPRGGGAGGSSVGTGGGGTGGVGGGAGSEDSGDRGGTLGGGTLGPPSPPGAPSPPEPGGEIELVFRPHPLLVEKGEYCQTRYVKTTGNATVDHLSKYLALRIALERRQQQEAGEPGGPGGGASDTGGPDGCGGEGGGAGGGDGPEEPALPSLEGVSEKQYTIYIAPGGGAFTTLNGSLTLELVNEKFWKVSRPLELCYAPTKDPK

SEQ ID NO: 39933 - protein, 566 aa, Homo sapiens
MAQPEDKAPEVPTEGVRLVPPQVNKADRTPLGVLSTLEPLTRLQRTWGVWHVPELDTQDAEALVGLWPLGSFLVTGRDPSQALVLRSGPLPGEVNTYQIQKIPRGVSLESSNLCMPDLPHLLAFLSASRDVLPRTLLLPPPTLGPRDEHTDPVQIGRVQQDTPGKVLSIVNQLYLETHRGWGREQTPQETEPEAAQRHDPAPRNPAPHGVSWVKGPLSPEVDHPGPALASLLEEEEEDLEGKEEGREDDPEEEGPEDVLTIHVQSLVRARSSYVARQYRSLRVRIASDSGGPHGSGDPATELLQDVRHLLTDLQDHLAKDSYIRAVFGSRGPGLPKKDEDPGPALETAVCQAVLAPLKPALWTRLRTLRAPELRRLRRRQTALRAGAGPPGAQGPGPEGQSPAPALRSRIHERLAHLHAACAPRRKVALLLEVCRDVYAGLARGENQDPLGADAFLPALTEELIWSPDIGDTQLDVEFLMELLDPDELRGEAGYYLTTWFGALHHIAHYQPETDRAPRGLSSEARASLHQWHRRRTLHRKDHPRAQANLPFKEPWAEETVTGTSDN

SEQ ID NO: 39934 - protein, 452 aa, Homo sapiens
MPDLPHLLAFLSASRDVLPRTLLLPPPTLGPRDEHTDPVQIGRVQQDTPGKVLSIVNQLYLETHRGWGREQTPQETEPEAAQRHDPAPRNPAPHGVSWVKGPLSPEVDHPGPALASLLEEEEEDLEGKEEGREDDPEEEGPEDVLTIHVQSLVRARSSYVARQYRSLRVRIASDSGGPHGSGDPATELLQDVRHLLTDLQDHLAKDSYIRAVFGSRGPGLPKKDEDPGPALETAVCQAVLAPLKPALWTRLRTLRAPELRRLRRRQTALRAGAGPPGAQGPGPEGQSPAPALRSRIHERLAHLHAACAPRRKVALLLEVCRDVYAGLARGENQDPLGADAFLPALTEELIWSPDIGDTQLDVEFLMELLDPDELRGEAGYYLTTWFGALHHIAHYQPETDRAPRGLSSEARASLHQWHRRRTLHRKDHPRAQANLPFKEPWAEETVTGTSDN

SEQ ID NO: 39935 - protein, 124 aa, Homo sapiens
MPAPAATYERVVYKNPSEYHYMKVCLEFQDCGVGLNAAQFKQLLISAVKDLFGEVDAALPLDILTYEEKTLSAILRICSSGLVKLWSSLTLLGSYKGKKCAFRVIQVSPFLLALSGNSRELVLD

SEQ ID NO: 39936 - protein, 176 aa, Homo sapiens [sequence omitted]

SEQ ID NO: 39937 - protein, 188 aa, Homo sapiens [sequence omitted]

SEQ ID NO: 39938 - protein, 159 aa, Homo sapiens
MLYRFLARRTNSTFNQVVLKRLFMSRTNRPPLSLSRMIRKMKLPGRENKTAVVVGTITDDVRVQEVPKLKVCALRVTSRARSRILRAGGKILTFDQLALDSPKGCGTVLLSGPRKGREVYRHFGKAPGTPHSHTKPYVRSKGRKFERARGRRASRGYKN

SEQ ID NO: 39939 - protein, 757 aa, Homo sapiens
MTSGSVFFYILIFGKYFSHGGGQDVKCSLGYFPCGNITKCLPQLLHCNGVDDCGNQADEDNCGDNNGWSLQFDKYFASYYKMTSQYPFEAETPECLVGSVPVQCLCQGLELDCDETNLRAVPSVSSNVTAMSLQWNLIRKLPPDCFKNYHDLQKLYLQNNKITSISIYAFRGLNSLTKLYLSHNRITFLKPGVFEDLHRLEWLIIEDNHLSRISPPTFYGLNSLILLVLMNNVLTRLPDKPLCQHMPRLHWLDLEGNHIHNLRNLTFISCSNLTVLVMRKNKINHLNENTFAPLQKLDELDLGSNKIENLPPLIFKDLKELSQLNLSYNPIQKIQANQFDYLVKLKSLSLEGIEISNIQQRMFRPLMNLSHIYFKKFQYCGYAPHVRSCKPNTDGISSLENLLASIIQRVFVWVVSAVTCFGNIFVICMRPYIRSENKLYAMSIISLCCADCLMGIYLFVIGGFDLKFRGEYNKHAQLWMESTHCQLVGSLAILSTEVSVLLLTFLTLEKYICIVYPFRCVRPGKCRTITVLILIWITGFIVAFIPLSNKEFFKNYYGTNGVCFPLHSEDTESIGAQIYSVAIFLGINLAAFIIIVFSYGSMFYSVHQSAITATEIRNQVKKEMILAKRFFFIVFTDALCWIPIFVVKFLSLLQVEIPGTITSWVVIFILPINSALNPILYTLTTRPFKEMIHRFWYNYRQRKSMDSKGQKTYAPSFIWVEMWPLQEMPPELMKPDLFTYPCEMSLISQSTRLNSYS

SEQ ID NO: 39940 - protein, 724 aa, Homo sapiens
MTSGSVFFYILIFGKYFSHGGGQDVKCSLGYFPCGNITKCLPQLLHCNGVDDCGNQADEDNCVVGSVPVQCLCQGLELDCDETNLRAVPSVSSNVTAMSLQWNLIRKLPPDCFKNYHDLQKLYLQNNKITSISIYAFRGLNSLTKLYLSHNRITFLKPGVFEDLHRLEWLIIEDNHLSRISPPTFYGLNSLILLVLMNNVLTRLPDKPLCQHMPRLHWLDLEGNHIHNLRNLTFISCSNLTVLVMRKNKINHLNENTFAPLQKLDELDLGSNKIENLPPLIFKDLKELSQLNLSYNPIQKIQANQFDYLVKLKSLSLEGIEISNIQQRMFRPLMNLSHIYFKKFQYCGYAPHVRSCKPNTDGISSLENLLASIIQRVFVWVVSAVTCFGNIFVICMRPYIRSENKLYAMSIISLCCADCLMGIYLFVIGGFDLKFRGEYNKHAQLWMESTHCQLVGSLAILSTEVSVLLLTFLTLEKYICIVYPFRCVRPGKCRTITVLILIWITGFIVAFIPLSNKEFFKNYYGTNGVCFPLHSEDTESIGAQIYSVAIFLGINLAAFIIIVFSYGSMFYSVHQSAITATEIRNQVKKEMILAKRFFFIVFTDALCWIPIFVVKFLSLLQVEIPGTITSWVVIFILPINSALNPILYTLTTRPFKEMIHRFWYNYRQRKSMDSKGQKTYAPSFIWVEMWPLQEMPPELMKPDLFTYPCEMSLISQSTRLNSYS

SEQ ID NO: 39941 - protein, 189 aa, Homo sapiens
MTSGSVFFYILIFGKYFSHGGGQDVKCSLGYFPCGNITKCLPQLLHCNGVDDCGNQADEDNCGDNNGWSLQFDKYFASYYKMTSQYPFEAETPECLVGSVPVQCLCQGLELDCDETNLRAVPSVSSNVTAMSLQWNLIRKLPPDCFKNYHDLQKLYLQNNKITSISIYAFRGLNSLTKLSRAVKDGSEK

SEQ ID NO: 39942 - protein, 709 aa, Homo sapiens
MTSGSVFFYILIFGKYFSHGGGQDVKCSLGYFPCGNITKCLPQLLHCNGVDDCGNQADEDNCGDNNGWSLQFDKYFASYYKMTSQYPFEAETPECLVGSVPVQCLCQGLELDCDETNLRAVPSVSSNVTAMSLQWNLIRKLPPDCFKNYHDLQKLYLQNNKITSISIYAFRGLNSLTKLYLSHNRITFLKPGVFEDLHRLEWLIIEDNHLSRISPPTFYGLNSLILLVLMNNVLTRLPDKPLCQHMPRLHWLDLEGNHIHNLRNLTFISCSNLTVLVMRKNKINHLNENTFAPLQKLDEFSLEGIEISNIQQRMFRPLMNLSHIYFKKFQYCGYAPHVRSCKPNTDGISSLENLLASIIQRVFVWVVSAVTCFGNIFVICMRPYIRSENKLYAMSIISLCCADCLMGIYLFVIGGFDLKFRGEYNKHAQLWMESTHCQLVGSLAILSTEVSVLLLTFLTLEKYICIVYPFRCVRPGKCRTITVLILIWITGFIVAFIPLSNKEFFKNYYGTNGVCFPLHSEDTESIGAQIYSVAIFLGINLAAFIIIVFSYGSMFYSVHQSAITATEIRNQVKKEMILAKRFFFIVFTDALCWIPIFVVKFLSLLQVEIPGTITSWVVIFILPINSALNPILYTLTTRPFKEMIHRFWYNYRQRKSMDSKGQKTYAPSFIWVEMWPLQEMPPELMKPDLFTYPCEMSLISQSTRLNSYS

SEQ ID NO: 39943 - protein, 652 aa, Homo sapiens
MTSQYPFEAETPECLVGSVPVQCLCQGLELDCDETNLRAVPSVSSNVTAMSLQWNLIRKLPPDCFKNYHDLQKLYLQNNKITSISIYAFRGLNSLTKLYLSHNRITFLKPGVFEDLHRLEWLIIEDNHLSRISPPTFYGLNSLILLVLMNNVLTRLPDKPLCQHMPRLHWLVMRKNKINHLNENTFAPLQKLDELDLGSNKIENLPPLIFKDLKELSQLNLSYNPIQKIQANQFDYLVKLKSLSLEGIEISNIQQRMFRPLMNLSHIYFKKFQYCGYAPHVRSCKPNTDGISSLENLLASIIQRVFVWVVSAVTCFGNIFVICMRPYIRSENKLYAMSIISLCCADCLMGIYLFVIGGFDLKFRGEYNKHAQLWMESTHCQLVGSLAILSTEVSVLLLTFLTLEKYICIVYPFRCVRPGKCRTITVLILIWITGFIVAFIPLSNKEFFKNYYGTNGVCFPLHSEDTESIGAQIYSVAIFLGINLAAFIIIVFSYGSMFYSVHQSAITATEIRNQVKKEMILAKRFFFIVFTDALCWIPIFVVKFLSLLQVEIPGTITSWVVIFILPINSALNPILYTLTTRPFKEMIHRFWYNYRQRKSMDSKGQKTYAPSFIWVEMWPLQEMPPELMKPDLFTYPCEMSLISQSTRLNSYS

SEQ ID NO: 39944 - protein, 395 aa, Homo sapiens
MFPRVSTFLPLRPLSRHPLSSGSPETSAAAIMLLTVRHGTVRYRSSALLARTKNNIQRYFGTNSVICSKKDKQSVRTEETSKETSESQDSEKENTKKDLLGIIKGMKVELSTVNVRTTKPPKRRPLKSLEATLGRLRRATEYAPKKRIEPLSPELVAAASAVADSLPFDKQTTKSELLSQLQQHEEESRAQRDAKRPKISFSNIISDMKVARSATARVRSRPELRIQFDEGYDNYPGQEKTDDLKKRKNIFTGKRLNIFDMMAVTKEAPETDTSPSLWDVEFAKQLATVNEQPLQNGFEELIQWTKEGKLWEFPINNEAGFDDDGSEFHEHIFLEKHLESFPKQGPIRHFMELVTCGLSKNPYLSVKQKVEHIEWFRNYFNEKKDILKESNIQFN

SEQ ID NO: 39945 - protein, 323 aa, Homo sapiens
MAAAALPAWLSLQSRARTLRAFSTAVYSATPVPTPSLPERTPGNERPPRRKALPPRTEKMAVDQDWPSVYPVAAPFKPSAVPLPVRMGYPVKKGVPMAKEGNLELLKIPNFLHLTPVAIKKHCEALKDFCTEWPAALDSDEKCEKHFPIEIDSTDYVSSGPSVRNPRARVVVLRVKLSSLNLDDHAKKKLIKLVGERYCKTTDVLTIKTDRCPLRRQNYDYAVYLLTVLYHESWNTEEWEKSKTEADMEEYIWENSSSERNILETLLQMKAAEKNMEINKEELLGTKEIEEYKKSVVSLKNEEENENSISQYKESVKRLLNVT

SEQ ID NO: 39946 - protein, 194 aa, Homo sapiens
MAAAALPAWLSLQSRARTLRAFSTAVYSATPVPTPSLPERTPGNERPPRRKALPPRTEKMAVDQDWPSVYPVAAPFKPSAVPLPVRMGYPVKKGVPMAKEGNLELLKIPNFLHLTPVAIKKHCEALKDFCTEWPAALDSDEKCEKHFPIEIDSTDYVSSGPSVRNPRARVVVLRVPFKEAELRLCSVSTNSVIP

SEQ ID NO: 39947 - protein, 396 aa, Homo sapiens
MEFLKTCVLRRNACTAVCFWRSKVVQKPSVRRISTTSPRSTVMPAWVIDKYGKNEVLRFTQNMMMPIIHYPNEVIVKVHAASVNPIDVNMRSGYGATALNMKRDPLHVKIKGEEFPLTLGRDVSGVVMECGLDVKYFKPGDEVWAAVPPWKQGTLSEFVVVSGNEVSHKPKSLTHTQAASLPYVALTAWSAINKVGGLNDKNCTGKRVLILGASGGVGTFAIQVMKAWDAHVTAVCSQDASELVRKLGADDVIDYKSGSVEEQLKSLKPFDFILDNVGGSTETWAPDFLKKWSGATYVTLVTPFLLNMDRLGIADGMLQTGVTVGSKALKHFWKGVHYRWAFFMASGPCLDDIAELVDAGKIRPVIEQTFPFSKVPEAFLKVERGHARGKTVINVV

SEQ ID NO: 39948 - protein, 296 aa, Homo sapiens
MKRDPLHVKIKGEEFPLTLGRDVSGVVMECGLDVKYFKPGDEVWAAVPPWKQGTLSEFVVVSGNEVSHKPKSLTHTQAASLPYVALTAWSAINKVGGLNDKNCTGKRVLILGASGGVGTFAIQVMKAWDAHVTAVCSQDASELVRKLGADDVIDYKSGSVEEQLKSLKPFDFILDNVGGSTETWAPDFLKKWSGATYVTLVTPFLLNMDRLGIADGMLQTGVTVGSKALKHFWKGVHYRWAFFMASGPCLDDIAELVDAGKIRPVIEQTFPFSKVPEAFLKVERGHARGKTVINVV

SEQ ID NO: 39949 - protein, 225 aa, Homo sapiens
MEFLKTCVLRRNACTAVCFWRSKVVQKPSVRRISTTSPRSTVMPAWVIDKYGKNEVLRFTQNMMMPIIHYPNEVIVKVHAASVNPIDVNMRSGYGATALNMKRDPLHVKIKGEEFPLTLGRDVSGVVMECGLDVKYFKPGDEVWAAVPPWKQGTLSEFVVVSGNEVSHKPKSLTHTQAASLPYVALTAWSAINKVGGLNDKNCTGKRISGKESIIAGHFSWPVAH

SEQ ID NO: 39950 - protein, 776 aa, Homo sapiens
MAAPGDPQDELLPLAGPGSQWLRHRGEGENEAVTPKGATPAPQAGEPSPGLGARAREAASREAGSGPARQSPVAMETASTGVAGVSSAMDHTFSTTSKDGEGSCYTSLISDICYPPQEDSTYFTGILQKENGHVTISESPEELGTPGPSLPDVPGIESRGLFSSDSGIEMTPAESTEVNKILADPLDQMKAEAYKYIDITRPEEVKHQEQHHPELEDKDLDFKNKDTDISIKPEGVREPDKPAPVEGKIIKDHLLEESTFAPYIDDLSEEQRRAPQITTPVKITLTEIEPSVETTTQEKTPEKQDICLKPSPDTVPTVTVSEPEDDSPGSITPPSSGTEPSAAESQGKGSISEDELITAIKEAKGLSYETAENPRPVGQLADRPEVKARSGPPTIPSPLDHEASSAESGDSEIELVSEDPMAAEDALPSGYVSFGHVGGPPPSPASPSIQYSILREEREAELDSELIIESCDASSASEESPKREQDSPPMKPSALDAIREETGVRAEERAPSRRGLAEPGSFLDYPSTEPQPGPELPPGDGALEPETPMLPRKPEEDSSSNQSPAATKGPGPLGPGAPPPLLFLNKQKAIDLLYWRDIKQTGIVFGSFLLLLFSLTQFSVVSVVAYLALAALSATISFRIYKSVLQAVQKTDEGHPFKAYLELEITLSQEQIQKYTDCLQFYVNSTLKELRRLFLVQDLVDSLKFAVLMWLLTYVGALFNGLTLLLMAVVSMFTLPVVYVKHQAQIDQYLGLVRTHINAVVAKIQAKIPGAKRHAE

SEQ ID NO: 39951 - protein, 356 aa, Homo sapiens
MAAEDALPSGYVSFGHVGGPPPSPASPSIQYSILREEREAELDSELIIESCDASSASEESPKREQDSPPMKPSALDAIREETGVRAEERAPSRRGLAEPGSFLDYPSTEPQPGPELPPGDGALEPETPMLPRKPEEDSSSNQSPAATKGPGPLGPGAPPPLLFLNKQKAIDLLYWRDIKQTGIVFGSFLLLLFSLTQFSVVSVVAYLALAALSATISFRIYKSVLQAVQKTDEGHPFKAYLELEITLSQEQIQKYTDCLQFYVNSTLKELRRLFLVQDLVDSLKFAVLMWLLTYVGALFNGLTLLLMAVVSMFTLPVVYVKHQAQIDQYLGLVRTHINAVVAKIQAKIPGAKRHAE

SEQ ID NO: 39952 - protein, 208 aa, Homo sapiens
MQATADSTKMDCVWSNWKSQAIDLLYWRDIKQTGIVFGSFLLLLFSLTQFSVVSVVAYLALAALSATISFRIYKSVLQAVQKTDEGHPFKAYLELEITLSQEQIQKYTDCLQFYVNSTLKELRRLFLVQDLVDSLKFAVLMWLLTYVGALFNGLTLLLMAVVSMFTLPVVYVKHQAQIDQYLGLVRTHINAVVAKIQAKIPGAKRHAE

SEQ ID NO: 39953 - protein, 396 aa, Homo sapiens
MAAPCVSYGGAVSYRLLLWGRGSLARKQGLWKTAAPELQTNVRSQILRLRHTAFVIPKKNVPTSKRETYTEDFIKKQIEEFNIGKRHLANMMGEDPETFTQEDIDRAIAYLFPSGLFEKRARPVMKHPEQIFPRQRAIQWGEDGRPFHYLFYTGKQSYYSLMHDVYGMLLNLEKHQSHLQAKSLLPEKTVTRDVIGSRWLIKEELEEMLVEKLSDLDYMQFIRLLEKLLTSQCGAAEEEFVQRFRRSVTLESKKQLIEPVQYDEQGMAFSKSEGKRKTAKAEAIVYKHGSGRIKVNGIDYQLYFPITQDREQLMFPFHFVDRLGKHDVTCTVSGGGRSAQAGAIRLAMAKALCSFVTEDEVEWMRQAGLLTTDPRVRERKKPGQEGARRKFTWKKR

SEQ ID NO: 39954 - protein, 602 aa, Homo sapiens
MAALAAAAKKVWSARRLLVLLFTPLALLPVVFALPPKEGRCLFVILLMAVYWCTEALPLSVTALLPIVLFPFMGILPSNKVCPQYFLDTNFLFLSGLIMASAIEEWNLHRRIALKILMLVGVQPARLILGMMVTTSFLSMWLSNTASTAMMLPIANAILKSLFGQKEVRKDPSQESEENTAAVRRNGLHTVPTEMQFLASTEAKDHPGETEVPLDLPADSRKEDEYRRNIWKGFLISIPYSASIGGTATLTGTAPNLILLGQLKSFFPQCDVVNFGSWFIFAFPLMLLFLLAGWLWISFLYGGLSFRGWRKNKSEIRTNAEDRARAVIREEYQNLGPIKFAEQAVFILFCMFAILLFTRDPKFIPGWASLFNPGFLSDAVTGVAIVTILFFFPSQRPSLKWWFDFKAPNTETEPLLTWKKAQETVPWNIILLLGGGFAMAKGCEESGLSVWIGGQLHPLENVPPALAVLLITVVIAFFTEFASNTATIIIFLPVLAELAIRLRVHPLYLMIPGTVGCSFAFMLPVSTPPNSIAFASGHLLVKDMVRTGLLMNLMGVLLLSLAMNTWAQTIFQLGTFPDWADMYSVNVTALPPTLANDTFRTL

SEQ ID NO: 39955 - protein, 232 aa, Homo sapiens
MAALAAAAKKVWSARRLLVLLFTPLALLPVVFALPPKEGRCLFVILLMAVYWCTEALPLSVTALLPIVLFPFMGILPSNKVCPQYFLDTNFLFLSGLIMASAIEEWNLHRRIALKILMLVGVQPARLILGMMVTTSFLSMWLSNTASTAMMLPIANAILKSLFGQKEVRKDPSQESEENTGIEPNTFLSEERLKLQAPLVIRLGQITESGQWNMSGNDVCNFRVLSFLPGGM

SEQ ID NO: 39956 - protein, 520 aa, Homo sapiens
MAVYWCTEALPLSVTALLPIVLFPFMGILPSNKVCPQYFLDTNFLFLSGLIMASAIEEWNLHRRIALKILMLVGVQPARLILGMMVTTSFLSMWLSNTASTAMMLPIANAILKSLFGQKEVRKDPSQESEENTAAVRRNGLHTVPTEMQFLASTEAKDHPGETEVPLDLPADSRKEDEYRRNIWKGFLISIPYSASIGGTATLTGTAPNLILLGQLKSFFPQCDVVNFGSWFIFAFPLMLLFLLAGWLWISFLYGGLSFRGWRKNKSEIRTNAEDRARAVIREEYQNLGPIKFLSDAVTGVAIVTILFFFPSQRPSLKWWFDFKAPNTETEPLLTWKKAQETVPWNIILLLGGGFAMAKGCEESGLSVWIGGQLHPLENVPPALAVLLITVVIAFFTEFASNTATIIIFLPVLAELAIRLRVHPLYLMIPGTVGCSFAFMLPVSTPPNSIAFASGHLLVKDMVRTGLLMNLMGVLLLSLAMNTWAQTIFQLGTFPDWADMYSVNVTALPPTLANDTFRTL

SEQ ID NO: 39957 - protein, 338 aa, Homo sapiens
MAALAAAAKKVWSARRLLVLLFTPLALLPVVFALPPKEGRCLFVILLMAVYWCTEALPLSVTALLPIVLFPFMGILPSNKVCPQYFLDTNFLFLSGLIMASAIEEWNLHRRIALKILMLVGVQPARLILGMMVTTSFLSMWLSNTASTAMMLPIANAILKSLFGQKEVRKDPSQESEENTAKTTLGRQRFHWICRLTPGRRMNIVGTSGRASSSPSPTQPVLGAQPHSRAQPLTSSCLASSRGWLWISFLYGGLSFRGWRKNKSEIRTNAEDRARAVIREEYQNLGPIKFAEQAVFILFCMFAILLFTRDPKFIPGWASLFNPGCKMGIISISTIQKM

SEQ ID NO: 39958 - protein, 552 aa, Homo sapiens
MAALAAAAKKVWSARRLLVLLFTPLALLPVVFALPPKEGRCLFVILLMAVYWCTEALPLSVTALLPIVLFPFMGILPSNKVCPQYFLDTNFLFLSGLIMASAIEEWNLHRRIALKILMLVGVQPARLILGMMVTTSFLSMWLSNTASTAMMLPIANAILKSLFGQKEVRKDPSQESEENTAKTTLGRQRFHWICRLTPGRRMNIVGTSGRASSSPSPTQPVLGAQPHSRAQPLTSSCLASSRGWLWISFLYGGLSFRGWRKNKSEIRTNAEDRARAVIREEYQNLGPIKFAEQAVFILFCMFAILLFTRDPKFIPGWASLFNPGFLSDAVTGVAIVTILFFFPSQRPSLKWWFDFKAPNTETEPLLTWKKAQETVPWNIILLLGGGFAMAKGCEESGLSVWIGGQLHPLENVPPALAVLLITVVIAFFTEFASNTATIIIFLPVLAELAIRLRVHPLYLMIPGTVGCSFAFMLPVSTPPNSIAFASGHLLVKDMVRTGLLMNLMGVLLLSLAMNTWAQTIFQLGTFPDWADMYSVNVTALPPTLANDTFRTL

SEQ ID NO: 39959 - protein, 555 aa, Homo sapiens
MAVYWCTEALPLSVTALLPIVLFPFMGILPSNKVCPQYFLDTNFLFLSGLIMASAIEEWNLHRRIALKILMLVGVQPARLILGMMVTTSFLSMWLSNTASTAMMLPIANAILKSLFGQKEVRKDPSQESEENTAAVRRNGLHTVPTEMQFLASTEAKDHPGETEVPLDLPADSRKEDEYRRNIWKGFLISIPYSASIGGTATLTGTAPNLILLGQLKSFFPQCDVVNFGSWFIFAFPLMLLFLLAGWLWISFLYGGLSFRGWRKNKSEIRTNAEDRARAVIREEYQNLGPIKFAEQAVFILFCMFAILLFTRDPKFIPGWASLFNPGFLSDAVTGVAIVTILFFFPSQRPSLKWWFDFKAPNTETEPLLTWKKAQETVPWNIILLLGGGFAMAKGCEESGLSVWIGGQLHPLENVPPALAVLLITVVIAFFTEFASNTATIIIFLPVLAELAIRLRVHPLYLMIPGTVGCSFAFMLPVSTPPNSIAFASGHLLVKDMVRTGLLMNLMGVLLLSLAMNTWAQTIFQLGTFPDWADMYSVNVTALPPTLANDTFRTL

SEQ ID NO: 39960 - protein, 408 aa, Homo sapiens
MMCSRVPSEQSSGTSLLPKDGAPFSWDSLDEDGLDDSLLELSEGEEDDGDVNYTEEEIDALLKEDDPSYEQSSGEDDGGHVEKGERGSQILLDTPREKNSSYSLGPVAETPDLFKLPQLSTSSGHGPAHTKPLNRRSVLEKNLIKVTVAPFNPTVCDALLDKDETDSSKDTEKLSSLGEEMREDGLSPNESKLCTESEGISPNNSAWNGPQLSSSNNNFQQTVSDKNMPDSENPTSVFSRISDHSETPNMELSCRNGGSHKSSCEMRSLVVSTSSNKQDVLNKDSGKMKGHERRLGKVIPVLQTKTRTNVPTFSQSNLEQQKQLYLRSVIAHIEDPEDTNQGISGELCALMDQVHHMQHSKWQHPSDLTTRNYARRQKHLQRYSLTQWVDRNMRSHHRFQRLPDFSYS

SEQ ID NO: 39961 - protein, 342 aa, Homo sapiens
MMCSRVPSEQSSGTSLLPKDGAPFSWDSLDEDGLDDSLLELSEGEEDDGDVNYTEEEIDALLKEDDPSYEQSSGEDDGGHVEKGERGSQILLDTPREKNSSYSLGPVAETPDLFKLPQLSTSSGHGPAHTKPLNRRSVLEKNLIKVTVAPFNPTVCDALLDKDETDSSKDTEKLSSLGEEMREDGLSPNESKLCTESEGISPNNSAWNGPQLSSSNNNFQQTVSDKNMPDSENPTSVFSRISDHSETPNMELSCRNGGSHKSSCEMRSLVVSTSSNKQDVLNKDSGKMKGHERRLGKVIPVLQTKTRTNVPTFSQSNLEQQKQLYLRSVIAHIEDPEDTNQG

SEQ ID NO: 39962 - protein, 258 aa, Homo sapiens
MAASVLNTVLRRLPMLSLFRGSHRVQVPLQTLCTKAPSEEDSLSSVPISPYKDEPWKYLESEEYQERYGSRPVWADYRRNHKGGVPPQRTRKTCIRRNKVVGNPCPICRDHKLHVDFRNVKLLEQFVCAHTGIIFYAPYTGVCVKQHKRLTQAIQKARDHGLLIYHIPQVEPRDLDFSTSHGAVSATPPAPTLVSGDPWYPWYNWKQPPERELSRLRRLYQGHLQEESGPPPESMPKMPPRTPAEASSTGQTGPQSAL

SEQ ID NO: 39963 - protein, 66 aa, Homo sapiens
MDPPARKEKTKVKESVSRVEKAKQKSAQQELKQRQRAEIYALNRVMTELEQQQFDEFCKQMQPPGE

SEQ ID NO: 39964 - protein, 3571 aa, Homo sapiens
MWPRLAFCCWGLALVSGWATFQQMSPSRNFSFRLFPETAPGAPGSIPAPPAPGDEAAGSRVERLGQAFRRRVRLLRELSERLELVFLVDDSSSVGEVNFRSELMFVRKLLSDFPVVPTATRVAIVTFSSKNYVVPRVDYISTRRARQHKCALLLQEIPAISYRGGGTYTKGAFQQAAQILLHARENSTKVVFLITDGYSNGGDPRPIAASLRDSGVEIFTFGIWQGNIRELNDMASTPKEEHCYLLHSFEEFEALARRALHEDLPSGSFIQDDMVHCSYLCDEGKDCCDRMGSCKCGTHTGHFECICEKGYYGKGLQYECTACPSGTYKPEGSPGGISSCIPCPDENHTSPPGSTSPEDCVCREGYRASGQTCELVHCPALKPPENGYFIQNTCNNHFNAACGVRCHPGFDLVGSSIILCLPNGLWSGSESYCRVRTCPHLRQPKHGHISCSTREMLYKTTCLVACDEGYRLEGSDKLTCQGNSQWDGPEPRCVERHCSTFQMPKDVIISPHNCGKQPAKFGTICYVSCRQGFILSGVKEMLRCTTSGKWNVGVQAAVCKDVEAPQINCPKDIEAKTLEQQDSANVTWQIPTAKDNSGEKVSVHVHPAFTPPYLFPIGDVAIVYTATDLSGNQASCIFHIKVIDAEPPVIDWCRSPPPVQVSEKVHAASWDEPQFSDNSGAELVITRSHTQGDLFPQGETIVQYTATDPSGNNRTCDIHIVIKGSPCEIPFTPVNGDFICTPDNTGVNCTLTCLEGYDFTEGSTDKYYCAYEDGVWKPTYTTEWPDCAKKRFANHGFKSFEMFYKAARCDDTDLMKKFSEAFETTLGKMVPSFCSDAEDIDCRLEENLTKKYCLEYNYDYENGFAIGPGGWGAANRLDYSYDDFLDTVQETATSIGNAKSSRIKRSAPLSDYKIKLIFNITASVPLPDERNDTLEWENQQRLLQTLETITNKLKRTLNKDPMYSFQLASEILIADSNSLETKKASPFCRPGSVLRGRMCVNCPLGTYYNLEHFTCESCRIGSYQDEEGQLECKLCPSGMYTEYIHSRNISDCKAQCKQGTYSYSGLETCESCPLGTYQPKFGSRSCLSCPENTSTVKRGAVNISACGVPCPEGKFSRSGLMPCHPCPRDYYQPNAGKAFCLACPFYGTTPFAGSRSITECSSFSSTFSAAEESVVPPASLGHIKKRHEISSQVFHECFFNPCHNSGTCQQLGRGYVCLCPLGYTGLKCETDIDECSPLPCLNNGVCKDLVGEFICECPSGYTGQRCEENINECSSSPCLNKGICVDGVAGYRCTCVKGFVGLHCETEVNECQSNPCLNNAVCEDQVGGFLCKCPPGFLGTRCGKNVDECLSQPCKNGATCKDGANSFRCLCAAGFTGSHCELNINECQSNPCRNQATCVDELNSYSCKCQPGFSGKRCETEQSTGFNLDFEVSGIYGYVMLDGMLPSLHALTCTFWMKSSDDMNYGTPISYAVDNGSDNTLLLTDYNGWVLYVNGREKITNCPSVNDGRWHHIAITWTSANGIWKVYIDGKLSDGGAGLSVGLPIPGGGALVLGQEQDKKGEGFSPAESFVGSISQLNLWDYVLSPQQVKSLATSCPEELSKGNVLAWPDFLSGIVGKVKIDSKSIFCSDCPRLGGSVPHLRTASEDLKPGSKVNLFCDPGFQLVGNPVQYCLNQGQWTQPLPHCERISCGVPPPLENGFHSADDFYAGSTVTYQCNNGYYLLGDSRMFCTDNGSWNGVSPSCLDVDECAVGSDCSEHASCLNVDGSYICSCVPPYTGDGKNCAEPIKCKAPGNPENGHSSGEIYTVGAEVTFSCQEGYQLMGVTKITCLESGEWNHLIPYCKAVSCGKPAIPENGCIEELAFTFGSKVTYRCNKGYTLAGDKESSCLANSSWSHSPPVCEPVKCSSPENINNGKYILSGLTYLSTASYSCDTGYSLQGPSIIECTASGIWDRAPPACHLVFCGEPPAIKDAVITGNNFTFRNTVTYTCKEGYTLAGLDTIECLADGKWSRSDQQCLAVSCDEPPIVDHASPETAHRLFGDIAFYYCSDGYSLADNSQLLCNAQGKWVPPEGQDMPRCIAHFCEKPPSVSYSILESVSKAKFAAGSVVSFKCMEGFVLNTSAKIECMRGGQWNPSPMSIQCIPVRCGEPPSIMNGYASGSNYSFGAMVAYSCNKGFYIKGEKKSTCEATGQWSSPIPTCHPVSCGEPPKVENGFLEHTTGRIFESEVRYQCNPGYKSVGSPVFVCQANRHWHSESPLMCVPLDCGKPPPIQNGFMKGENFEVGSKVQFFCNEGYELVGDSSWTCQKSGKWNKKSNPKCMPAKCPEPPLLENQLVLKELTTEVGVVTFSCKEGHVLQGPSVLKCLPSQQWNDSFPVCKIVLCTPPPLISFGVPIPSSALHFGSTVKYSCVGGFFLRGNSTTLCQPDGTWSSPLPECVPVECPQPEEIPNGIIDVQGLAYLSTALYTCKPGFELVGNTTTLCGENGHWLGGKPTCKAIECLKPKEILNGKFSYTDLHYGQTVTYSCNRGFRLEGPSALTCLETGDWDVDAPSCNAIHCDSPQPIENGFVEGADYSYGAIIIYSCFPGFQVAGHAMQTCEESGWSSSIPTCMPIDCGLPPHIDFGDCTKLKDDQGYFEQEDDMMEVPYVTPHPPYHLGAVAKTWENTKESPATHSSNFLYGTMVSYTCNPGYELLGNPVLICQEDGTWNGSAPSCISIECDLPTAPENGFLRFTETSMGSAVQYSCKPGHILAGSDLRLCLENRKWSGASPRCEAISCKKPNPVMNGSIKGSNYTYLSTLYYECDPGYVLNGTERRTCQDDKNWDEDEPICIPVDCSSPPVSANGQVRGDEYTFQKEIEYTCNEGFLLEGARSRVCLANGSWSGATPDCVPVRCATPPQLANGVTEGLDYGFMKEVTFHCHEGYILHGAPKLTCQSDGNWDAEIPLCKPVNCGPPEDLAHGFPNGFSFIHGGHIQYQCFPGYKLHGNSSRRCLSNGSWSGSSPSCLPCRCSTPVIEYGTVNGTDFDCGKAARIQCFKGFKLLGLSEITCEADGQWSSGFPHCEHTSCGSLPMIPNAFISETSSWKENVITYSCRSGYVIQGSSDLICTEKGVWSQPYPVCEPLSCGSPPSVANAVATGEAHTYESEVKLRCLEGYTMDTDTDTFTCQKDGRWFPERISCSPKKCPLPENITHILVHGDDFSVNRQVSVSCAEGYTFEGVNISVCQLDGTWEPPFSDESCSPVSCGKPESPEHGFVVGSKYTFESTIIYQCEPGYELEGNRERVCQENRQWSGGVAICKETRCETPLEFLNGKADIENRTTGPNVVYSCNRGYSLEGPSEAHCTENGTWSHPVPLCKPNPCPVPFVIPENALLSEKEFYVDQNVSIKCREGFLLQGHGIITCNPDETWTQTSAKCEKISCGPPAHVENAIARGVHYQYGDMITYSCYSGYMLEGFLRSVCLENGTWTSPPICRAVCRFPCQNGGICQRPNACSCPEGWMGRLCEEPICILPCLNGGRCVAPYQCDCPPGWTGSRCHTAVCQSPCLNGGKCVRPNRCHCLSSWTGHNCSRKRRTGF

SEQ ID NO: 39965 - protein, 868 aa, Homo sapiens
MWPRLAFCCWGLALVSGWATFQQMSPSRNFSFRLFPETAPGAPGSIPAPPAPGDEAAGSRVERLGQAFRRRVRLLRELSERLELVFLVDDSSSVGEVNFRSELMFVRKLLSDFPVVPTATRVAIVTFSSKNYVVPRVDYISTRRARQHKCALLLQEIPAISYRGGGTYTKGAFQQAAQILLHARENSTKVVFLITDGYSNGGDPRPIAASLRDSGVEIFTFGIWQGNIRELNDMASTPKEEHCYLLHSFEEFEALARRALHEDLPSGSFIQDDMVHCSYLCDEGKDCCDRMGSCKCGTHTGHFECICEKGYYGKGLQYECTACPSGTYKPEGSPGGISSCIPCPDENHTSPPGSTSPEDCVCREGYRASGQTCELVHCPALKPPENGYFIQNTCNNHFNAACGVRCHPGFDLVGSSIILCLPNGLWSGSESYCRVRTCPHLRQPKHGHISCSTREMLYKTTCLVACDEGYRLEGSDKLTCQGNSQWDGPEPRCVERHCSTFQMPKDVIISPHNCGKQPAKFGTICYVSCRQGFILSGVKEMLRCTTSGKWNVGVQAAVCKDVEAPQINCPKDIEAKTLEQQDSANVTWQIPTAKDNSGEKVSVHVHPAFTPPYLFPIGDVAIVYTATDLSGNQASCIFHIKVIDAEPPVIDWCRSPPPVQVSEKVHAASWDEPQFSDNSGAELVITRSHTQGDLFPQGETIVQYTATDPSGNNRTCDIHIVIKGSPCEIPFTPVNGDFICTPDNTGVNCTLTCLEGYDFTEGSTDKYYCAYEDGVWKPTYTTEWPDCAKKRFANHGFKSFEMFYKAARCDDTDLMKKFSEAFETTLGKMVPSFCSDAEDIDCRLEENLTKKYCLEYNYDYENGFAIGN

SEQ ID NO: 39966 - protein, 1497 aa, Homo sapiens
MPRCIAHFCEKPPSVSYSILESVSKAKFAAGSVVSFKCMEGFVLNTSAKIECMRGGQWNPSPMSIQCIPVRCGEPPSIMNGYASGSNYSFGAMVAYSCNKGFYIKGEKKSTCEATGQWSSPIPTCHPVSCGEPPKVENGFLEHTTGRIFESEVRYQCNPGYKSVGSPVFVCQANRHWHSESPLMCVPLDCGKPPPIQNGFMKGENFEVGSKVQFFCNEGYELVGDSSWTCQKSGKWNKKSNPKCMPAKCPEPPLLENQLVLKELTTEVGVVTFSCKEGHVLQGPSVLKCLPSQQWNDSFPVCKIVLCTPPPLISFGVPIPSSALHFGSTVKYSCVGGFFLRGNSTTLCQPDGTWSSPLPECVPVECPQPEEIPNGIIDVQGLAYLSTALYTCKPGFELVGNTTTLCGENGHWLGGKPTCKAIECLKPKEILNGKFSYTDLHYGQTVTYSCNRGFRLEGPSALTCLETGDWDVDAPSCNAIHCDSPQPIENGFVEGADYSYGAIIIYSCFPGFQVAGHAMQTCEESGWSSSIPTCMPIDCGLPPHIDFGDCTKLKDDQGYFEQEDDMMEVPYVTPHPPYHLGAVAKTWENTKESPATHSSNFLYGTMVSYTCNPGYELLGNPVLICQEDGTWNGSAPSCISIECDLPTAPENGFLRFTETSMGSAVQYSCKPGHILAGSDLRLCLENRKWSGASPRCEAISCKKPNPVMNGSIKGSNYTYLSTLYYECDPGYVLNGTERRTCQDDKNWDEDEPICIPVDCSSPPVSANGQVRGDEYTFQKEIEYTCNEGFLLEGARSRVCLANGSWSGATPDCVPVRCATPPQLANGVTEGLDYGFMKEVTFHCHEGYILHGAPKLTCQSDGNWDAEIPLCKPVNCGPPEDLAHGFPNGFSFIHGGHIQYQCFPGYKLHGNSSRRCLSNGSWSGSSPSCLPCRCSTPVIEYGTVNGTDFDCGKAARIQCFKGFKLLGLSEITCEADGQWSSGFPHCEHTSCGSLPMIPNAFISETSSWKENVITYSCRSGYVIQGSSDLICTEKGVWSQPYPVCEPLSCGSPPSVANAVATGEAHTYESEVKLRCLEGYTMDTDTDTFTCQKDGRWFPERISCSPKKCPLPENITHILVHGDDFSVNRQVSVSCAEGYTFEGVNISVCQLDGTWEPPFSDESCSPVSCGKPESPEHGFVVGSKYTFESTIIYQCEPGYELEGNRERVCQENRQWSGGVAICKETRCETPLEFLNGKADIENRTTGPNVVYSCNRGYSLEGPSEAHCTENGTWSHPVPLCKPNPCPVPFVIPENALLSEKEFYVDQNVSIKCREGFLLQGHGIITCNPDETWTQTSAKCEKISCGPPAHVENAIARGVHYQYGDMITYSCYSGYMLEGFLRSVCLENGTWTSPPICRAVCRFPCQNGGICQRPNACSCPEGWMGRLCEEPICILPCLNGGRCVAPYQCDCPPGWTGSRCHTAVCQSPCLNGGKCVRPNRCHCLSSWTGHNCSRKRRTGF

SEQ ID NO: 39967 - protein, 1546 aa, Homo sapiens
MWPRLAFCCWGLALVSGWATFQQMSPSRNFSFRLFPETAPGAPGSIPAPPAPGDEAAGSRVERLGQAFRRRVRLLRELSERLELVFLVDDSSSVGEVNFRSELMFVRKLLSDFPVVPTATRVAIVTFSSKNYVVPRVDYISTRRARQHKCALLLQEIPAISYRGGGTYTKGAFQQAAQILLHARENSTKVVFLITDGYSNGGDPRPIAASLRDSGVEIFTFGIWQGNIRELNDMASTPKEEHCYLLHSFEEFEALARRALHEDLPSGSFIQDDMVHCSYLCDEGKDCCDRMGSCKCGTHTGHFECICEKGYYGKGLQYECTACPSGTYKPEGSPGGISSCIPCPDENHTSPPGSTSPEDCVCREGYRASGQTCELVHCPALKPPENGYFIQNTCNNHFNAACGVRCHPGFDLVGSSIILCLPNGLWSGSESYCRVRTCPHLRQPKHGHISCSTREMLYKTTCLVACDEGYRLEGSDKLTCQGNSQWDGPEPRCVERHCSTFQMPKDVIISPHNCGKQPAKFGTICYVSCRQGFILSGVKEMLRCTTSGKWNVGVQAAVCKDVEAPQINCPKDIEAKTLEQQDSANVTWQIPTAKDNSGEKVSVHVHPAFTPPYLFPIGDVAIVYTATDLSGNQASCIFHIKVIDAEPPVIDWCRSPPPVQVSEKVHAASWDEPQFSDNSGAELVITRSHTQGDLFPQGETIVQYTATDPSGNNRTCDIHIVIKGSPCEIPFTPVNGDFICTPDNTGVNCTLTCLEGYDFTEGSTDKYYCAYEDGVWKPTYTTEWPDCAKKRFANHGFKSFEMFYKAARCDDTDLMKKFSEAFETTLGKMVPSFCSDAEDIDCRLEENLTKKYCLEYNYDYENGFAIGPGGWGAANRLDYSYDDFLDTVQETATSIGNAKSSRIKRSAPLSDYKIKLIFNITASVPLPDERNDTLEWENQQRLLQTLETITNKLKRTLNKDPMYSFQLASEILIADSNSLETKKASPFCRPGSVLRGRMCVNCPLGTYYNLEHFTCESCRIGSYQDEEGQLECKLCPSGMYTEYIHSRNISDCKAQCKQGTYSYSGLETCESCPLGTYQPKFGSRSCLSCPENTSTVKRGAVNISACGVPCPEGKFSRSGLMPCHPCPRDYYQPNAGKAFCLACPFYGTTPFAGSRSITECSSFSSTFSAAEESVVPPASLGHIKKRHEISSQVFHECFFNPCHNSGTCQQLGRGYVCLCPLGYTGLKCETDIDECSPLPCLNNGVCKDLVGEFICECPSGYTGQRCEENINECSSSPCLNKGICVDGVAGYRCTCVKGFVGLHCETEVNECQSNPCLNNAVCEDQVGGFLCKCPPGFLGTRCGKNVDECLSQPCKNGATCKDGANSFRCLCAAGFTGSHCELNINECQSNPCRNQATCVDELNSYSCKCQPGFSGKRCETEQSTGFNLDFEVSGIYGYVMLDGMLPSLHALTCTFWMKSSDDMNYGTPISYAVDNGSDNTLLLTDYNGWVLYVNGREKITNCPSVNDGRWHHIAITWTSANGIWKVYIDGKLSDGGAGLSVGLPIP

SEQ ID NO: 39968 - protein, 1262 aa, Homo sapiens
MLQQVPENINFPAEEEKILEFWTEFNCFQECLKQSKHKPKFTFYDGPPFATGLPHYGHILAGTIKDIVTRYAHQSGFHVDRRFGWDCHGLPVEYEIDKTLGIRGPEDVAKMGITEYNNQCRAIVMRYSAEWKSTVSRLGRWIDFDNDYKTLYPQFMESVWWVFKQLYDKGLVYRGVKVMPFSTACNTPLSNFESHQNYKDVQDPSVFVTFPLEEDETVSLVAWTTTPWTLPSNLAVCVNPEMQYVKIKDVARGRLLILMEARLSALYKLESDYEILERFPGAYLKGKKYRPLFDYFLKCKENGAFTVLVDNYVKEEEGTGVVHQAPYFGAEDYRVCMDFNIIRKDSLPVCPVDASGCFTTEVTDFAGQYVKDADKSIIRTLKEQGRLLVATTFTHSYPFCWRSDTPLIYKAVPSWFVRVENMVDQLLRNNDLCYWVPELVREKRFGNWLKDARDWTISRNRYWGTPIPLWVSDDFEEVVCIGSVAELEELSGAKISDLHRESVDHLTIPSRCGKGSLHRISEVFDCWFESGSMPYAQVHYPFENKREFEDAFPADFIAEGIDQTRGWFYTLLVLATALFGQPPFKNVIVNGLVLASDGQKMSKRKKNYPDPVSIIQKYGADALRLYLINSPVVRAENLRFKEEGVRDVLKDVLLPWYNAYRFLIQNVLRLQKEEEIEFLYNENTVRESPNITDRWILSFMQSLIGFFETEMAAYRLYTVVPRLVKFVDILTNWYVRMNRRRLKGENGMEDCVMALETLFSVLLSLCRLMAPYTPFLTELMYQNLKVLIDPVSVQDKDTLSIHYLMLPRVREELIDKKTESAVSQMQSVIELGRVIRDRKTIPIKYPLKEIVVIHQDPEALKDIKSLEKYIIEELNVRKVTLSTDKNKYGIRLRAEPDHMVLGKRLKGAFKAVMTSIKQLSSEELEQFQKTGTIVVEGHELHDEDIRLMYTFDQATGGTAQFEAHSDAQALVLLDVTPDQSMVDEGMAREVINRIQKLRKKCNLVPTDEITVYYKAKSEGTYLNSVIESHTEFIFTTIKAPLKPYPVSPSDKVLIQEKTQLKGSELEITLTRGSSLPGPACAYVNLNICANGSEQGGVLLLENPKGDNRLDLLKLKSVVTSIFGVKNTELAVFHDETEIQNQTDLLSLSGKTLCVTAGSAPSLINSSSTLLCQYINLQLLNAKPQECLMGTVGTLLLENPLGQNGLTHQGLLYEAAKVFGLRSRKLKLFLNETQTQEITEDIPVKTLNMKTVYVSVLPTTADF

SEQ ID NO: 39969 - protein, 1012 aa, Homo sapiens
MRWGLRPRGPGAAALATARSLWGTPRLPCSPGWQGATKRLLVRSVSGASNHQPNSNSGRYRDTVLLPQTSFPMKLLGRQQPDTELEIQQKCGFSELYSWQRERKVKTEFCLHDGPPYANGDPHVGHALNKILKDIANRFHMMNGSKIHFVPGWDCHGLPIEIKVLSELGREAQNLSAMEIRKKARSFAKAAIEKQKSAFIRWGIMADWNNCYYTFDGKYEAKQLRTFYQMYDKGLVYRSYKPVFWSPSSRTALAEAELEYNPEHVSRSIYVKFPLLKPSPKLASLIDGSSPVSILVWTTQPWTIPANEAVCYMPESKYAVVKCSKSGDLYVLAADKVASVASTLETTFETISTLSGVDLENGTCSHPLIPDKASPLLPANHVTMAKGTGLVHTAPAHGMEDYGVASQHNLPMDCLVDEDGVFTDVAGPELQNKAVLEEGTDVVIKMLQTAKNLLKEEKLVHSYPYDWRTKKPVVIRASKQWFINITDIKTAAKELLKKVKFIPGSALNGMVEMMDRRPYWCISRQRVWGVPIPVFHHKTKDEYLINSQTTEHIVKLVEQHGSDIWWTLPPEQLLPKEVLSEVGGPDALEYVPGQDILDIWFDSGTSWSYVLPGPDQRADLYLEGKDQLGGWFQSSLLTSVAARKRAPYKTVIVHGFTLGEKGEKMSKSLGNVIHPDVVVNGGQDQSKEPPYGADVLRWWVADSNVFTEVAIGPSVLNAARDDISKLRNTLRFLLGNVADFNPETDSIPVNDMYVIDQYMLHLLQDLANKITELYKQYDFGKVVRLLRTFYTRELSNFYFSIIKDRLYCEKENDPKRRSCQTALVEILDVIVRSFAPILPHLAEEVFQHIPYIKEPKSVFRTGWISTSSIWKKPGLEEAVESACAMRDSFLGSIPGKNAAEYKVITVIEPGLLFEIIEMLQSEETSSTSQLNELMMASESTLLAQEPREMTADVIELKGKFLINLEGGDIREESSYKVIVMPTTKEKCPRCWKYTAESSDTLCPRCAEVVSGK

SEQ ID NO: 39970 - protein, 2214 aa, Homo sapiens
MKRKERIARRLEGIENDTQPILLQSCTGLVTHRLLEEDTPRYMRASDPASPHIGRSNEEEETSDSSLEKQTRSKYCTETSGVHGDSPYGSGTMDTHSLESKAERIARYKAERRRQLAEKYGLTLDPEADSEYLSRYTKSRKEPDAVEKRGGKSDKQEESSRDASSLYPGTETMGLRTCAGESKDYALHVGDGSSDPEVLLNIENQRRGQELSATRQAHDLSPAAESSSTFSFSGRDSSFTEVPRSPKHAHSSSLQQAASRSPSFGDPQLSPEARPSTGKPKHEWFLQKDSEGDTPSLINWPSRVKVREKLVKEESARNSPELASESVTQRRHQPAPVHYVSFQSEHSAFDRVPSKAAGSTRQPIRGYVQPADTGHTAKLVTPETPENASECSWVASATQNVPKPPSLTVLEGDGRDSPVLHVCESKAEEEEGEGEGEEKEEDVCFTEALEQSKKTLLALEGDGLVRSPEDPSRNEDFGKPAVSTVTLEHQKELENVAQPPQAPHQPTERTGRSEMVLYIQSEPVSQDAKPTGHNREASKKRKVRTRSLSDFTGPPQLQALKYKDPASRRELELPSSKTEGPYGEISMLDTKVSVAQLRSAFLASANACRRPELKSRVERSAEGPGLPTGVERERGSRKPRRYFSPGESRKTSERFRTQPITSAERKESDRCTSHSETPTVDDEEKVDERAKLSVAAKRLLFREMEKSFDEQNVPKRRSRNTAVEQRLRRLQDRSLTQPITTEEVVIAATEPIPASCSGGTHPVMARLPSPTVARSAVQPARLQASAHQKALAKDQTNEGKELAEQGEPDSSTLSLAEKLALFNKLSQPVSKAISTRNRIDTRQRRMNARYQTQPVTLGEVEQVQSGKLIPFSPAVNTSVSTVASTVAPMYAGDLRTKPPLDHNASATDYKFSSSIENSDSPVRSILKSQAWQPLVEGSENKGMLREYGETESKRALTGRDSGMEKYGSFEEAEASYPILNRAREGDSHKESKYAVPRRGSLERANPPITHLGDEPKEFSMAKMNAQGNLDLRDRLPFEEKVEVENVMKRKFSLRAAEFGEPTSEQTGTAAGKTIAQTTAPVSWKPQDSSEQPQEKLCKNPCAMFAAGEIKTPTGEGLLDSPSKTMSIKERLALLKKSGEEDWRNRLSRRQEGGKAPASSLHTQEAGRSLIKKRVTESRESQMTIEERKQLITVREEAWKTRGRGAANDSTQFTVAGRMVKKGLASPTAITPVASPICGKTRGTTPVSKPLEDIEARPDMQLESDLKLDRLETFLRRLNNKVGGMHETVLTVTGKSVKEVMKPDDDETFAKFYRSVDYNMPRSPVEMDEDFDVIFDPYAPKLTSSVAEHKRAVRPKRRVQASKNPLKMLAAREDLLQEYTEQRLNVAFMESKRMKVEKMSSNSNFSEVTLAGLASKENFSNVSLRSVNLTEQNSNNSAVPYKRLMLLQIKGRRHVQTRLVEPRASALNSGDCFLLLSPHCCFLWVGEFANVIEKAKASELATLIQTKRELGCRATYIQTIEEGINTHTHAAKDFWKLLGGQTSYQSAGDPKEDELYEAAIIETNCIYRLMDDKLVPDDDYWGKIPKCSLLQPKEVLVFDFGSEVYVWHGKEVTLAQRKIAFQLAKHLWNGTFDYENCDINPLDPGECNPLIPRKGQGRPDWAIFGRLTEHNETILFKEKFLDWTELKRSNEKNPGELAQHKEDPRTDVKAYDVTRMVSMPQTTAGTILDGVNVGRGYGLVEGHDRRQFEITSVSVDVWHILEFDYSRLPKQSIGQFHEGDAYVVKWKFMVSTAVGSRQKGEHSVRAAGKEKCVYFFWQGRHSTVSEKGTSALMTVELDEERGAQVQVLQGKEPPCFLQCFQGGMVVHSGRREEEEENVQSEWRLYCVRGEVPVEGNLLEVACHCSSLRSRTSMVVLNVNKALIYLWHGCKAQAHTKEVGRTAANKIKEQCPLEAGLHSSSKVTIHECDEGSEPLGFWDALGRRDRKAYDCMLQDPGSFNFAPRLFILSSSSGDFAATEFVYPARAPSVVSSMPFLQEDLYSAPQPALFLVDNHHEVYLWQGWWPIENKITGSARIRWASDRKSAMETVLQYCKGKNLKKPAPKSYLIHAGLEPLTFTNMFPSWEHREDIAEITEMDTEVSNQITLVEDVLAKLCKTIYPLADLLARPLPEGVDPLKLEIYLTDEDFEFALDMTRDEYNALPAWKQVNLKKAKGLF

SEQ ID NO: 39971 - protein, 1788 aa, Homo sapiens
MKRKERIARRLEGIENDTQPILLQSCTGLVTHRLLEEDTPRYMRASDPASPHIGRSNEEEETSDSSLEKQTRSKYCTETSGVHGDSPYGSGTMDTHSLESKAERIARYKAERRRQLAEKYGLTLDPEADSEYLSRYTKSRKEPDAVEKRGGKSDKQEESSRDASSLYPGTETMGLRTCAGESKDYALHVGDGSSDPEVLLNIENQRRGQELSATRQAHDLSPAAESSSTFSFSGRDSSFTEVPRSPKHAHSSSLQQAASRSPSFGDPQLSPEARPRCTSHSETPTVDDEEKVDERAKLSVAAKRLLFREMEKSFDEQNVPKRRSRNTAVEQRLRRLQDRSLTQPITTEEVVIAATLQASAHQKALAKDQTNEGKELAEQGEPDSSTLSLAEKLALFNKLSQPVSKAISTRNRIDTRQRRMNARYQTQPVTLGEVEQVQSGKLIPFSPAVNTSVSTVASTVAPMYAGDLRTKPPLDHNASATDYKFSSSIENSDSPVRSILKSQAWQPLVEGSENKGMLREYGETESKRALTGRDSGMEKYGSFEEAEASYPILNRAREGDSHKESKYAVPRRGSLERANPPITHLGDEPKEFSMAKMNAQGNLDLRDRLPFEEKVEVENVMKRKFSLRAAEFGEPTSEQTGTAAGKTIAQTTAPVSWKPQDSSEQPQEKLCKNPCAMFAAGEIKTPTGEGLLDSPSKTMSIKERLALLKKSGEEDWRNRLSRRQEGGKAPASSLHTQEAGRSLIKKRVTESRESQMTIEERKQLITVREEAWKTRGRGAANDSTQFTVAGRMVKKGLASPTAITPVASPICGKTRGTTPVSKPLEDIEARPDMQLESDLKLDRLETFLRRLNNKVGGMHETVLTVTGKSVKEVMKPDDDETFAKFYRSVDYNMPRSPVEMDEDFDVIFDPYAPKLTSSVAEHKRAVRPKRRVQASKNPLKMLAAREDLLQEYTEQRLNVAFMESKRMKVEKMSSNSNFSEVTLAGLASKENFSNVSLRSVNLTEQNSNNSAVPYKRLMLLQIKGRRHVQTRLVEPRASALNSGDCFLLLSPHCCFLWVGEFANVIEKAKASELATLIQTKRELGCRATYIQTIEEGINTHTHAAKDFWKLLGGQTSYQSAGDPKEDELYEAAIIETNCIYRLMDDKLVPDDDYWGKIPKCSLLQPKEVLVFDFGSEVYVWHGKEVTLAQRKIAFQLAKHLWNGTFDYENCDINPLDPGECNPLIPRKGQGRPDWAIFGRLTEHNETILFKEKFLDWTELKRSNEKNPGELAQHKEDPRTDVKAYDVTRMVSMPQTTAGTILDGVNVGRGYGLVEGHDRRQFEITSVSVDVWHILEFDYSRLPKQSIGQFHEGDAYVVKWKFMVSTAVGSRQKGEHSVRAAGKEKCVYFFWQGRHSTVSEKGTSALMTVELDEERGAQVQVLQGKEPPCFLQCFQGGMVVHSGRREEEEENVQSEWRLYCVRGEVPVEGNLLEVACHCSSLRSRTSMVVLNVNKALIYLWHGCKAQAHTKEVGRTAANKIKEQCPLEAGLHSSSKVTIHECDEGSEPLGFWDALGRRDRKAYDCMLQDPGSFNFAPRLFILSSSSGDFAATEFVYPARAPSVVSSMPFLQEDLYSAPQPALFLVDNHHEVYLWQGWWPIENKITGSARIRWASDRKSAMETVLQYCKGKNLKKPAPKSYLIHAGLEPLTFTNMFPSWEHREDIAEITEMDTEVSNQITLVEDVLAKLCKTIYPLADLLARPLPEGVDPLKLEIYLTDEDFEFALDMTRDEYNALPAWKQVNLKKAKGLF

SEQ ID NO: 39972 - protein, 2187 aa, Homo sapiens
MKRKERIARRLEGIENDTQPILLQSCTGLVTHRLLEEDTPRYMRASDPASPHIGRSNEEEETSDSSLEKQTRSKYCTETSGVHGDSPYGSGTMDTHSLESKAERIARYKAERRRQLAEKYGLTLDPEADSEYLSRYTKSRKEPDAVEKRGGKSDKQEESSRDASSLYPGTETMGLRTCAGESKDYALHVGDGSSDPEVLLNIENQRRGQELSATRQAHDLSPAAESSSTFSFSGRDSSFTEVPRSPKHAHSSSLQQAASRSPSFGDPQLSPEARPRVKVREKLVKEESARNSPELASESVTQRRHQPAPVHYVSFQSEHSAFDRVPSKAAGSTRQPIRGYVQPADTGHTAKLVTPETPENASECSWVASATQNVPKPPSLTVLEGDGRDSPVLHVCESKAEEEEGEGEGEEKEEDVCFTEALEQSKKTLLALEGDGLVRSPEDPSRNEDFGKPAVSTVTLEHQKELENVAQPPQAPHQPTERTGRSEMVLYIQSEPVSQDAKPTGHNREASKKRKVRTRSLSDFTGPPQLQALKYKDPASRRELELPSSKTEGPYGEISMLDTKVSVAQLRSAFLASANACRRPELKSRVERSAEGPGLPTGVERERGSRKPRRYFSPGESRKTSERFRTQPITSAERKESDRCTSHSETPTVDDEEKVDERAKLSVAAKRLLFREMEKSFDEQNVPKRRSRNTAVEQRLRRLQDRSLTQPITTEEVVIAATEPIPASCSGGTHPVMARLPSPTVARSAVQPARLQASAHQKALAKDQTNEGKELAEQGEPDSSTLSLAEKLALFNKLSQPVSKAISTRNRIDTRQRRMNARYQTQPVTLGEVEQVQSGKLIPFSPAVNTSVSTVASTVAPMYAGDLRTKPPLDHNASATDYKFSSSIENSDSPVRSILKSQAWQPLVEGSENKGMLREYGETESKRALTGRDSGMEKYGSFEEAEASYPILNRAREGDSHKESKYAVPRRGSLERANPPITHLGDEPKEFSMAKMNAQGNLDLRDRLPFEEKVEVENVMKRKFSLRAAEFGEPTSEQTGTAAGKTIAQTTAPVSWKPQDSSEQPQEKLCKNPCAMFAAGEIKTPTGEGLLDSPSKTMSIKERLALLKKSGEEDWRNRLSRRQEGGKAPASSLHTQEAGRSLIKKRVTESRESQMTIEERKQLITVREEAWKTRGRGAANDSTQFTVAGRMVKKGLASPTAITPVASPICGKTRGTTPVSKPLEDIEARPDMQLESDLKLDRLETFLRRLNNKVGGMHETVLTVTGKSVKEVMKPDDDETFAKFYRSVDYNMPRSPVEMDEDFDVIFDPYAPKLTSSVAEHKRAVRPKRRVQASKNPLKMLAAREDLLQEYTEQRLNVAFMESKRMKVEKMSSNSNFSEVTLAGLASKENFSNVSLRSVNLTEQNSNNSAVPYKRLMLLQIKGRRHVQTRLVEPRASALNSGDCFLLLSPHCCFLWVGEFANVIEKAKASELATLIQTKRELGCRATYIQTIEEGINTHTHAAKDFWKLLGGQTSYQSAGDPKEDELYEAAIIETNCIYRLMDDKLVPDDDYWGKIPKCSLLQPKEVLVFDFGSEVYVWHGKEVTLAQRKIAFQLAKHLWNGTFDYENCDINPLDPGECNPLIPRKGQGRPDWAIFGRLTEHNETILFKEKFLDWTELKRSNEKNPGELAQHKEDPRTDVKAYDVTRMVSMPQTTAGTILDGVNVGRGYGLVEGHDRRQFEITSVSVDVWHILEFDYSRLPKQSIGQFHEGDAYVVKWKFMVSTAVGSRQKGEHSVRAAGKEKCVYFFWQGRHSTVSEKGTSALMTVELDEERGAQVQVLQGKEPPCFLQCFQGGMVVHSGRREEEEENVQSEWRLYCVRGEVPVEGNLLEVACHCSSLRSRTSMVVLNVNKALIYLWHGCKAQAHTKEVGRTAANKIKEQCPLEAGLHSSSKVTIHECDEGSEPLGFWDALGRRDRKAYDCMLQDPGSFNFAPRLFILSSSSGDFAATEFVYPARAPSVVSSMPFLQEDLYSAPQPALFLVDNHHEVYLWQGWWPIENKITGSARIRWASDRKSAMETVLQYCKGKNLKKPAPKSYLIHAGLEPLTFTNMFPSWEHREDIAEITEMDTEVSNQITLVEDVLAKLCKTIYPLADLLARPLPEGVDPLKLEIYLTDEDFEFALDMTRDEYNALPAWKQVNLKKAKGLF

SEQ ID NO: 39973 - protein, 2182 aa, Homo sapiens
MKRKERIARRLEGIENDTQPILLQSCTGLVTHRLLEEDTPRYMRASDPASPHIGRSNEEEETSDSSLEKQTRSKYCTETSGVHGDSPYGSGTMDTHSLESKAERIARYKAERRRQLAEKYGLTLDPEADSEYLSRYTKSRKEPDAVEKRGGKSDKQEESSRDASSLYPGTETMGLRTCAGESKDYALHVGDGSSDPEVLLNIENQRRGQELSATRQAHDLSPAAESSSTFSFSGRDSSFTEVPRSPKHAHSSSLQQAASRSPSFGDPQLSPEARPSTGKPKHEWFLQKDSEGDTPSLINWPSRVKVREKLVKEESARNSPELASESVTQRRHQPAPVHYVSFQSEHSAFDRVPSKAAGSTRQPIRGYVQPADTGHTAKLVTPETPENASECSWVASATQNVPKPPSLTVLEGDGRDSPVLHVCESKAEEEEGEGEGEEKEEDVCFTEALEQSKKTLLALEGDGLVRSPEDPSRNEDFGKPAVSTVTLEHQKELENVAQPPQAPHQPTERTGRSEMVLYIQSEPVSQDAKPTGHNREASKKRKVRTRSLSDFTGPPQLQALKYKDPASRRELELPSSKTEGPYGEISMLDTKVSVAQLRSAFLASANACRRPELKSRVERSAEGPGLPTGVERERGSRKPRRYFSPGESRKTSERFRTQPITSAERKESDRCTSHSETPTVDDEEKVDERAKLSVAAKRLLFREMEKSFDEQNVPKRRSRNTAVEQRLRRLQDRSLTQPITTEEVVIAATLQASAHQKALAKDQTNEGKELAEQGEPDSSTLSLAEKLALFNKLSQPVSKAISTRNRIDTRQRRMNARYQTQPVTLGEVEQVQSGKLIPFSPAVNTSVSTVASTVAPMYAGDLRTKPPLDHNASATDYKFSSSIENSDSPVRSILKSQAWQPLVEGSENKGMLREYGETESKRALTGRDSGMEKYGSFEEAEASYPILNRAREGDSHKESKYAVPRRGSLERANPPITHLGDEPKEFSMAKMNAQGNLDLRDRLPFEEKVEVENVMKRKFSLRAAEFGEPTSEQTGTAAGKTIAQTTAPVSWKPQDSSEQPQEKLCKNPCAMFAAGEIKTPTGEGLLDSPSKTMSIKERLALLKKSGEEDWRNRLSRRQEGGKAPASSLHTQEAGRSLIKKRVTESRESQMTIEERKQLITVREEAWKTRGRGAANDSTQFTVAGRMVKKGLASPTAITPVASPICGKTRGTTPVSKPLEDIEARPDMQLESDLKLDRLETFLRRLNNKVGGMHETVLTVTGKSVKEVMKPDDDETFAKFYRSVDYNMPRSPVEMDEDFDVIFDPYAPKLTSSVAEHKRAVRPKRRVQASKNPLKMLAAREDLLQEYTEQRLNVAFMESKRMKVEKMSSNSNFSEVTLAGLASKENFSNVSLRSVNLTEQNSNNSAVPYKRLMLLQIKGRRHVQTRLVEPRASALNSGDCFLLLSPHCCFLWVGEFANVIEKAKASELATLIQTKRELGCRATYIQTIEEGINTHTHAAKDFWKLLGGQTSYQSAGDPKEDELYEAAIIETNCIYRLMDDKLVPDDDYWGKIPKCSLLQPKEVLVFDFGSEVYVWHGKEVTLAQRKIAFQLAKHLWNGTFDYENCDINPLDPGECNPLIPRKGQGRPDWAIFGRLTEHNETILFKEKFLDWTELKRSNEKNPGELAQHKEDPRTDVKAYDVTRMVSMPQTTAGTILDGVNVGRGYGLVEGHDRRQFEITSVSVDVWHILEFDYSRLPKQSIGQFHEGDAYVVKWKFMVSTAVGSRQKGEHSVRAAGKEKCVYFFWQGRHSTVSEKGTSALMTVELDEERGAQVQVLQGKEPPCFLQCFQGGMVVHSGRREEEEENVQSEWRLYCVRGEVPVEGNLLEVACHCSSLRSRTSMVVLNVNKALIYLWHGCKAQAHTKEVGRTAANKIKEQCPLEAGLHSSSKVTIHECDEGSEPLGFWDALGRRDRKAYDCMLQDPGSFNFAPRLFILSSSSGDFAATEFVYPARAPSVVSSMPFLQEDLYSAPQPALFLVDNHHEVYLWQGWWPIENKITGSARIRWASDRKSAMETVLQYCKGKNLKKPAPKSYLIHAGLEPLTFTNMFPSWEHREDIAEITEMDTEVSNQITLVEDVLAKLCKTIYPLADLLARPLPEGVDPLKLEIYLTDEDFEFALDMTRDEYNALPAWKQVNLKKAKGLF

SEQ ID NO: 39974 - protein, 77 aa, Homo sapiens
MGLCFPCPGESAPPTPDLEEKRAKLAEAAERRQKEAASRGILDVQSVQEKRKKKEKIEKQIATSGPPPEGGLRWTVS

SEQ ID NO: 39975 - protein, 479 aa, Homo sapiens
MAVLGVQLVVTLLTATLMHRLAPHCSFARWLLCNGSLFRYKHPSEEELRALAGKPRPRGRKERWANGLSEEKPLSVPRDAPFQLETCPLTTVDALVLRFFLEYQWFVDFAVYSGGVYLFTEAYYYMLGPAKETNIAVFWCLLTVTFSIKMFLTVTRLYFSAEEGGERSVCLTFAFLFLLLAMLVQVVREETLELGLEPGLASMTQNLEPLLKKQGWDWALPVAKLAIRVGLAVVGSVLGAFLTFPGLRLAQTHRDALTMSEDRPMLQFLLHTSFLSPLFILWLWTKPIARDFLHQPPFGETRFSLLSDSAFDSGRLWLLVVLCLLRLAVTRPHLQAYLCLAKARVEQLRREAGRIEAREIQQRVVRVYCYVTVVSLQYLTPLILTLNCTLLLKTLGGYSWGLGPAPLLSPDPSSASAAPIGSGEDEVQQTAARIAGALGGLLTPLFLRGVLAYLIWWTAACQLLASLFGLYFHQHLAGS

SEQ ID NO: 39976 - protein, 376 aa, Homo sapiens
MAVLGVQLVVTLLTATLMHRLAPHCSFARWLLCNGSLFRYKHPSEEELRALAGKPRPRGRKERWANGLSEEKPLSVPRDAPFQLETCPLTTVDALGLASMTQNLEPLLKKQGWDWALPVAKLAIRVGLAVVGSVLGAFLTFPGLRLAQTHRDALTMSEDRPMLQFLLHTSFLSPLFILWLWTKPIARDFLHQPPFGETRFSLLSDSAFDSGRLWLLVVLCLLRLAVTRPHLQAYLCLAKARVEQLRREAGRIEAREIQQRVVRVYCYVTVVSLQYLTPLILTLNCTLLLKTLGGYSWGLGPAPLLSPDPSSASAAPIGSGEDEVQQTAARIAGALGGLLTPLFLRGVLAYLIWWTAACQLLASLFGLYFHQHLAGS

SEQ ID NO: 39977 - protein, 929 aa, Homo sapiens
MLGPHLPPPPLAPSEGRPTPCAFQIPDGSYRCLALEAEESSGEEGLQGEVGPTDLEEDEGVSRSGDDSACRVTQGTPQLPKALGIQPPSCSREEQGASQHDDRASQDWDVVKAGQMMTASPSPGPGPRVAQKPALGRSTSLTEKDLKEAKARSQQIAAQLTTPPSSNSRGVQLFNRRRQRVNEFTLESHGQRGQKPSQESLRVLPSSLPGHAPGLSLSSTSLPEPGPPRHPSPQSPDRGVPGHSMEGYSEEASLLRHLEKVASEEEEVPLVVYLKENAALLTANGLHLSQNREAQQSSPAPPPAEVHSPAADVNQNLASPSATLTTPTSNSSHNPPATDVNQNPPATVVPQSLPLSSIQQNSSEAQLPSNGTGPASKPSTLCADGQPQAPAEEVRCSTLLIDKVSTPATTTSTFSREATLIPSSRPPASDFMSSSLLIDIQPNTLVVSADQEMSGRAAATTPTKVYSEVHFTLAKPPSVVNRTARPFGIQAPGGTSQMERSPMLERRHFGEKAPAPQPPSLPDRSPRPQRHIMSRSPMVERRMMGQRSPASERRPLGNFTAPPTYTETLSTAPLASWVRSPPSYSVLYPSSDPKSSHLKGQAVPASKTGILEESMARRGSRKSMFTFVEKPKVTPNPDLLDLVQTADEKRRQRDQGEVGVEEEPFALGAEASNFQQEPAPRDRASPAAAEEVVPEWASCLKSPRIQAKPKPKPNQNLSEASGKGAELYARRQSRMEKYVIESSSHTPELARCPSPTMSLPSSWKYPTNAPGAFRVASRSPARTPPASLYHGYLPENGVLRPEPTKQPPYQLRPSLFVLSPIKEPAKVSPRAASPAKPSSLDLVPNLPKGALPPSPALPRPSRSSPGLYTSPGQDSLQPTAVSPPYGGDISPVSPSRAWSPRAKQAPRPSFSTRNAGIEAQVWKPSFCFK

SEQ ID NO: 39978 - protein, 903 aa, Homo sapiens
MEGYSEEASLLRHLEKVASEEEEVPLVVYLKENAALLTANGLHLSQNREAQQSSPAPPPAEVHSPAADVNQNLASPSATLTTPTSNSSHNPPATDVNQNPPATVVPQSLPLSSIQQNSSEAQLPSNGTGPASKPSTLCADGQPQAPAEEVRCSTLLIDKVSTPATTTSTFSREATLIPSSRPPASDFMSSSLLIDIQPNTLVVSADQEMSGRAAATTPTKVYSEVHFTLAKPPSVVNRTARPFGIQAPGGTSQMERSPMLERRHFGEKAPAPQPPSLPDRSPRPQRHIMSRSPMVERRMMGQRSPASERRPLGNFTAPPTYTETLSTAPLASWVRSPPSYSVLYPSSDPKSSHLKGQAVPASKTGILEESMARRGSRKSMFTFVEKPKVTPNPDLLDLVQTADEKRRQRDQGEVGVEEEPFALGAEASNFQQEPAPRDRASPAAAEEVVPEWASCLKSPRIQAKPKPKPNQNLSEASGKGAELYARRQSRMEKYVIESSSHTPELARCPSPTMSLPSSWKYPTNAPGAFRVASRSPARTPPASLYHGYLPENGVLRPEPTKQPPYQLRPSLFVLSPIKEPAKVSPRAASPAKPSSLDLVPNLPKGALPPSPALPRPSRSSPGLYTSPGQDSLQPTAVSPPYGGDISPVSPSRAWSPRAKQAPRPSFSTRNAGIEAQDRRESLPTSPPWTPGASRPPSSLDGWVSPGPWEPGRGSSMSSPPPLPPPPPMSPSWSERSVSPLRPETEARPPSRQLQALLARNIINAARRKSASPRSAGAENPRPFSPPRAPPPPPPPPPPPPRMRSPQPARPGSAAVPGAAFAPIPRSPLPAGPSSCTSPRSPLPAPPRPFLYRRSPTDSDVSLDSEDSGAKSPGILGYNICPRGWNGSLRLKRGSLPAEASCTT

SEQ ID NO: 39979 - protein, 685 aa, Homo sapiens
MEGYSEEASLLRHLEKVASEEEEVPLVVYLKENAALLTANGLHLSQNREAQQSSPAPPPAEVHSPAADVNQNLASPSATLTTPTSNSSHNPPATDVNQNPPATVVPQSLPLSSIQQNSSEAQLPSNGTGPASKPSTLCADGQPQAPAEEVRCSTLLIDKVSTPATTTSTFSREATLIPSSRPPASDFMSSSLLIDIQPNTLVVSADQEMSGRAAATTPTKVYSEVHFTLAKPPSVVNRTARPFGIQAPGGTSQMERSPMLERRHFGEKAPAPQPPSLPDRSPRPQRHIMSRSPMVERRMMGQRSPASERRPLGNFTAPPTYTETLSTAPLASWVRSPPSYSVLYPSSDPKSSHLKGQAVPASKTGILEESMARRGSRKSMFTFVEKPKVTPNPDLLDLVQTADEKRRQRDQGEVGVEEEPFALGAEASNFQQEPAPRDRASPAAAEEVVPEWASCLKSPRIQAKPKPKPNQNLSEASGKGAELYARRQSRMEKYVIESSSHTPELARCPSPTMSLPSSWKYPTNAPGAFRVASRSPARTPPASLYHGYLPENGVLRPEPTKQPPYQLRPSLFVLSPIKEPAKVSPRAASPAKPSSLDLVPNLPKGALPPSPALPRPSRSSPGLYTSPGQDSLQPTAVSPPYGGDISPVSPSRAWSPRAKQAPRPSFSTRNAGIEAQVWKPSFCFK

SEQ ID NO: 39980 - protein, 487 aa, Homo sapiens
MGVIGIQLVVTMVMASVMQKIIPHYSLARWLLCNGSLRWYQHPTEEELRILAGKQQKGKTKKDRKYNGHIESKPLTIPKDIDLHLETKSVTEVDTLALHYFPEYQWLVDFTVAATVVYLVTEVYYNFMKPTQEMNISLVWCLLVLSFAIKVLFSLTTHYFKVEDGGERSVCVTFGFFFFVKAMAVLIVTENYLEFGLETGFTNFSDSAMQFLEKQGLESQSPVSKLTFKFFLAIFCSFIGAFLTFPGLRLAQMHLDALNLATEKITQTLLHINFLAPLFMVLLWVKPITKDYIMNPPLGKESIPLMTEATFDTLRLWLIILLCALRLAMMRSHLQAYLNLAQKCVDQMKKEAGRISTVELQKMVARVFYYLCVIALQYVAPLVMLLHTTLLLKTLGNHSWGIYPESISTLPVDNSLLSNSVYSELPSAEGKMKVTVTQITVALSSLKNIFTPLLFRGLLSFLTWWIAACLFSTSLFGLFYHQYLTVA

SEQ ID NO: 39981 - protein, 307 aa, Homo sapiens
MGVIGIQLVVTMVMASVMQKIIPHYSLARWLLCNGSLRWYQHPTEEELRILAGKQQKGKTKKDRKYNGHIESKPLTIPKDIDLHLETKSVTEVDTLALHYFPEYQWLVDFTVAATVVYLVTEVYYNFMKPTQEMNISLVWCLLVLSFAIKVLFSLTTHYFKVEDGGERSVCVTFGFFFFVKAMAVLIVTENYLEFGLETGFTNFSDSAMQFLEKQGLESQSPVSKLTFKFFLAIFCSFIGAFLTFPGLRLAQMHLDALNLATEKITQTLLHINFLAPLFMVLLWVKPITKDYIMNPPLGKEISPSGR

SEQ ID NO: 39982 - protein, 140 aa, Homo sapiens
MKPTQEMNISLVWCLLVLSFAIKVLFSLTTHYFKVEDGGERSVCVTFGFFFFVKAMAVLIVTENYLEFGLETGFTNFSDSAMQFLEKQGLESQSPVSKLTFKFFLAIFCSFIGAFLTFPGLRLAQMHLDALNLATEKITQ

SEQ ID NO: 39983 - protein, 144 aa, Homo sapiens
MEREGSGGSGGSAGLLQQILSLKVVPRVGNGTLCPNSTSLCSFPEMWYGVFLWALVSSLFFHVPAGLLALFTLRHHKYGRFMSVSILLMGIVGPITAGILTSAAIAGVYRAAGKEMIPFEALTLGTGQTFCVLVVSFLRILATL

SEQ ID NO: 39984 - protein, 121 aa, Homo sapiens
MEREGSGGSGGSAGLLQQILSLKVVPRVGNGTLCPNSTSLCSFPEMWYGVFLWALVSSLFFHVPAGLLALFTLRHHKYGAAIAGVYRAAGKEMIPFEALTLGTGQTFCVLVVSFLRILATL

SEQ ID NO: 39985 - protein, 235 aa, Homo sapiens
MGTADSDEMAPEAPQHTHIDVHIHQESALAKLLLTCCSALRPRATQARGSSRLLVASWVMQIVLGILSAVLGGFFYIRDYTLLVTSGAAIWTGAVAVLAGAAAFIYEKRGGTYWALLRTLLTLAAFSTAIAALKLWNEDFRYGYSYYNSACRISSSSDWNTPAPTQSPEEVRRLHLCTSFMDMLKALFRTLQAMLLGVWILLLLASLTPLWLYCWRMFPTKGKRDQKEMLEVSGI

SEQ ID NO: 39986 - protein, 270 aa, Homo sapiens
MTQNTVIVNGVAMASRPSQPTHVNVHIHQESALTQLLKAGGSLKKFLFHPGDTVPSTARIGYEQLALGVTQILLGVVSCVLGVCLSLGPWTVLSASGCAFWAGSVVIAAGAGAIVHEKHPGKLAGYISSLLTLAGFATAMAAVVLCVNSFIWQTEPFLYIDTVCDRSDPVFPTTGYRWMRRSQENQWQKEECRAYMQMLRKLFTAIRALFLAVCVLKVIVSLVSLGVGLRNLCGQSSQPLNEEGSEKRLLGENSVPPSPSREQTSTAIVL

SEQ ID NO: 39987 - protein, 233 aa, Homo sapiens
MTQNTVIVNGVAMASRPSQPTHVNVHIHQESALTQLLKAGGSLKKFLFHPGDTVPSTARIGYEQLALGVIAAGAGAIVHEKHPGKLAGYISSLLTLAGFATAMAAVVLCVNSFIWQTEPFLYIDTVCDRSDPVFPTTGYRWMRRSQENQWQKEECRAYMQMLRKLFTAIRALFLAVCVLKVIVSLVSLGVGLRNLCGQSSQPLNEEGSEKRLLGENSVPPSPSREQTSTAIVL

SEQ ID NO: 39988 - protein, 271 aa, Homo sapiens
MIPKLLSLLCFRLCVGQGDTRGDGSLPKPSLSAWPSSVVPANSNVTLRCWTPARGVSFVLRKGGIILESPKPLDSTEGAAEFHLNNLKVRNAGEYTCEYYRKASPHILSQRSDVLLLLVTGHLSKPFLRTYQRGTVTAGGRVTLQCQKRDQLFVPIMFALLKAGTPSPIQLQSPAGKEIDFSLVDVTAGDAGNYSCMYYQTKSPFWASEPSDQLEILVTVPPGTTSSNYSLGNFVRLGLAAVIVVIMGAFLVEAWYSRNVSPGESEAFKPE

SEQ ID NO: 39989 - protein, 279 aa, Homo sapiens [sequence omitted]

SEQ ID NO: 39990 - protein, 297 aa, Homo sapiens
MEPRALVTALSLGLSLCSLGLLVTAIFTDHWYETDPRRHKESCERSRAGADPPDQKNRLMPLSHLPLRDSPPLGRRLLPGGPGRADPESWRSLLGLGGLDAECGRPLFATYSGLWRKCYFLGIDRDIDTLILKGIAQRCTAIKYHFSQPIRLRNIPFNLTKTIQQDEWHLLHLRRITAGFLGMAVAVLLCGCIVATVSFFWEESLTQHVAGLLFLMTGIFCTISLCTYAASISYDLNRLPKLIYSLPADVEHGYSWSIFCAWCSLGFIVAAGGLCIAYPFISRTKIAQLKSGRDSTV

SEQ ID NO: 39991 - protein, 111 aa, Homo sapiens
MEPRALVTALSLGLSLCSLGLLVTAIFTDHWYETDPRRHKESCERSRAGADPPDQKNRLMPLSHLLGPLEEVLLPGHRPGHRHPHPERYCAAMHGHQVPLFSAHPLAKHSF

SEQ ID NO: 39992 - protein, 108 aa, Homo sapiens
MTRKIFTNTRERWRQQNVNSAFAKLRKLIPTHPPDKKLSKNETLRLAMRYINFLVKVLGEQSLQQTGVAAQGNILGLFPQGPHLPGLEDRTLLENYQVPSPGPSHHIP

SEQ ID NO: 39993 - protein, 514 aa, Homo sapiens
MVLDLDLFRVDKGGDPALIRETQEKRFKDPGLVDQLVKADSEWRRCRFRADNLNKLKNLCSKTIGEKMKKKEPVGDDESVPENVLSFDDLTADALANLKVSQIKKVRLLIDEAILKCDAERIKLEAERFENLREIGNLLHPSVPISNDEDVDNKVERIWGDCTVRKKYSHVDLVVMVDGFEGEKGAVVAGSRGYFLKGVLVFLEQALIQYALRTLGSRGYIPIYTPFFMRKEVMQEVAQLSQFDEELYKVIGKGSEKSDDNSYDEKYLIATSEQPIAALHRDEWLRPEDLPIKYAGLSTCFRQEVGSHGRDTRGIFRVHQFEKIEQFVYSSPHDNKSWEMFEEMITTAEEFYQSLGIPYHIVNIVSGSLNHAASKKLDLEAWFPGSGAFRELVSCSNCTDYQARRLRIRYGQTKKMMDKVEFVHMLNATMCATTRTICAILENYQTEKGITVPEKLKEFMPPGLQELIPFVKPAPIEQEPSKKQKKQHEGSKKKAAARDVTLENRLQNMEVTDA

SEQ ID NO: 39994 - protein, 294 aa, Homo sapiens
MAAGRLLLYTGLSLALCALGMLAVAICSDHWYETDARKHRDRCKAFNTRRVDPGFIYNNNNNLPLRASRSRLDRWEGKLLRARNRRQLFAMSPADECSRQYNSTNMGLWRKCHRQGFDPEIAALIRKGEIERCTYIKYHYSSATIPRNLTFNITKTIRQDEWHALHLRRMTAGFMGMAVAIILFGWIIGVLGCCWDRGLMQYVAGLLFLMGGTFCIISLCTCVAGINFELSRYPRYLYGLPDDISHGYGWSMFCAWGGLGLTLISGFFCTLAPSVQPVPRTNYPKSRPENGTVC

SEQ ID NO: 39995 - protein, 1068 aa, Homo sapiens
MLSSLGCLLLCGSITLALGNAQKLPKGKRPNLKVHINTTSDSILLKFLRPSPNVKLEGLLLGYGSNVSPNQYFPLPAEGKFTEAIVDAEPKYLIVVRPAPPPSQKKSCSGKTRSRKPLQLVVGTLTPSSVFLSWGFLINPHHDWTLPSHCPNDRFYTIRYREKDKEKKWIFQICPATETIVENLKPNTVYEFGVKDNVEGGIWSKIFNHKTVVGSKKVNGKIQSTYDQDHTVPAYVPRKLIPITIIKQVIQNVTHKDSAKSPEKAPLGGVILVHLIIPGLNETTVKLPASLMFEISDALKTQLAKNETLALPAESKTPEVEKISARPTTVTPETVPRSTKPTTSSALDVSETTLASSEKPWIVPTAKISEDSKVLQPQTATYDVFSSPTTSDEPEISDSYTATSDRILDSIPPKTSRTLEQPRATLAPSETPFVPQKLEIFTSPEMQPTTPAPQQTTSIPSTPKRRPRPKPPRTKPERTTSAGTITPKISKSPEPTWTTPAPGKTQFISLKPKIPLSPEVTHTKPAPKQTPRAPPKPKTSPRPRIPQTQPVPKVPQRVTAKPKTSPSPEVSYTTPAPKDVLLPHKPYPEVSQSEPAPLETRGIPFIPMISPSPSQEELQTTLEETDQSTQEPFTTKIPRTTELAKTTQAPHRFYTTVRPRTSDKPHIRPGVKQAPRPSGADRNVSVDSTHPTKKPGTRRPPLPPRPTHPRRKPLPPNNVTGKPGSAGIISSGPITTPPLRSTPRPTGTPLERIETDIKQPTVPASGEELENITDFSSSPTRETDPLGKPRFKGPHVRYIQKPDNSPCSITDSVKRFPKEEATEGNATSPPQNPPTNLTVVTVEGCPSFVILDWEKPLNDTVTEYEVISRENGSFSGKNKSIQMTNQTFSTVENLKPNTSYEFQVKPKNPLGEGPVSNTVAFSTESADPRVSEPVSAGRDAIWTERPFNSDSYSECKGKQYVKRTWYKKFVGVQLCNSLRYKIYLSDSLTGKFYNIGDQRGHGEDHCQFVDSFLDGRTGQQLTSDQLPIKEGYFRAVRQEPVQFGEIGGHTQINYVQWYECGTTIPGKW

SEQ ID NO: 39996 - protein, 486 aa, Homo sapiens
MISPSPSQEELQTTLEETDQSTQEPFTTKIPRTTELAKTTQAPHRFYTTVRPRTSDKPHIRPVLNRTTTRPTRPKPSGMPSGNGVGTGVKQAPRPSGADRNVSVDSTHPTKKPGTRRPPLPPRPTHPRRKPLPPNNVTGKPGSAGIISSGPITTPPLRSTPRPTGTPLERIETDIKQPTVPASGEELENITDFSSSPTRETDPLGKPRFKGPHVRYIQKPDNSPCSITDSVKRFPKEEATEGNATSPPQNPPTNLTVVTVEGCPSFVILDWEKPLNDTVTEYEVISRENGSFSGKNKSIQMTNQTFSTVENLKPNTSYEFQVKPKNPLGEGPVSNTVAFSTESADPRVSEPVSAGRDAIWTERPFNSDSYSECKGKQYVKRTWYKKFVGVQLCNSLRYKIYLSDSLTGKFYNIGDQRGHGEDHCQFVDSFLDGRTGQQLTSDQLPIKEGYFRAVRQEPVQFGEIGGHTQINYVQWYECGTTIPGKW

SEQ ID NO: 39997 - protein, 655 aa, Homo sapiens
MTESLPVSDVLESVTLSTESPKETIAPAKTDYVYPTAKAPLWPEEPKTEVVESITYVSEPPETTLETSPLPSQSITLPSPDEPQTEPAPKQTPRAPPKPKTSPRPRIPQTQPVPKVPQRVTAKPKTSPSPEVSYTTPAPKDVLLPHKPYPEVSQSEPAPLETRGIPFIPMISPSPSQEELQTTLEETDQSTQEPFTTKIPRTTELAKTTQAPHRFYTTVRPRTSDKPHIRPVLNRTTTRPTRPKPSGMPSGNGVGTGVKQAPRPSGADRNVSVDSTHPTKKPGTRRPPLPPRPTHPRRKPLPPNNVTGKPGSAGIISSGPITTPPLRSTPRPTGTPLERIETDIKQPTVPASGEELENITDFSSSPTRETDPLGKPRFKGPHVRYIQKPDNSPCSITDSVKRFPKEEATEGNATSPPQNPPTNLTVVTVEGCPSFVILDWEKPLNDTVTEYEVISRENGSFSGKNKSIQMTNQTFSTVENLKPNTSYEFQVKPKNPLGEGPVSNTVAFSTESADPRVSEPVSAGRDAIWTERPFNSDSYSECKGKQYVKRTWYKKFVGVQLCNSLRYKIYLSDSLTGKFYNIGDQRGHGEDHCQFVDSFLDGRTGQQLTSDQLPIKEGYFRAVRQEPVQFGEIGGHTQINYVQWYECGTTIPGKW

SEQ ID NO: 39998 - protein, 784 aa, Homo sapiens
MTIVPTTDIEPVTVRTEATVTTLAPKTSQRTRTRRPRPKHKTTPRPETLQTKLDFGPITPGTSSAPTTTTKRTRRPHPKPKTTPHPEVPQTKLAPKVPQRTHRPHPKPKTTLSPEELQTELVPVTDLGPVTFRTEIPATTLATKTSKRTRPPRPRPKTTPSPQAPETKPVPATVLEPVTLRPEASTTLASKTSQRTRRPRLRTKTTPRPEAPESKPAPKQTPRAPPKPKTSPRPRIPQTQPVPKVPQRVTAKPKTSPSPEVSYTTPAPKDVLLPHKPYPEVSQSEPAPLETRGIPFIPMISPSPSQEELQTTLEETDQSTQEPFTTKIPRTTELAKTTQAPHRFYTTVRPRTSDKPHIRPVLNRTTTRPTRPKPSGMPSGNGVGTGVKQAPRPSGADRNVSVDSTHPTKKPGTRRPPLPPRPTHPRRKPLPPNNVTGKPGSAGIISSGPITTPPLRSTPRPTGTPLERIETDIKQPTVPASGEELENITDFSSSPTRETDPLGKPRFKGPHVRYIQKPDNSPCSITDSVKRFPKEEATEGNATSPPQNPPTNLTVVTVEGCPSFVILDWEKPLNDTVTEYEVISRENGSFSGKNKSIQMTNQTFSTVENLKPNTSYEFQVKPKNPLGEGPVSNTVAFSTESADPRVSEPVSAGRDAIWTERPFNSDSYSECKGKQYVKRTWYKKFVGVQLCNSLRYKIYLSDSLTGKFYNIGDQRGHGEDHCQFVDSFLDGRTGQQLTSDQLPIKEGYFRAVRQEPVQFGEIGGHTQINYVQWYECGTTIPGKW

SEQ ID NO: 39999 - protein, 233 aa, Homo sapiens
MALNNFLFAQCACYFLAFLFSFVVVVPLSENGHDFRGRCLLFTEGMWLSANLTVQERERFTVQEWGPPAACRFSLLASLLSLLLAAAHAWRTLFFLCKGHEGSFFSAFLNLLVSAFVVFLVFIASTIVSVGFTMWCDTITEKGTVPHSCEELQDIDLELGVDNSAFYDQFAIAQFGLWASWLAWLAITTLAFLKVYHNYRQEDLLDSLIHEKELLLARPSPRTSFQEEKSAVI

SEQ ID NO: 40000 - protein, 197 aa, Homo sapiens
MALNNFLFAQCACYFLAFLFSFVVVVPLSENGHDFRGRCLLFTEGMWLSANLTVQERERFTVQEWGPPAACRFSLLASLLSLLLAAAHAWRTLFFLCKGHEGSFFSAFLNLLVSAFVVFLVFIASTIVSVGFTMWCDTITEKGTVPHSCEELQDIDLELGVDNSAFYDQFAIAQVGGSGQEGRLAMLGGGHLLLDIC

SEQ ID NO: 40001 - protein, 219 aa, Homo sapiens
MALSWLQRVELALFAAAFLCGAVAAAAMTRTQGSFSGRCPLYGVATLNGSSLALSRPSAPSLCYFVAGASGLLALYCLLLLLFWIYSSCIEDSHRGAIGLRIALAISAIAVFLVLVSACILRFGTRSLCNSIISLNTTISCSEAQKIPWTPPGTALQFYSNLHNAETSSWVNLVLWCVVLVLQVVQWKSEATPYRPLERGDPEWSSETDALVGSRLSHS

SEQ ID NO: 40002 - protein, 376 aa, Homo sapiens
MARGPGPLGRPRPDTVAMPKRGKRLKFRAHDACSGRVTVADYANSDPAVVRSGRVKKAVANAVQQEVKSLCGLEASQVPAEEALSGAGEPCDIIDSSDEMDAQEESIHERTVSRKKKSKRHKEELDGAGGEEYPMDIWLLLASYIRPEDIVNFSLICKNAWTVTCTAAFWTRLYRRHYTLDASLPLRLRPESMEKLRCLRACVIRSLYHMYEPFAARISKNPAIPESTPSTLKNSKCLLFWCRKIVGNRQEPMWEFNFKFKKQSPRLKSKCTGGLQPPVQYEDVHTNPDQDCCLLQVTTLNFIFIPIVMGMIFTLFTINVSTDMRHHRVRLVFQDSPVHGGRKLRSEQGVQVILDPVHSVRLFDWWHPQYPFSLRA

SEQ ID NO: 40003 - protein, 236 aa, Homo sapiens
MARGPGPLGRPRPDTVAMPKRGKRLKFRAHDACSGRVTVADYANSDPAVVRSGRVKKAVANAVQQEVKSLCGLEASQVPAEEALSGAGEPCDIIDSSDEMDAQEESIHERTVSRKKKSKRHKEELDGAGGEEYPMDIWLLLASYIRPEDIVNFSLICKNAWTVTCTAAFWTRLYRRHYTLDASLPLRLRPESMEKLRCLRACVIRSLYHMYEPFAARISKNPAIPESTPSTLKNSK

SEQ ID NO: 40004 - protein, 376 aa, Homo sapiens
MARGPGPLGRPRPDTVAMPKRGKRLKFRAHDACSGRVTVADYADSDLAVVRSGRVKKAVANAVRQEVKSLCGLEASQVPAEEALSGAGEPYDIIDSSDEMDAQEENIHERTVSRKKKSKRHKEELDGAGGEEYPMDIWLLLASYIRPEDIVNFSLICKNAWTVTCTAAFWTRLYRRHYTLDASLPLRLRPESMEKLHCLRACVIRSLYHMYEPFAARISKNPAIPESTPSTLKNSKCLLFWCRKIVGNRQEPMWEFNFKFKKQSPRLKSKCTGGLQPPVQYEDVHTNPDQDCCLLQVTTLNFIFIPIVMGMIFTLFTINVSTDMRHHRVRLVFQDSPVHGGRKLRSEQGVQVILDPVHSVRLFDWWHPQYPFSLRA

SEQ ID NO: 40005 - protein, 216 aa, Homo sapiens
MSALGQITITVSRCWNTERNQTDKNPCLHGAYLQLRETVKNKSTHLKKPLMKQAPPWKDHLTFQPLHPAERKTQVWRWQSGNSSDLETTSSASPWPTGSNRDVVLNTLAESCCGLSELITAPPYAGVSIQGFSQIWVLFPFCGGTFHHNEKDVLGLQDFERESVSTSQSRNISLLTLGQLQNCVIGKLTIIDLLTEHLLGVRHGVICFPWGLPSSS

SEQ ID NO: 40006 - protein, 518 aa, Homo sapiens
MAASMARRLWPLLTRRGFRPRGGCISNDSPRRSFTTEKRNRNLLYEYAREGYSALPQLDIERFCACPEEAAHALELRKGELRSADLPAIISTWQELRQLQEQIRSLEEEKAAVTEAVRALLANQDSGEVQQDPKYQGLRARGREIRKELVHLYPREAQLEEQFYLQALKLPNQTHPDVPVGDESQARVLHMVGDKPVFSFQPRGHLEIGEKLDIIRQKRLSHVSGHRSYYLRGAGALLQHGLVNFTFNKLLRRGFTPMTVPDLLRGAVFEGCGMTPNANPSQIYNIDPARFKDLNLAGTAEVGLAGYFMDHTVAFRDLPVRMVCSSTCYRAETNTGQEPRGLYRVHHFTKVEMFGVTGPGLEQSSQLLEEFLSLQMEILTELGLHFRVLDMPTQELGLPAYRKFDIEAWMPGRGRFGEVTSASNCTDFQSRRLHIMFQTEAGELQFAHTVNATACAVPRLLIALLESNQQKDGSVLVPPALQSYLGTDRITAPTHVPLQYIGPNQPRKPGLPGQPAVS

SEQ ID NO: 40007 - protein, 520 aa, Homo sapiens
MAASMARRLWPLLTRRGFRPRGGCISNDSPRRSFTTEKRNRNLLYEYAREGYSALPQLDIERFCACPEEAAHALELRKGELRSADLPAIISTWQELRQLQEQIRSLEEEKAAVTEAVRALLANQDSGEVQQVRLDPGAGSIFGPTFLPFPGQLSLLVEAQLEEQFYLQALKLPNQTHPDVPVGDESQARVLHMVGDKPVFSFQPRGHLEIGEKLDIIRQKRLSHVSGHRSYYLRGAGALLQHGLVNFTFNKLLRRGFTPMTVPDLLRGAVFEGCGMTPNANPSQIYNIDPARFKDLNLAGTAEVGLAGYFMDHTVAFRDLPVRMVCSSTCYRAETNTGQEPRGLYRVHHFTKVEMFGVTGPGLEQSSQLLEEFLSLQMEILTELGLHFRVLDMPTQELGLPAYRKFDIEAWMPGRGRFGEVTSASNCTDFQSRRLHIMFQTEAGELQFAHTVNATACAVPRLLIALLESNQQKDGSVLVPPALQSYLGTDRITAPTHVPLQYIGPNQPRKPGLPGQPAVS

SEQ ID NO: 40008 - protein, 413 aa, Homo sapiens
MSNVSGILETAGVPLVSANWPQPSPPPAVPAGPQMDHMGNSSQGAPWLFLTSALARGVSGIFVWTALVLTCHQIYLHLRSYTVPQEQRYIIRLLLIVPIYAFDSWLSLLLLGDHQYYVYFDSVRDCYEAFVIYSFLSLCFQYLGGEGAIMAEIRGKPIKSSCLYGTCCLRGMTYSIGFLRFCKQATLQFCLVKPVMAVTTIILQAFGKYHDGDFNVRSGYLYVTLIYNASVSLALYALFLFYFTTRELLRPFQPVLKFLTIKAVIFLSFWQGLLLAILERCGVIPEVETSGGNKLGAGTLAAGYQNFIICVEMLFASVALRYAFPCQVYAEKKENSPAPPAPMQSISSGIRETVSPQDIVQDAIHNFSPAYQHYTQQATHEAPRPGTHPSGGSGGSRKSRSLEKRMLIPSEDL

SEQ ID NO: 40009 - protein, 301 aa, Homo sapiens
MLSEGYLSGLEYWNDIHWSCASYNEQVAGEKEEETNSVATLSYSSVDETQVRSLYVSCKSSGKFISSVHSRESQHSRSQRVTVLQTNPNPVFESPNLAAVEICRDASRETYLVPSSCKSICKNYNDLQIAGGQVMAINSVTTDFPSESSFEYGPLLKSSEIPLPMEDSISTQPSDFPQKPIQRYSSYWRITSIKEKSSLQMQNPISNAVLNEYLEQKVVELYKQYIMDTVFHDSSPTQILASELIMTSVDQISLQVSREKNLETSKARDIVFSRLLQLMSTEITEISTPSLHISQYSNVNP

SEQ ID NO: 40010 - protein, 2430 aa, Homo sapiens
MAPPAHKSILERSENVLMSPWKGKLIVQDRMLCDIALWSTYGAMIPTQLPQELDFKYVMKVSSLKKRLPEAAFRKQNYLEEKVCFQDLCFNLYEVELSNRQGENIDKLTECIKNKQLAIIKCLEDRGFFILLTSSALLSEPDFGGKQMGLHGLHLFRSPLSTGVKDLKVEDDISMKVIPILSTLNCALLETKKSLPEERIHPNTLVKRHFQELYKADRSPSLSVAPQDRMKDPTFLGKLPSGFDLIPPAEKCPSESLTQLNSYFSDPSAYILEVSTALDLLAEHPQSPCVSDGICDAGFSLVMTPDPEFLVSEAEVRKETETKKDSEEMLKAKKRVFPLSPASNLRVQPKRKASMPHMVQSKKVNLCRPFPKRTASRADNSSDSPTTLKLVKGQFPQKRKRGAEVLTAQFVQKTKLDRKNQEAPISKDVPVPTNAKRARKQEKSPVKTVPRAKPPVKKSPQKQRVNIVKGNENPRNRKQLQPVKGETASKLQSEISRGCQEDGISINSVQPENTTAAHNDLPENSIVNYDSQALNMLADLALSSATSSTPVSEARNLHCSSELPQNDVLLSKENSLRGTSDHEYHRGVKTQKGELLPNPSSDRKSNSGSDLTVSQDEESLVPCSQAPAKAQSALTEEMLESSDASQSSSVSVEHSYALLLTEHSKKHLQEREILSPLFPRNGTKSPEAATPVGKVMPFRHQPGLLLQQKPPDDPVVKPKDRPPSARVKKSSCSRIVLSCDDSVKITFKCETEYAFSLDSKYTNNPLEKTVVRALHGPWNTDLPDNVEEVKLLLHMWVALFYSNQNKIIRSSRKVVEHSNPAKYVSINSTLESCELREIEESLGLEKCSADSLLETNEISRAHAAEVSFRDPNCLLPFIKTPLTQGLELCVQNEQKKTFARECDPDTQEDQNFICSYNNEVTGEEAKQESLETSNLVLSGIGSTQTNGPSVPSEEEIVQPLDSTRVASYSGTVTQATFTRTYDGPGSQPVICQSSVYGTLENKVDILDAAVQTKTGTLQDLIQHGSPINNECHPSLERKDDNMGCAVINPEPITLTFEKNAHVPIQTEGVNTADERTTFKKELIKQVSPAASLRHPVSTSENARTQGLRDIPSLVVAGQKGTKYLCASSVGGETLDKAVCSLQKETPLPVSLPSDKTMVMEALSLAKSSSHLSPSEEVRCTQDFLSQTQSLLGLSSEGLLELTQVEVDSSSASTTLGRQCSLNCISSGCHTSGDSLELRKNHKNGPNTENMNLEAFDSVFIKQTSLSVSREVSLELSEEDSDIDLALTISPPTSPREEMPAGEIEQFEEAPFSNLELQDVAEEIGEPEEVALTESREVSSADNVSVYPSVSEEPVENKERKGDNLQPVTLILSKENCTLEIAEEINVTSDFPFDSVIEEVSPASSPEPPVPVKETRPYQAVTPCILKLHGTQCEKSNQISQCESEDLGITEKENVFVGPTHPVGQDNFTQVQQMQVSAEMPLILTDHPGRTGRPTLPGKVTEEIVSSEHDEGLSFSGKVQCYGRELNQPASAAKCTGDFSPSPEKLVKSGNPLQPVSIENRNLDLKHLVLESSEPPFGPRNVIENKSLSDTLVSTTAPSGIVNVSVKQQTSPKSSQNHLFPGDLKTDEGIYLQVKSLTAASVDGAYSTQGCMCSVVPTLCSSSDNATLTHYVRPINAEPVFQAQEIPAGRMASLLKNGEPEAELHKETTGPGTAGPQSNTTSSLKGERKAIHTLQDVSTCETKELLNVGVSSLCAGPYQNTADTKENLSKEPLASFVSESFDTSVCGIATEHVEIENSGEGLRAEAGSETLGRDGEVGVNSDMHYELSGDSDLDLLGDCRNPRLDLEDSYTLRGSYTRKKDVPTDGYESSLNFHNNNQEDWGCSSWVPGMETSLPPGHWTAAVKKEEKCVPPYVQIRDLHGILRTYANFSITKELKDTMRTSHGLRRHPSFSANCGLPSSWTSTWQVADDLTQNTLDLEYLRFAHKLKQTIKNGDSQHSASSANVFPKESPTQISIGAFPSTKISEAPFLHPAPRSRSPLLVTVVESDPRPQGQPRRGYTASSLDSSSSWRERCSHNRDLRNSQRNHTVSFHLNKLKYNSTVKESRNDISLILNEYAEFNKVMKNSNQFIFQDKELNDVSGEATAQEMYLPFPGRSASYEDIIIDVCTNLHVKLRSVVKEACKSTFLFYLVETEDKSFFVRTKNLLRKGGHTEIEPQHFCQAFHRENDTLIIIIRNEDISSHLHQIPSLLKLKHFPSVIFAGVDSPGDVLDHTYQELFRAGGFVISDDKILEAVTLVQLKEIIKILEKLNGNGRWKWLLHYRENKKLKEDERVDSTAHKKNIMLKSFQSANIIELLHYHQCDSRSSTKAEILKCLLNLQIQHIDARFAVLLTDKPTIPREVFENSGILVTDVNNFIENIEKIAAPFRSSYW

SEQ ID NO: 40011 - protein, 1625 aa, Homo sapiens
MAPPAHKSILERSENVLMSPWKGKLIVQDRMLCDIALWSTYGAMIPTQLPQELDFKYVMKVSSLKKRLPEAAFRKQNYLEEKVCFQDLCFNLYEVELSNRQGENIDKLTECIKNKQLAIIKCLEDRGFFILLTSSALLSEPDFGGKQMGLHGLHLFRSPLSTGVKDLKVEDDISMKVIPILSTLNCALLETKKSLPEERIHPNTLVKRHFQELYKADRSPSLSVAPQDRMKDPTFLGKLPSGFDLIPPAEKCPSESLTQLNSYFSDPSAYILEVSTALDLLAEHPQSPCVSDGICDAGFSLVMTPDPEFLVSEAEVRKETETKKDSEEMLKAVCSLQKETPLPVSLPSDKTMVMEALSLAKSSSHLSPSEEVRCTQDFLSQTQSLLGLSSEGLLELTQVEVDSSSASTTLGRQCSLNCISSGCHTSGDSLELRKNHKNGPNTENMNLEAFDSVFIKQTSLSVSREVSLELSEEDSDIDLALTISPPTSPREEMPAGEIEQFEEAPFSNLELQDVAEEIGEPEEVALTESREVSSADNVSVYPSVSEEPVENKERKGDNLQPVTLILSKENCTLEIAEEINVTSDFPFDSVIEEVSPASSPEPPVPVKETRPYQAVTPCILKLHGTQCEKSNQISQCESEDLGITEKENVFVGPTHPVGQDNFTQVQQMQVSAEMPLILTDHPGRTGRPTLPGKVTEEIVSSEHDEGLSFSGKVQCYGRELNQPASAAKCTGDFSPSPEKLVKSGNPLQPVSIENRNLDLKHLVLESSEPPFGPRNVIENKSLSDTLVSTTAPSGIVNVSVKQQTSPKSSQNHLFPGDLKTDEGIYLQVKSLTAASVDGAYSTQGCMCSVVPTLCSSSDNATLTHYVRPINAEPVFQAQEIPAGRMASLLKNGEPEAELHKETTGPGTAGPQSNTTSSLKGERKAIHTLQDVSTCETKELLNVGVSSLCAGPYQNTADTKENLSKEPLASFVSESFDTSVCGIATEHVEIENSGEGLRAEAGSETLGRDGEVGVNSDMHYELSGDSDLDLLGDCRNPRLDLEDSYTLRGSYTRKKDVPTDGYESSLNFHNNNQEDWGCSSWVPGMETSLPPGHWTAAVKKEEKCVPPYVQIRDLHGILRTYANFSITKELKDTMRTSHGLRRHPSFSANCGLPSSWTSTWQVADDLTQNTLDLEYLRFAHKLKQTIKNGDSQHSASSANVFPKESPTQISIGAFPSTKISEAPFLHPAPRSRSPLLVTVVESDPRPQGQPRRGYTASSLDSSSSWRERCSHNRDLRNSQRNHTVSFHLNKLKYNSTVKESRNDISLILNEYAEFNKVMKNSNQFIFQDKELNDVSGEATAQEMYLPFPGRSASYEDIIIDVCTNLHVKLRSVVKEACKSTFLFYLVETEDKSFFVRTKNLLRKGGHTEIEPQHFCQAFHRENDTLIIIIRNEDISSHLHQIPSLLKLKHFPSVIFAGVDSPGDVLDHTYQELFRAGGFVISDDKILEAVTLVQLKEIIKILEKLNGNGRWKWLLHYRENKKLKEDERVDSTAHKKNIMLKSFQSANIIELLHYHQCDSRSSTKAEILKCLLNLQIQHIDARFAVLLTDKPTIPREVFENSGILVTDVNNFIENIEKIAAPFRSSYW

SEQ ID NO: 40012 - protein, 407 aa, Homo sapiens
MTVRGDVLAPDPASPTTAAASPSVSVIPEGSPTAMEQPVFLMTTAAQAISGFFVWTALLITCHQIYMHLRCYSCPNEQRYIVRILFIVPIYAFDSWLSLLFFTNDQYYVYFGTVRDCYEALVIYNFLSLCYEYLGGESSIMSEIRGKPIESSCMYGTCCLWGKTYSIGFLRFCKQATLQFCVVKPLMAVSTVVLQAFGKYRDGDFDVTSGYLYVTIIYNISVSLALYALFLFYFATRELLSPYSPVLKFFMVKSVIFLSFWQGMLLAILEKCGAIPKIHSARVSVGEGTVAAGYQDFIICVEMFFAALALRHAFTYKVYADKRLDAQGRCAPMKSISSSLKETMNPHDIVQDAIHNFSPAYQQYTQQSTLEPGPTWRGGAHGLSRSHSLSGARDNEKTLLLSSDDEF

SEQ ID NO: 40013 - protein, 1670 aa, Homo sapiens
MATAVETEACQPTDASWESGGGGDDEMKQALPELESSQQNGGGGGLNIAEPSGGAGREENAGAEAAQSLSHEQPQDSSEAGAAALPRGPEEPERPVRRSFQIPRKSREKKALFQPLTPGSREFEDVVNILHSSYLEPTSVTNFNYRRACLVHNELLEKEFTEKRRELKFDGRLDKELSESYAFLMVDRYQVQTICEKGLHVGQSKITILGSPSMGVYLSRYADLLQANPLDTGAMGDVVIFKIMKGKIKSIYDPMGVKSLESMLNKSALDPTPKHECHVSKNANRITSLLAYRAYELTQYYFYEYGFDELRRRPRHVCPYAVVSFTYKDDIQTPKFVPSSRSNSFNTDRNIDKYNYTLWKGQLLNKGKLLCYISLRSATRAFLPIKLPEKLDVETVMSIDHLKQKIPPALFYKETYLGPNEVLKNGMYCSLYEVVEKTRIGSNMESLLQKLDREKLVLVKPLGDRGYLFLLSPYQMVPPYEYQTAKSRVLHALFLFQEPRSIVTSQKGSTNAAPQERHESMPDVLKIAQFLQFSLIQCRKEFKNISAINFHSVVEKYVSEFFKRGFGSGKREFIMFPYDSRLDDKKFLYSAPRNKSHIDTCLHAYIFRPEVYQLPICKLKELFEENRKLQQFSPLSDYEGQEEEMNGTKMKFGKRNNSRGEAIISGKQRSSHSLDYDKDRVKELINLIQCRKKSVGGDSDTEDMRSKTVLKRKLEDLPENMRKLAKTSNLSENCHLYEESPQPIGSLGHDADLRRQQQDTCNSGIADIHRLFNWLSETLANARHSDASLTDTVNKALGLSTDDAYEELRQKHEYELNSTPDKKDYEQPTCAKVENAQFKGTQSLLLEVDATSKYSVAISTSEVGTDHKLHLKEDPNLISVNNFEDCSLCPSVPIEHGFRRQQSKSNNVEETEIHWKLIPITGGNARSPEDQLGKHGEKQTPGMKSPEEQLVCVPPQEAFPNDPRVINRQRSSDYQFPSSPFTDTLKGTTEDDVLTGQVEEQCVPAAEAEPPAVSETTERTVLGEYNLFSRKIEEILKQKNVSYVSTVSTPIFSTQEKMKRLSEFIYSKTSKAGVQEFVDGLHEKLNTIIIKASAKGGNLPPVSPNDSGAKIASNPLERHVIPVSSSDFNNKHLLEPLCSDPLKDTNSDEQHSTSALTEVEMNQPQHATELMVTSDHIVPGDMAREPVEETTKSPSDVNISAQPALSNFISQLEPEVFNSLVKIMKDVQKNTVKFYIHEEEESVLCKEIKEYLIKLGNTECHPEQFLERRSKLDKLLIIIQNEDIAGFIHKIPGLVTLKKLPCVSFAGVDSLDDVKNHTYNELFVSGGFIVSDESILNPEVVTVENLKNFLTFLEELSTPEGKWQWKVHCKFQKKLKELGRLNAKALSLLTLLNVYQKKHLVEILSYHNCDSQTRNAPELDCLIRLQAQNIQQRHIVFLTEKNIKMLSSYTDNGIVVATAEDFMQNFKNLVGYHNSITEENLPQLGANENLESQSALLENDEKDEEDMSLDSGDEISHIEVCSNFHSEIWEKETKGSRGTDQKKNTQIELQSSPDVQNSLLEDKTYLDSEERTSIDIVCSEGENSNSTEQDSYSNFQVYHSQLNMSHQFSHFNVLTHQTFLGTPYALSSSQSQENENYFLSAYTESLDRDKSPPPLSWGKSDSSRPYSQEK

SEQ ID NO: 40014 - protein, 1233 aa, Homo sapiens
MSIDHLKQKIPPALFYKETYLGPNEVLKNGMYCSLYEVVEKTRIGSNMESLLQKLDREKLVLVKPLGDRGYLFLLSPYQMVPPYEYQTAKSRVLHALFLFQEPRSIVTSQKGSTNAAPQERHESMPDVLKIAQFLQFSLIQCRKEFKNISAINFHSVVEKYVSEFFKRGFGSGKREFIMFPYDSRLDDKKFLYSAPRNKSHIDTCLHAYIFRPEVYQLPICKLKELFEENRKLQQFSPLSDYEGQEEEMNGTKMKFGKRNNSRGEAIISGKQRSSHSLDYDKDRVKELINLIQCRKKSVGGDSDTEDMRSKTVLKRKLEDLPENMRKLAKTSNLSENCHLYEESPQPIGSLGHDADLRRQQQDTCNSGIADIHRLFNWLSETLANARHSDASLTDTVNKALGLSTDDAYEELRQKHEYELNSTPDKKDYEQPTCAKVENAQFKGTQSLLLEVDATSKYSVAISTSEVGTDHKLHLKEDPNLISVNNFEDCSLCPSVPIEHGFRRQQSKSNNVEETEIHWKLIPITGGNARSPEDQLGKHGEKQTPDTLKGTTEDDVLTGQVEEQCVPAAEAEPPAVSETTERTVLGEYNLFSRKIEEILKQKNVSYVSTVSTPIFSTQEKMKRLSEFIYSKTSKAGVQEFVDGLHEKLNTIIIKASAKGGNLPPVSPNDSGAKIASNPLERHVIPVSSSDFNNKHLLEPLCSDPLKDTNSDEQHSTSALTEVEMNQPQHATELMVTSDHIVPGDMAREPVEETTKSPSDVNISAQPALSNFISQLEPEVFNSLVKIMKDVQKNTVKFYIHEEEESVLCKEIKEYLIKLGNTECHPEQFLERRSKLDKLLIIIQNEDIAGFIHKIPGLVTLKKLPCVSFAGVDSLDDVKNHTYNELFVSGGFIVSDESILNPEVVTVENLKNFLTFLEELSTPEGKWQWKVHCKFQKKLKELGRLNAKALSLLTLLNVYQKKHLVEILSYHNCDSQTRNAPELDCLIRLQAQNIQQRHIVFLTEKNIKMLSSYTDNGIVVATAEDFMQNFKNLVGYHNSITEENLPQLGANENLESQSALLENDEKDEEDMSLDSGDEISHIEVCSNFHSEIWEKETKGSRGTDQKKNTQIELQSSPDVQNSLLEDKTYLDSEERTSIDIVCSEGENSNSTEQDSYSNFQVYHSQLNMSHQFSHFNVLTHQTFLGTPYALSSSQSQENENYFLSAYTESLDRDKSPPPLSWGKSDSSRPYSQEK

SEQ ID NO: 40015 - protein, 1512 aa, Homo sapiens
MATAVETEACQPTDASWESGGGGDDEMKQALPELESSQQNGGGGGLNIAEPSGGAGREENAGAEAAQSLSHEQPQDSSEAGAAALPRGPEEPERPVRRSFQIPRKSREKKALFQPLTPGSREFEDVVNILHSSYLEPTSVTNFNYRRACLVHNELLEKEFTEKRRELKFDGRLDKELSESYAFLMVDRYQVQTICEKGLHVGQSKITILGSPSMGVYLSRYADLLQANPLDTGAMGDVVIFKIMKGKIKSIYDPMGVKSLESMLNKSALDPTPKHECHVSKNANRITSLLAYRAYELTQYYFYEYGFDELRRRPRHVCPYAVVSFTYKDDIQTPKFVPSSRSNSFNTDRNIDKYNYTLWKGQLLNKGKLLCYISLRSATRAFLPIKLPEKLDVETVMSIDHLKQKIPPALFYKETYLGPNEVLKNGMYCSLYEVVEKTRIGSNMESLLQKLDREKLVLVKPLGDRGYLFLLSPYQMVPPYEYQTAKSRVLHALFLFQEPRSIVTSQKGSTNAAPQERHESMPDVLKIAQFLQFSLIQCRKEFKNISAINFHSVVEKYVSEFFKRGFGSGKREFIMFPYDSRLDDKKFLYSAPRNKSHIDTCLHAYIFRPEVYQLPICKLKELFEENRKLQQFSPLSDYEGQEEEMNGTKMKFGKRNNSRGEAIISGKQRSSHSLDYDKDRVKELINLIQCRKKSVGGDSDTEDMRSKTVLKRKLEDLPENMRKLAKTSNLSENCHLYEESPQPIGSLGHDADLRRQQQDTCNSGIADIHRLFNWLSETLANARHSDASLTDTVNKALGLSTDDAYEELRQKHEYELNSTPDKKDYEQPTCAKVENAQFKGTQSLLLEVDATSKYSVAISTSEVGTDHKLHLKEDPNLISVNNFEDCSLCPSVPIEHGFRRQQSKSNNVEETEIHWKLIPITGGNARSPEDQLGKHGEKQTPGMKSPEEQLVCVPPQEAFPNDPRVINRQRSSDYQFPSSPFTDTLKGTTEDDVLTGQVEEQCVPAAEAEPPAVSETTERTVLGEYNLFSRKIEEILKQKNVSYVSTVSTPIFSTQEKMKRLSEFIYSKTSKAGVQEFVDGLHEKLNTIIIKASAKGGNLPPVSPNDSGAKIASNPLERHVIPVSSSDFNNKHLLEPLCSDPLKDTNSDEQHSTSALTEVEMNQPQHATELMVTSDHIVPGDMAREPVEETTKSPSDVNISAQPALSNFISQLEPEVFNSLVKIMKDVQKNTVKFYIHEEEESVLCKEIKEYLIKLGNTECHPEQFLERRSKLDKLLIIIQNEDIAGFIHKIPGLVTLKKLPCVSFAGVDSLDDVKNHTYNELFVSGGFIVSDESILNPEVVTVENLKNFLTFLEELSTPEGKWQWKVHCKFQKKLKELGRLNAKALSLLTLLNVYQKKHLVEILSYHNCDSQTRNAPELDCLIRLQAQNIQQRHIVFLTEKNIKMLSSYTDNGIVVATAEDFMQNFKNLVGYHNSITEENLPQLGANENLESQSDAVLTLTPLELGVGISQH

SEQ ID NO: 40016 - protein, 1609 aa, Homo sapiens
MATAVETEACQPTDASWESGGGGDDEMKQALPELESSQQNGGGGGLNIAEPSGGAGREENAGAEAAQSLSHEQPQDSSEAGAAALPRGPEEPERPVRRSFQIPRKSREKKALFQPLTPGSREFEDVVNILHSSYLEPTSVTNFNYRRACLVHNELLEKEFTEKRRELKFDGRLDKELSESYAFLMVDRYQVQTICEKGLHVGQSKITILGSPSMGVYLSRYADLLQANPLDTGAMGDVVIFKIMKGKIKSIYDPMGVKSLESMLNKSALDPTPKHECHVSKNANRITSLLAYRAYELTQYYFYEYGFDELRRRPRHVCPYAVVSFTYKDDIQTPKFVPSSRSNSFNTDRNIDKYNYTLWKGQLLNKGKLLCYISLRSATRAFLPIKLPEKLDVETVMSIDHLKQKIPPALFYKETYLGPNEVLKNGMYCSLYEVVEKTRIGSNMESLLQKLDREKLVLVKPLGDRGYLFLLSPYQMVPPYEYQTAKSRVLHALFLFQEPRSIVTSQKGSTNAAPQERHESMPDVLKIAQFLQFSLIQCRKEFKNISAINFHSVVEKYVSEFFKRGFGSGKREFIMFPYDSRLDDKKFLYSAPRNKSHIDTCLHAYIFRPEVYQLPICKLKELFEENRKLQQFSPLSDYEGQEEEMNGTKMKFGKRNNSRGEAIISGKQRSSHSLDYDKDRVKELINLIQCRKKSVGGDSDTEDMRSKTVLKRKLEDLPENMRKLAKTSNLSENCHLYEESPQPIGSLGHDADLRRQQQDTCNSGIADIHRLFNWLSETLANARHSDASLTDTVNKALGLSTDDAYEELRQKHEYELNSTPDKKDYEQPTCAKVENAQFKGTQSLLLEVDATSKYSVAISTSEVGTDHKLHLKEDPNLISVNNFEDCSLCPSVPIEHGFRRQQSKSNNVEETEIHWKLIPITDTLKGTTEDDVLTGQVEEQCVPAAEAEPPAVSETTERTVLGEYNLFSRKIEEILKQKNVSYVSTVSTPIFSTQEKMKRLSEFIYSKTSKAGVQEFVDGLHEKLNTIIIKASAKGGNLPPVSPNDSGAKIASNPLERHVIPVSSSDFNNKHLLEPLCSDPLKDTNSDEQHSTSALTEVEMNQPQHATELMVTSDHIVPGDMAREPVEETTKSPSDVNISAQPALSNFISQLEPEVFNSLVKIMKDVQKNTVKFYIHEEEESVLCKEIKEYLIKLGNTECHPEQFLERRSKLDKLLIIIQNEDIAGFIHKIPGLVTLKKLPCVSFAGVDSLDDVKNHTYNELFVSGGFIVSDESILNPEVVTVENLKNFLTFLEELSTPEGKWQWKVHCKFQKKLKELGRLNAKALSLLTLLNVYQKKHLVEILSYHNCDSQTRNAPELDCLIRLQAQNIQQRHIVFLTEKNIKMLSSYTDNGIVVATAEDFMQNFKNLVGYHNSITEENLPQLGANENLESQSALLENDEKDEEDMSLDSGDEISHIEVCSNFHSEIWEKETKGSRGTDQKKNTQIELQSSPDVQNSLLEDKTYLDSEERTSIDIVCSEGENSNSTEQDSYSNFQVYHSQLNMSHQFSHFNVLTHQTFLGTPYALSSSQSQENENYFLSAYTESLDRDKSPPPLSWGKSDSSRPYSQEK

SEQ ID NO: 40017 - protein, 438 aa, Homo sapiens
MPCTCTWRNWRQWIRPLVAVIYLVSIVVAVPLCVWELQKLEVGIHTKAWFIAGIFLLLTIPISLWVILQHLVHYTQPELQKPIIRILWMVPIYSLDSWIALKYPGIAIYVDTCRECYEAYVIYNFMGFLTNYLTNRYPNLVLILEAKDQQKHFPPLCCCPPWAMGEVLLFRCKLGVLQYTVVRPFTTIVALICELLGIYDEGNFSFSNAWTYLVIINNMSQLFAMYCLLLFYKVLKEELSPIQPVGKFLCVKLVVFVSFWQAVVIALLVKVGVISEKHTWEWQTVEAVATGLQDFIICIEMFLAAIAHHYTFSYKPYVQEAEEGSCFDSFLAMWDVSDIRDDISEQVRHVGRTVRGHPRKKLFPEDQDQNEHTSLLSSSSQDAISIASSMPPSPMGHYQGFGHTVTPQTTPTTAKISDEILSDTIGEKKEPSDKSVDS

SEQ ID NO: 40018 - protein, 261 aa, Homo sapiens
MPCTCTWRNWRQWIRPLVAVIYLVSIVVAVPLCVWELQKLEVGIHTKAWFIAGIFLLLTIPISLWVILQHLVHYTQPELQKPIIRILWMVPIYSLDSWIALKYPGIAIYVDTCRECYEAYVIYNFMGFLTNYLTNRYPNLVLILEAKDQQKHFPPLCCCPPWAMGEVLLFRCKLGVLQYTVVRPFTTIVALICELLGIYDEGNFSFSNAWTYLVIINNMSQLFAMYCLLLFYKVLKEELSPIQPVGKFLCVKLVVFVSFWQ

SEQ ID NO: 40019 - protein, 350 aa, Homo sapiens
MNLRGLFQDFNPSKFLIYACLLLFSVLLALRLDGIIQWSYWAVFAPIWLWKLMVIVGASVGTGVWARNPQYRAEGETCVEFKAMLIAVGIHLLLLMFEVLVCDRIERGSHFWLLVFMPLFFVSPVSVAACVWGFRHDRSLELEILCSVNILQFIFIALRLDKIIHWPWLVVCVPLWILMSFLCLVVLYYIVWSVLFLRSMDVIAEQRRTHITMALSWMTIVVPLLTFEILLVHKLDGHNAFSSIPIFVPLWLSLITLMATTFGQKGGNHWWFGIRKDFCQFLLEIFPFLREYGNISYDLHHEDNEETEETPVPEPPKIAPMFRKKARVVITQSPGKYVLPPPKLNIEMPD

SEQ ID NO: 40020 - protein, 1533 aa, Homo sapiens
MPVKRLREVVSQNHGDHLVLLKDELPCVPPALSANKRLPVGTGTSLNGTSRGSSDLTSARNCYQPLLENPMVSESDFSKDVAVQVLPLDKIEENNKQKANDIFISQYTMGQKDALRTVLKQKAQSMPVFKEVKVHLLEDAGIEKDAVTQETRISPSGIDSATTVAAATAAAIATAAPLIKVQSDLEAKVNSVTELLSKLQETDKHLQRVTEQQTSIQRKQEKLHCHDHEKQMNVFMEQHIRHLEKLQQQQIDIQTHFISAALKTSSFQPVSMPSSRAVEKYSVKPEHPNLGSCNPSLYNTFASKQAPLKEVEDTSFDKQKSPLETPAPRRFAPVPVSRDDELSKRENLLEEKENMEVSCHRGNVRLLEQILNNNDSLTRKSESSNTTSLTRSKIGWTPEKTNRFPSCEELETTKVTMQKSDDVLHDLGQKEKETNSMVQPKESLSMLKLPDLPQNSVKLQTTNTTRSVLKDAEKILRGVQNNKKVLEENLEAIIRAKDGAAMYSLINALSTNREMSEKIRIRKTVDEWIKTISAEIQDELSRTDYEQKRFDQKNQRTKKGQNMTKDIRTNTQDKTVNKSVIPRKHSQKQIEEHFRNLPMRGMPASSLQKERKEGLLKATTVIQDEDYMLQVYGKPVYQGHRSTLKKGPYLRFNSPSPKSRPQRPKVIERVKGTKVKSIRTQTDFYATKPKKMDSKMKHSVPVLPHGDQQYLFSPSREMPTFSGTLEGHLIPMAILLGQTQSNSDTMPPAGVIVSKPHPVTVTTSIPPSSRKVETGVKKPNIAIVEMKSEKKDPPQLTVQVLPSVDIDSISNSSADVLSPLSSPKEASLPPVQTWIKTPEIMKVDEEEVKFPGTNFDEIIDVIQEEEKCDEIPDSEPILEFNRSVKADSTKYNGPPFPPVASTFQPTADILDKVIERKETLENSLIQWVEQEIMSRIISGLFPVQQQIAPSISVSVSETSEPLTSDIVEGTSSGALQLFVDAGVPVNSNVIKHFVNEALAETIAVMLGDREAKKQGPVATGVSGDASTNETYLPARVCTPLPTPQPTPPCSPSSPAKECVLVKTPDSSPCDSDHDMAFPVKEICAEKGDDMPAIMLVNTPTVTPTTTPPPAAAVFTPTLSDISIDKLKVSSPELPKPWGDGDLPLEEENPNSPQEELHPRAIVMSVAKDEEPESMDFPAQPPPPEPVPFMPFPAGTKAPSPSQMPGSDSSTLESTLSVTVTETETLDKPISEGEILFSCGQKLAPKILEDIGLYLTNLNDSLSSTLHDAVEMEDDPPSEGQVIRMSHKKFHADAILSFAKQNQESAVSQQAVYHSEDLENSVGELSEGQRPQLTAAAENILMGHSLYMQPPVTNTQSLDQQCDPKPLSRQFDTVSGSIYEDSCASHGPMSLGELELEPNSKLVLPTTLLTAQENDVNLPVAAEDFSQYQLKQNQDVKQVEHKPSQSYLRVRNKSDIAPSQQQVSPGDMDRTQIELNPYLTCVFSGGKAVPLSASQMPPAKMSVMLPSVNLEDCSQSLSLSTMQEDMESSGADTF

SEQ ID NO: 40021 - protein, 1472 aa, Homo sapiens
MKGSEVSLEKKKKIKMPVKRLREVVSQNHGDHLVLLKDELPCVPPALSANKRLPVGTGTSLNGTSRGSSDLTSARNCYQPLLENPMVSESDFSKDVAVQVLPLDKIEENNKQKANDIFISQYTMGQKDALRTVLKQKAQSMPVFKEVKVHLLEDAGIEKDAVTQETRISPSGIDSATTVAAATAAAIATAAPLIKVQSDLEAKVNSVTELLSKLQETDKHLQRVTEQQTSIQRKQEKLHCHDHEKQMNVFMEQHIRHLEKLQQQQIDIQTHFISAALKTSSFQPVSMPSSRAVEKYSVKPEHPNLGSCNPSLYNTFASKQAPLKEVEDTSFDKQKSPLETPAPRRFAPVPVSRDDELSKRENLLEEKENMEVSCHRGNVRLLEQILNNNDSLTRKSESSNTTSLTRSKIGWTPEKTNRFPSCEELETTKVTMQKSDDVLHDLGQKEKETNSMVQPKESLSMLKLPDLPQNSVKLQTTNTTRSVLKDAEKILRGVQNNKKVLEENLEAIIRAKDGAAMYSLINALSTNREMSEKIRIRKTVDEWIKTISAEIQGLLKATTVIQDEDYMLQVYGKPVYQGHRSTLKKGPYLRFNSPSPKSRPQRPKVIERVKGTKVKSIRTQTDFYATKPKKMDSKMKHSVPVLPHGDQQYLFSPSREMPTFSGTLEGHLIPMAILLGQTQSNSDTMPPAGVIVSKPHPVTVTTSIPPSSRKVETGVKKPNIAIVEMKSEKKDPPQLTVQVLPSVDIDSISNSSADVLSPLSSPKEASLPPVQTWIKTPEIMKVDEEEVKFPGTNFDEIIDVIQEEEKCDEIPDSEPILEFNRSVKADSTKYNGPPFPPVASTFQPTADILDKVIERKETLENSLIQWVEQEIMSRIISGLFPVQQQIAPSISVSVSETSEPLTSDIVEGTSSGALQLFVDAGVPVNSNVIKHFVNEALAETIAVMLGDREAKKQGPVATGVSGDASTNETYLPARVCTPLPTPQPTPPCSPSSPAKECVLVKTPDSSPCDSDHDMAFPVKEICAEKGDDMPAIMLVNTPTVTPTTTPPPAAAVFTPTLSDISIDKLKVSSPELPKPWGDGDLPLEEENPNSPQEELHPRAIVMSVAKDEEPESMDFPAQPPPPEPVPFMPFPAGTKAPSPSQMPGSDSSTLESTLSVTVTETETLDKPISEGEILFSCGQKLAPKILEDIGLYLTNLNDSLSSTLHDAVEMEDDPPSEGQVIRMSHKKFHADAILSFAKQNQESAVSQQAVYHSEDLENSVGELSEGQRPQLTAAAENILMGHSLYMQPPVTNTQSLDQQCDPKPLSRQFDTVSGSIYEDSCASHGPMSLGELELEPNSKLVLPTTLLTAQENDVNLPVAAEDFSQYQLKQNQDVKQVEHKPSQSYLRVRNKSDIAPSQQQVSPGDMDRTQIELNPYLTCVFSGGKAVPLSASQMPPAKMSVMLPSVNLEDCSQSLSLSTMQEDMESSGADTF

SEQ ID NO: 40022 - protein, 1644 aa, Homo sapiens
MFWCGTCFVTNNMKGSEVSLEKKKKIKMPVKRLREVVSQNHGDHLVLLKDELPCVPPALSANKRLPVGTGTSLNGTSRGSSDLTSARNCYQPLLENPMVSESDFSKDVAVQVLPLDKIEENNKQKANDIFISQYTMGQKDALRTVLKQNVSLCLTGWSDHSGVITTHCSLYLLRLMRSSHLSLPSSWDYRAQSMPVFKEVKVHLLEDAGIEKDAVTQETRISPSGIDSATTVAAATAAAIATAAPLIKVQSDLEAKVNSVTELLSKLQETDKHLQRVTEQQTSIQRKQEKLHCHDHEKQMNVFMEQHIRHLEKLQQQQIDIQTHFISAALKTSSFQPVSMPSSRAVEKYSVKPEHPNLGSCNPSLYNTFASKQAPLKEVEDTSFDKQKSPLETPAPRRFAPVPVSRDDELSKRENLLEEKENMEVSCHRGNVRLLEQILNNNDSLTRKSESSNTTSLTRSKIGWTPEKTNRFPSCEELETTKVTMQKSDDVLHDLGQKEKETNSMVQPKESLSMLKLPDLPQNSVKLQTTNTTRSVLKDAEKILRGVQNNKKVLEENLEAIIRAKDGAAMYSLINALSTNREMSEKIRIRKTVDEWIKTISAEIQDELSRTDYEQKRFDQKNQRTKKGQNMTKDIRTNTQDKTVNKSVIPRKHSQKQIEEHFRNLPMRGMPASSLQKERKEGLLKATTVIQDEDYMLQVYGKPVYQGHRSTLKKGPYLRFNSPSPKSRPQRPKVIERVKGTKVKSIRTQTDFYATKPKKMDSKMKHSVPVLPHGDQQYLFSPSREMPTFSGTLEGHLIPMAILLGQTQSNSDTMPPAGVIVSKPHPVTVTTSIPPSSRKVETGVKKPNIAIVEMKSEKKDPPQLTVQVLPSVDIDSISNSSADVLSPLSSPKEASLPPVQTWIKTPEIMKVDEEEVKFPGTNFDEIIDVIQEEEKCDEIPDSEPILEFNRSVKADSTKYNGPPFPPVASTFQPTADILDKVIERKETLENSLIQWVEQEIMSRIISGLFPVQQQIAPSISVSVSETSEPLTSDIVEGTSSGALQLFVDAGVPVNSNVIKHFVNEALAETIAVMLGDREAKKQGPVATGVSGDASTNETYLPARVCTPLPTPQPTPPCSPSSPAKECVLVKTPDSSPCDSDHDMAFPVKEICAEKGDDMPAIMLVNTPTVTPTTTPPPAAAVFTPTLSDISIDKLKVSSPELPKPWGDGDLPLEEENPNSPQEELHPRAIVMSVAKDEEPESMDFPAQPPPPEPVPFMPFPAGTKAPSPSQMPGSDSSTLESTLSVTVTETETLDKPISEGEILFSCGQKLAPKILEDIGLYLTNLNDSLSSTLHDAVEMEDDPPSEGQVIRMSHKKFHADAILSFAKQNQESAVSQQAVYHSEDLENSVGELSEGQRPQLTAAAENILMGHSLYMQPPVTNTQSLDQQCDPKPLSRQFDTVSGSIYEDSCASHGPMSLGELELEPNSKLVLPTTLLTAQENDVNLPVAAEDFSQYQLKQNQDVKQVEHKPSQSYLRVRNKSDIAPSQQQVSPGDMDRTQIELNPYLTCVFSGLGVHVKKVSCIGKLGLWRFVIQIISSPRWESSATLRFTDAPCQDVSDAAVSEPRGLLSVSESQHNAGGHGVFGGRYLLNGKRQPAQCLCHWF

SEQ ID NO: 40023 - protein, 1504 aa, Homo sapiens
MVSESDFSKDVAVQVLPLDKIEENNKQKANDIFISQYTMGQKDALRTVLKQNVSLCLTGWSDHSGVITTHCSLYLLRLMRSSHLSLPSSWDYRAQSMPVFKEVKVHLLEDAGIEKDAVTQETRISPSGIDSATTVAAATAAAIATAAPLIKVQSDLEAKVNSVTELLSKLQETDKHLQRVTEQQTSIQRKQEKLHCHDHEKQMNVFMEQHIRHLEKLQQQQIDIQTHFISAALKTSSFQPVSMPSSRAVEKYSVKPEHPNLGSCNPSLYNTFASKQAPLKEVEDTSFDKQKSPLETPAPRRFAPVPVSRDDELSKRENLLEEKENMEVSCHRGNVRLLEQILNNNDSLTRKSESSNTTSLTRSKIGWTPEKTNRFPSCEELETTKVTMQKSDDVLHDLGQKEKETNSMVQPKESLSMLKLPDLPQNSVKLQTTNTTRSVLKDAEKILRGVQNNKKVLEENLEAIIRAKDGAAMYSLINALSTNREMSEKIRIRKTVDEWIKTISAEIQDELSRTDYEQKRFDQKNQRTKKGQNMTKDIRTNTQDKTVNKSVIPRKHSQKQIEEHFRNLPMRGMPASSLQKERKEGLLKATTVIQDEDYMLQVYGKPVYQGHRSTLKKGPYLRFNSPSPKSRPQRPKVIERVKGTKVKSIRTQTDFYATKPKKMDSKMKHSVPVLPHGDQQYLFSPSREMPTFSGTLEGHLIPMAILLGQTQSNSDTMPPAGVIVSKPHPVTVTTSIPPSSRKVETGVKKPNIAIVEMKSEKKDPPQLTVQVLPSVDIDSISNSSADVLSPLSSPKEASLPPVQTWIKTPEIMKVDEEEVKFPGTNFDEIIDVIQEEEKCDEIPDSEPILEFNRSVKADSTKYNGPPFPPVASTFQPTADILDKVIERKETLENSLIQWVEQEIMSRIISGLFPVQQQIAPSISVSVSETSEPLTSDIVEGTSSGALQLFVDAGVPVNSNVIKHFVNEALAETIAVMLGDREAKKQGPVATGVSGDASTNETYLPARVCTPLPTPQPTPPCSPSSPAKECVLVKTPDSSPCDSDHDMAFPVKEICAEKGDDMPAIMLVNTPTVTPTTTPPPAAAVFTPTLSDISIDKLKVSSPELPKPWGDGDLPLEEENPNSPQEELHPRAIVMSVAKDEEPESMDFPAQPPPPEPVPFMPFPAGTKAPSPSQMPGSDSSTLESTLSVTVTETETLDKPISEGEILFSCGQKLAPKILEDIGLYLTNLNDSLSSTLHDAVEMEDDPPSEGQVIRMSHKKFHADAILSFAKQNQESAVSQQAVYHSEDLENSVGELSEGQRPQLTAAAENILMGHSLYMQPPVTNTQSLDQQCDPKPLSRQFDTVSGSIYEDSCASHGPMSLGELELEPNSKLVLPTTLLTAQENDVNLPVAAEDFSQYQLKQNQDVKQVEHKPSQSYLRVRNKSDIAPSQQQVSPGDMDRTQIELNPYLTCVFSGGKAVPLSASQMPPAKMSVMLPSVNLEDCSQSLSLSTMQEDMESSGADTF

SEQ ID NO: 40024 - protein, 420 aa, Homo sapiens
MTMEKGMSSGEGLPSRSSQVSAGKITAKELETKQSYKEKRGGFVLVHAGAGYHSESKAKEYKHVCKRACQKAIEKLQAGALATDAVTAALVELEDSPFTNAGMGSNLNLLGEIECDASIMDGKSLNFGAVGALSGIKNPVSVANRLLCEGQKGKLSAGRIPPCFLVGEGAYRWAVDHGIPSCPPNIMTTRFSLAAFKRNKRKLELAERVDTDFMQLKKRRQSSEKENDSGTLDTVGAVVVDHEGNVAAAVSSGGLALKHPGRVGQAALYGCGCWAENTGAHNPYSTAVSTSGCGEHLVRTILARECSHALQAEDAHQALLETMQNKFISSPFLASEDGVLGGVIVLRSCRCSAEPDSSQNKQTLLVEFLWSHTTESMCVGYMSAQDGKAKTHISRLPPGAVAGQSVAIEGGVCRLESPVN

SEQ ID NO: 40025 - protein, 129 aa, Homo sapiens
MTMEKGMSSGEGLPSRSSQVSAGKITAKELETKQSYKEKRGGFVLVHAGAGYHSESKAKEYKHVCKRACQKAIEKLQAGALATDAVTAALVELEVYTHSYTSWSCIQPSIHVLLVKRQRKSPLPRISTF

SEQ ID NO: 40026 - protein, 145 aa, Homo sapiens
MTMEKGMSSGEGLPSRSSQVSAGKITAKELETKQSYKEKRGGFVLVHAGAGYHSESKAKEYKHVCKRACQKAIEKLQAGALATDAVTAALVELEDVESILCAPYWLENVHMLYKLRMLTKPCWRLCKTSLSVHLSLPVKMACLAE

SEQ ID NO: 40027 - protein, 114 aa, Homo sapiens
MASVSELACIYSALILHDDEVTVTEDKINALIKAAGVNVEPFWPGLFAKALANVNIGSLICNVGAGGPAPAAGAAPAGGPAPSTAAAPAEEKKVEAKKEESEESDDDMGFGLFD

SEQ ID NO: 40028 - protein, 89 aa, Homo sapiens
MASVSELACIYSALILHDDEVTVTALANVNIGSLICNVGAGGPAPAAGAAPAGGPAPSTAAAPAEEKKVEAKKEESEESDDDMGFGLFD

SEQ ID NO: 40029 - protein, 403 aa, Homo sapiens
MSHRKFSAPRHGSLGFLPRKRSSRHRGKVKSFPKDDPSKPVHLTAFLGYKAGMTHIVREVDRPGSKVNKKEVVEAVTIVETPPMVVVGIVGYVETPRGLRTFKTVFAEHISDECKRRFYKNWHKSKKKAFTKYCKKWQDEDGKKQLEKDFSSMKKYCQVIRVIAHTQMRLLPLRQKKAHLMEIQVNGGTVAEKLDWARERLEQQVPVNQVFGQDEMIDVIGVTKGKGYKGVTSRWHTKKLPRKTHRGLRKVACIGAWHPARVAFSVARAGQKGYHHRTEINKKIYKIGQGYLIKDGKLIKNNASTDYDLSDKSINPLGGFVHYGEVTNDFVMLKGCVVGTKKRVLTLRKSLLVQTKRRALEKIDLKFIDTTSKFGHGRFQTMEEKKAFMGPLKKDRIAKEEGA

SEQ ID NO: 40030 - protein, 579 aa, Homo sapiens
MSVTGFTITDEKVHLYHSIEKEKTVRHIGDLCSSHSVKKIQVGICLLLVELCERFTFFEVVCNMIPFCTIKLGYHNCQAAILNLCFIGTSILTPVFVRWLTDVYLGRNKLVYICLFLHFLGTALLSVVAFPLEDFYLGTYHAVNNIPKTEQHRLFYVALLTICLGIGGVRAIVCPLGAFGLQEYGSQKTMSFFNWFYWLMNLNATIVFLGISYIQHSQAWALVLLIPFMSMLMAVITLHMIYYNLIYQSEKRCSLLTGVGVLVSALKTCHPQYCHLGRDVTSQLDHAKEKNGGCYSELHVEDTTFFLTLLPLFIFQLLYRMCIMQIPSGYYLQTMNSNLNLDGFLLPIAVMNAISSLPLLILAPFLEYFSTCLFPSKRVGSFLSTCIIAGNLFAALSVMIAGFFEIHRKHFPAVEQPLSGKVLTVSSMPCFYLILQYVLLGVAETLVNPALSVISYRFVPSNVRGTSMNFLTLFNGFGCFTGALLVKLVYLISDGNWFPNTLNKGNLESFFFFLASLTLLNVLGFCSVSQRYCNLNHFNAQNIRGSNLEETLLLHEKSLKFYGSIQEFSSSIDLWETAL

SEQ ID NO: 40031 - protein, 227 aa, Homo sapiens
MEGQSGRCKIVVVGDAECGKTALLQVFAKDAYPGSYVPTVFENYTASFEIDKRRIELNMWDTSGSSYYDNVRPLAYPDSDAVLICFDISRPETLDSVLKKWQGETQEFCPNAKVVLVGCKLDMRTDLATLRELSKQRLIPVTHEQGTVLAKQVGAVSYVECSSRSSERSVRDVFHVATVASLGRGHRQLRRTDSRRGMQRSAQLSGRPDRGNEGEIHKDRAKSCNLM

SEQ ID NO: 40032 - protein, 541 aa, Homo sapiens
MVINLCLPQFRPRIHCNKISADGYEVENLISEDLTKRSHGFRTEYFIKPPVYVTVSFPFNVEICRINIDLTAGGGQNVTGLEMYTSASSSRVSWNTPQCRTLGPAEPSVPDKEAFTLVGKVLLKNQSQVVFSHRGFKARPPFGAMEATLPSPAVVAQELWNKGALSLSHVAHLRICITHVTGGGIPCIKRLEVWGQPAKTCSQEVIDSILLVTSENLPQDVALQAPALPMESDCDPGDQPESQQAPSSLQKLAEIIQDVPEEFLDPITLEIMPCPMLLPSGKVIDQSTLEKCNRSEATWGRVPSDPFTGVAFTPHSQPLPHPSLKARIDHFLLQHSIPGCHLLGRAQTALAVIPSSIVLPSQKRKIEQAEHVPDSNFGVNASCFSATSPLVLPTTSEHTAKKMKATNEPSLTHMDCSTGPLSHEQKLSQSLEIALASTLGSMPSFTARLTRGQLQHLGTRGSNTSWRPGTGSEQPGSILGPECASCKRVFSPYFKKEPVYQLPCGHLLCRPCLGEKQRSLPMTCTACQRPVASQDVLRVHF

SEQ ID NO: 40033 - protein, 487 aa, Homo sapiens
MVINLCLPQFRPRIHCNKISADGYEVENLISEDLTKRSHGFRTEYFIKPPVYVTVSFPFNVEICRINIDLTAGGGQNVTGLEMYTSASSSRVSWNTPQCRTLGPAEPSVPDKEAFTLVGKVLLKNQSQVVFSHRGFKARPPFGAMEATLPSPAVVAQELWNKGALSLSHVAHLRICITHVTGGGIPCIKRLEVWGQPAKTCSQEVIDSILLVTSENLPQDVALQAPALPMESDCDPGDQPESQQAPSSLQKLAEIIQDVPEEFLDPITLEIMPCPMLLPSGKVIDQSTLEKCNRSEATWGRVPSDPFTGVAFTPHSQPLPHPSLKARIDHFLLQHSIPGCHLLGRAQTALAVIPSSIVLPSQKRKIEQAEHVPDSNFGVNASCFSATSPLVLPTTSEHTAKKMKATNEPSLTHMDCSTEQPGSILGPECASCKRVFSPYFKKEPVYQLPCGHLLCRPCLGEKQRSLPMTCTACQRPVASQDVLRVHF

SEQ ID NO: 40034 - protein, 216 aa, Homo sapiens
MKLNLVQIFFMLLMLLLGLGMGLGLGLHMATAVLEESDQPLNEFWSSDSQDKAEATEEGDGTQTTETLVLSNKEVVQPGWPEDPILGEDEVGGNKMLRASALFQSNKDYLRLDQTDRECNDMMAHKMKEPSQSCIAQYAFIHEDLNTVKAVCNSPVIACELKGGKCHKSSRPFDLTLCELSQPDQVTPNCNYLTSVIKKHIIITCNDMKRQLPTGQ

SEQ ID NO: 40035 - protein, 244 aa, Homo sapiens
MWGAPLPRRPVWDVRSASAGPQPCLGGKMKLNLVQIFFMLLMLLLGLGMGLGLGLHMATAVLEESDQPLNEFWSSDSQDKAEATEEGDGTQTTETLVLSNKEVVQPGWPEDPILGEDEVGGNKMLRASALFQSNKDYLRLDQTDRECNDMMAHKMKEPSQSCIAQYAFIHEDLNTVKAVCNSPVIACELKGGKCHKSSRPFDLTLCELSQPDQVTPNCNYLTSVIKKHIIITCNDMKRQLPTGQ

SEQ ID NO: 40036 - protein, 147 aa, Homo sapiens
MIIMVIIFLVLLFWENEVNDEAVMSTLEHLHVDYPQNDVPVPARYCNHMIIQRVIREPDHTCKKEHVFIHERPRKINGICISPKKVACQNLSAIFCFQSETKFKMTVCQLIEGTRYPACRYHYSPTEGFVLVTCDDLRPDSFLGYVK

SEQ ID NO: 40037 - protein, 517 aa, Homo sapiens
MAAPEQPLAISRGCTSSSSLSPPRGDRTLLVRHLPAELTAEEKEDLLKYFGAQSVRVLSDKGRLKHTAFATFPNEKAAIKALTRLHQLKLLGHTLVVEFAKEQDRVHSPCPTSGSEKKKRSDDPVEDDKEKKELGYLTVENGIAPNHGLTFPLNSCLKYMYPPPSSTILANIVNALASVPKFYVQVLHLMNKMNLPTPFGPITARPPMYEDYMPLHAPLPPTSPQPPEEPPLPDEDEELSSEESEYESTDDEDRQRMNKLMELANLQPKRPKTIKQRHVRKKRKIKDMLNTPLCPSHSSLHPVLLPSDVFDQPQPVGNKRIEFHISTDMPAAFKKDLEKEQNCEEKNHDLPATEVDASNIGFGKIFPKPNLDITEEIKEDSDEMPSECISRRELEKGRISREEMETLSVFRSYEPGEPNCRIYVKNLAKHVQEKDLKYIFGRYVDFSSETQRIMFDIRLMKEGRMKGQAFIGLPNEKAAAKALKEANGYVLFGKPMVVQFARSARPKQDPKEGKRKC

SEQ ID NO: 40038 - protein, 516 aa, Homo sapiens
MAAPEQPLAISRGCTSSSSLSPPRGDRTLLVRHLPAELTAEEKEDLLKYFGAQSVRVLSDKGRLKHTAFATFPNEKAAIKALTRLHQLKLLGHTLVVEFAKEQDRVHSPCPTSGSEKKKRSDDPVEDDKEKKELGYLTVENGIAPNHGLTFPLNSCLKYMYPPPSSTILANIVNALASVPKFYVQVLHLMNKMNLPTPFGPITARPPMYEDYMPLHAPLPPTSPQPPEEPPLPDEDEELSSEESEYESTDDEDRQRMNKLMELANLQPKRPKTIKQRHVRKKRKIKDMLNTPLCPSHSLHPVLLPSDVFDQPQPVGNKRIEFHISTDMPAAFKKDLEKEQNCEEKNHDLPATEVDASNIGFGKIFPKPNLDITEEIKEDSDEMPSECISRRELEKGRISREEMETLSVFRSYEPGEPNCRIYVKNLAKHVQEKDLKYIFGRYVDFSSETQRIMFDIRLMKEGRMKGQAFIGLPNEKAAAKALKEANGYVLFGKPMVVQFARSARPKQDPKEGKRKC

SEQ ID NO: 40039 - protein, 515 aa, Homo sapiens
MACKISPGANSASLPGHPNKVICERVRLQSLFPLLPSDQNTTVQEDAHFKAFFQSEDSPSPKRQRLSHSVFDYTSASPAPSPPMRPWEMTSNRQPPSVRPSQHHFSGERCNTPARNRRSPPVRRQRGRRDRLSRHNSISQDENYHHLPYAQQQAIEEPRAFHPPNVSPRLLHPAAHPPQQNAVMVDIHDQLHQGTVPVSYTVTTVAPHGIPLCTGQHIPACSTQQVPGCSVVFSGQHLPVCSVPPPMLQACSVQHLPVPYAAFPPLISSDPFLIHPPHLSPHHPPHLPPPGQFVPFQTQQSRSPLQRIENEVELLGEHLPVGGFTYPPSAHPPTLPPSAPLQFLTHDPLHQEVSFGVPYPPFMPRRLTGRSRYRSQQPIPPPPYHPSLLPYVLSMLPVPPAVGPTFSFELDVEDGEVENYEALLNLAERLGEAKPRGLTKADIEQLPSYRFNPNNHQSEQTLCVVCMCDFESRQLLRVLPCNHEFHAKCVDKWLKANRTCPICRADASEVHRDSE

SEQ ID NO: 40040 - protein, 465 aa, Homo sapiens
MACKSEDSPSPKRQRLSHSVFDYTSASPAPSPPMRPWEMTSNRQPPSVRPSQHHFSGERCNTPARNRRSPPVRRQRGRRDRLSRHNSISQDENYHHLPYAQQQAIEEPRAFHPPNVSPRLLHPAAHPPQQNAVMVDIHDQLHQGTVPVSYTVTTVAPHGIPLCTGQHIPACSTQQVPGCSVVFSGQHLPVCSVPPPMLQACSVQHLPVPYAAFPPLISSDPFLIHPPHLSPHHPPHLPPPGQFVPFQTQQSRSPLQRIENEVELLGEHLPVGGFTYPPSAHPPTLPPSAPLQFLTHDPLHQEVSFGVPYPPFMPRRLTGRSRYRSQQPIPPPPYHPSLLPYVLSMLPVPPAVGPTFSFELDVEDGEVENYEALLNLAERLGEAKPRGLTKADIEQLPSYRFNPNNHQSEQTLCVVCMCDFESRQLLRVLPCNHEFHAKCVDKWLKANRTCPICRADASEVHRDSE

SEQ ID NO: 40041 - protein, 432 aa, Homo sapiens
MRPWEMTSNRQPPSVRPSQHHFSGERCNTPARNRRSPPVRRQRGRRDRLSRHNSISQDENYHHLPYAQQQAIEEPRAFHPPNVSPRLLHPAAHPPQQNAVMVDIHDQLHQGTVPVSYTVTTVAPHGIPLCTGQHIPACSTQQVPGCSVVFSGQHLPVCSVPPPMLQACSVQHLPVPYAAFPPLISSDPFLIHPPHLSPHHPPHLPPPGQFVPFQTQQSRSPLQRIENEVELLGEHLPVGGFTYPPSAHPPTLPPSAPLQFLTHDPLHQEVSFGVPYPPFMPRRLTGRSRYRSQQPIPPPPYHPSLLPYVLSMLPVPPAVGPTFSFELDVEDGEVENYEALLNLAERLGEAKPRGLTKADIEQLPSYRFNPNNHQSEQTLCVVCMCDFESRQLLRVLPCNHEFHAKCVDKWLKANRTCPICRADASEVHRDSE

SEQ ID NO: 40042 - protein, 439 aa, Homo sapiens
MQHTCTQQKKVTYKHIARFSPRNRLCQADAVFNNNLAGFQLQSPPVRRQRGRRDRLSRHNSISQDENYHHLPYAQQQAIEEPRAFHPPNVSPRLLHPAAHPPQQNAVMVDIHDQLHQGTVPVSYTVTTVAPHGIPLCTGQHIPACSTQQVPGCSVVFSGQHLPVCSVPPPMLQACSVQHLPVPYAAFPPLISSDPFLIHPPHLSPHHPPHLPPPGQFVPFQTQQSRSPLQRIENEVELLGEHLPVGGFTYPPSAHPPTLPPSAPLQFLTHDPLHQEVSFGVPYPPFMPRRLTGRSRYRSQQPIPPPPYHPSLLPYVLSMLPVPPAVGPTFSFELDVEDGEVENYEALLNLAERLGEAKPRGLTKADIEQLPSYRFNPNNHQSEQTLCVVCMCDFESRQLLRVLPCNHEFHAKCVDKWLKANRTCPICRADASEVHRDSE

SEQ ID NO: 40043 - protein, 332 aa, Homo sapiens
MVDIHDQLHQGTVPVSYTVTTVAPHGIPLCTGQHIPACSTQQVPGCSVVFSGQHLPVCSVPPPMLQACSVQHLPVPYAAFPPLISSDPFLIHPPHLSPHHPPHLPPPGQFVPFQTQQSRSPLQRIENEVELLGEHLPVGGFTYPPSAHPPTLPPSAPLQFLTHDPLHQEVSFGVPYPPFMPRRLTGRSRYRSQQPIPPPPYHPSLLPYVLSMLPVPPAVGPTFSFELDVEDGEVENYEALLNLAERLGEAKPRGLTKADIEQLPSYRFNPNNHQSEQTLCVVCMCDFESRQLLRVLPCNHEFHAKCVDKWLKANRTCPICRADASEVHRDSE

SEQ ID NO: 40044 - protein, 372 aa, Homo sapiens
MKAGATSMWASCCGLLNEVMGTGAVRGQQSAFAGATGPFRFTPNPEFSTYPPAATEGPNIVCKACGLSFSVFRKKHVCCDCKKDFCSVCSVLQENLRRCSTCHLLQETAFQRPQLMRLKVKDLRQYLILRNIPIDTCREKEDLVDLVLCHHGLGSEDDMDTSSLNSSRSQTSSFFTRSFFSNYTAPSATMSSFQGELMDGDQTSRSGVPAQVQSEITSANTEDDDDDDDEDDDDEEENAEDRNPGLSKERVRASLSDLSSLDDVEGMSVRQLKEILARNFVNYSGCCEKWELVEKVNRLYKENEENQKSYGERLQLQDEEDDSLCRICMDAVIDCVLLECGHMVTCTKCGKRMSECPICRQYVVRAVHVFKS

SEQ ID NO: 40045 - protein, 373 aa, Homo sapiens
MRKAGATSMWASCCGLLNEVMGTGAVRGQQSAFAGATGPFRFTPNPEFSTYPPAATEGPNIVCKACGLSFSVFRKKHVCCDCKKDFCSVCSVLQENLRRCSTCHLLQETAFQRPQLMRLKVKDLRQYLILRNIPIDTCREKEDLVDLVLCHHGLGSEDDMDTSSLNSSRSQTSSFFTRSFFSNYTAPSATMSSFQGELMDGDQTSRSGVPAQVQSEITSANTEDDDDDDDEDDDDEEENAEDRNPGLSKERVRASLSDLSSLDDVEGMSVRQLKEILARNFVNYSGCCEKWELVEKVNRLYKENEENQKSYGERLQLQDEEDDSLCRICMDAVIDCVLLECGHMVTCTKCGKRMSECPICRQYVVRAVHVFKS

SEQ ID NO: 40046 - protein, 410 aa, Homo sapiens
MPYSTNKELILGIMVGTAGISLLLLWYHKVRKPGIAMKLPEFLSLGNTFNSITLQDEIHDDQGTTVIFQERQLQILEKLNELLTNMEELKEEIRFLKEAIPKLEEYIQDELGGKITVHKISPQHRARKRRLPTIQSSATSNSSEEAESEGGYITANTDTEEQSFPVPKAFNTRVEELNLDVLLQKVDHLRMSESGKSESFELLRDHKEKFRDEIEFMWRFARAYGDMYELSTNTQEKKHYANIGKTLSERAINRAPMNGHCHLWYAVLCGYVSEFEGLQNKINYGHLFKEHLDIAIKLLPEEPFLYYLKGRYCYTVSKLSWIEKKMAATLFGKIPSSTVQEALHNFLKAEELCPGYSNPNYMYLAKCYTDLEENQNALKFCNLALLLPTVTKEDKEAQKEMQKIMTSLKR

SEQ ID NO: 40047 - protein, 573 aa, Homo sapiens
MGKCLSCCKEDQSFQRCSPEDQVSTDAQHRGASSISQPSISLGHKTSYSPVTHKVNAAKASRRLLSVSSPSFSERRYSLFVGFQKRNASPYWQQSRANFDSEEDTGFTDIKSSSDHCGSFISRRRRFSSRKLSIVSYYKSAIFFDPQASGQNVFNLNEIEIFSKTSSNTDAKKHITISAPEYNTKNFKNFETNTTSPAFGNTIDTASYQQSTSSFFSLASDISSPDQQNGIANDIQQRGQLCKDLKDFLHPRPESYSTGHSPIMIPQHPSQSGTFPFLHKAGFSSSYKNSGCFIPPQSELTSGLFEDEDFAVLFQDEDRSSPIEIPKIRYITANTDTEEQSFPVPKAFNTRVEELNLDVLLQKVDHLRMSESGKSESFELLRDHKEKFRDEIEFMWRFARAYGDMYELSTNTQEKKHYANIGKTLSERAINRAPMNGHCHLWYAVLCGYVSEFEGLQNKINYGHLFKEHLDIAIKLLPEEPFLYYLKGRYCYTVSKLSWIEKKMAATLFGKIPSSTVQEALHNFLKAEELCPGYSNPNYMYLAKCYTDLEENQNALKFCNLALLLPTVTKEEL

SEQ ID NO: 40048 - protein, 211 aa, Homo sapiens
MGKCLRYITANTDTEEQSFPVPKAFNTRVEELNLDVLLQKVDHLRMSESGKSESFELLRDHKEKFRDEIEFMWRFARAYGDMYELSTNTQEKKHYANIGKTLSERAINRAPMNGHCHLWYAVLCGYVSEFEGLQNKINYGHLFKEHLDIAIKLLPEEPFLYYLKGRYCYTVSKLSWIEKKMAATLFGKIPSSTVQEALHNFLKVHFVYPLF

SEQ ID NO: 40049 - protein, 265 aa, Homo sapiens
MGKCLRYITANTDTEEQSFPVPKAFNTRVEELNLDVLLQKVDHLRMSESGKSESFELLRDHKEKFRDEIEFMWRFARAYGDMYELSTNTQEKKHYANIGKTLSERAINRAPMNGHCHLWYAVLCGYVSEFEGLQNKINYGHLFKEHLDIAIKLLPEEPFLYYLKGRYCYTVSKLSWIEKKMAATLFGKIPSSTVQEALHNFLKAEELCPGYSNPNYMYLAKCYTDLEENQNALKFCNLALLLPTVTKEDKEAQKEMQKIMTSLKR

SEQ ID NO: 40050 - protein, 470 aa, Homo sapiens
MSRLGALGGARAGLGLLLGTAAGLGFLCLLYSQRWKRTQRHGRSQSLPNSLDYTQTSDPGRHVMLLRAVPGGAGDASVLPSLPREGQEKVLDRLDFVLTSLVALRREVEELRSSLRGLAGEIVGEVRCHMEENQRVARRRRFPFVRERSDSTGSSSVYFTASSGATFTDAESEGGYTTANAESDNERDSDKESEDGEDEVSCETVKMGRKDSLDLEEEAASGASSALEAGGSSGLEDVLPLLQQADELHRGDEQGKREGFQLLLNNKLVYGSRQDFLWRLARAYSDMCELTEEVSEKKSYALDGKEEAEAALEKGDESADCHLWYAVLCGQLAEHESIQRRIQSGFSFKEHVDKAIALQPENPMAHFLLGRWCYQVSHLSWLEKKTATALLESPLSATVEDALQSFLKAEELQPGFSKAGRVYISKCYRELGKNSEARWWMKLALELPDVTKEDLAIQKDLEELEVILRD

SEQ ID NO: 40051 - protein, 341 aa, Homo sapiens
MEENQRVARRRRFPFVRERSDSTGSSSVYFTASSGATFTDAESEGGYTTANAESDNERDSDKESEDGEDEVSCETVKMGRKDSLDLEEEAASGASSALEAGGSSGLEDVLPLLQQADELHRGDEQGKREGFQLLLNNKLVYGSRQDFLWRLARAYSDMCELTEEVSEKKSYALDGKEEAEAALEKGDESADCHLWYAVLCGQLAEHESIQRRIQSGFSFKEHVDKAIALQPENPMAHFLLGRWCYQVSHLSWLEKKTATALLESPLSATVEDALQSFLKAEELQPGFSKAGRVYISKCYRELGKNSEARWWMKLALELPDVTKEDLAIQKDLEELEVILRD

SEQ ID NO: 40052 - protein, 189 aa, Homo sapiens
  MOD_RES (188)..(188): Selenocysteine
MERQEESLSARPALETEGLRFLHTTVGSLLATYGWYIVFSCILLYVVFQKLSARLRALRQRQLDRAAAAVEPDVVVKRQEALAAARLKMQEELNAQVEKHKEKLKQLEEEKRRQKIEMWDSMQEGKSYKGNAKKPQEEDSPGPSTSSVLKRKSDRKPLRGGGYNPLSGEGGGACSWRPGRRGPSSGGXG

SEQ ID NO: 40053 - protein, 195 aa, Homo sapiens
  MOD_RES (49)..(49): Selenocysteine
MRLLLLLLVAASAMVRSEASANLGGVPSKRLKMQYATGPLLKFQICVSXGYRRVFEEYMRVISQRYPDIRIEGENYLPQPIYRHIASFLSVFKLVLIGLIIVGKDPFAFFGMQAPSIWQWGQENKVYACMMVFFLSNMIENQCMSTGAFEITLNDVPVWSKLESGHLPSMQQLVQILDNEMKLNVHMDSIPHHRS

SEQ ID NO: 40054 - protein, 58 aa, Homo sapiens
MDTQKDVQPPKQQPMIYICGECHTENEIKSRDPIRCRECGYRIMYKKRTKRLVVFDAR

SEQ ID NO: 40055 - protein, 306 aa, Homo sapiens
MDTLDRVVKPKTKRAKRFLEKREPKLNENIKNAMLIKGGNANATVTKVLKDVYALKKPYGVLYKKKNITRPFEDQTSLEFFSKKSDCSLFMFGSHNKKRPNNLVIGRMYDYHVLDMIELGIENFVSLKDIKNSKCPEGTKPMLIFAGDDFDVTEDYRRLKSLLIDFFRGPTVSNIRLAGLEYVLHFTALNGKIYFRSYKLLLKKSGCRTPRIELEEMGPSLDLVLRRTHLASDDLYKLSMKMPKALKPKKKKNISHDTFGTTYGRIHMQKQDLSKLQTRKMKGLKKRPAERITEDHEKKSKRIKKN

SEQ ID NO: 40056 - protein, 665 aa, Homo sapiens
MTSANKAIELQLQVKQNAEELQDFMRDLENWEKDIKQKDMELRRQNGVPEENLPPIRNGNFRKKKKGKAKESSKKTREENTKNRIKSYDYEAWAKLDVDRILDELDKDDSTHESLSQESESEEDGIHVDSQKALVLKEKGNKYFKQGKYDEAIDCYTKGMDADPYNPVLPTNRASAYFRLKKFAVAESDCNLAVALNRSYTKAYSRRGAARFALQKLEEAKKDYERVLELEPNNFEATNELRKISQALASKENSYPKEADIVIKSTEGERKQIEAQQNKQQAISEKDRGNGFFKEGKYERAIECYTRGIAADGANALLPANRAMAYLKIQKYEEAEKDCTQAILLDGSYSKAFARRGTARTFLGKLNEAKQDFETVLLLEPGNKQAVTELSKIKKELIEKGHWDDVFLDSTQRQNVVKPIDNPPHPGSTKPLKKVIIEETGNLIQTIDVPDSTTAAAPENNPINLANVIAATGTTSKKNSSQDDLFPTSDTPRAKVLKIEEVSDTSSLQPQASLKQDVCQSYSEKMPIEIEQKPAQFATTVLPPIPANSFQLESDFRQLKSSPDMLYQYLKQIEPSLYPKLFQKNLDPDVFNQIVKILHDFYIEKEKPLLIFEILQRLSELKRFDMAVMFMSETEKKIARALFNHIDKSGLKDSSVEELKKRYGG

SEQ ID NO: 40057 - protein, 631 aa, Homo sapiens
MTSANKAIELQLQVKQNAEELQDFMRDLENWEKDIKQKDMELRRQNGVPEENLPPIRNGNFRKKKKGKAKESSKKTREENTKNRIKSYDYEAWAKLDVDRILDELDKDDSTHESLSQESESEEDGIHVDSQKALVLKEKGNKYFKQGKYDEAIDCYTKGMDADPYNPVLPTNRASAYFRLKKFAVAESDCNLAVALNRSYTKAYSRRGAARFALQKLEEAKKDYERVLELEPNNFEATNELRKISQALASKENSYPKEADIVIKSTEGERKQIEAQQNKQQAISEKDRGNGFFKEGKYERAIECYTRGIAADGANALLPANRAMAYLKIQKYEEAEKDCTQAILLDGSYSKAFARRGTARTFLGKLNEAKQDFETVLLLEPGNKQAVTELSKIKKKPLKKVIIEETGNLIQTIDVPDSTTAAAPENNPINLANVIAATGTTSKKNSSQDDLFPTSDTPRAKVLKIEEVSDTSSLQPQASLKQDVCQSYSEKMPIEIEQKPAQFATTVLPPIPANSFQLESDFRQLKSSPDMLYQYLKQIEPSLYPKLFQKNLDPDVFNQIVKILHDFYIEKEKPLLIFEILQRLSELKRFDMAVMFMSETEKKIARALFNHIDKSGLKDSSVEELKKRYGG

SEQ ID NO: 40058 - protein, 506 aa, Homo sapiens
MDADPYNPVLPTNRASAYFRLKKFAVAESDCNLAVALNRSYTKAYSRRGAARFALQKLEEAKKDYERVLELEPNNFEATNELRKISQALASKENSYPKEADIVIKSTEGERKQIEAQQNKQQAISEKDRGNGFFKEGKYERAIECYTRGIAADGANALLPANRAMAYLKIQKYEEAEKDCTQAILLDGSYSKAFARRGTARTFLGKLNEAKQDFETVLLLEPGNKQAVTELSKIKKELIEKGHWDDVFLDSTQRQNVVKPIDNPPHPGSTKPLKKVIIEETGNLIQTIDVPDSTTAAAPENNPINLANVIAATGTTSKKNSSQDDLFPTSDTPRAKVLKIEEVSDTSSLQPQASLKQDVCQSYSEKMPIEIEQKPAQFATTVLPPIPANSFQLESDFRQLKSSPDMLYQYLKQIEPSLYPKLFQKNLDPDVFNQIVKILHDFYIEKEKPLLIFEILQRLSELKRFDMAVMFMSETEKKIARALFNHIDKSGLKDSSVEELKKRYGG

SEQ ID NO: 40059 - protein, 1020 aa, Homo sapiens
MREPEELMPDSGAVFTFGKSKFAENNPGKFWFKNDVPVHLSCGDEHSAVVTGNNKLYMFGSNNWGQLGLGSKSAISKPTCVKALKPEKVKLAACGRNHTLVSTEGGNVYATGGNNEGQLGLGDTEERNTFHVISFFTSEHKIKQLSAGSNTSAALTEDGRLFMWGDNSEGQIGLKNVSNVCVPQQVTIGKPVSWISCGYYHSAFVTTDGELYVFGEPENGKLGLPNQLLGNHRTPQLVSEIPEKVIQVACGGEHTVVLTENAVYTFGLGQFGQLGLGTFLFETSEPKVIENIRDQTISYISCGENHTALITDIGLMYTFGDGRHGKLGLGLENFTNHFIPTLCSNFLRFIVKLVACGGCHMVVFAAPHRGVAKEIEFDEINDTCLSVATFLPYSSLTSGNVLQRTLSARMRRRERERSPDSFSMRRTLPPIEGTLGLSACFLPNSVFPRCSERNLQESVLSEQDLMQPEEPDYLLDEMTKEAEIDNSSTVESLGETTDILNMTHIMSLNSNEKSLKLSPVQKQKKQQTIGELTQDTALTENDDSDEYEEMSEMKEGKACKQHVSQGIFMTQPATTIEAFSDEEVGNDTGQVGPQADTDGEGLQKEVYRHENNNGVDQLDAKEIEKESDGGHSQKESEAEEIDSEKETKLAEIAGMKDLREREKSTKKMSPFFGNLPDRGMNTESEENKDFVKKRESCKQDVIFDSERESVEKPDSYMEGASESQQGIADGFQQPEAIEFSSGEKEDDEVETDQNIRYGRKLIEQGNEKETKPIISKSMAKYDFKCDRLSEIPEEKEGAEDSKGNGIEEQEVEANEENVKVHGGRKEKTEILSDDLTDKAEDHEFSKTEELKLEDVDEEINAENVESKKKTVGDDESVPTGYHSKTEGAERTNDDSSAETIEKKEKANLEERAICEYNENPKGYMLDDADSSSLEILENSETTPSKDMKKTKKIFLFKRVPSINQKIVKNNNEPLPEIKSIGDQIILKSDNKDADQNHMSQNHQNIPPTNTERRSKSCTIL

SEQ ID NO: 40060 - protein, 815 aa, Homo sapiens
MREPEELMPDSGAVFTFGKSKFAENNPGKFWFKNDVPVHLSCGDEHSAVVTGNNKLYMFGSNNWGQLGLGSKSAISKPTCVKALKPEKVKLAACGRNHTLVSTEGGNVYATGGNNEGQLGLGDTEERNTFHVISFFTSEHKIKQLSAGSNTSAALTEDGRLFMWGDNSEGQIGLKNVSNVCVPQQVTIGKPVSWISCGYYHSAFVTTDGELYVFGEPENGKLGLPNQLLGNHRTPQLVSEIPEKVIQVACGGEHTVVLTENAVYTFGLGQFGQLGLGTFLFETSEPKVIENIRDQTISYISCGENHTALITDIGLMYTFGDGRHGKLGLGLENFTNHFIPTLCSNFLRFIVKLVACGGCHMVVFAAPHRGVAKEIEFDEINDTCLSVATFLPYSSLTSGNVLQRTLSARMRRRERERSPDSFSMRRTLPPIEGTLGLSACFLPNSVFPRCSERNLQESVLSEQDLMQPEEPDYLLDEMTKEAEIDNSSTVESLGETTDILNMTHIMSLNSNEKSLKLSPVQKQKKQQTIGELTQDTALTENDDSDEYEEMSEMKEGKACKQHVSQGIFMTQPATTIEAFSDEEVEIPEEKEGAEDSKGNGIEEQEVEANEENVKVHGGRKEKTEILSDDLTDKAEDHEFSKTEELKLEDVDEEINAENVESKKKTVGDDESVPTGYHSKTEGAERTNDDSSAETIEKKEKANLEERAICEYNENPKGYMLDDADSSSLEILENSETTPSKDMKKTKKIFLFKRVPSINQKIVKNNNEPLPEIKSIGDQIILKSDNKDADQNHMSQNHQNIPPTNTERRSKSCTIL

SEQ ID NO: 40061 - protein, 646 aa, Homo sapiens
MREPEELMPDSGAVFTFGKSKFAENNPGKFWFKNDVPVHLSCGDEHSAVVTGNNKLYMFGSNNWGQLGLGSKSAISKPTCVKALKPEKVKLAACGRNHTLVSTEGGNVYATGGNNEGQLGLGDTEERNTFHVISFFTSEHKIKQLSAGSNTSAALTEDGRLFMWGDNSEGQIGLKNVSNVCVPQQVTIGKPVSWISCGYYHSAFVTTDGELYVFGEPENGKLGLPNQLLGNHRTPQLVSEIPEKVIQVACGGEHTVVLTENAVYTFGLGQFGQLGLGTFLFETSEPKVIENIRDQTISYISCGENHTALITDIGLMYTFGDGRHGKLGLGLENFTNHFIPTLCSNFLRFIVKLVACGGCHMVVFAAPHRGVAKEIEFDEINDTCLSVATFLPYSSLTSGNVLQRTLSARMRRRERERSPDSFSMRRTLPPIEGTLGLSACFLPNSVFPRCSERNLQESVLSEQDLMQPEEPDYLLDEMTKEAEIDNSSTVESLGETTDILNMTHIMSLNSNEKSLKLSPVQKQKKQQTIGELTQDTALTENDDSDEYEEMSEMKEGKACKQHVSQGIFMTQPATTIEAFSDEEVEIPEEKEGAEDSKGNGIEEQEVEANEENVKVHGGRKEKTEILSDDLTDKAEYSASHSQIVSV

SEQ ID NO: 40062 - protein, 753 aa, Homo sapiens
MREPEELMPDSGAVFTFGKSKFAENNPGKFWFKNDVPVHLSCGDEHSAVVTGNNKLYMFGSNNWGQLGLGSKSAISKPTCVKALKPEKVKLAACGRNHTLVSTEGGNVYATGGNNEGQLGLGDTEERNTFHVISFFTSEHKIKQLSAGSNTSAALTEDGRLFMWGDNSEGQIGLKNVSNVCVPQQVTIGKPVSWISCGYYHSAFVTTDGELYVFGEPENGKLGLPNQLLGNHRTPQLVSEIPEKVIQVACGGEHTVVLTENAVYTFGLGQFGQLGLGTFLFETSEPKVIENIRDQTISYISCGENHTALITDIGLMYTFGDGRHGKLGLGLENFTNHFIPTLCSNFLRFIVKLERSPDSFSMRRTLPPIEGTLGLSACFLPNSVFPRCSERNLQESVLSEQDLMQPEEPDYLLDEMTKEAEIDNSSTVESLGETTDILNMTHIMSLNSNEKSLKLSPVQKQKKQQTIGELTQDTALTENDDSDEYEEMSEMKEGKACKQHVSQGIFMTQPATTIEAFSDEEVEIPEEKEGAEDSKGNGIEEQEVEANEENVKVHGGRKEKTEILSDDLTDKAEDHEFSKTEELKLEDVDEEINAENVESKKKTVGDDESVPTGYHSKTEGAERTNDDSSAETIEKKEKANLEERAICEYNENPKGYMLDDADSSSLEILENSETTPSKDMKKTKKIFLFKRVPSINQKIVKNNNEPLPEIKSIGDQIILKSDNKDADQNHMSQNHQNIPPTNTERRSKSCTIL

SEQ ID NO: 40063 - protein, 480 aa, Homo sapiens
MREPEELMPDSGAVFTFGKSKFAENNPGKFWFKNDVPVHLSCGDEHSAVVTGNNKLYMFGSNNWGQLGLGSKSAISKPTCVKALKPEKVKLAACGRNHTLVSTEGGNVYATGGNNEGQLGLGDTEERNTFHVISFFTSEHKIKQLSAGSNTSAALTEDGRLFMWGDNSEGQIGLKNVSNVCVPQQVTIGKPVSWISCGYYHSAFVTTDGELYVFGEPENGKLGLPNQLLGNHRTPQLVSEIPEKVIQVACGGEHTVVLTENAVYTFGLGQFGQLGLGTFLFETSEPKVIENIRDQTISYISCGENHTALITDIGLMYTFGDGRHGKLGLGLENFTNHFIPTLCSNFLRFIVKLVACGGCHMVVFAAPHRGVAKEIEFDEINDTCLSVATFLPYSSLTSGNVLQRTLSARMRRRERERSPDSFSMRRTLPPIEGTLGLSACFLPNSVFPRCSERNLQESVLSEQDLMQPEEPDTHHEPEFQ

SEQ ID NO: 40064 - protein, 1152 aa, Homo sapiens
MREPEELMPDSGAVFTFGKSKFAENNPGKFWFKNDVPVHLSCGDEHSAVVTGNNKLYMFGSNNWGQLGLGSKSAISKPTCVKALKPEKVKLAACGRNHTLVSTEGGNVYATGGNNEGQLGLGDTEERNTFHVISFFTSEHKIKQLSAGSNTSAALTEDGRLFMWGDNSEGQIGLKNVSNVCVPQQVTIGKPVSWISCGYYHSAFVTTDGELYVFGEPENGKLGLPNQLLGNHRTPQLVSEIPEKVIQVACGGEHTVVLTENAVYTFGLGQFGQLGLGTFLFETSEPKVIENIRDQTISYISCGENHTALITDIGLMYTFGDGRHGKLGLGLENFTNHFIPTLCSNFLRFIVKLVACGGCHMVVFAAPHRGVAKEIEFDEINDTCLSVATFLPYSSLTSGNVLQRTLSARMRRRERERSPDSFSMRRTLPPIEGTLGLSACFLPNSVFPRCSERNLQESVLSEQDLMQPEEPDYLLDEMTKEAEIDNSSTVESLGETTDILNMTHIMSLNSNEKSLKLSPVQKQKKQQTIGELTQDTALTENDDSDEYEEMSEMKEGKACKQHVSQGIFMTQPATTIEAFSDEEVEIPEEKEGAEDSKGNGIEEQEVEANEENVKVHGGRKEKTEILSDDLTDKAEVSEGKAKSVGEAEDGPEGRGDGTCEEGSSGAEHWQDEEREKGEKDKGRGEMERPGEGEKELAEKEEWKKRDGEEQEQKEREQGHQKERNQEMEEGGEEEHGEGEEEEGDREEEEEKEGEGKEEGEGEEVEGEREKEEGERKKEERAGKEEKGEEEGDQGEGEEEETEGRGEEKEEGGEVEGGEVEEGKGEREEEEEEGEGEEEEGEGEEEEGEGEEEEGEGKGEEEGEEGEGEEEGEEGEGEGEEEEGEGEGEEEGEGEGEEEEGEGEGEEEGEGEGEEEEGEGKGEEEGEEGEGEGEEEEGEGEGEDGEGEGEEEEGEWEGEEEEGEGEGEEEGEGEGEEGEGEGEEEEGEGEGEEEEGEEEGEEEGEGEEEGEGEGEEEEEGEVEGEVEGEEGEGEGEEEEGEEEGEEREKEGEGEENRRNREEEEEEEGKYQETGEEENERQDGEEYKKVSKIKGSVKYGKHKTYQKKSVTNTQGNGKEQRSKMPVQSKRLLKNGPSGSKKFWNNVLPHYLELK

SEQ ID NO: 40065 - protein, 178 aa, Homo sapiens
MSSFSRAPQQWATFARIWYLLDGKMQPPGKLAAMASIRLQGLHKPVYHALSDCGDHVVIMNTRHIAFSGNKWEQKVYSSHTGYPGGFRQVTAAQLHLRDPVAIVKLAIYGMLPKNLHRRTMMERLHLFPDEYIPEDILKNLVEELPQPRKIPKRLDEYTQEEIDAFPRLWTPPEDYRL

SEQ ID NO: 40066 - protein, 607 aa, Homo sapiens
MEAPAAGLFLLLLLGTWAPAPGSASSEAPPLINEDVKRTVDLSSHLAKVTAEVVLAHLGGGSTSRATSFLLALEPELEARLAHLGVQVKGEDEEENNLEVRETKIKGKSGRFFTVKLPVALDPGAKISVIVETVYTHVLHPYPTQITQSEKQFVVFEGNHYFYSPYPTKTQTMRVKLASRNVESYTKLGNPTRSEDLLDYGPFRDVPAYSQDTFKVHYENNSPFLTITSMTRVIEVSHWGNIAVEENVDLKHTGAVLKGPFSRYDYQRQPDSGISSIRSFKTILPAAAQDVYYRDEIGNVSTSHLLILDDSVEMEIRPRFPLFGGWKTHYIVGYNLPSYEYLYNLGDQYALKMRFVDHVFDEQVIDSLTVKIILPEGAKNIEIDSPYEISRAPDELHYTYLDTFGRPVIVAYKKNLVEQHIQDIVVHYTFNKVLMLQEPLLVVAAFYILFFTVIIYVRLDFSITKDPAAEARMKVACITEQVLTLVNKRIGLYRHFDETVNRYKQSRDISTLNSGKKSLETEHKALTSEIALLQSRLKTEGSDLCDRVSEMQKLDAQVKELVLKSAVEAERLVAGKLKKDTYIENEKLISGKRQELVTKIDHILDAL

SEQ ID NO: 40067 - protein, 1174 aa, Homo sapiens
MYDADEDMQYDEDDDEITPDLWQEACWIVISSYFDEKGLVRQQLDSFDEFIQMSVQRIVEDAPPIDLQAEAQHASGEVEEPPRYLLKFEQIYLSKPTHWERDGAPSPMMPNEARLRNLTYSAPLYVDITKTVIKEGEEQLQTQHQKTFIGKIPIMLRSTYCLLNGLTDRDLCELNECPLDPGGYFIINGSEKVLIAQEKMATNTVYVFAKKDSKYAYTGECRSCLENSSRPTSTIWVSMLARGGQGAKKSAIGQRIVATLPYIKQEVPIIIVFRALGFVSDRDILEHIIYDFEDPEMMEMVKPSLDEAFVIQEQNVALNFIGSRGAKPGVTKEKRIKYAKEVLQKEMLPHVGVSDFCETKKAYFLGYMVHRLLLAALGRRELDDRDHYGNKRLDLAGPLLAFLFRGMFKNLLKEVRIYAQKFIDRGKDFNLELAIKTRIISDGLKYSLATGNWGDQKKAHQARAGVSQVLNRLTFASTLSHLRRLNSPIGRDGKLAKPRQLHNTLWGMVCPAETPEGHAVGLVKNLALMAYISVGSQPSPILEFLEEWSMENLEEISPAAIADATKIFVNGCWVGIHKDPEQLMNTLRKLRRQMDIIVSEVSMIRDIREREIRIYTDAGRICRPLLIVEKQKLLLKKRHIDQLKEREYNNYSWQDLVASGVVEYIDTLEEETVMLAMTPDDLQEKEVAYCSTYTHCEIHPSMILGVCASIIPFPDHNQSPRNTYQSAMGKQAMGVYITNFHVRMDTLAHVLYYPQKPLVTTRSMEYLRFRELPAGINSIVAIASYTGYNQEDSVIMNRSAVDRGFFRSVFYRSYKEQESKKGFDQEEVFEKPTRETCQGMRHAIYDKLDDDGLIAPGVRVSGDDVIIGKTVTLPENEDELESTNRRYTKRDCSTFLRTSETGIVDQVMVTLNQEGYKFCKIRVRSVRIPQIGDKFASRHGQKGTCGIQYRQEDMPFTCEGITPDIIINPHAIPSRMTIGHLIECLQGKVSANKGEIGDATPFNDAVNVQKISNLLSDYGYHLRGNEVLYNGFTGRKITSQIFIGPTYYQRLKHMVDDKIHSRARGPIQILNRQPMEGRSRDGGLRFGEMERDCQIAHGAAQFLRERLFEASDPYQVHVCNLCGIMAIANTRTHTYECRGCRNKTQISLVRMPYACKLLFQELMSMSIAPRMMSV

SEQ ID NO: 40068 - protein, 180 aa, Homo sapiens [sequence omitted]

SEQ ID NO: 40069 - protein, 149 aa, Homo sapiens
MVFLTAQLWLRNRVTDRYFRIQEVLKHARHFRGRKNRCYRLAVRTVIRAFVKCTKARYLKKKNMRTLWINRITAASQEHGLKYPALIGNLVKCQVELNRKVLADLAIYEPKTFKSLAALASRRRHEGFAAALGDGKEPEGIFSRVVQYH

SEQ ID NO: 40070 - protein, 155 aa, Homo sapiens
MVFLTAQLWLRNRVTDRYFRIQEVLKHARHFRGRKNRCYRLAVRTVIRAFVKCTKARYLKKKNMRTLWINRITAASQEHGLKYPALIGNLVKVWVSMWVPLKFWTSAETIMRGVVVLPVVPANQEAEARGSLETDFWAVVCYADGVSMLSVVSIW

SEQ ID NO: 40071 - protein, 161 aa, Homo sapiens
MVPKLFTSQICLLLLLGLLAVEGSLHVKPPQFTWAQWFETQHINMTSQQCTNAMQVINNYQRRCKNQNTFLLTTFANVVNVCGNPNMTCPSNKTRKNCHHSGSQVPLIHCNLTTPSPQNISNCRYAQTPANMFYIVACDNRDQRRDPPQYPVVPVHLDRII

SEQ ID NO: 40072 - protein, 1354 aa, Homo sapiens
MSTGDSFETRFEKMDNLLRDPKSEVNSDCLLDGLDALVYDLDFPALRKNKNIDNFLSRYKDTINKIRDLRMKAEDYEVVKVIGRGAFGEVQLVRHKSTRKVYAMKLLSKFEMIKRSDSAFFWEERDIMAFANSPWVVQLFYAFQDDRYLYMVMEYMPGGDLVNLMSNYDVPEKWARFYTAEVVLALDAIHSMGFIHRDVKPDNMLLDKSGHLKLADFGTCMKMNKEGMVRCDTAVGTPDYISPEVLKSQGGDGYYGRECDWWSVGVFLYEMLVGDTPFYADSLVGTYSKIMNHKNSLTFPDDNDISKEAKNLICAFLTDREVRLGRNGVEEIKRHLFFKNDQWAWETLRDTVAPVVPDLSSDIDTSNFDDLEEDKGEEETFPIPKAFVGNQLPFVGFTYYSNRRYLSSANPNDNRTSSNADKSLQESLQKTIYKLEEQLHNEMQLKDEMEQKCRTSNIKLDKIMKELDEEGNQRRNLESTVSQIEKEKMLLQHRINEYQRKAEQENEKRRNVENEVSTLKDQLEDLKKVSQNSQLANEKLSQLQKQLEEANDLLRTESDTAVRLRKSHTEMSKSISQLESLNRELQERNRILENSKSQTDKDYYQLQAILEAERRDRGHDSEMIGDLQARITSLQEEVKHLKHNLEKVEGERKEAQDMLNHSEKEKNNLEIDLNYKLKSLQQRLEQEVNEHKVTKARLTDKHQSIEEAKSVAMCEMEKKLKEEREAREKAENRVVQIEKQCSMLDVDLKQSQQKLEHLTGNKERMEDEVKNLTLQLEQESNKRLLLQNELKTQAFEADNLKGLEKQMKQEINTLLEAKRLLEFELAQLTKQYRGNEGQMRELQDQLEAEQYFSTLYKTQVKELKEEIEEKNRENLKKIQELQNEKETLATQLDLAETKAESEQLARGLLEEQYFELTQESKKAASRNRQEITDKDHTVSRLEEANSMLTKDIEILRRENEELTEKMKKAEEEYKLEKEEEISNLKAAFEKNINTERTLKTQAVNKLAEIMNRKDFKIDRKKANTQDLRKKEKENRKLQLELNQEREKFNQMVVKHQKELNDMQAQLVEECAHRNELQMQLASKESDIEQLRAKLLDLSDSTSVASFPSADETDGNLPESRIEGWLSVPNRGNIKRYGWKKQYVVVSSKKILFYNDEQDKEQSNPSMVLDIDKLFHVRPVTQGDVYRAETEEIPKIFQILYANEGECRKDVEMEPVQQAEKTNFQNHKGHEFIPTLYHFPANCDACAKPLWHVFKPPPALECRRCHVKCHRDHLDKKEDLICPCKVSYDVTSARDMLLLACSQDEQKKWVTHLVKKIPKNPPSGFVRASPRTLSTRSTANQSFRKVVKNTSGKTS

SEQ ID NO: 40073 - protein, 155 aa, Homo sapiens
MHPFQWCNGCFCGLGLVSTNKSCSMPPISFQDLPLNIYMVIFGTGIFVFMLSLIFCCYFISKLRNQAQSERYGYKEVVLKGDAKKLQLYGQTCAVCLEDFKGKDELGVLPCQHAFHRKCLVKWLEVRCVCPMCNKPIASPSEATQNIGILLDELV

SEQ ID NO: 40074 - protein, 230 aa, Homo sapiens
MGQQISDQTQLVINKLPEKVAKHVTLVRESGSLTYEEFLGRVAELNDVTAKVASGQEKHLLFEVQPGSDSSAFWKVVVRVVCTKINKSSGIVEASRIMNLYQFIQLYKDITSQAAGVLAQSSTSEEPDENSSSVTSCQASLWMGRVKQLTDEEECCICMDGRADLILPCAHSFCQKCIDKWSDRHRNCPICRLQMTGANESWVVSDAPTEDDMANYILNMADEAGQPHRP

SEQ ID NO: 40075 - protein, 328 aa, Homo sapiens
MAAGTAARKAAPVLEAPPQQEQLSHTKLSAEDTWNLQQERMYKMHRGHDSMHVEMILIFLCVLVIAQIVLVQWRQRHGRSYNLVTLLQMWVVPLYFTIKLYWWRFLSMWGMFSVITSYILFRATRKPLSGRTPRLVYKWFLLIYKLSYAFGVVGYLAIMFTMCGFNLFFKIKARDSMDFGIVSLFYGLYYGVMGRDFAEICSDYMASTIGFYSVSRLPTRSLSDNICAVCGQKIIVELDEEGLIENTYQLSCNHVFHEFCIRGWCIVGKKQTCPYCKEKVDLKRMISNPWERTHFLYGQILDWLRYLVAWQPVVIGIVQGIIYSLGLE

SEQ ID NO: 40076 - protein, 181 aa, Homo sapiens
MADPTILVYKWFLLIYKLSYAFGVVGYLAIMFTMCGFNLFFKIKARDSMDFGIVSLFYGLYYGVMGRDFAEICSDYMASTIGFYSVSRLPTRSLSDNICAVCGQKIIVELDEEGLIENTYQLSCNHVYPFQRKLFGLHQASFFPPSPPPPPVPISSILLTFHAQTPVLYPPAQSSLPVCPC

SEQ ID NO: 40077 - protein, 359 aa, Homo sapiens
MMAGCGEIDHSINMLPTNRKANESCSNTAPSLTVPECAICLQTCVHPVSLPCKHVFCYLCVKGASWLGKRCALCRQEIPEDFLDKPTLLSPEELKAASRGNGEYAWYYEGRNGWWQYDERTSRELEDAFSKGKKNTEMLIAGFLYVADLENMVQYRRNEHGRRRKIKRDIIDIPKKGVAGLRLDCDANTVNLARESSADGADSVSAQSGASVQPLVSSVRPLTSVDGQLTSPATPSPDASTSLEDSFAHLQLSGDNTAERSHRGEGEEDHESPSSGRVPAPDTSIEETESDASSDSEDVSAVVAQHSLTQQRLLVSNANQTVPDRSDRSGTDRSVAGGGTVSVSVRSRRPDGQCTVTEV

SEQ ID NO: 40078 - protein, 358 aa, Homo sapiens
MAGCGEIDHSINMLPTNRKANESCSNTAPSLTVPECAICLQTCVHPVSLPCKHVFCYLCVKGASWLGKRCALCRQEIPEDFLDKPTLLSPEELKAASRGNGEYAWYYEGRNGWWQYDERTSRELEDAFSKGKKNTEMLIAGFLYVADLENMVQYRRNEHGRRRKIKRDIIDIPKKGVAGLRLDCDANTVNLARESSADGADSVSAQSGASVQPLVSSVRPLTSVDGQLTSPATPSPDASTSLEDSFAHLQLSGDNTAERSHRGEGEEDHESPSSGRVPAPDTSIEETESDASSDSEDVSAVVAQHSLTQQRLLVSNANQTVPDRSDRSGTDRSVAGGGTVSVSVRSRRPDGQCTVTEV

SEQ ID NO: 40079 - protein, 475 aa, Homo sapiens [sequence omitted]

SEQ ID NO: 40080 - protein, 398 aa, Homo sapiens
MASAARLTMMWEEVTCPICLDPFVEPVSIECGHSFCQECISQVGKGGGSVCPVCRQRFLLKNLRPNRQLANMVNNLKEISQEAREGTQGERCAVHGERLHLFCEKDGKALCWVCAQSRKHRDHAMVPLEEAAQEYQEKLQVALGELRRKQELAEKLEVEIAIKRADWKEVIIVLERSESWNLKDLDITSPELRSVCHVPGLKKMLRTCAVHITLDPDTANPWLILSEDRRQVRLGDTQQSIPGNEERFDSYPMVLGAQHFHSGKHYWEVDVTGKEAWDLGVCRDSVRRKGHFLLSSKSGFWTIWLWNKQKYEAGTYPQTPLHLQVPPCQVGIFLDYEAGMVSFYNITDHGSLIYSFSECAFTGPLRPFFSPGFNDGGKNTAPLTLCPLNIGSQGSTDY

SEQ ID NO: 40081 - protein, 542 aa, Homo sapiens
MGEEQSTVSGGGGPQESQTLASGTAGHPEPPRPQGDSARAPPLRAASAEPSGGGCGSDWGCADTSAPEPARSLGPPGWSKSRAPAQPAGLALTGPLNPQTLPLQLELEEEEEEAGDRKEGGDEQQEAPPGEELEPRTRVGAADGLVLDVLGQRRPSLAKRQVFCSVYCVESDLPEAPASEQLSPPASPPGAPPVLNPPSTRSSFPSPRLSLPTDSLSPDGGSIELEFYLAPEPFSMPSLLGAPPYSGLGGVGDPYVPLMVLMCRVCLEDKPIKPLPCCKKAVCEECLKVYLSAQVQLGQVEIKCPITECFEFLEETTVVYNLTHEDSIKYKYFLELGRIDSSTKPCPQCKHFTTFKKKGHIPTPSRSESKYKIQCPTCQFVWCFKCHSPWHEGVNCKEYKKGDKLLRHWASEIEHGQRNAQKCPKCKIHIQRTEGCDHMTCSQCNTNFCYRCGERYRQLRFFGDHTSNLSIFGCKYRYLPERPHLRRLVRGSVCAGKLFIAPLIMVLGLALGAIAVVIGLFVFPIYCLCKKQRKRSRTGMHW

SEQ ID NO: 40082 - protein, 275 aa, Homo sapiens
MKVQLGQVEIKCPITECFEFLEETTVVYNLTHEDSIKYKYFLELGRIDSSTKPCPQCKHFTTFKKKGHIPTPSRSESKYKIQCPTCQFVWCFKCHSPWHEGVNCKEYKKGDKLLRHWASEIEHGQRNAQKCPKCKIHIQRTEGCDHMTCSQCNTNFCYRCGERYRQLRFFGDHTSNLSIFGCKYRYLPERPHLRRLVRGSVCAGKLFIAPLIMVLGLALGAIAVVIVEEIKTYWNLISGRTRNQTQHLAPQPVLLSDMLYCLKQVFICISYLLPL

SEQ ID NO: 40083 - protein, 350 aa, Homo sapiens [sequence omitted]

SEQ ID NO: 40084 - protein, 518 aa, Homo sapiens
MDRAPQRQHRASRELLAAKKTHTSQIEVIPCKICGDKSSGIHYGVITCEGCKGFFRRSQRCNAAYSCTRQQNCPIDRTSRNRCQHCRLQKCLALGMSRDAVKFGRMSKKQRDSLHAEVQKQLQQRQQQQQEPVVKTPPAGAQGADTLTYTLGLPDGQLPLGSSPDLPEASACPPGLLKASGSGPSYSNNLAKAGLNGASCHLEYSPERGKAEGRESFYSTGSQLTPDRCGLRFEEHRHPGLGELGQGPDSYGSPSFRSTPEAPYASLTEIEHLVQSVCKSYRETCQLRLEDLLRQRSNIFSREEVTGYQRKSMWEMWERCAHHLTEAIQYVVEFAKRLSGFMELCQNDQIVLLKAGAMEVVLVRMCRAYNADNRTVFFEGKYGGMELFRALGCSELISSIFDFSHSLSALHFSEDEIALYTALVLINAHRPGLQEKRKVEQLQYNLELAFHHHLCKTHRQSILAKLPPKGKLRSLCSQHVERLQIFQHLHPIVVQAAFPPLYKELFSTETESPVGLSK

SEQ ID NO: 40085 - protein, 497 aa, Homo sapiens
MRTQIEVIPCKICGDKSSGIHYGVITCEGCKGFFRRSQRCNAAYSCTRQQNCPIDRTSRNRCQHCRLQKCLALGMSRDAVKFGRMSKKQRDSLHAEVQKQLQQRQQQQQEPVVKTPPAGAQGADTLTYTLGLPDGQLPLGSSPDLPEASACPPGLLKASGSGPSYSNNLAKAGLNGASCHLEYSPERGKAEGRESFYSTGSQLTPDRCGLRFEEHRHPGLGELGQGPDSYGSPSFRSTPEAPYASLTEIEHLVQSVCKSYRETCQLRLEDLLRQRSNIFSREEVTGYQRKSMWEMWERCAHHLTEAIQYVVEFAKRLSGFMELCQNDQIVLLKAGAMEVVLVRMCRAYNADNRTVFFEGKYGGMELFRALGCSELISSIFDFSHSLSALHFSEDEIALYTALVLINAHRPGLQEKRKVEQLQYNLELAFHHHLCKTHRQSILAKLPPKGKLRSLCSQHVERLQIFQHLHPIVVQAAFPPLYKELFSTETESPVGLSK

SEQ ID NO: 40086 - protein, 658 aa, Homo sapiens
MEKASGRQSIALSTVETGTVNPGLELMEKEVEPEGSKRTDAQGHSLGDGLGPSTYQRRSRWPFSKARSFCKTHASLFKKILLGLLCLAYAAYLLAACILNFQRALALFVITCLVIFVLVHSFLKKLLGKKLTRCLKPFENSRLRLWTKWVFAGVSLVGLILWLALDTAQRPEQLIPFAGICMFILILFACSKHHSAVSWRTVFSGLGLQFVFGILVIRTDLGYTVFQWLGEQVQIFLNYTVAGSSFVFGDTLVKDVFAFQALPIIIFFGCVVSILYYLGLVQWVVQKVAWFLQITMGTTATETLAVAGNIFVGMTEAPLLIRPYLGDMTLSEIHAVMTGGFATISGTVLGAFIAFGVDASSLISASVMAAPCALASSKLAYPEVEESKFKSEEGVKLPRGKERNVLEAASNGAVDAIGLATNVAANLIAFLAVLAFINAALSWLGELVDIQGLTFQVICSYLLRPMVFMMGVEWTDCPMVAEMVGIKFFINEFVAYQQLSQYKNKRLSGMEEWIEGEKQWISVRAEIITTFSLCGFANLSSIGITLGGLTSIVPHRKSDLSKVVVRALFTGACVSLISACMAGILYVPRGAEADCVSFPNTSFTNRTYETYMCCRGLFQSTSLNGTNPPSFSGPWEDKEFSAMALTNCCGFYNNTVCA

SEQ ID NO: 40087 - protein, 760 aa, Homo sapiens
MAGQQFQYDDSGNTFFYFLTSFVGLIVIPATYYLWPRDQNAEQIRLKNIRKVYGRCMWYRLRLLKPQPNIIPTVKKIVLLAGWALFLFLAYKVSKTDREYQEYNPYEVLNLDPGATVAEIKKQYRLLSLKYHPDKGGDEVMFMRIAKAYAALTDEESRKNWEEFGNPDGPQATSFGIALPAWIVDQKNSILVLLVYGLAFMVILPVVVGSWWYRSIRYSGDQILIRTTQIYTYFVYKTRNMDMKRLIMVLAGASEFDPQYNKDATSRPTDNILIPQLIREIGSINLKKNEPPLTCPYSLKARVLLLSHLARMKIPETLEEDQQFMLKKCPALLQEMVNVICQLIVMARNREEREFRAPTLASLENCMKLSQMAVQGLQQFKSPLLQLPHIEEDNLRRVSNHKKYKIKTIQDLVSLKESDRHTLLHFLEDEKYEEVMAVLGSFPYVTMDIKSQVLDDEDSNNITVGSLVTVLVKLTRQTMAEVFEKEQSICAAEEQPAEDGQGETNKNRTKGGWQQKSKGPKKTAKSKKKKPLKKKPTPVLLPQSKQQKQKQANGVVGNEAAVKEDEEEVSDKGSDSEEEETNRDSQSEKDDGSDRDSDREQDEKQNKDDEAEWQELQQSIQRKERALLETKSKITHPVYSLYFPEEKQEWWWLYIADRKEQTLISMPYHVCTLKDTEEVELKFPAPGKPGNYQYTVFLRSDSYMGLDQIKPLKLEVHEAKPVPENHPQWDTAIEGDEDQEDSEGFEDSFEEEEEEEEDDD

SEQ ID NO: 40088 - protein, 121 aa, Homo sapiens
MAPRPLLLLLLLLGGSAARPAPPRARRHSDGTFTSELSRLREGARLQRLLQGLVGKRSEQDAENSMAWTRLSAGLLCPSGSNMPILQAWMPLDGTWSPWLPPGPMVSEPAGAAAEGTLRPR

SEQ ID NO: 40089 - protein, 456 aa, Homo sapiens [sequence omitted]

SEQ ID NO: 40090 - protein, 535 aa, Homo sapiens
MRRERTRGPQAWEFPSPTKSGCSLQSLSRDLRELREGEKPEDQAETEESWQGLARKTPGKACAPEGGSCQPGKTENTITMTTSHQPQDRYKAVWLIFFMLGLGTLLPWNFFMTATQYFTNRLDMSQNVSLVTAELSKDAQASAAPAAPLPERNSLSAIFNNVMTLCAMLPLLLFTYLNSFLHQRIPQSVRILGSLVAILLVFLITAILVKVQLDALPFFVITMIKIVLINSFGAILQGSLFGLAGLLPASYTAPIMSGQGLAGFFASVAMICAIASGSELSESAFGYFITACAVIILTIICYLGLPRLEFYRYYQQLKLEGPGEQETKLDLISKGEEPRAGKEESGVSVSNSQPTNESHSIKAILKNISVLAFSVCFIFTITIGMFPAVTVEVKSSIAGSSTWERYFIPVSCFLTFNIFDWLGRSLTAVFMWPGKDSRWLPSLVLARLVFVPLLLLCNIKPRRYLTVVFEHDAWFIFFMAAFAFSNGYLASLCMCFGPKKVKPAEAETAGAIMAFFLCLGLALGAVFSFLFRAIV

SEQ ID NO: 40091 - protein, 2213 aa, Homo sapiens
MARGARPSAAGGGGGGAEPPERAGPGRPRGSPPGRARPSLAPRPGPEPSRPRAAPETSGGDTAGAGRCGGRRAAKLGPGRRGWWALLALQLHLLRALAQDDVAPYFKTEPGLPQIHLEGNRLVLTCLAEGSWPLEFKWMRDDSELTTYSSEYKYIIPSLQKLDAGFYRCVVRNRMGALLQRKSEVQVAYMGSFMDTDQRKTVSQGRAAILNLLPITSYPRPQVTWFREGHKIIPSNRIAITLENQLVILATTTSDAGAYYVQAVNEKNGENKTSPFIHLSIARDVGTPETMAPTIVVPPGNRSVVAGSSETTLECIASARPVEDLSVTWKRNGVRITSGLHSFGRRLTISNPTSADTGPYVCEAALPGSAFEPARATAFLFIIEPPYFTAEPESRISAEVEETVDIGCQAMGVPLPTLQWYKDAISISRLQNPRYKVLASGGLRIQKLRPEDSGIFQCFASNEGGEIQTHTYLDVTNIAPVFTQRPVDTTVTDGMTAILRCEVSGAPKPAITWKRENHILASGSVRIPRFMLLESGGLQIAPVFIQDAGNYTCYAANTEGSLNASATLTVWNRTSIVHPPEDHVVIKGTTATLHCGATHDPRVSLRYVWKKDNVALTPSSTSRIVVEKDGSLLISQTWSGDIGDYSCEIVSEGGNDSRMARLEVIELPHSPQNLLVSPNSSHSHAVVLSWVRPFDGNSPILYYIVELSENNSPWKVHLSNVGPEMTGVTVSGLTPARTYQFRVCAVNEVGRGQYSAETSRLMLPEEPPSAPPKNIVASGRTNQSIMVQWQPPPETEHNGVLRGYILRYRLAGLPGEYQQRNITSPEVNYCLVTDLIIWTQYEIQVAAYNGAGLGVFSRAVTEYTLQGVPTAPPQNVQTEAVNSTTIQFLWNPPPQQFINGINQGYKLLAWPADAPEAVTVVTIAPDFHGVHHGHITNLKKFTAYFTSVLCFTTPGDGPPSTPQLVWTQEDKPGAVGHLSFTEILDTSLKVSWQEPLEKNGIITGYQISWEVYGRNDSRLTHTLNSTTHEYKIQGLSSLTTYTIDVAAVTAVGTGLVTSSTISSGVPPDLPGAPSNLVISNISPRSATLQFRPGYDGKTSISRWIVEGQVGAIGDEEEWVTLYEEENEPDAQMLEIPNLTPYTHYRFRMKQVNIVGPSPYSPSSRVIQTLQAPPDVAPTSVTVRTASETSLRLRWVPLPDSQYNGNPESVGYRIKYWRSDLQSSAVAQVVSDRLEREFTIEELEEWMEYELQMQAFNAVGAGPWSEVVRGRTRESVPSAAPENVSAEAVSSTQILLTWTSVPEQDQNGLILGYKILFRAKDLDPEPRSHIVRGNHTQSALLAGLRKFVLYELQVLAFTRIGNGVPSTPLILERTKDDAPGPPVRLVFPEVRLTSVRIVWQPPEEPNGIILGYQIAYRLASSSPHTFTTVEVGATVRQFTATDLAPESAYIFRLSAKTRQGWGEPLEATVITTEKRERPAPPRELLVPQAEVTARSLRLQWVPGSDGASPIRYFTMQVRELPRGEWQTYSSSISHEATACVVDRLRPFTSYKLRLKATNDIGDSDFSSETEAVTTLQDVPGEPPGSVSATPHTTSSVLIQWQPPRDESLNGLLQGYRIYYRELEYEAGSGTEAKTLKNPIALHAELTAQSSFKTVNSSSTSTMCELTHLKKYRRYEVIMTAYNIIGESPASAPVEVFVGEAAPAMAPQNVQVTPLTASQLEVTWDPPPPESQNGNIQGYKIYYWEADSQNETEKMKVLFLPEPVVRLKNLTSHTKYLVSISAFNAAGDGPKSDPQQGRTHQAAPGAPSFLAFSEITSTTLNVSWGEPAAANGILQGYRVVYEPLAPVQGVSKVVTVEVRGNWQRWLKVRDLTKGVTYFFRVQARTITYGPELQANITAGPAEGSPGSPRDVLVTKSASELTLQWTEGHSGDTPTTGYVIEARPSDEGLWDMFVKDIPRSATSYTLSLDKLRQGVTYEFRVVAVNEAGYGEPSNPSTAVSAQVEAPFYEEWWFLLVMALSSLIVILLVVFALVLHGQNKKYKNCSTGKGISTMEESVTLDNGGFAALELSSRHLNVKSTFSKKNGTRSPPRPSPGGLHYSDEDICNKYNGAVLTESVSLKEKSADASESEATDSDYEDALPKHSFVNHYMSDPTYYNSWKRRAQGRAPAPHRYEAVAGSEAGAQLHPVITTQSAGGVYTPAGPGARTPLTGFSSFV

SEQ ID NO: 40092 - protein, 273 aa, Homo sapiens
MEDEGLWDMFVKDIPRSATSYTLSLDKLRQGVTYEFRVVAVNEAGYGEPSNPSTAVSAQVEAPFYEEWWFLLVMALSSLIVILLVVFALVLHGQNKKYKNCSTGKGISTMEESVTLDNGGFAALELSSRHLNVKSTFSKKNGTRSPPRPSPGGLHYSDEDICNKYNGAVLTESVSLKEKSADASESEATDSDYEDALPKHSFVNHYMSDPTYYNSWKRRAQGRAPAPHRYEAVAGSEAGAQLHPVITTQSAGGVYTPAGPGARTPLTGFSSFV

SEQ ID NO: 40093 - protein, 2193 aa, Homo sapiens
MARGARPSAAGGGGGGAEPPERAGPGRPRGSPPGRARPSLAPRPGPEPSRPRAAPETSGGDTAGAGRCGGRRAAKLGPGRRGWWALLALQLHLLRALAQDDVAPYFKTEPGLPQIHLEGNRLVLTCLAEGSWPLEFKWMRDDSELTTYSSEYKYIIPSLQKLDAGFYRCVVRNRMGALLQRKSEVQVAYMGSFMDTDQRKTVSQGRAAILNLLPITSYPRPQVTWFREGHKIIPSNRIAITLENQLVILATTTSDAGAYYVQAVNEKNGENKTSPFIHLSIARDVGTPETMAPTIVVPPGNRSVVAGSSETTLECIASARPVEDLSVTWKRNGVRITSGLHSFGRRLTISNPTSADTGPYVCEAALPGSAFEPARATAFLFIIEPPYFTAEPESRISAEVEETVDIGCQAMGVPLPTLQWYKDAISISRLQNPRYKVLASGGLRIQKLRPEDSGIFQCFASNEGGEIQTHTYLDVTNIAPVFTQRPVDTTVTDGMTAILRCEVSGAPKPAITWKRENHILASGSVRIPRFMLLESGGLQIAPVFIQDAGNYTCYAANTEGSLNASATLTVWNRTSIVHPPEDHVVIKGTTATLHCGATHDPRVSLRYVWKKDNVALTPSSTSRIVVEKDGSLLISQTWSGDIGDYSCEIVSEGGNDSRMARLEVIELPHSPQNLLVSPNSSHSHAVVLSWVRPFDGNSPILYYIVELSENNSPWKVHLSNVGPEMTGVTVSGLTPARTYQFRVCAVNEVGRGQYSAETSRLMLPEEPPSAPPKNIVASGRTNQSIMVQWQPPPETEHNGVLRGYILRYRLAGLPGEYQQRNITSPEVNYCLVTDLIIWTQYEIQVAAYNGAGLGVFSRAVTEYTLQGVPTAPPQNVQTEAVNSTTIQFLWNPPPQQFINGINQGYKLLAWPADAPEAVTVVTIAPDFHGVHHGHITNLKKFTAYFTSVLCFTTPGDGPPSTPQLVWTQEDKPGAVGHLSFTEILDTSLKVSWQEPLEKNGIITGYQISWEVYGRNDSRLTHTLNSTTHEYKIQGLSSLTTYTIDVAAVTAVGTGLVTSSTISSGVPPDLPGAPSNLVISNISPRSATLQFRPGYDGKTSISRWIVEGQVGAIGDEEEWVTLYEEENEPDAQMLEIPNLTPYTHYRFRMKQVNIVGPSPYSPSSRVIQTLQAPPDVAPTSVTVRTASETSLRLRWVPLPDSQYNGNPESVGYRIKYWRSDLQSSAVAQVVSDRLEREFTIEELEEWMEYELQMQAFNAVGAGPWSEVVRGRTRESVPSAAPENVSAEAVSSTQILLTWTSVPEQDQNGLILGYKILFRAKDLDPEPRSHIVRGNHTQSALLAGLRKFVLYELQVLAFTRIGNGVPSTPLILERTKDDAPGPPVRLVFPEVRLTSVRIVWQPPEEPNGIILGYQIAYRLASSSPHTFTTVEVGATVRQFTATDLAPESAYIFRLSAKTRQGWGEPLEATVITTEKRERPAPPRELLVPQAEVTARSLRLQWVPGSDGASPIRYFTMQVRELPRGEWQTYSSSISHEATACVVDRLRPFTSYKLRLKATNDIGDSDFSSETEAVTTLQDVPGEPPGSVSATPHTTSSVLIQWQPPRDESLNGLLQGYRIYYRELEYEAGSGTEAKTLKNPIALHAELTHLKKYRRYEVIMTAYNIIGESPASAPVEVFVGEAAPAMAPQNVQVTPLTASQLEVTWDPPPPESQNGNIQGYKIYYWEADSQNETEKMKVLFLPEPVVRLKNLTSHTKYLVSISAFNAAGDGPKSDPQQGRTHQAAPGAPSFLAFSEITSTTLNVSWGEPAAANGILQGYRVVYEPLAPVQGVSKVVTVEVRGNWQRWLKVRDLTKGVTYFFRVQARTITYGPELQANITAGPAEGSPGSPRDVLVTKSASELTLQWTEGHSGDTPTTGYVIEARPSDEGLWDMFVKDIPRSATSYTLSLDKLRQGVTYEFRVVAVNEAGYGEPSNPSTAVSAQVEAPFYEEWWFLLVMALSSLIVILLVVFALVLHGQNKKYKNCSTGKGISTMEESVTLDNGGFAALELSSRHLNVKSTFSKKNGTRSPPRPSPGGLHYSDEDICNKYNGAVLTESVSLKEKSADASESEATDSDYEDALPKHSFVNHYMSDPTYYNSWKRRAQGRAPAPHRYEAVAGSEAGAQLHPVITTQSAGGVYTPAGPGARTPLTGFSSFV

SEQ ID NO: 40094 - protein, 571 aa, Homo sapiens
MTRAGDHNRQRGCCGSLADYLTSAKFLLYLGHSLSTWGDRMWHFAVSVFLVELYGNSLLLTAVYGLVVAGSVLVLGAIIGDWVDKNARLKVAQTSLVVQNVSVILCGIILMMVFLHKHELLTMYHGWVLTSCYILIITIANIANLASTATAITIQRDWIVVVAGEDRSKLANMNATIRRIDQLTNILAPMAVGQIMTFGSPVIGCGFISGWNLVSMCVEYVLLWKVYQKTPALAVKAGLKEEETELKQLNLHKDTEPKPLEGTHLMGVKDSNIHELEHEQEPTCASQMAEPFRTFRDGWVSYYNQPVFLAGMGLAFLYMTVLGFDCITTGYAYTQGLSGSILSILMGASAITGIMGTVAFTWLRRKCGLVRTGLISGLAQLSCLILCVISVFMPGSPLDLSVSPFEDIRSRFIQGESITPTKIPEITTEIYMSNGSNSANIVPETSPESVPIISVSLLFAGVIAARIGLWSFDLTVTQLLQENVIESERGIINGVQNSMNYLLDLLHFIMVILAPNPEAFGLLVLISVSFVAMGHIMYFRFAQNTLGNKLFACGPDAKEVRKENQANTSVV

SEQ ID NO: 40095 - protein, 361 aa, Homo sapiens
MSKQQPTQFINPETPGYVGFANLPNQVHRKSVKKGFEFTLMVVGESGLGKSTLINSLFLTDLYPERVIPGAAEKIERTVQIEASTVEIEERGVKLRLTVVDTPGYGDAINCRDCFKTIISYIDEQFERYLHDESGLNRRHIIDNRVHCCFYFISPFGHGLKPLDVAFMKAIHNKVNIVPVIAKADTLTLKERERLKKRILDEIEEHNIKIYHLPDAESDEDEDFKEQTRLLKASIPFSVVGSNQLIEAKGKKVRGRLYPWGVVEVENPEHNDFLKLRTMLITHMQDLQEVTQDLHYENFRSERLKRGGRKVENEDMNKDQILLEKEAELRRMQEMIARMQAQMQMQMQGGDGDGGALGHHV

SEQ ID NO: 40096 - protein, 396 aa, Homo sapiens
MPWISEGRATRPCLRVPSARRGDEGLHQRDEASQKMSKQQPTQFINPETPGYVGFANLPNQVHRKSVKKGFEFTLMVVGESGLGKSTLINSLFLTDLYPERVIPGAAEKIERTVQIEASTVEIEERGVKLRLTVVDTPGYGDAINCRDCFKTIISYIDEQFERYLHDESGLNRRHIIDNRVHCCFYFISPFGHGLKPLDVAFMKAIHNKVNIVPVIAKADTLTLKERERLKKRILDEIEEHNIKIYHLPDAESDEDEDFKEQTRLLKASIPFSVVGSNQLIEAKGKKVRGRLYPWGVVEVENPEHNDFLKLRTMLITHMQDLQEVTQDLHYENFRSERLKRGGRKVENEDMNKDQILLEKEAELRRMQEMIARMQAQMQMQMQGGDGDGGALGHHV

SEQ ID NO: 40097 - protein, 371 aa, Homo sapiens
MSKQQPTQFINPETPGYVGFANLPNQVHRKSVKKGFEFTLMVVGESGLGKSTLINSLFLTDLYPERVIPGAAALNTRKTLLWEKIERTVQIEASTVEIEERGVKLRLTVVDTPGYGDAINCRDCFKTIISYIDEQFERYLHDESGLNRRHIIDNRVHCCFYFISPFGHGLKPLDVAFMKAIHNKVNIVPVIAKADTLTLKERERLKKRILDEIEEHNIKIYHLPDAESDEDEDFKEQTRLLKASIPFSVVGSNQLIEAKGKKVRGRLYPWGVVEVENPEHNDFLKLRTMLITHMQDLQEVTQDLHYENFRSERLKRGGRKVENEDMNKDQILLEKEAELRRMQEMIARMQAQMQMQMQGGDGDGGALGHHV

SEQ ID NO: 40098 - protein, 456 aa, Homo sapiens
MARGDAPRDSYHLVGISFFILGLGTLLPWNFFITAIPYFQARLAGAGNSTARILSTNHTGPEDAFNFNNWVTLLSQLPLLLFTLLNSFLYQCVPETVRILGSLLAILLLFALTAALVKVDMSPGPFFSITMASVCFINSFSAVLQGSLFGQLGTMPSTYSTLFLSGQGLAGIFAALAMLLSMASGVDAETSALGYFITPCVGILMSIVCYLSLPHLKFARYYLANKSSQAQAQELETKAELLQSDENGIPSSPQKVALTLDLDLEKEPESEPDEPQKPGKPSVFTVFQKIWLTALCLVLVFTVTLSVFPAITAMVTSSTSPGKWSQFFNPICCFLLFNIMDWLGRSLTSYFLWPDEDSRLLPLLVCLRFLFVPLFMLCHVPQRSRLPILFPQDAYFITFMLLFAVSNGYLVSLTMCLAPRQVLPHEREVAGALMTFFLALGLSCGASLSFLFKALL

SEQ ID NO: 40099 - protein, 202 aa, Homo sapiens
MARGDAPRDSYHLVGISFFILGLGTLLPWNFFITAIPYFQARLAGAGNSTARILSTNHTGPEDAFNFNNWVTLLSQLPLLLFTLLNSFLYQCAGQGGHEPRTLLLHHHGLRLLHQLLQCSPTGQPLRAAGHHALHLQHPLPQRPGPGWDLCCPCHAPVHGQWRGRRDLCPGVLYHALCGHPHVHRVLPEPASPEVCPLLPGQ

SEQ ID NO: 40100 - protein, 301 aa, Homo sapiens
MARGDAPRDSYHLVGISFFILGLGTLLPWNFFITAIPYFQARLAGAGNSTARILSTNHTGPEDAFNFNNWVTLLSQLPLLLFTLLNSFLYQCVPETVRILGSLLAILLLFALTAALVKVDMSPGPFFSITMASVCFINSFSAVLQGSLFGQLGTMPSTYSTLFLSGQGLAGIFAALAMLLSMASGVDAETSALGYFITPCVGILMSIVCYLSLPHLKFARYYLANKSSQAQAQELETKAELLQSDENGIPSSPQKVALTLDLDLEKEPESEPDEPQKPGKPSVFTVFQKSPCPSSPPSQPW

SEQ ID NO: 40101 - protein, 2172 aa, Homo sapiens
MWGLLIWTLLALHQIRAARAQDDVSPYFKTEPVRTQVHLEGNRLVLTCMAEGSWPLEFKWLHNNRELTKFSLEYRYMITSLDRTHAGFYRCIVRNRMGALLQRQTEVQVAYMGSFEEGEKHQSVSHGEAAVIRAPRIASFPQPQVTWFRDGRKIPPSSRIAITLENTLVILSTVAPDAGRYYVQAVNDKNGDNKTSQPITLTVENVGGPADPIAPTIIIPPKNTSVVAGTSEVTLECVANARPLIKLHIIWKKDGVLLSGGISDHNRRLTIPNPTGSDAGYYECEAVLRSSSVPSVVRGAYLSVLEPPQFVKEPERHITAEMEKVVDIPCQAKGVPPPSITWYKDAAVVEVEKLTRFRQRNDGGLQISGLVPDDTGMFQCFARNAAGEVQTSTYLAVTSIAPNITRGPLDSTVIDGMSVVLACETSGAPRPAITWQKGERILASGSVQLPRFTPLESGSLLISPTHISDAGTYTCLATNSRGVDEASADLVVWARTRITKPPQDQSVIKGTQASMVCGVTHDPRVTIRYIWEKDGATLGTESHPRIRLDRNGSLHISQTWSGDIGTYTCRVISAGGNDSRSAHLRVRQLPHAPEHPVATLSTVERRAINLTWTKPFDGNSPLIRYILEMSENNAPWTVLLASVDPKATSVTVKGLVPARSYQFRLCAVNDVGKGQFSKDTERVSLPEEPPTAPPQNVIASGRTNQSIMIQWQPPPESHQNGILKGYIIRYCLAGLPVGYQFKNITDADVNNLLLEDLIIWTNYEIEVAAYNSAGLGVYSSKVTEWTLQGVPTVPPGNVHAEATNSTTIRFTWNAPSPQFINGINQGYKLIAWEPEQEEEVTMVTARPNFQDSIHVGFVSGLKKFTEYFTSVLCFTTPGDGPRSTPQLVRTHEDVPGPVGHLSFSEILDTSLKVSWQEPGEKNGILTGYRISWEEYNRTNTRVTHYLPNVTLEYRVTGLTALTTYTIEVAAMTSKGQGQVSASTISSGVPPELPGPPTNLGISNIGPRSVTLQFRPGYDGKTSISRWLVEAQVGVVGEGEEWLLIHQLSNEPDARSMEVPDLNPFTCYSFRMRQVNIVGTSPPSQPSRKIQTLQAPPDMAPANVSLRTASETSLWLRWMPLPEMEYNGNPESVGYKIKYSRSDGHGKTLSHVVQDRVERDYTIEDLEEWTEYRVQVQAFNAIGSGPWSQTVVGRTRESVPSSGPTNVSALATTSSSMLVRWSEVPEADRNGLVLGYKVMYKEKDSDTQPRFWLVEGNSSRSAQLTGLGKYVLYEVQVLAFTRIGDGSPSHPPILERTLDDVPGPPMGILFPEVRTTSVRLIWQPPAAPNGIILAYQITHRLNTTTANTATVEVLAPSARQYTATGLKPESVYLFRITAQTRKGWGEAAEALVVTTEKRDRPQPPSRPMVQQEDVRARSVLLSWEPGSDGLSPVRYYTIQTRELPSGRWALHSASVSHNASSFIVDRLKPFTSYKFRVKATNDIGDSEFSEESESLTTLQAAPDEAPTILSVTPHTTTSVLIRWQPPAEDKINGILLGFRIRYRELLYEGLRGFTLRGINNPGATWAELTSMYSMRNLSRPSLTQYELDNLNKHRRYEIRMSVYNAVGEGPSSPPQEVFVGEAVPTAAPRNVVVHGATATQLDVTWEPPPLDSQNGDIQGYKIYFWEAQRGNLTERVKTLFLAENSVKLKNLTGYTAYMVSVAAFNAAGDGPRSTPTQGQTQQAAPSAPSSVKFSELTTTSVNVSWEAPQFPNGILEGYRLVYEPCSPVDGVSKIVTVDVKGNSPLWLKVKDLAEGVTYRFRIRAKTFTYGPEIEANVTTGPGEGAPGPPGVPIIVRYSSAIAIHWSSGDPGKGPITRYVIEARPSDEGLWDILIKDIPKEVSSYTFSMDILKPGVSYDFRVIAVNDYGFGTPSSPSQSVPAQKANPFYEEWWFLVVIALVGLIFILLLVFVLIIRGQSKKYAKKTDSGNSAKSGALGHSEMMSLDESSFPALELNNRRLSVKNSFCRKNGLYTRSPPRPSPGSLHYSDEDVTKYNDLIPAESSSLTEKPSEISDSQGSDSEYEVDSNHQKAHSFVNHYISDPTYYNSWRRQQKGISRAQAYSYTESDSGEPDHTTVTNSTSTQQGSLFRPKASRTPTPQNPPNPPSQQSTLYRPPSSLAPGSRAPIAGFSSFV

SEQ ID NO: 40102 - protein, 1921 aa, Homo sapiens
MWGLLIWTLLALHQIRAARAQDDVSPYFKTEPVRTQVHLEGNRLVLTCMAEGSWPLEFKWLHNNRELTKFSLEYRYMITSLDRTHAGFYRCIVRNRMGALLQRQTEVQVAYMGSFEEGEKHQSVSHGEAAVIRAPRIASFPQPQVTWFRDGRKIPPSSRIAITLENTLVILSTVAPDAGRYYVQAVNDKNGDNKTSQPITLTVENVGGPADPIAPTIIIPPKNTSVVAGTSEVTLECVANARPLIKLHIIWKKDGVLLSGGISDHNRRLTIPNPTGSDAGYYECEAVLRSSSVPSVVRGAYLSVLEPPQFVKEPERHITAEMEKVVDIPCQAKGVPPPSITWYKDAAVVEVEKLTRFRQRNDGGLQISGLVPDDTGMFQCFARNAAGEVQTSTYLAVTSIAPNITRGPLDSTVIDGMSVVLACETSGAPRPAITWQKGERILASGSVQLPRFTPLESGSLLISPTHISDAGTYTCLATNSRGVDEASADLVVWARTRITKPPQDQSVIKGTQASMVCGVTHDPRVTIRYIWEKDGATLGTESHPRIRLDRNGSLHISQTWSGDIGTYTCRVISAGGNDSRSAHLRVRQLPHAPEHPVATLSTVERRAINLTWTKPFDGNSPLIRYILEMSENNAPWTVLLASVDPKATSVTVKGLVPARSYQFRLCAVNDVGKGQFSKDTERVSLPEEPPTAPPQNVIASGRTNQSIMIQWQPPPESHQNGILKGYIIRYCLAGLPVGYQFKNITDADVNNLLLEDLIIWTNYEIEVAAYNSAGLGVYSSKVTEWTLQGVPTVPPGNVHAEATNSTTIRFTWNAPSPQFINGINQGYKLIAWEPEQEEEVTMVTARPNFQDSIHVGFVSGLKKFTEYFTSVLCFTTPGDGPRSTPQLVRTHEDVPGPVGHLSFSEILDTSLKVSWQEPGEKNGILTGYRISWEEYNRTNTRVTHYLPNVTLEYRVTGLTALTTYTIEVAAMTSKGQGQVSASTISSGVPPELPGPPTNLGISNIGPRSVTLQFRPGYDGKTSISRWLVEAQVGVVGEGEEWLLIHQLSNEPDARSMEVPDLNPFTCYSFRMRQVNIVGTSPPSQPSRKIQTLQAPPDMAPANVSLRTASETSLWLRWMPLPEMEYNGNPESVGYKIKYSRSDGHGKTLSHVVQDRVERDYTIEDLEEWTEYRVQVQAFNAIGSGPWSQTVVGRTRESVPSSGPTNVSALATTSSSMLVRWSEVPEADRNGLVLGYKVMYKEKDSDTQPRFWLVEGNSSRSAQLTGLGKYVLYEVQVLAFTRIGDGSPSHPPILERTLDDVPGPPMGILFPEVRTTSVRLIWQPPAAPNGIILAYQITHRLNTTTANTATVEVLAPSARQYTATGLKPESVYLFRITAQTRKGWGEAAEALVVTTEKRDRPQPPSRPMVQQEDVRARSVLLSWEPGSDGLSPVRYYTIQTRELPSGRWALHSASVSHNASSFIVDRLKPFTSYKFRVKATNDIGDSEFSEESESLTTLQAAPDEAPTILSVTPHTTTSVLIRWQPPAEDKINGILLGFRIRYRELLYEGLRGFTLRGINNPGATWAELTSMYSMRNLSRPSLTQYELDNLNKHRRYEIRMSVYNAVGEGPSSPPQEVFVGEAVPTAAPRNVVVHGATATQLDVTWEPPPLDSQNGDIQGYKIYFWEAQRGNLTERVKTLFLAENSVKLKNLTGYTAYMVSVAAFNAAGDGPRSTPTQGQTQQAAPSAPSSVKFSELTTTSVNVSWEAPQFPNGILEGYRLVYEPCSPVDGVSKIVTVDVKGNSPLWLKVKDLAEGVTYRFRIRAKTFTYGPEIEANVTTGPGEGAPGPPGVPIIVRYSSAIAIHWSSGDPGKGPITRYVIEARPSGAPRPAGLRPHSSLSPFFLGPSTWGTCLCPPPEKALVLLQVKSPGPVEEWETGLGGS

SEQ ID NO: 40103 - protein, 2153 aa, Homo sapiens
MWGLLIWTLLALHQIRAARAQDDVSPYFKTEPVRTQVHLEGNRLVLTCMAEGSWPLEFKWLHNNRELTKFSLEYRYMITSLDRTHAGFYRCIVRNRMGALLQRQTEVQVAYMGSFEEGEKHQSVSHGEAAVIRAPRIASFPQPQVTWFRDGRKIPPSSRIAITLENTLVILSTVAPDAGRYYVQAVNDKNGDNKTSQPITLTVENVGGPADPIAPTIIIPPKNTSVVAGTSEVTLECVANARPLIKLHIIWKKDGVLLSGGISDHNRRLTIPNPTGSDAGYYECEAVLRSSSVPSVVRGAYLSVLEPPQFVKEPERHITAEMEKVVDIPCQAKGVPPPSITWYKDAAVVEVEKLTRFRQRNDGGLQISGLVPDDTGMFQCFARNAAGEVQTSTYLAVTSIAPNITRGPLDSTVIDGMSVVLACETSGAPRPAITWQKGERILASGSVQLPRFTPLESGSLLISPTHISDAGTYTCLATNSRGVDEASADLVVWARTRITKPPQDQSVIKGTQASMVCGVTHDPRVTIRYIWEKDGATLGTESHPRIRLDRNGSLHISQTWSGDIGTYTCRVISAGGNDSRSAHLRVRQLPHAPEHPVATLSTVERRAINLTWTKPFDGNSPLIRYILEMSENNAPWTVLLASVDPKATSVTVKGLVPARSYQFRLCAVNDVGKGQFSKDTERVSLPEEPPTAPPQNVIASGRTNQSIMIQWQPPPESHQNGILKGYIIRYCLAGLPVGYQFKNITDADVNNLLLEDLIIWTNYEIEVAAYNSAGLGVYSSKVTEWTLQGVPTVPPGNVHAEATNSTTIRFTWNAPSPQFINGINQGYKLIAWEPEQEEEVTMVTARPNFQDSIHVGFVSGLKKFTEYFTSVLCFTTPGDGPRSTPQLVRTHEDVPGPVGHLSFSEILDTSLKVSWQEPGEKNGILTGYRISWEEYNRTNTRVTHYLPNVTLEYRVTGLTALTTYTIEVAAMTSKGQGQVSASTISSGVPPELPGPPTNLGISNIGPRSVTLQFRPGYDGKTSISRWLVEAQVGVVGEGEEWLLIHQLSNEPDARSMEVPDLNPFTCYSFRMRQVNIVGTSPPSQPSRKIQTLQAPPDMAPANVSLRTASETSLWLRWMPLPEMEYNGNPESVGYKIKYSRSDGHGKTLSHVVQDRVERDYTIEDLEEWTEYRVQVQAFNAIGSGPWSQTVVGRTRESVPSSGPTNVSALATTSSSMLVRWSEVPEADRNGLVLGYKVMYKEKDSDTQPRFWLVEGNSSRSAQLTGLGKYVLYEVQVLAFTRIGDGSPSHPPILERTLDDVPGPPMGILFPEVRTTSVRLIWQPPAAPNGIILAYQITHRLNTTTANTATVEVLAPSARQYTATGLKPESVYLFRITAQTRKGWGEAAEALVVTTEKRDRPQPPSRPMVQQEDVRARSVLLSWEPGSDGLSPVRYYTIQTRELPSGRWALHSASVSHNASSFIVDRLKPFTSYKFRVKATNDIGDSEFSEESESLTTLQAAPDEAPTILSVTPHTTTSVLIRWQPPAEDKINGILLGFRIRYRELLYEGLRGFTLRGINNPGATWAELTYLNKHRRYEIRMSVYNAVGEGPSSPPQEVFVGEAVPTAAPRNVVVHGATATQLDVTWEPPPLDSQNGDIQGYKIYFWEAQRGNLTERVKTLFLAENSVKLKNLTGYTAYMVSVAAFNAAGDGPRSTPTQGQTQQAAPSAPSSVKFSELTTTSVNVSWEAPQFPNGILEGYRLVYEPCSPVDGVSKIVTVDVKGNSPLWLKVKDLAEGVTYRFRIRAKTFTYGPEIEANVTTGPGEGAPGPPGVPIIVRYSSAIAIHWSSGDPGKGPITRYVIEARPSDEGLWDILIKDIPKEVSSYTFSMDILKPGVSYDFRVIAVNDYGFGTPSSPSQSVPAQKANPFYEEWWFLVVIALVGLIFILLLVFVLIIRGQSKKYAKKTDSGNSAKSGALGHSEMMSLDESSFPALELNNRRLSVKNSFCRKNGLYTRSPPRPSPGSLHYSDEDVTKYNDLIPAESSSLTEKPSEISDSQGSDSEYEVDSNHQKAHSFVNHYISDPTYYNSWRRQQKGISRAQAYSYTESDSGEPDHTTVTNSTSTQQGSLFRPKASRTPTPQNPPNPPSQQSTLYRPPSSLAPGSRAPIAGFSSFV

SEQ ID NO: 40104 - protein, 2216 aa, Homo sapiens
MWGLLIWTLLALHQIRAARAQDDVSPYFKTEPVRTQVHLEGNRLVLTCMAEGSWPLEFKWLHNNRELTKFSLEYRYMITSLDRTHAGFYRCIVRNRMGALLQRQTEVQVAYMGSFEEGEKHQSVSHGEAAVIRAPRIASFPQPQVTWFRDGRKIPPSSRIAITLENTLVILSTVAPDAGRYYVQAVNDKNGDNKTSQPITLTVENVGGPADPIAPTIIIPPKNTSVVAGTSEVTLECVANARPLIKLHIIWKKDGVLLSGGISDHNRRLTIPNPTGSDAGYYECEAVLRSSSVPSVVRGAYLSVLEPPQFVKEPERHITAEMEKVVDIPCQAKGVPPPSITWYKDAAVVEVEKLTRFRQRNDGGLQISGLVPDDTGMFQCFARNAAGEVQTSTYLAVTSIAPNITRGPLDSTVIDGMSVVLACETSGAPRPAITWQKGERILASGSVQLPRFTPLESGSLLISPTHISDAGTYTCLATNSRGVDEASADLVVWARTRITKPPQDQSVIKGTQASMVCGVTHDPRVTIRYIWEKDGATLGTESHPRIRLDRNGSLHISQTWSGDIGTYTCRVISAGGNDSRSAHLRVRQLPHAPEHPVATLSTVERRAINLTWTKPFDGNSPLIRYILEMSENNAPWTVLLASVDPKATSVTVKGLVPARSYQFRLCAVNDVGKGQFSKDTERVSLPEEPPTAPPQNVIASGRTNQSIMIQWQPPPESHQNGILKGYIIRYCLAGLPVGYQFKNITDADVNNLLLEDLIIWTNYEIEVAAYNSAGLGVYSSKVTEWTLQGVPTVPPGNVHAEATNSTTIRFTWNAPSPQFINGINQGYKLIAWEPEQEEEVTMVTARPNFQDSIHVGFVSGLKKFTEYFTSVLCFTTPGDGPRSTPQLVRTHEDVPGPVGHLSFSEILDTSLKVSWQEPGEKNGILTGYRISWEEYNRTNTRVTHYLPNVTLEYRVTGLTALTTYTIEVAAMTSKGQGQVSASTISSGVPPELPGPPTNLGISNIGPRSVTLQFRPGYDGKTSISRWLVEAQVGVVGEGEEWLLIHQLSNEPDARSMEVPDLNPFTCYSFRMRQVNIVGTSPPSQPSRKIQTLQAPPDMAPANVSLRTASETSLWLRWMPLPEMEYNGNPESVGYKIKYSRSDGHGKTLSHVVQDRVERDYTIEDLEEWTEYRVQVQAFNAIGSGPWSQTVVGRTRESVPSSGPTNVSALATTSSSMLVRWSEVPEADRNGLVLGYKVMYKEKDSDTQPRFWLVEGNSSRSAQLTGLGKYVLYEVQVLAFTRIGDGSPSHPPILERTLDDVPGPPMGILFPEVRTTSVRLIWQPPAAPNGIILAYQITHRLNTTTANTATVEVLAPSARQYTATGLKPESVYLFRITAQTRKGWGEAAEALVVTTEKRDRPQPPSRPMVQQEDVRARSVLLSWEPGSDGLSPVRYYTIQTRELPSGRWALHSASVSHNASSFIVDRLKPFTSYKFRVKATNDIGDSEFSEESESLTTLQAAPDEAPTILSVTPHTTTSVLIRWQPPAEDKINGILLGFRIRYRELLYEGLRGFTLRGINNPGATWAELTSMYSMRNLSRPSLTQYELDNLNKHRRYEIRMSVYNAVGEGPSSPPQEVFVGEAVPTAAPRNVVVHGATATQLDVTWEPPPLDSQNGDIQGYKIYFWEAQRGNLTERVKTLFLAENSVKLKNLTGYTAYMVSVAAFNAAGDGPRSTPTQGQTQQAAPSAPSSVKFSELTTTSVNVSWEAPQFPNGILEGYRLVYEPCSPVDGVSKIVTVDVKGNSPLWLKVKDLAEGVTYRFRIRAKTFTYGPEIEANVTTGPGEGAPGPPGVPIIVRYSSAIAIHWSSGDPGKGPITRYVIEARPSDEGLWDILIKDIPKEVSSYTFSMDILKPGVSYDFRVIAVNDYGFGTPSSPSQSVPAQKANPFYEEWWFLVVIALVGLIFILLLVFVLIIRGQSKKYAKKTDSGNSAKSGALGHSEMMSLDESSFPALELNNRRLSVKNSFCRKNGLYTRSPPRPSPGSLHYSDEDVTKYNDLIPAESSSLTEKPSEISDSQGSDSEYEVDSNHQKAHSFVNHYISDPTYYNSWRRQQKGISRAQAYSYTESDSGEPDHTTVTNSTSTQQGSLFRPKASRTPTPQNPPNPPSQQSTLYRPPSKAGVQKEGENRERMCVASSSSALRWWGSLLPWELHGAGEVAVSLLWTRSGPGIWRERGSGG

SEQ ID NO: 40105 - protein, 1956 aa, Homo sapiens
MEFPIGSLETNNFRRFTPESLVEIEKQIAAKQGTKKAREKHREQKDQEEKPRPQLDLKACNQLPKFYGELPAELIGEPLEDLDPFYSTHRTFMVLNKGRTISRFSATRALWLFSPFNLIRRTAIKVSVHSWFSLFITVTILVNCVCMTRTDLPEKIEYVFTVIYTFEALIKILARGFCLNEFTYLRDPWNWLDFSVITLAYVGTAIDLRGISGLRTFRVLRALKTVSVIPGLKVIVGALIHSVKKLADVTILTIFCLSVFALVGLQLFKGNLKNKCVKNDMAVNETTNYSSHRKPDIYINKRGTSDPLLCGNGSDSGHCPDGYICLKTSDNPDFNYTSFDSFAWAFLSLFRLMTQDSWERLYQQTLRTSGKIYMIFFVLVIFLGSFYLVNLILAVVTMAYEEQNQATTDEIEAKEKKFQEALEMLRKEQEVLAALGIDTTSLHSHNGSPLTSKNASERRHRIKPRVSEGSTEDNKSPRSDPYNQRRMSFLGLASGKRRASHGSVFHFRSPGRDISLPEGVTDDGVFPGDHESHRGSLLLGGGAGQQGPLPRSPLPQPSNPDSRHGEDEHQPPPTSELAPGAVDVSAFDAGQKKTFLSAEYLDEPFRAQRAMSVVSIITSVLEELEESEQKCPPCLTSLSQKYLIWDCCPMWVKLKTILFGLVTDPFAELTITLCIVVNTIFMAMEHHGMSPTFEAMLQIGNIVFTIFFTAEMVFKIIAFDPYYYFQKKWNIFDCIIVTVSLLELGVAKKGSLSVLRSFRLLRVFKLAKSWPTLNTLIKIIGNSVGALGNLTIILAIIVFVFALVGKQLLGENYRNNRKNISAPHEDWPRWHMHDFFHSFLIVFRILCGEWIENMWACMEVGQKSICLILFLTVMVLGNLVVLNLFIALLLNSFSADNLTAPEDDGEVNNLQVALARIQVFGHRTKQALCSFFSRSCPFPQPKAEPELVVKLPLSSSKAENHIAANTARGSSGGLQAPRGPRDEHSDFIANPTVWVSVPIAEGESDLDDLEDDGGEDAQSFQQEVIPKGQQEQLQQVERCGDHLTPRSPGTGTSSEDLAPSLGETWKDESVPQVPAEGVDDTSSSEGSTVDCLDPEEILRKIPELADDLEEPDDCFTEGCIRHCPCCKLDTTKSPWDVGWQVRKTCYRIVEHSWFESFIIFMILLSSGSLAFEDYYLDQKPTVKALLEYTDRVFTFIFVFEMLLKWVAYGFKKYFTNAWCWLDFLIVNISLISLTAKILEYSEVAPIKALRTLRALRPLRALSRFEGMRVVVDALVGAIPSIMNVLLVCLIFWLIFSIMGVNLFAGKFWRCINYTDGEFSLVPLSIVNNKSDCKIQNSTGSFFWVNVKVNFDNVAMGYLALLQVATFKGWMDIMYAAVDSREVNMQPKWEDNVYMYLYFVIFIIFGGFFTLNLFVGVIIDNFNQQKKKLGGQDIFMTEEQKKYYNAMKKLGSKKPQKPIPRPLNKFQGFVFDIVTRQAFDITIMVLICLNMITMMVETDDQSEEKTKILGKINQFFVAVFTGECVMKMFALRQYYFTNGWNVFDFIVVVLSIASLIFSAILKSLQSYFSPTLFRVIRLARIGRILRLIRAAKGIRTLLFALMMSLPALFNIGLLLFLVMFIYSIFGMSSFPHVRWEAGIDDMFNFQTFANSMLCLFQITTSAGWDGLLSPILNTGPPYCDPNLPNSNGTRGDCGSPAVGIIFFTTYIIISFLIMVNMYIAVILENFNVATEESTEPLSEDDFDMFYETWEKFDPEATQFITFSALSDFADTLSGPLRIPKPNRNILIQMDLPLVPGDKIHCLDILFAFTKNVLGESGELDSLKANMEEKFMATNLSKSSYEPIATTLRWKQEDISATVIQKAYRSYVLHRSMALSNTPCVPRAEEEAASLPDEGFVAFTANENCVLPDKSETASATSFPPSYESVTRGLSDRVNMRTSSSIQNEDEATSMELIAPGP

SEQ ID NO: 40106 - protein, 475 aa, Homo sapiens
MAVVSEDDFQHSSNSTYRTTSSSLRADQEALLEKLLDRPPPGLQRPEDRFCGTYIIFFSLGIGSLLPWNFFITAKEYWMFKLRNSSSPATGEDPEGSDILNYFESYLAVASTVPSMLCLVANFLLVNRVAVHIRVLASLTVILAIFMVITALVKVDTSSWTRGFFAVTIVCMVILSGASTVFSSSIYGMTGSFPMRNSQALISGGAMGGTVSAVASLVDLAASSDVRNSALAFFLTATVFLVLCMGLYLLLSRLEYARYYMRPVLAAHVFSGEEELPQDSLSAPSVASRFIDSHTPPLRPILKKTASLGFCVTYVFFITSLIYPAICTNIESLNKGSGSLWTTKFFIPLTTFLLYNFADLCGRQLTAWIQVPGPNSKALPGFVLLRTCLIPLFVLCNYQPRVHLKTVVFQSDVYPALLSSLLGLSNGYLSTLALLYGPKIVPRELAEATGVVMSFYVCLGLTLGSACSTLLVHLI

SEQ ID NO: 40107 - protein, 329 aa, Homo sapiens
MVITALVKVDTSSWTRGFFAVTIVCMVILSGASTVFSSSIYGMTGSFPMRNSQALISGGAMGGTVSAVASLVDLAASSDVRNSALAFFLTATVFLVLCMGLYLLLSRLEYARYYMRPVLAAHVFSGEEELPQDSLSAPSVASRFIDSHTPPLRPILKKTASLGFCVTYVFFITSLIYPAICTNIESLNKGSGSLWTTKFFIPLTTFLLYNFADLCGRQLTAWIQVPGPNSKALPGFVLLRTCLIPLFVLCNYQPRVHLKTVVFQSDVYPALLSSLLGLSNGYLSTLALLYGPKIVPRELAEATGVVMSFYVCLGLTLGSACSTLLVHLI

SEQ ID NO: 40108 - protein, 358 aa, Homo sapiens
MSKGLPETRTDAAMSELVPEPRPKPAVPMKPMSINSNLLGYIGIDTIIEQMRKKTMKTGFDFNIMVVGQSGLGKSTLVNTLFKSQVSRKASSWNREEKIPKTVEIKAIGHVIEEGGVKMKLTVIDTPGFGDQINNENCWEPIEKYINEQYEKFLKEEVNIARKKRIPDTRVHCCLYFISPTGHSLRPLDLEFMKHLSKVVNIIPVIAKADTMTLEEKSEFKQRVRKELEVNGIEFYPQKEFDEDLEDKTENDKIRQESMPFAVVGSDKEYQVNGKRVLGRKTPWGIIEVENLNHCEFALLRDFVIRTHLQDLKEVTHNIHYETYRAKRLNDNGGLPPGEGLLGTVLPPVPATPCPTAE

SEQ ID NO: 40109 - protein, 350 aa, Homo sapiens
MSKGLPETRTDAAMSELVPEPRPKPAVPMKPMSINSNLLGYIGIDTIIEQMRKKTMKTGFDFNIMVVGQSGLGKSTLVNTLFKSQVSRKASSWNREEKIPKTVEIKAIGHVIEEGGVKMKLTVIDTPGFGDQINNENCWEPIEKYINEQYEKFLKEEVNIARKKRIPDTRVHCCLYFISPTGHSLRPLDLEFMKHLSKVVNIIPVIAKADTMTLEEKSEFKQRVRKELEVNGIEFYPQKEFDEDLEDKTENDKIRQESMPFAVVGSDKEYQVNGKRVLGRKTPWGIIEVENLNHCEFALLRDFVIRTHLQDLKEVTHNIHYETYRAKRLNDNGGLPPVSVDTEESHDSNP

SEQ ID NO: 40110 - protein, 83 aa, Homo sapiens
MSKGLPETRTDAAMSELVPEPRPKPAVPMKPMSINSNLLGYIGIDTIIEQMRKKTMKTGFDFNIMVVAGSPLRSTSMSSTRSS

SEQ ID NO: 40111 - protein, 513 aa, Homo sapiens
MSSKPEPKDVHQLNGTGPSASPCSSDGPGREPLAGTSEFLGPDGAGVEVVIESRANAKGVREEDALLENGSQSNESDDVSTDRGPAPPSPLKETSFSIGLQVLFPFLLAGFGTVAAGMVLDIVQHWEVFQKVTEVFILVPALLGLKGNLEMTLASRLSTAANIGHMDTPKELWRMITGNMALIQVQATVVGFLASIAAVVFGWIPDGHFSIPHAFLLCASSVATAFIASLVLGMIMIGVIIGSRKIGINPDNVATPIAASLGDLITLALLSGISWGLYLELNHWRYIYPLVCAFFVALLPVWVVLARRSPATREVLYSGWEPVIIAMAISSVGGLILDKTVSDPNFAGMAVFTPVINGVGGNLVAVQASRISTFLHMNGMPGENSEQAPRRCPSPCTTFFSPDVNSRSARVLFLLVVPGHLVFLYTISCMQGGHTTLTLIFIIFYMTAALLQVLILLYIADWMVHWMWGRGLDPDNFSIPYLTALGDLLGTGLLALSFHVLWLIGDRDTDVGD

SEQ ID NO: 40112 - protein, 530 aa, Homo sapiens
MGSVGSQRLEEPSVAGTPDPGVVMSFTFDSHQLEEAAEAAQGQGLRARGVPAFTDTTLDEPVPDDRYHAIYFAMLLAGVGFLLPYNSFITDVDYLHHKYPGTSIVFDMSLTYILVALAAVLLNNVLVERLTLHTRITAGYLLALGPLLFISICDVWLQLFSRDQAYAINLAAVGTVAFGCTVQQSSFYGYTGMLPKRYTQGVMTGESTAGVMISLSRILTKLLLPDERASTLIFFLVSVALELLCFLLHLLVRRSRFVLFYTTRPRDSHRGRPGLGRGYGYRVHHDVVAGDVHFEHPAPALAPNESPKDSPAHEVTGSGGAYMRFDVPRPRVQRSWPTFRALLLHRYVVARVIWADMLSIAVTYFITLCLFPGLESEIRHCILGEWLPILIMAVFNLSDFVGKILAALPVDWRGTHLLACSCLRVVFIPLFILCVYPSGMPALRHPAWPCIFSLLMGISNGYFGSVPMILAAGKVSPKQRELAGNTMTVSYMSGLTLGSAVAYCTYSLTRDAHGSCLHASTANGSILAGL

SEQ ID NO: 40113 - protein, 516 aa, Homo sapiens
MGSVGSQRLEEPSVAGTPDPGVVMSFTFDSHQLEEAAEAAQGQGLRARGVPAFTDTTLDEPVPDDRYHAIYFAMLLAGVGFLLPYNSFITDVDYLHHKYPGTSIVFDMSLTYILVALAAVLLNNVLVERLTLHTRITAASATCGCSSSLGTRPTPSTWPLWAPWPSAAQQSSFYGYTGMLPKRYTQGVMTGESTAGVMISLSRILTKLLLPDERASTLIFFLVSVALELLCFLLHLLVRRSRFVLFYTTRPRDSHRGRPGLGRGYGYRVHHDVVAGDVHFEHPAPALAPNESPKDSPAHEVTGSGGAYMRFDVPRPRVQRSWPTFRALLLHRYVVARVIWADMLSIAVTYFITLCLFPGLESEIRHCILGEWLPILIMAVFNLSDFVGKILAALPVDWRGTHLLACSCLRVVFIPLFILCVYPSGMPALRHPAWPCIFSLLMGISNGYFGSVPMILAAGKVSPKQRELAGNTMTVSYMSGLTLGSAVAYCTYSLTRDAHGSCLHASTANGSILAGL

SEQ ID NO: 40114 - protein, 573 aa, Homo sapiens
MTNSKGRSITDKTSGGPSSGGGFVDWTLRLNTIQSDKFLNLLLSMVPVIYQKNQEDRHKKANGIWQDGLSTAVQTFSNRSEQHMEYHSFSEQSFHANNGHASSSCSQKYDDYANYNYCDGRETSETTAMLQDEDISSDGDEDAIVEVTPKLPKESSGIMALQILVPFLLAGFGTVSAGMVLDIVQHWEVFRKVTEVFILVPALLGLKGNLEMTLASRLSTAVNIGKMDSPIEKWNLIIGNLALKQVQATVVGFLAAVAAIILGWIPEGKYYLDHSILLCSSSVATAFIASLLQGIIMVGVIVGSKKTGINPDNVATPIAASFGDLITLAILAWISQGLYSCLETYYYISPLVGVFFLALTPIWIIIAAKHPATRTVLHSGWEPVITAMVISSIGGLILDTTVSDPNLVGIVVYTPVINGIGGNLVAIQASRISTYLHLHSIPGELPDEPKGCYYPFRTFFGPGVNNKSAQVLLLLVIPGHLIFLYTIHLMKSGHTSLTIIFIVVYLFGAVLQVFTLLWIADWMVHHFWRKGKDPDSFSIPYLTALGDLLGTALLALSFHFLWLIGDRDGDVGD

SEQ ID NO: 40115 - protein, 249 aa, Homo sapiens
MDEERSSMLPTMAAGPNSILFAINIDNKDLNGQSKFAPTVSDLLKESTQNVTLLKESTQGVSSVFREITASSAISILIKPEQETDPLPVVSRNVSADAKCKKERKKKKQVTNIISFDDEEDEQNSGDMFKKTPGAGESSEDNSDHSSVNIMSAFESPFGPNSNGSQSSNSWKIDSLSLNREFGYQKLDVKSIDDEDVDENEDDVYGNSSGRKHRGHSESPEKNGAHSVTQAGVQWHDLSSLQPLPPGFK

SEQ ID NO: 40116 - protein, 478 aa, Homo sapiens
MDRSLGWQGNSVPEDRTEAGIKRFLEDTTDDGELSKFVKDFSGNASCHPPEAKTWASRPQVPEPRPQAPDLYDDDLEFRPPSRPQSSDNQQYFCAPAPLSPSARPRSPWGKLDPYDSSEDDKEYVGFATLPNQVHRKSVKKGFDFTLMVAGESGLGKSTLVNSLFLTDLYRDRKLLGAEERIMQTVEITKHAVDIEEKGVRLRLTIVDTPGFGDAVNNTECWKPVAEYIDQQFEQYFRDESGLNRKNIQDNRVHCCLYFISPFGHGLRPLDVEFMKALHQRVNIVPILAKADTLTPPEVDHKKRKIREEIEHFGIKIYQFPDCDSDEDEDFKLQDQALKESIPFAVIGSNTVVEARGRRVRGRLYPWGIVEVENPGHCDFVKLRTMLVRTHMQDLKDVTRETHYENYRAQCIQSMTRLVVKERNRNKLTRESGTDFPIPAVPPGTDPETEKLIREKDEELRRMQEMLHKIQKQMKENY

SEQ ID NO: 40117 - protein, 459 aa, Homo sapiens
MIKRFLEDTTDDGELSKFVKDFSGNASCHPPEAKTWASRPQVPEPRPQAPDLYDDDLEFRPPSRPQSSDNQQYFCAPAPLSPSARPRSPWGKLDPYDSSEDDKEYVGFATLPNQVHRKSVKKGFDFTLMVAGESGLGKSTLVNSLFLTDLYRDRKLLGAEERIMQTVEITKHAVDIEEKGVRLRLTIVDTPGFGDAVNNTECWKPVAEYIDQQFEQYFRDESGLNRKNIQDNRVHCCLYFISPFGHGLRPLDVEFMKALHQRVNIVPILAKADTLTPPEVDHKKRKIREEIEHFGIKIYQFPDCDSDEDEDFKLQDQALKESIPFAVIGSNTVVEARGRRVRGRLYPWGIVEVENPGHCDFVKLRTMLVRTHMQDLKDVTRETHYENYRAQCIQSMTRLVVKERNRNKLTRESGTDFPIPAVPPGTDPETEKLIREKDEELRRMQEMLHKIQKQMKENY

SEQ ID NO: 40118 - protein, 470 aa, Homo sapiens
MPGFYSVMTDEEIKRFLEDTTDDGELSKFVKDFSGNASCHPPEAKTWASRPQVPEPRPQAPDLYDDDLEFRPPSRPQSSDNQQYFCAPAPLSPSARPRSPWGKLDPYDSSEDDKEYVGFATLPNQVHRKSVKKGFDFTLMVAGESGLGKSTLVNSLFLTDLYRDRKLLGAEERIMQTVEITKHAVDIEEKGVRLRLTIVDTPGFGDAVNNTECWKPVAEYIDQQFEQYFRDESGLNRKNIQDNRVHCCLYFISPFGHGLRPLDVEFMKALHQRVNIVPILAKADTLTPPEVDHKKRKIREEIEHFGIKIYQFPDCDSDEDEDFKLQDQALKESIPFAVIGSNTVVEARGRRVRGRLYPWGIVEVENPGHCDFVKLRTMLVRTHMQDLKDVTRETHYENYRAQCIQSMTRLVVKERNRNKLTRESGTDFPIPAVPPGTDPETEKLIREKDEELRRMQEMLHKIQKQMKENY

SEQ ID NO: 40119 - protein, 493 aa, Homo sapiens
MRSSPALFSSRAAPQKPRKEGSQAAGLLVFSDSLEIKRFLEDTTDDGELSKFVKDFSGNASCHPPEAKTWASRPQVPEPRPQAPDLYDDDLEFRPPSRPQSSDNQQYFCAPAPLSPSARPRSPWGKLDPYDSSEDDKEYVGFATLPNQVHRKSVKKGFDFTLMVAGESGLGKSTLVNSLFLTDLYRDRKLLGAEERIMQTVEITKHAVDIEEKGVRLRLTIVDTPGFGDAVNNTECWKPVAEYIDQQFEQYFRDESGLNRKNIQDNRVHCCLYFISPFGHGLRPLDVEFMKALHQRVNIVPILAKADTLTPPEVDHKKRKIREEIEHFGIKIYQFPDCDSDEDEDFKLQDQALKESIPFAVIGSNTVVEARGRRVRGRLYPWGIVEVENPGHCDFVKLRTMLVRTHMQDLKDVTRETHYENYRAQCIQSMTRLVVKERNRNKLTRESGTDFPIPAVPPGTDPETEKLIREKDEELRRMQEMLHKIQKQMKENY

SEQ ID NO: 40120 - protein, 331 aa, Homo sapiens
MVAGESGLGKSTLVNSLFLTDLYRDRKLLGAEERIMQTVEITKHAVDIEEKGVRLRLTIVDTPGFGDAVNNTECWKPVAEYIDQQFEQYFRDESGLNRKNIQDNRVHCCLYFISPFGHGLRPLDVEFMKALHQRVNIVPILAKADTLTPPEVDHKKRKIREEIEHFGIKIYQFPDCDSDEDEDFKLQDQALKESIPFAVIGSNTVVEARGRRVRGRLYPWGIVEVENPGHCDFVKLRTMLVRTHMQDLKDVTRETHYENYRAQCIQSMTRLVVKERNRNKLTRESGTDFPIPAVPPGTDPETEKLIREKDEELRRMQEMLHKIQKQMKENY

SEQ ID NO: 40121 - protein, 274 aa, Homo sapiens
MIKRFLEDTTDDGELSKFVKDFSGNASCHPPEAKTWASRPQVPEPRPQAPDLYDDDLEFRPPSRPQSSDNQQYFCAPAPLSPSARPRSPWGKLDPYDSSEDDKEYVGFATLPNQVHRKSVKKGFDFTLMVAGESGLGKSTLVNSLFLTDLYRDRKLLGAEERIMQTVEITKHAVDIEEKGVRLRLTIVDTPGFGDAVNNTECWKPVAEYIDQQFEQYFRDESGLNRKNIQDNRVHCCLYFISPFGHGYGPSLRLLAPPGAVKGTGQEHQGQGCH

SEQ ID NO: 40122 - protein, 996 aa, Homo sapiens
MVKTNKPGAKVAVSAQRGSEVTTNTSPQQGHGYVLASSHRSAAVSLNPSHRRSEAAHPTTPHSASDYPRSVSLQSGPGHYAVPTPRGPETGPRTESSRHSSPHLKSQKTQTLASHASSRQWKVSPPREEAARRGSESKSGREVGHHASSIPDAKSTHQLSFQDQKNNLQSQILEDDPPSKVQNPQGVRVPRRILSYPKDEAVQTEPIQRITTTSEIRSPRSPSLLEHGSSCVSADYQTAQRRVPVEESETGPYGPIPSKPKALYRNMNLDSLLKLSVLKDSDGVHRVSARVDPESLHKYSAYPETKPSAKVLVSSQVESNVRTPIRGNSEVGRRVTISPGVQSVEPTHHVTVPSVSEGSHKSSMFVTPEPIYKQQTQKPPEITYMSQGPTPRYPELSQKPSIHAELELTPRPLPPRSLPRYGPDSSWWPLLNPEVETPQSQLTTPDFEPKCSPSLDLLLSGFKIDSSPFCEDLKFQREKASLSPPSPPKEFPSWAPLSEVPQTPKHTCKQPIQRFTAFFLDVSEEMYNRVIWWLKDEEIKRFLEDTTDDGELSKFVKDFSGNASCHPPEAKTWASRPQVPEPRPQAPDLYDDDLEFRPPSRPQSSDNQQYFCAPAPLSPSARPRSPWGKLDPYDSSEDDKEYVGFATLPNQVHRKSVKKGFDFTLMVAGESGLGKSTLVNSLFLTDLYRDRKLLGAEERIMQTVEITKHAVDIEEKGVRLRLTIVDTPGFGDAVNNTECWKPVAEYIDQQFEQYFRDESGLNRKNIQDNRVHCCLYFISPFGHGLRPLDVEFMKALHQRVNIVPILAKADTLTPPEVDHKKRKIREEIEHFGIKIYQFPDCDSDEDEDFKLQDQALKESIPFAVIGSNTVVEARGRRVRGRLYPWGIVEVENPGHCDFVKLRTMLVRTHMQDLKDVTRETHYENYRAQCIQSMTRLVVKERNRNKLTRESGTDFPIPAVPPGTDPETEKLIREKDEELRRMQEMLHKIQKQMKENY

SEQ ID NO: 40123 - protein, 570 aa, Homo sapiens
MVKTNKPGAKVAVSAQRGSEVTTNTSPQQGHGYVLASSHRSAAVSLNPSHRRSEAAHPTTPHSASDYPRSVSLQSGPGHYAVPTPRGPETGPRTESSRHSSPHLKSQKTQTLASHASSRQWKVSPPREEAARRGSESKSGREVGHHASSIPDAKSTHQLSFQDQKNNLQSQILEDDPPSKVQNPQGVRVPRRILSYPKDEAVQTEPIQRITTTSEIRSPRSPSLLEHGSSCVSADYQTAQRRVPVEESETGPYGPIPSKPKALYRNMNLDSLLKLSVLKDSDGVHRVSARVDPESLHKYSAYPETKPSAKVLVSSQVESNVRTPIRGNSEVGRRVTISPGVQSVEPTHHVTVPSVSEGSHKSSMFVTPEPIYKQQTQKPPEITYMSQGPTPRYPELSQKPSIHAELELTPRPLPPRSLPRYGPDSSWWPLLNPEVETPQSQLTTPDFEPKCSPSLDLLLSGFKIDSSPFCEDLKFQREKASLSPPSPPKEFPSWAPLSEVPQTPKHTCKQPIQRFTAFFLDVSEEMYNRVIWWLKGLCFSLLWAHCGSLGDGRTGEEWHLCIYRAGSFRR

SEQ ID NO: 40124 - protein, 387 aa, Homo sapiens
MERPPPRAAGRDPSALRAEAPWLRAEGPGPRAAPVTVPTPPQGSSVGGGFAGLEFARPQESEPRASDLGAPRTWTGAAAGPRTPSAHIPVPAQRATPGKARLDEVMAAAALTSLSTSPLLLGAPVAAFSPEPGLEPWKEALVRPPGSYSSSSNSGDWGWDLASDQSSPSTPSPPLPPEAAHFLFGEPTLRKRKSPAQVMFQCLWKSCGKVLSTASAMQRHIRLVHLGRQAEPEQSDGEEDFYYTELDVGVDTLTDGLSSLTPVSPTASMPPAFPRLELPELLEPPALPSPLRPPAPPLPPPPVLSTVANPQSCHSDRVYQGCLTPARLEPQPTEVGACPPALSSRIGVTLRKPRGDAKKCRKVYGMERRDLWCTACRWKKACQRFLD

SEQ ID NO: 40125 - protein, 189 aa, Homo sapiens
MFQCLWKSCGKVLSTASAMQRHIRLVHLGRQAEPEQSDGEEDFYYTELDVGVDTLTDGLSSLTPVSPTASMPPAFPRLELPELLEPPALPSPLRPPAPPLPPPPVLSTVANPQSCHSDRVYQGCLTPARLEPQPTEVGACPPALSSRIGVTLRKPRGDAKKCRKVYGMERRDLWCTACRWKKACQRFLD

SEQ ID NO: 40126 - protein, 282 aa, Homo sapiens
MAAAALTSLSTSPLLLGAPVAAFSPEPGLEPWKEALVRPPGSYSSSSNSGDWGWDLASDQSSPSTPSPPLPPEAAHFLFGEPTLRKRKSPAQVMFQCLWKSCGKVLSTASAMQRHIRLVHLGRQAEPEQSDGEEDFYYTELDVGVDTLTDGLSSLTPVSPTASMPPAFPRLELPELLEPPALPSPLRPPAPPLPPPPVLSTVANPQSCHSDRVYQGCLTPARLEPQPTEVGACPPALSSRIGVTLRKPRGDAKKCRKVYGMERRDLWCTACRWKKACQRFLD

SEQ ID NO: 40127 - protein, 507 aa, Homo sapiens
MDGTETRQRRLDSCGKPGELGLPHPLSTGGLPVASEDGALRAPESQSVTPKPLETEPSRETTWSIGLQVTVPFMFAGLGLSWAGMLLDYFQHWPVFVEVKDLLTLVPPLVGLKGNLEMTLASRLSTAANTGQIDDPQEQHRVISSNLALIQVQATVVGLLAAVAALLLGVVSREEVDVAKVELLCASSVLTAFLAAFALGVLMVCIVIGARKLGVNPDNIATPIAASLGDLITLSILALVSSFFYRHKDSRYLTPLVCLSFAALTPVWVLIAKQSPPIVKILKFGWFPIILAMVISSFGGLILSKTVSKQQYKGMAIFTPVICGVGGNLVAIQTSRISTYLHMWSAPGVLPLQMKKFWPNPCSTFCTSEINSMSARVLLLLVVPGHLIFFYIIYLVEGQSVINSQTFVVLYLLAGLIQVTILLYLAEVMVRLTWHQALDPDNHCIPYLTGLGDLLGSSSVGHTAAVPRRCTASPGWGLIQPFICTQHLIVSLLSFYFPFCLLAKTSI

SEQ ID NO: 40128 - protein, 500 aa, Homo sapiens
MDGTETRQRRLDSCGKPGELGLPHPLSTGGLPVASEDGALRAPESQSVTPKPLETEPSRETTWSIGLQVTVPFMFAGLGLSWAGMLLDYFQHWPVFVEVKDLLTLVPPLVGLKGNLEMTLASRLSTAANTGQIDDPQEQHRVISSNLALIQVQATVVGLLAAVAALLLGVVSREEVDVAKVELLCASSVLTAFLAAFALGVLMVCIVIGARKLGVNPDNIATPIAASLGDLITLSILALVSSFFYRHKDSRYLTPLVCLSFAALTPVWVLIAKQSPPIVKILKFGWFPIILAMVISSFGGLILSKTVSKQQYKGMAIFTPVICGVGGNLVAIQTSRISTYLHMWSAPGVLPLQMKKFWPNPCSTFCTSEINSMSARVLLLLVVPGHLIFFYIIYLVEGQSVINSQTFVVLYLLAGLIQVTILLYLAEVMVRLTWHQALDPDNHCIPYLTGLGDLLGSSSVGHTAAVPRRCTASPGWGLIQPFICTQHLIVSLLSFYFPFC

SEQ ID NO: 40129 - protein, 471 aa, Homo sapiens
MDGTETRQRRLDSCGKPGELGLPHPLSTGGLPVASEDGALRAPESQSVTPKPLETEPSRETTWSIGLQVTVPFMFAGLGLSWAGMLLDYFQANTGQIDDPQEQHRVISSNLALIQVQATVVGLLAAVAALLLGVVSREEVDVAKVELLCASSVLTAFLAAFALGVLMVCIVIGARKLGVNPDNIATPIAASLGDLITLSILALVSSFFYRHKDSRYLTPLVCLSFAALTPVWVLIAKQSPPIVKILKFGWFPIILAMVISSFGGLILSKTVSKQQYKGMAIFTPVICGVGGNLVAIQTSRISTYLHMWSAPGVLPLQMKKFWPNPCSTFCTSEINSMSARVLLLLVVPGHLIFFYIIYLVEGQSVINSQTFVVLYLLAGLIQVTILLYLAEVMVRLTWHQALDPDNHCIPYLTGLGDLLGSSSVGHTAAVPRRCTASPGWGLIQPFICTQHLIVSLLSFYFPFCLLAKTSI

SEQ ID NO: 40130 - protein, 464 aa, Homo sapiens
MDGTETRQRRLDSCGKPGELGLPHPLSTGGLPVASEDGALRAPESQSVTPKPLETEPSRETTWSIGLQVTVPFMFAGLGLSWAGMLLDYFQANTGQIDDPQEQHRVISSNLALIQVQATVVGLLAAVAALLLGVVSREEVDVAKVELLCASSVLTAFLAAFALGVLMVCIVIGARKLGVNPDNIATPIAASLGDLITLSILALVSSFFYRHKDSRYLTPLVCLSFAALTPVWVLIAKQSPPIVKILKFGWFPIILAMVISSFGGLILSKTVSKQQYKGMAIFTPVICGVGGNLVAIQTSRISTYLHMWSAPGVLPLQMKKFWPNPCSTFCTSEINSMSARVLLLLVVPGHLIFFYIIYLVEGQSVINSQTFVVLYLLAGLIQVTILLYLAEVMVRLTWHQALDPDNHCIPYLTGLGDLLGSSSVGHTAAVPRRCTASPGWGLIQPFICTQHLIVSLLSFYFPFC

SEQ ID NO: 40131 - protein, 478 aa, Homo sapiens
MDGTETRQRRLDSCGKPGELGLPHPLSTGGLPVASEDGALRAPESQSVTPKPLETEPSRETVPFMFAGLGLSWAGMLLDYFQHWPVFVEVKDLLTLVPPLVGLKGNLEMTLASRLSTAANTGQIDDPQEQHRVISSNLALIQVQATVVGLLAAVAALLLGVVSREEVDVAKVELLCASSVLTAFLAAFALGVLMVCIVIGARKLGVNPDNIATPIAASLGDLITLSILALVSSFFYRHKDSRYLTPLVCLSFAALTPVWVLIAKQSPPIVKILKFGWFPIILAMVISSFGGLILSKTVSKQQYKGMAIFTPVICGVGGNLVAIQTSRISTYLHMWSAPGVLPLQMKKFWPNPCSTFCTSEINSMSARVLLLLVVPGHLIFFYIIYLVEGQSVINSQTFVVLYLLAGLIQVTILLYLAEVMVRLTWHQALDPDNHCIPYLTGLGDLLGTGLLALCFFTDWLLKSKAELGGISELASGPP

SEQ ID NO: 40132 - protein, 438 aa, Homo sapiens
MDGTETRQRRLDSCGKPGELGLPHPLSTGGLPVASEDGALRAPESQSVTPKPLETEPSRETTWSIGLQVTVPFMFAGLGLSWAGMLLDYFQHWPVFVEVKDLLTLVPPLVGLKGNLEMTLASRLSTAANTGQIDDPQEQHRVISSNLALIQVQATVVGLLAAVAALLLGVVSREEVDVAKVELLCASSVLTAFLAAFALGVLMVCIVIGARKLGVNPVWVLIAKQSPPIVKILKFGWFPIILAMVISSFGGLILSKTVSKQQYKGMAIFTPVICGVGGNLVAIQTSRISTYLHMWSAPGVLPLQMKKFWPNPCSTFCTSEINSMSARVLLLLVVPGHLIFFYIIYLVEGQSVINSQTFVVLYLLAGLIQVTILLYLAEVMVRLTWHQALDPDNHCIPYLTGLGDLLGTGLLALCFFTDWLLKSKAELGGISELASGPP

SEQ ID NO: 40133 - protein, 461 aa, Homo sapiens
MVVTQLNLEFCFQGKKLRGFSCELTRSPHGVLPESFFTIMCQVVVPILLSGLCMMTAGLVMNTIQHWPVFVEVKDLLTLVPPLVGLKGNLEMTLASRLSTAANTGQIDDPQEQHRVISSNLALIQVQATVVGLLAAVAALLLGVVSREEVDVAKVELLCASSVLTAFLAAFALGVLMVCIVIGARKLGVNPDNIATPIAASLGDLITLSILALVSSFFYRHKDSRYLTPLVCLSFAALTPVWVLIAKQSPPIVKILKFGWFPIILAMVISSFGGLILSKTVSKQQYKGMAIFTPVICGVGGNLVAIQTSRISTYLHMWSAPGVLPLQMKKFWPNPCSTFCTSEINSMSARVLLLLVVPGHLIFFYIIYLVEGQSVINSQTFVVLYLLAGLIQVTILLYLAEVMVRLTWHQALDPDNHCIPYLTGLGDLLGTGLLALCFFTDWLLKSKAELGGISELASGPP

SEQ ID NO: 40134 - protein, 370 aa, Homo sapiens
MTLASRLSTAANTGQIDDPQEQHRVISSNLALIQVQATVVGLLAAVAALLLGVVSREEVDVAKVELLCASSVLTAFLAAFALGVLMVCIVIGARKLGVNPDNIATPIAASLGDLITLSILALVSSFFYRHKDSRYLTPLVCLSFAALTPVWVLIAKQSPPIVKILKFGWFPIILAMVISSFGGLILSKTVSKQQYKGMAIFTPVICGVGGNLVAIQTSRISTYLHMWSAPGVLPLQMKKFWPNPCSTFCTSEINSMSARVLLLLVVPGHLIFFYIIYLVEGQSVINSQTFVVLYLLAGLIQVTILLYLAEVMVRLTWHQALDPDNHCIPYLTGLGDLLGTGLLALCFFTDWLLKSKAELGGISELASGPP

SEQ ID NO: 40135 - protein, 487 aa, Homo sapiens
MDGTETRQRRLDSCGKPGELGLPHPLSTGGLPVASEDGALRAPESQSVTPKPLETEPSRETTWSIGLQVTVPFMFAGLGLSWAGMLLDYFQHWPVFVEVKDLLTLVPPLVGLKGNLEMTLASRLSTAANTGQIDDPQEQHRVISSNLALIQVQATVVGLLAAVAALLLGVVSREEVDVAKVELLCASSVLTAFLAAFALGVLMVCIVIGARKLGVNPDNIATPIAASLGDLITLSILALVSSFFYRHKDSRYLTPLVCLSFAALTPVWVLIAKQSPPIVKILKFGWFPIILAMVISSFGGLILSKTVSKQQYKGMAIFTPVICGVGGNLVAIQTSRISTYLHMWSAPGVLPLQMKKFWPNPCSTFCTSEINSMSARVLLLLVVPGHLIFFYIIYLVEGQSVINSQTFVVLYLLAGLIQVTILLYLAEVMVRLTWHQALDPDNHCIPYLTGLGDLLGTGLLALCFFTDWLLKSKAELGGISELASGPP

SEQ ID NO: 40136 - protein, 1791 aa, Homo sapiens
MDDRCYPVIFPDERNFRPFTSDSLAAIEKRIAIQKEKKKSKDQTGEVPQPRPQLDLKASRKLPKLYGDIPRELIGKPLEDLDPFYRNHKTFMVLNRKRTIYRFSAKHALFIFGPFNSIRSLAIRVSVHSLFSMFIIGTVIINCVFMATGPAKNSNSNNTDIAECVFTGIYIFEALIKILARGFILDEFSFLRDPWNWLDSIVIGIAIVSYIPGITIKLLPLRTFRVFRALKAISVVSRLKVIVGALLRSVKKLVNVIILTFFCLSIFALVGQQLFMGSLNLKCISRDCKNISNPEAYDHCFEKKENSPEFKMCGIWMGNSACSIQYECKHTKINPDYNYTNFDNFGWSFLAMFRLMTQDSWEKLYQQTLRTTGLYSVFFFIVVIFLGSFYLINLTLAVVTMAYEEQNKNVAAEIEAKEKMFQEAQQLLKEEKEALVAMGIDRSSLTSLETSYFTPKKRKLFGNKKRKSFFLRESGKDQPPGSDSDEDCQKKPQLLEQTKRLSQNLSLDHFDEHGDPLQRQRALSAVSILTITMKEQEKSQEPCLPCGENLASKYLVWNCCPQWLCVKKVLRTVMTDPFTELAITICIIINTVFLAMEHHKMEASFEKMLNIGNLVFTSIFIAEMCLKIIALDPYHYFRRGWNIFDSIVALLSFADVMNCVLQKRSWPFLRSFRVLRVFKLAKSWPTLNTLIKIIGNSVGALGSLTVVLVIVIFIFSVVGMQLFGRSFNSQKSPKLCNPTGPTVSCLRHWHMGDFWHSFLVVFRILCGEWIENMWECMQEANASSSLCVIVFILITVIGKLVVLNLFIALLLNSFSNEERNGNLEGEARKTKVQLALDRFRRAFCFVRHTLEHFCHKWCRKQNLPQQKEVAGGCAAQSKDIIPLVMEMKRGSETQEELGILTSVPKTLGVRHDWTWLAPLAEEEDDVEFSGEDNAQRITQPEPEQQAYELHQENKKPTSQRVQSVEIDMFSEDEPHLTIQDPRKKSDVTSILSECSTIDLQDGFGWLPEMVPKKQPERCLPKGFGCCFPCCSVDKRKPPWVIWWNLRKTCYQIVKHSWFESFIIFVILLSSGALIFEDVHLENQPKIQELLNCTDIIFTHIFILEMVLKWVAFGFGKYFTSAWCCLDFIIVIVSVTTLINLMELKSFRTLRALRPLRALSQFEGMKVVVNALIGAIPAILNVLLVCLIFWLVFCILGVYFFSGKFGKCINGTDSVINYTIITNKSQCESGNFSWINQKVNFDNVGNAYLALLQVATFKGWMDIIYAAVDSTEKEQQPEFESNSLGYIYFVVFIIFGSFFTLNLFIGVIIDNFNQQQKKLGGQDIFMTEEQKKYYNAMKKLGSKKPQKPIPRPLNKCQGLVFDIVTSQIFDIIIISLIILNMISMMAESYNQPKAMKSILDHLNWVFVVIFTLECLIKIFALRQYYFTNGWNLFDCVVVLLSIVSTMISTLENQEHIPFPPTLFRIVRLARIGRILRLVRAARGIRTLLFALMMSLPSLFNIGLLLFLIMFIYAILGMNWFSKVNPESGIDDIFNFKTFASSMLCLFQISTSAGWDSLLSPMLRSKESCNSSSENCHLPGIATSYFVSYIIISFLIVVNMYIAVILENFNTATEESEDPLGEDDFDIFYEVWEKFDPEATQFIKYSALSDFADALPEPLRVAKPNKYQFLVMDLPMVSEDRLHCMDILFAFTARVLGGSDGLDSMKAMMEEKFMEANPLKKLYEPIVTTTKRKEEERGAAIIQKAFRKYMMKVTKGDQGDQNDLENGPHSPLQTLCNGDLSSFGVAKGKVHCD

SEQ ID NO: 40137 - protein, 1444 aa, Homo sapiens
MDDRCYPVIFPDERNFRPFTSDSLAAIEKRIAIQKEKKKSKDQTGEVPQPRPQLDLKASRKLPKLYGDIPRELIGKPLEDLDPFYRNHKTFMVLNRKRTIYRFSAKHALFIFGPFNSIRSLAIRVSVHSLFSMFIIGTVIINCVFMATGPAKNSNSNNTDIAECVFTGIYIFEALIKILARGFILDEFSFLRDPWNWLDSIVIGIAIVSYIPGITIKLLPLRTFRVFRALKAISVVSRLKVIVGALLRSVKKLVNVIILTFFCLSIFALVGQQLFMGSLNLKCISRDCKNISNPEAYDHCFEKKENSPEFKMCGIWMGNSACSIQYECKHTKINPDYNYTNFDNFGWSFLAMFRLMTQDSWEKLYQQTLRTTGLYSVFFFIVVIFLGSFYLINLTLAVVTMAYEEQNKNVAAEIEAKEKMFQEAQQLLKEEKEALVAMGIDRSSLTSLETSYFTPKKRKLFGNKKRKSFFLRESGKDQPPGSDSDEDCQKKPQLLEQTKRLSQNLSLDHFDEHGDPLQRQRALSAVSILTITMKEQEKSQEPCLPCGENLASKYLVWNCCPQWLCVKKVLRTVMTDPFTELAITICIIINTVFLAMEHHKMEASFEKMLNIGNLVFTSIFIAEMCLKIIALDPYHYFRRGWNIFDSIVALLSFADVMNCVLQKRSWPFLRSFRVLRVFKLAKSWPTLNTLIKIIGNSVGALGSLTVVLVIVIFIFSVVGMQLFGRSFNSQKSPKLCNPTGPTVSCLRHWHMGDFWHSFLVVFRILCGEWIENMWECMQEANASSSLCVIVFILITVIGKLVVLNLFIALLLNSFSNEERNGNLEGEARKTKVQLALDRFRRAFCFVRHTLEHFCHKWCRKQNLPQQKEVAGGCAAQSKDIIPLVMEMKRGSETQEELGILTSVPKTLGVRHDWTWLAPLAEEEDDVEFSGEDNAQRITQPEPEQQAYELHQENKKPTSQRVQSVEIDMFSEDEPHLTIQDPRKKSDVTSILSECSTIDLQDGFGWLPEMVPKKQPERCLPKGFGCCFPCCSVDKRKPPWVIWWNLRKTCYQIVKHSWFESFIIFVILLSSGALIFEDVHLENQPKIQELLNCTDIIFTHIFILEMVLKWVAFGFGKYFTSAWCCLDFIIVIVSVTTLINLMELKSFRTLRALRPLRALSQFEGMKVVVNALIGAIPAILNVLLVCLIFWLVFCILGVYFFSGKFGKCINGTDSVINYTIITNKSQCESGNFSWINQKVNFDNVGNAYLALLQVATFKGWMDIIYAAVDSTEKEQQPEFESNSLGYIYFVVFIIFGSFFTLNLFIGVIIDNFNQQQKKLGGQDIFMTEEQKKYYNAMKKLGSKKPQKPIPRPLNKCQGLVFDIVTSQIFDIIIISLIILNMISMMAESYNQPKAMKSILDHLNWVFVVIFTLECLIKIFALRQYYFTNGWNLFDCVVVLLSIVSK

SEQ ID NO: 40138 - protein, 1753 aa, Homo sapiens
MDDRCYPVIFPDERNFRPFTSDSLAAIEKRIAIQKEKKKSKDQTGEVPQPRPQLDLKASRKLPKLYGDIPRELIGKPLEDLDPFYRNHKTFMVLNRKRTIYRFSAKHALFIFGPFNSIRSLAIRVSVHSLFSMFIIGTVIINCVFMATGPAKNSNSNNTDIAECVFTGIYIFEALIKILARGFILDEFSFLRDPWNWLDSIVIGIAIVSYIPGITIKLLPLRTFRVFRALKAISVVSRLKVIVGALLRSVKKLVNVIILTFFCLSIFALVGQQLFMGSLNLKCISRDCKNISNPEAYDHCFEKKENSPEFKMCGIWMGNSACSIQYECKHTKINPDYNYTNFDNFGWSFLAMFRLMTQDSWEKLYQQTLRTTGLYSVFFFIVVIFLGSFYLINLTLAVVTMAYEEQNKNVAAEIEAKEKMFQEAQQLLKEEKEALVAMGIDRSSLTSLETSYFTPKKRKLFGNKKRKSFFLRESGKDQPPGSDSDEDCQKKPQLLEQTKRLSQNLSLDHFDEHGDPLQRQRALSAVSILTITMKEQEKSQEPCLPCGENLASKYLVWNCCPQWLCVKKVLRTVMTDPFTELAITICIIINTVFLAMEHHKMEASFEKMLNIGNLVFTSIFIAEMCLKIIALDPYHYFRRGWNIFDSIVALLSFADVMNCVLQKRSWPFLRSFRVLRVFKLAKSWPTLNTLIKIIGNSVGALGSLTVVLVIVIFIFSVVGMQLFGRSFNSQKSPKLCNPTGPTVSCLRHWHMGDFWHSFLVVFRILCGEWIENMWECMQEANASSSLCVIVFILITVIGKLVVLNLFIALLLNSFSNEERNGNLEGEARKTKVQLALDRFRRAFCFVRHTLEHFCHKWCRKQNLPQQKEVAGGCAAQSKDIIPLVMEMKRGSETQEELGILTSVPKTLGVRHDWTWLAPLAEEEDDVEFSGEDNAQRITQPEPEQQKSDVTSILSECSTIDLQDGFGWLPEMVPKKQPERCLPKGFGCCFPCCSVDKRKPPWVIWWNLRKTCYQIVKHSWFESFIIFVILLSSGALIFEDVHLENQPKIQELLNCTDIIFTHIFILEMVLKWVAFGFGKYFTSAWCCLDFIIVIVSVTTLINLMELKSFRTLRALRPLRALSQFEGMKVVVNALIGAIPAILNVLLVCLIFWLVFCILGVYFFSGKFGKCINGTDSVINYTIITNKSQCESGNFSWINQKVNFDNVGNAYLALLQVATFKGWMDIIYAAVDSTEKEQQPEFESNSLGYIYFVVFIIFGSFFTLNLFIGVIIDNFNQQQKKLGGQDIFMTEEQKKYYNAMKKLGSKKPQKPIPRPLNKCQGLVFDIVTSQIFDIIIISLIILNMISMMAESYNQPKAMKSILDHLNWVFVVIFTLECLIKIFALRQYYFTNGWNLFDCVVVLLSIVSTMISTLENQEHIPFPPTLFRIVRLARIGRILRLVRAARGIRTLLFALMMSLPSLFNIGLLLFLIMFIYAILGMNWFSKVNPESGIDDIFNFKTFASSMLCLFQISTSAGWDSLLSPMLRSKESCNSSSENCHLPGIATSYFVSYIIISFLIVVNMYIAVILENFNTATEESEDPLGEDDFDIFYEVWEKFDPEATQFIKYSALSDFADALPEPLRVAKPNKYQFLVMDLPMVSEDRLHCMDILFAFTARVLGGSDGLDSMKAMMEEKFMEANPLKKLYEPIVTTTKRKEEERGAAIIQKAFRKYMMKVTKGDQGDQNDLENGPHSPLQTLCNGDLSSFGVAKGKVHCD

SEQ ID NO: 40139 - protein, 491 aa, Homo sapiens
MAGQGLPLHVATLLTGLLECLGFAGVLFGWPSLVFVFKNEDYFKDLCGPDAGPIGNATGQADCKAQDERFSLIFTLGSFMNNFMTFPTGYIFDRFKTTVARLIAIFFYTTATLIIAFTSAGSAVLLFLAMPMLTIGGILFLITNLQIGNLFGQHRSTIITLYNGAFDSSSAVFLIIKLLYEKGISLRASFIFISVCSTWHVARTFLLMPRGHIPYPLPPNYSYGLCPGNGTTKEEKETAEHENRELQSKEFLSAKEETPGAGQKQELRSFWSYAFSRRFAWHLVWLSVIQLWHYLFIGTLNSLLTNMAGGDMARVSTYTNAFAFTQFGVLCAPWNGLLMDRLKQKYQKEARKTGSSTLAVALCSTVPSLALTSLLCLGFALCASVPILPLQYLTFILQVISRSFLYGSNAAFLTLAFPSEHFGKLFGLVMALSAVVSLLQFPIFTLIKGSLQNDPFYVNVMFMLAILLTFFHPFLVYRECRTWKESPSAIA

SEQ ID NO: 40140 - protein, 504 aa, Homo sapiens
MAGQGLPLHVATLLTGLLECLGFAGVLFGWPSLVFVFKNEDYFKDLCGPDAGPIGNATGQAGRLGCMGDLFSTPDCKAQDERFSLIFTLGSFMNNFMTFPTGYIFDRFKTTVARLIAIFFYTTATLIIAFTSAGSAVLLFLAMPMLTIGGILFLITNLQIGNLFGQHRSTIITLYNGAFDSSSAVFLIIKLLYEKGISLRASFIFISVCSTWHVARTFLLMPRGHIPYPLPPNYSYGLCPGNGTTKEEKETAEHENRELQSKEFLSAKEETPGAGQKQELRSFWSYAFSRRFAWHLVWLSVIQLWHYLFIGTLNSLLTNMAGGDMARVSTYTNAFAFTQFGVLCAPWNGLLMDRLKQKYQKEARKTGSSTLAVALCSTVPSLALTSLLCLGFALCASVPILPLQYLTFILQVISRSFLYGSNAAFLTLAFPSEHFGKLFGLVMALSAVVSLLQFPIFTLIKGSLQNDPFYVNVMFMLAILLTFFHPFLVYRECRTWKESPSAIA

SEQ ID NO: 40141 - protein, 308 aa, Homo sapiens
MAGKKNVLSSLAVYAEDSEPESDGEAGIEAVGSAAEEKGGLVSDAYGEDDFSRLGGDEDGYEEEEDENSRQSEDDDSETEKPEADDPKDNTEAEKRDPQELVASFSERVRNMSPDEIKIPPEPPGRCSNHLQDKIQKLYERKIKEGMDMNYIIQRKKEFRNPSIYEKLIQFCAIDELGTNYPKDMFDPHGWSEDSYYEALAKAQKIEMDKLEKAKKERTKIEFVTGTKKGTTTNATSTTTTTASTAVADAQKRKSKWDSAIPVTTIAQPTILTTTATLPAVVTVTTSASGSKTTVISAVGTIVKKAKQ

SEQ ID NO: 40142 - protein, 292 aa, Homo sapiens
MAGKKNVLSSLAVYAEDSEPESDGEAGIEAVGSAAEEKGGLVSDAYGEDDFSRLGGDEDGYEEEEDENSRQSDNTEAEKRDPQELVASFSERVRNMSPDEIKIPPEPPGRCSNHLQDKIQKLYERKIKEGMDMNYIIQRKKEFRNPSIYEKLIQFCAIDELGTNYPKDMFDPHGWSEDSYYEALAKAQKIEMDKLEKAKKERTKIEFVTGTKKGTTTNATSTTTTTASTAVADAQKRKSKWDSAIPVTTIAQPTILTTTATLPAVVTVTTSASGSKTTVISAVGTIVKKAKQ

SEQ ID NO: 40143 - protein, 369 aa, Homo sapiens
MSTGLRYKSKLATPEDKQDIDKQYVGFATLPNQVHRKSVKKGFDFTLMVAGESGLGKSTLVHSLFLTDLYKDRKLLSAEERISQTVEILKHTVDIEEKGVKLKLTIVDTPGFGDAVNNTECWKPITDYVDQQFEQYFRDESGLNRKNIQDNRVHCCLYFISPFGHGLRPVDVGFMKALHEKVNIVPLIAKADCLVPSEIRKLKERIREEIDKFGIHVYQFPECDSDEDEDFKQQDRELKESAPFAVIGSNTVVEAKGQRVRGRLYPWGIVEVENQAHCDFVKLRNMLIRTHMHDLKDVTCDVHYENYRAHCIQQMTSKLTQDSRMESPIPILPLPTPDAETEKLIRMKDEELRRMQEMLQRMKQQMQDQ

SEQ ID NO: 40144 - protein, 346 aa, Homo sapiens
MDSLAAPQDRLVEQLLSPRTQAQRRLKDIDKQYVGFATLPNQVHRKSVKKGFDFTLMVAGESGLGKSTLVHSLFLTDLYKDRKLLSAEERISQTVEILKHTVDIEEKGVKLKLTIVDTPGFGDAVNNTECWKPITDYVDQQFEQYFRDESGLNRKNIQDNRVHCCLYFISPFGHGLRPVDVGFMKALHEKVNIVPLIAKADCLVPSEIRKLKERIREEIDKFGIHVYQFPECDSDEDEDFKQQDRELKESAPFAVIGSNTVVEAKGQRVRGRLYPWGIVEGALRLREAAQHAHPHAYARPQGRDVRRALRELPRALHPADDQQTDPGQPHGEPHPDPAAAHPGRRD

SEQ ID NO: 40145 - protein, 782 aa, Homo sapiens
MLQQPGPRPGRQQPSGDRDACRLHPQGRPPALPTMIPAASSTPPGDALFPSVAPQDFWRSQVTGYSGSVTRHLSHRANNFKRHPKRRKCIRPSPPPPPNTPCPLELVDFGDLHPQRSFRELLFNGCILFGIEFSYAMETAYVTPVLLQMGLPDQLYSLVWFISPILGFLLQPLLGAWSDRCTSRFGRRRPFILVLAIGALLGLSLLLNGRDIGIALADVTGNHKWGLLLTVCGVVLMDFSADSADNPSHAYMMDVCSPADQDRGLNIHALLAGLGGGFGYVVGGIHWDKTGFGRALGGQLRVIYLFTAVTLSVTTVLTLVSIPERPLRPPSEKRAAMKSPSLPLPPSPPVLPEEGPGDSLPSHTATNFSSPISPPSPLTPKYGSFISRDSSLTGISEFASSFGTANIDSVLIDCFTGGHDSYLAIPGSVPRPPISVSFPRAPDGFYRQDRGLLEGREGALTSGCDGDILRVGSLDTSKPRSSGILKRPQTLAIPDAAGGGGPETSRRRNVTFSQQVANILLNGVKYESELTGSSERAEQPLSVGRLCSTICNMPKALRTLCVNHFLGWLSFEGMLLFYTDFMGEVVFQGDPKAPHTSEAYQKYNSGVTMGCWGMCIYAFSAAFYSAILEKLEEFLSVRTLYFIAYLAFGLGTGLATLSRNLYVVLSLCITYGILFSTLCTLPYSLLCDYYQSKKFAGSSADGTRRGMGVDISLLSCQYFLAQILVSLVLGPLTSAVGSANGVMYFSSLVSFLGCLYSSLFVIYEIPPSDAADEEHRPLLLNV

SEQ ID NO: 40146 - protein, 179 aa, Homo sapiens
MAATEPILAATGSPAAVPPEKLEGAGSSSAPERNCVGSSLPEASPPAPEPSSPNAAVPEAIPTPRAAASAALELPLGPAPVSVAPQAEAEARSTPGPAGSRLGPETFRQRFRQFRYQDAAGPREAFRQLRELSRQWLRPDIRTKEQIVEMLVQEQLLAILPEAARARRIRRRTDVRITG

SEQ ID NO: 40147 - protein, 1347 aa, Homo sapiens
MENLPFPLKLLSASSLNAPSSTPWVLDIFLTLVFALGFFFLLLPYLSYFRCDDPPSPSPGKRKCPVGRRRRPRGRMKNHSLRAGRECPRGLQETSDLLSQLQSLLGPHLDKGDFGQLSGPDPPGEVGERAPDGASQSSHEPMEDAAPILSPLASPDPQAKHPQDLASTPSPGPMTTSVSSLSASQPPEPSLPLEHPSPEPPALFPHPPHTPDPLACSPPPPKGFTAPPLRDSTLITPSHCDSVALPLGTVPQSLSPHEDLVASVPAISGLGGSNSHVSASSRWQETARTSCAFNSSVQQDHLSRHPPETYQMEAGSLFLLSSDGQNAVGIQVTETAKVNIWEEKENVGSFTDRMTPEKHLNSLRNLAKSLDAEQDTTNPKPFWNMGENSKQLPGPQKLSDPRLWQESFWKNYSQLFWGLPSLHSESLVANAWVTDRSYTLQSPPFLFNEMSNVCPIQRETTMSPLLFQAQPPSHLGPECQPFISSTPQFRPTPMAQAEAQAHLQSSFPVLSPAFPSLIKNTGVACPASQNKVQALSLPETQHPEWPLLRRQLEGRLALPSRVQKSQDVFSVSTPNLPQESLTSILPENFPVSPELRRQLEQHIKKWIIQHWGNLGRIQESLDLMQLRDESPGTSQAKGKPSPWQSSMSTGESSKEAQKVKFQLERDPCPHLGQILGETPQNLSRDMKSFPRKVLGVTSEESERNLRKPLRSDSGSDLLRCTERTHIENILKAHMGRNLGQTNEGLIPVRVRRSWLAVNQALPVSNTHVKTSNLAAPKSGKACVNTAQVLSFLEPCTQQGLGAHIVRFWAKHRWGLPLRVLKPIQCFKLEKVSSLSLTQLAGPSSATCESGAGSEVEVDMFLRKPPMASLRKQVLTKASDHMPESLLASSPAWKQFQRAPRGIPSWNDHGPLKPPPAGQEGRWPSKPLTYSLTGSTQQSRSLGAQSSKAGETREAVPQCRVPLETCMLANLQATSEDMHGFEAPGTSKSSLHPRVSVSQDPRKLCLMEEVVNEFEPGMATKSETQPQVCAAVVLLPDGQASVVPHASENLVSQVPQGHLQSMPAGNMRASQELHDLMAARRSKLVHEEPRNPNCQGSCKNQRPMFPPIHKSEKSRKPNLEKHEERLEGLRTPQLTPVRKTEDTHQDEGVQLLPSKKQPPSVSHFGGNIKQFFQWIFSKKKSKPAPVTAESQKTVKNRSCVYSSSAEAQGLMTAVGQMLDEKMSLCHARHASKVNQHKQKFQAPVCGFPCNHRHLFYSEHGRILSYAASSQQATLKSQGCPNRDRQIRNQQPLKSVRCNNEQWGLRHPQILHPKKAVSPVSPLQHWPKTSGASSHHHHCPRHCLLWEGI

SEQ ID NO: 40148 - protein, 1347 aa, Homo sapiens
MENLPFPLKLLSASSLNAPSSTPWVLDIFLTLVFALGFFFLLLPYLSYFRCDDPPSPSPGKRKCPVGRRRRPRGRMKNHSLRAGRECRRGLEETSDLLSQLQSLLGPHLDKGDFGQLSGPDPPGEVGERAPDGASQSSHEPMEDAAPILSLLASPDPQAKHPQDLASTPSPGPMTTSVSSLSASQPPEPSLPLEHPSPEPPALFPHPPHTPDPLACSLPPPKGFTAPPLRDSTLITPSHCDSVALPLGTVPQSLSPHEDLVASVPAISGLGGSNSHVSASSRWQETARTSCAFNSSVQQDHLSRHPPETCQMEAGSLFLLSSDGQNVVGIQVTETAKVNIWEEKENVGSFTNRMTPEKHLNSLRNLAKSLDAEQDTTNPKPFWNMGENSKQLPGPQKLSDPRLWQESFWKNYSQLFWGLPSLHSESLVANAWVTDRSYTLQSPPFLFNEMSNVCPIQRETTMSPLLFQAQPLSHLGPECQPFISSTPQFRPTPMAQAEAQAHLQSSFPVLSPAFPSLIQNTGVACPASQNKVQALSLPETQHPEWPLLRRQLEGRLALPSRVQKSQDVFSVSTPNLPQESLTSILPENFPVSPELRRQLEQHIKKWIIQHWGNLGRIQESLDLMQLQDESPGTSQAKGKPSPWQSSMSTGESSKEAQKVKFQLERDPCPHLGQILGETPQNLSRDMKSFPRKVLGVTSEELERNLRKPLRSDSGSDLLRCTERTHIENILKAHMGRNLGQTNEGLIPVRVRRSWLAVNQALPVSNTHVKTSNLAAPKSGKACVNTAQVLSFLEPCTQQGLGAHIVRFWAKHRWGLPLRVLKPIQCFKLEKVSSLSLTQLAGPSSATCESGAGSEVEVDMFLRKPPMASLRKQVLTKASDHMPESLLASSPAWKQFQRAPRGIPSWNDHEPLKPPPAGQEGRWPSKPLTYSLTGSTQQSRSLGAQSSKAGETREAVPQCRVPLETCMLANLQATSEDVHGFEAPGTSKSSLHPRVSVSQDPRKLCLMEEVVSEFEPGMATKSETQPQVCAAVVLLPDGQASVVPHASENLVSQVPQGHLQSMPTGNMRASQELHDLMAARRSKLVHEEPRKPNCQGSCKSQRPMFPPIHKSEKFRKPNLEKHEERLEGLRTPQLTPVRKTEDTHQDEGVQLLPSKKQPPSVSPFGENIKQIFQWIFSKKKSKPAPVTAESQKTVKNRSCVYSSSAEAQGLMTAVGQMLDEKMSLCHARHASKVNQHKQKFQAPVCGFPCNHRHLFYSEHGRILSYAASSQQATLKSQGCPNRDRQIRNQQPLKSVRCNNEQWGLRHPQILHPKKAVSPVSPPQHWPKTSGASSHHHHCPRHCLLWEGI

SEQ ID NO: 40149 - protein, 1347 aa, Homo sapiens
MENLPFPLKLLSASSLNAPSSTPWVLDIFLTLVFALGFFFLLLPYLSYFRCDDPPSPSPGKRKCPVGRRRRPRGRMKNHSLRAGRECRRGLEETSDLLSQLQSLLGPHLDKGDFGQLSGPDPPGEVGERAPDGASQSSHEPMEDAAPILSPLASPDPQAKHPQDLASTPSPGPMTTSVSSLSASQPPEPSLPLEHPSPEPPALFPHPPHTPDPLACSLPPPKGFTAPPLRDSTLITPSHCDSVAFPLGTVPQSLSPHEDLVASVPAISGLGGSNSHVSASSRWQETARTSCAFNSSVQQDHLSRHPPETCQMEAGSLFLLSSDGQNVVGIQVTETAKVNIWEEKENVGSFTNRMTPEKHLNSLRNLAKSLDAEQDTTNPKPFWNMGENSKQLPGPQKLSDPRLWQESFWKNYSQLFWGLPSLHSESLVANAWVTDRSYTLQSPPFLFNEMSNVCPIQRETTMSPLLFQAQPLSHLGPECQPFISSTPQFRPTPMAQAEAQAHLQSSFPVLSPAFPSLIQNTGVACPASQNKVQALSLPETQHPEWPLLRRQLEGRLALPSRVQKSQDVFSVSTPNLPQESLTSILPENFPVSPELRRQLEQHIKKWIIQHWGNLGRIQESLDLMQLRDESPGTSQAKGKPSPWQSSMSTGEGSKEAQKVKFQLERDPCPHLGQILGETPQNLSRDMKSFPRKVLGVTSEELERNLRKPLRSDSGSDLLRCTERTHIENILKAHMGRNLGQTNEGLIPVCVRRSWLAVNQALPVSNTHVKTSNLAAPKSGKACVNTAQVLSFLEPCTQQGLGAHIVRFWAKHRWGLPLRVLKPIQCFKLEKVSSLSLTQLAGPSSATCESGAGSEVEVDMFLRKPPMASLRKQVLTKASDHMPESLLASSPAWKQFQRAPRGIPSWNDHEPLKPPPAGQEGRWPSKPLTYSLTGSIQQSRSLGAQSSKAGETREAVPQCRVPLETCMLANLQATSEDVHGFEAPGTSKSSLHPRVSVSQDPRKLCLMEEVVNEFEPGMATKSETQPQVCAAVVLLPDGQASVVPHASENLVSQVPQGHLQSMPTGNMRASQELHDLMAARRSKLVHEEPRNPNCQGSCKSQRPMFPPIHKSEKSRKPNLEKHEERLEGLRTPQLTPVRKTEDTHQDEGVQLLPSKKQPPSVSPFGENIKQIFQWIFSKKKSKPAPVTAESQKTVKNRSRVYSSSAEAQGLMTAVGQMLDEKMSLCHARHASKVNQHKQKFQAPVCGFPCNHRHLFYSEHGRILSYAASSQQATLKSQGCPNRDRQIRNQQPLKSVRCNNEQWGLRHPQILHPKKAVSPVSPPQHWPKTSGASSHHHHCPRHCLLWEGI

SEQ ID NO: 40150 - protein, 306 aa, Homo sapiens
MAVAVDQQIQTPSVQDLQIVKLEEDSHWEQEISLQGNYPGPETSCQSFWHFRYQEASRPREALLQLQKLCCQWLRPEKCTKEQILELLVLEQFPTVLLQEIQIWVRQQHPESGEEAVALVEDLQKEPGRQRLEPRARPSGRTPPAQLRSPWPMTAAGPASRARASETGSTASCAGRWRTCCAAAAAPSAARSASARTGRSTSSCARAARAPSATEGALTRTPAPRRPLQRRRPGTGPWRPGRQRGAGTAPPGTQPRQRPSPRPTPRRPRPRLARPRAGQKPWLLVIRSMERVMYVMLIIQMETEDV

SEQ ID NO: 40151 - protein, 152 aa, Homo sapiens
MAVAVDQQIQTPSVQDLQIVKLEEDSHWEQEISLQGNYPGPETSCQSFWHFRYQEASRPREALLQLQKLCCQWLRPEKCTKEQILELLVLEQFPTVLLQEIQIWVRQQHPESGEEAVALVEDLQKEPGRQRLEPCLMWLWEFLQRRAGVARR

SEQ ID NO: 40152 - protein, 1343 aa, Homo sapiens
MENLPFPLKLLSASSLNAPSSTPWVLDIFLTLVFALGFFFLLLPYLSYFHCDDPPSPSPGKRKCPVGRRRRPRGRMKNHSLRAGRECPRGLEETSDLLSQLQSLLGPHLDKGDFGQLSGPDPPGEVGERAPDGASQSSHEPMEDAAPILSPLASPDPQAKHPQDLASTPSPGPMTTSVSSLSASQPPEPSLPLEHPSPEPPALFPHPPHTPDPLACSPPPPKGFTAPPLRDSTLITPSHCDSVALPLGTVPQSLSPHEDLVASVPAISGLGGSNSHVSASSRWQETARTSCAFNSSVQQDPLSRHPPETCQMEAGSLFLLSSDGQNVVGIQVTETAKVNIWEEKENVGSFTNQMTPEKHLNSLGNLAKSLDAEQDTTNPKPFWNMGENSKQLPGPQKCSDPRLLQESFWKNYSQLFWGLPSLHSESLVANAWVTDRSYTLQSPPFLFNEMSNVCPIQRETTMSPLLFQAQPLSHRQPFISSTPQFLPTPMAQAEAQAHLQSSFPVLSPAFPSLIKNTGVACPASQNKVQALSLPETQHPEWPLLRKQLEGRLALPSRVQKSQDVFSVSTPNLPQESLTSILPENFPVSPELRRQLEQHIKKWIIQHWGNLGRIQESLDLMQLRDESPGTSQAKGKPSPWQSSTSTGESSKEAQKVKFQLERDLCPHLGQILGETPQNLSRDMKSFPRKVLGVTSEESERNLRKPLRSDSGSDLLRCTERTHIENILKAHMGRNLGQTNEGLIPVRVRRSWLAVNQALPVSNTHVKTSNLAAPKSGKACVNTAQVLSFLEPCTQQGLGAHIVRFWAKHRWGLPLRVLKPIQCFKLEKVSSLSLTQLAGPSSATCESGAGSEVEVDMFLRKPPMASLRKQVLTKASDHMPESLLASSPAWKQFQRAPRGIPSWNDHGPLKPPPAGQEGRWPSKPLTYSLTGSTQQSRSLGAQSSKAGETREAVPQCRVPLETCMLANLQATSEDVHGFEAPGTSKSSLHPRVSVSQDPRKLCLMEEVVSEFEPGMATKSETQPQVCAAVVLLPDGQASVVPHASENLVSQVPQGHLQSMPTGNMRASQELHDLMAARRSKLVQEEPRNPNCQGSCKSQRPMFPPIHKSEKSRKPNLEKHEERLEGLRTPQLTPVRKTEDTHQDEGVQLLPSKKQPPSVSHFGENIKQFFQWIFSKKKSKPAPVTAESQKTVKNRSCVYSSSAEAQGLMTAVGQMLDKKMSLCHAHHASKVNQHKQKFQAPVCGFPCNHRHLFYSEHGRILSYAASSQQATLKSQGCPNRDRQIRNQQPLKSVRCNNEQWGLRHPQILHPKKAVSPVSPPQHWPKTSGASSHHHHCPRHCLLWEGI

SEQ ID NO: 40153 - protein, 530 aa, Homo sapiens
MGSNSGQAGRHIYKSLADDGPFDSVEPPKRPTSRLIMHSMAMFGREFCYAVEAAYVTPVLLSVGLPSSLYSIVWFLSPILGFLLQPVVGSASDHCRSRWGRRRPYILTLGVMMLVGMALYLNGATVVAALIANPRRKLVWAISVTMIGVVLFDFAADFIDGPIKAYLFDVCSHQDKEKGLHYHALFTGFGGALGYLLGAIDWAHLELGRLLGTEFQVMFFFSALVLTLCFTVHLCSISEAPLTEVAKGIPPQQTPQDPPLSSDGMYEYGSIEKVKNGYVNPELAMQGAKNKNHAEQTRRAMTLKSLLRALVNMPPHYRYLCISHLIGWTAFLSNMLFFTDFMGQIVYRGDPYSAHNSTEFLIYERGVEVGCWGLCINSVFSSLYSYFQKVLVSYIGLKGLYFTGYLLFGLGTGFIGLFPNVYSTLVLCSLFGVMSSTLYTVPFNLITEYHREEEKERQQAPGGDPDNSVRGKGMDCATLTCMVQLAQILVGGGLGFLVNTAGTVVVVVITASAVALIGCCFVALFVRYVD

SEQ ID NO: 40154 - protein, 298 aa, Homo sapiens
MGSNSGQAGRHIYKSLADDGPFDSVEPPKRPTSRLIMHSMAMFGREFCYAVEAAYVTPVLLSVGLPSSLYSIVWFLSPILGFLLQPVVGSASDHCRSRWGRRRPYILTLGVMMLVGMALYLNGATVVAALIANPRRKLVWAISVTMIGVVLFDFAADFIDGPIKAYLFDVCSHQDKEKGLHYHALFTQTRRAMTLKSLLRALVNMPPHYRYLCISHLIGWTAFLSNMLFFTDFMGQIVYRGDPYSAHNSTEFLIYERGVEVGCWGLCINSVFSSLYSCKSFSLLRMSSKSFWSSTTWI

SEQ ID NO: 40155 - protein, 471 aa, Homo sapiens
MGSNSGQAGRHIYKSLADDGPFDSVEPPKRPTSRLIMHSMAMFGREFCYAVEAAYVTPVLLSVGLPSSLYSIVWFLSPILGFLLQPVVGSASDHCRSRWGRRRPYILTLGVMMLVGMALYLNGATVVAGFGGALGYLLGAIDWAHLELGRLLGTEFQVMFFFSALVLTLCFTVHLCSISEAPLTEVAKGIPPQQTPQDPPLSSDGMYEYGSIEKVKNGYVNPELAMQGAKNKNHAEQTRRAMTLKSLLRALVNMPPHYRYLCISHLIGWTAFLSNMLFFTDFMGQIVYRGDPYSAHNSTEFLIYERGVEVGCWGLCINSVFSSLYSYFQKVLVSYIGLKGLYFTGYLLFGLGTGFIGLFPNVYSTLVLCSLFGVMSSTLYTVPFNLITEYHREEEKERQQAPGGDPDNSVRGKGMDCATLTCMVQLAQILVGGGLGFLVNTAGTVVVVVITASAVALIGCCFVALFVRYVD

SEQ ID NO: 40156 - protein, 460 aa, Homo sapiens
MGSNSGQAGRHIYKSLADDGPFDSVEPPKRPTSRLIMHSMAMFGREFCYAVEAAYVTPVLLSVGLPSSLYSIVWFLSPILGFLLQPVVGSASDHCRSRWGRRRPYILTLGVMMLVGMALYLNGATVVAALIANPRRKLVWAISVTMIGVVLFDFAADFIDGPIKAYLFDVCSHQDKEKGLHYHALFTGFGGALGYLLGAIDWAHLELGRLLGTEFQVMFFFSALVLTLCFTVHLCSISEAPLTEVAKGIPPQQTPQDPPLSSDGMYEYGSIEKVKNGYVNPELAMQGAKNKNHAEQTRRAMTLKSLLRALVNMPPHYRYLCISHLIGWTAFLSNMLFFTDFMGQIVYRGDPYSAHNSTEFLIYERGVEVGCWGLCINSVFSSLYSYFQKVLVSYIGLKGLYFTGYLLFGLGTGFIGLFPNVYSTLVLCSLFGVMSSTLYTVPFNLITEYHREEEKEVCCH

SEQ ID NO: 40157 - protein, 1325 aa, Homo sapiens
MEAVSRVFPALAGQAPEEQGEIIKVKVKEEDHTWDQESALRRNLSYTRELSRQRFRQFCYQETPGPREALSQLRELCRQWLNPEIHTKEQILELLVLEQFLTILPEELQSWVREHNPESGEEVVTLLEDLERELDEPRQQVSQGTYGQEVSMEEMIPLDSAKESLGTQLQSMEDRMECESPEPHPLQDNGSFLWFSMMSQSMGGDNLSSLDTNEAEIEPENMREKFFRSLARLLENKSNNTKIFSKAKYCQLIKEVKEAKAKAKKESVDYRRLARFDVILVQGNEKLIEAVNGETDKIRYYLHSEDLFDILHNTHLSIGHGGRTRMEKELQAKYKNITKEVIMLYLTLCKPCQQKNSKLKKVLTSKSIKEVSSRCQVDLIDMQLNPDGEYRFILHYQDLCTKLTFLRSLKSKRPTEVAHALLDIFTIIGAPSVLQSDNGREFSSQVVSELSNIWPELKIVHGKSQTCQSQSSAEQTEDIRKRIFSWMQTNNSSHWTEFLWFIQMSQNQPYHRSMQQTPCESAFSSEAKLGLSHSQLTEELVASLHTENELDQADKELENTLRAQYEENIETGTDSSDIEENLSVTPKVAEKSPPESRLRFLSCVVCEKECTGVNSCISCDGNIHAICGVPSQHGTEGCGRQITCSLCYETSTMKRKHDEIQRSLPVKPSKMLKPSGTPFSPDKVGDWMAKQASLDFFVKKRHAFSEHSSSNKRNVNNRSYPEEGKTKRVHASFTRKYDPSYIEFGFVAVIDGEVLKPQCIICGDVLANEAMKPSKLKRHLYSKHKEISSQPKEFFERKSSELKSQPKQVFNVSHINISALRASYKVALPVAKSKTPYTIAETLVKDCIKEVCLEMLGESAAKKVAQVPLSNDTIARRIQELANDMEDQLIEQIKLAKYFSLQLDECRDIANMIILLVYVRFEHDDDIKEEFFFSASLPTNTTSSELYEAVKNYIVNKCGLEFKFCVGVCSDGAASMTGKHSEVVTQIKELAPECKTTHCFIHRESLAMKKISAELNSVLNDIVKIVNYIKSNSLNSRLFSLLCDNMEADHKQLLLHAEIRWLSRGKVLSRMFEIRNELLVFLQGKKPMWSQLFKDVNWTARLAYLSDIFSIFNDLNASMQGKNATYFSMADKVEGQKQKLEAWKNRISTDCYDMFHNLTTIINEVGNDLDIAHLRKVISEHLTNLLECFEFYFPSKEDPRIGNLWIQNPFLSSKDNLNLTVTLQDKLLKLATDEGLKISFENTASLPSFWIKAKNDYPELAEIALKLLLLFPSTYLCETGFSTLSVIKTKHRNSLNIHYPLRVALSSIQPRLDKLTSKKQAHLSH

SEQ ID NO: 40158 - protein, 1347 aa, Homo sapiens
MENLPFPLKLLSASSLNAPSSTPWVLDIFLTLVFALGFFFLLLPYLSYFRCDDPPSPSPGKRKCPVGRRRRPRGRMKNHSLRAGRECPRGLEETSDLLSQLQSLLGPHLDKGDFGQLSGPDPPGEVGERAPDGASQSSHEPMEDAAPILSPLASPDPQAKHPQDLASTPSPGPMTTSVSSLSASQPPEPSLPLEHPSPEPPALFPHPPHTPDPLACSLPPPKGFTAPPLRDSTLITPSHCDSVAFPLGTVPQSLSPHEDLVASVPAISGLGGSNSHVSASSRWQETARTSCAFNSSVQQDHLSRHPPETCQMEAGSLFLLSSDGQNVVGIQVTETAKVNIWEEKENVGSFTNRMTPEKHLNYLRNLAKSLDAEQDTTNPKPFWNMGENSKQLPGPQKLSDPRLWQESFWKNYSQLFWGLPSLHSESLVANAWVTDRSYTLQSPPFLFNEMSNVCPIQRETTMSPLLFQAQPLSHLGPECQPFISSTPQFRPTPMAQAEAQAHLQSSFPVLSPAFPSLIQNTGVACPASQNKVQALSLPETQHPEWPLLRRQLEGRLALPSRVQKSQDVFSVSTPNLPQESLTSILPENFPVSPELRRQLEQHIKKWIIQHWGNLGRIQESLDLMQLRDESPGTSQAKGKPSPWQSSMSTGESSKEAQKVKFQLERDPCPHLGQILGETPQNLSRDMKSFPRKVLGVTSEELERNLRKPLRSDSGSDLLRCTERTHIENILKAHMGRNLGQTNEGLIPVCVRRSWLAVNQALPVSNTHVKTSNLAAPKSGKACVNTAQVLSFLEPCTQQGLGAHIVRFWAKHRWGLPLRVLKPIQCFKLEKVSSLSLTQLAGPSSATCESGAGSEVEVDMFLRKPPMASLRKQVLTKASDHMPESLLASSPAWKQFQRAPRGIPSWNDHEPLKPPPAGQEGRWPSKPLTYSLTGSIQQSRSLGAQSSKAGETREAVPQCRVPLETCMLANLQATSEDVHGFEAPGTSKSSLHPRVSVSQDPRKLCLMEEVVNEFEPGMATKSETQPQVCAAVVLLPDGQASVVPHASENLVSQVPQGHLQSMPTGNMRASQELHDLMAARRSKLVHEEPRNPNCQGSCKSQRPMFPPIHKSEKSRKPNLEKHEERLEGLRTPQLTPVRKTEDTHQDEGVQLLPSKKQPPSVSPFGENIKQIFQWIFSKKKSKPAPVTAESQKTVKNRSRVYSSSAEAQGLMTAVGQMLDEKMSLCHARHASKVNQHKQKFQAPVCGFPCNHRHLFYSEHGRILSYAASSQQATLKSQGCPNRDRQIRNQQPLKSVRCNNEQWGLRHPQILHPKKAVSPVSPPQHWPKTSGASSHHHHCPRHCLLWEGI

SEQ ID NO: 40159 - protein, 1188 aa, Homo sapiens
MENLPFPLKLLSASSLNTPSSTPWVLDIFLTLVFALGLFFLLLPYFSYLRCDNPPSPSPRKRKRHLVSQRHLVSQCPTGRRGRPRGRMKNHSLRACRECPRGLEETWDLLSQLQSLLGPHLEKGDFGQLSGPDPPGEVGKRTPDGASRSSHEPMEDAAPIVSPLASPDPRTKHPQDLASTPPPGPMTTSVSSLSASQPPEPSLLLERPSPEPPALFPHPPHTPDPLACSPPPPKGFTPPPLRDSTLLTPSHCDSVALPLDTVPQSLSPREDLAASVPAISGLGGSNSQVSALSWSQETTKTWCIFNSSVQQDHLSRQRDTTMSPLLFQAQPLSHLGPESQPFISSTPQFRPTPMAQAEAQAHLQSSFPVLSPAFLSPMKNTGVACPASQNKVQALSLPETQHPERPLLRKQLEGGLALPSRVQKSQDVFSVSTPNLPQERLTSILPENFPVSPELWRQLEQYMGQRGRIQESLDLMQLQDELPGTSQAKGKPRPWQSSTSTGESSKEAQTVKFQLERDPCPHLGQILGETPQNLSRGMESFPGKVLGATSEESERNLRKPLRSDSGSDLLRRTERNHIENILKAHMGRKLGQTNEGLIPVSVRRSWLAVNQAFPVSNTHVKTSNLAAPKSRKACVNTAQVLSFLELCTQQVLEAHIVRFWAKHRWGLPLRVLKPIQCFQLEKVSSLSLIQLAGPSSDTCESGAGSKVEVATLLGEPPMASLRKQVLTKPSVHMPERLQASSPACKQFQRAPRGIPSSNDHGSLKAPTAGQEGRWPSKPLTYSLKGSTQQSRSLGAQSSRAGETREAVPQPTVPLGTCMRANLQATSEDVRGFKAPGASKSSLLPRMSVSQDPRKLCLMEEAVSEFEPGMATKSETQPQVSAAVVLLPDGQASVVPHASENLASQVPQGHLQSTPTGNMQASQELCDLMSARRSNMGHKEPRNPNCQGSCKSQSPMFPPTHKRENSRKPNLEKHEEMFQGLRTPQLTPGRKTEDTRQNEGVQLLPSKKQPPSISHFGENIKQFFETIFSKKERKPAPVTAESQKTVKNRSCVYGSSAEAERLMTAVGQIPEENMSLCHARHASKVNQQRQQFQAPVCGFPCNHRHPFYSDHSRMLSYAASSQQATLKNQSRPNRDRQIRDQQPLKSVRCNNEQWGLRHPQLLLPKKAVSPVSPPQHRPKTPSASSHHHH

SEQ ID NO: 40160 - protein, 688 aa, Homo sapiens
MENLPFPLKLLSASSLNTPSSTPWVLDIFLTLVFALGLFFLLLPYFSYLRCDNPPSPSPRKRKRHLVSQRHLVSQCPTGRRGRPRGRMKNHSLRACRECPRGLEETWDLLSQLQSLLGPHLEKGDFGQLSGPDPPGEVGKRTPDGASRSSHEPMEDAAPIVSPLASPDPRTKHPQDLASTPPPGPMTTSVSSLSASQPPEPSLLLERPSPEPPALFPHPPHTPDPLACSPPPPKGFTPPPLRDSTLLTPSHCDSVALPLDTVPQSLSPREDLAASVPAISGLGGSNSQVSALSWSQETTKTWCIFNSSVQQDHLSRQRDTTMSPLLFQAQPLSHLGPESQPFISSTPQFRPTPMAQAEAQAHLQSSFPVLSPAFLSPMKNTGVACPASQNKVQALSLPETQHPERPLLRKQLEGGLALPSRVQKSQDVFSVSTPNLPQERLTSILPENFPVSPELWRQLEQYMGQRGRIQESLDLMQLQDELPGTSQAKGKPRPWQSSTSTGESSKEAQTVKFQLERDPCPHLGQILGETPQNLSRGMESFPGKVLGATSEESERNLRKPLRSDSGSDLLRRTERNHIENILKAHMGRKLGQTNEGLIPVSVRRSWLAVNQAFPVSNTHVKTSNLAAPKSRKACVNTAQVLSFLELCTQQVLEAHIVRFWAKHRWGLPLRVLKPIQCFQLEKRPNFGV

SEQ ID NO: 40161 - protein, 434 aa, Homo sapiens
MAATDIARQVGEGCRTVPLAGHVGFDSLPDQLVNKSVSQGFCFNILCVGETGLGKSTLMDTLFNTKFEGEPATHTQPGVQLQSNTYDLQESNVRLKLTIVSTVGFGDQINKEDSYKPIVEFIDAQFEAYLQEELKIRRVLHTYHDSRIHVCLYFIAPTGHSLKSLDLVTMKKLDSKVNIIPIIAKADAISKSELTKFKIKITSELVSNGVQIYQFPTDDESVAEINGTMNAHLPFAVIGSTEELKIGNKMMRARQYPWGTVQVENEAHCDFVKLREMLIRVNMEDLREQTHTRHYELYRRCKLEEMGFKDTDPDSKPFSLQETYEAKRNEFLGELQKKEEEMRQMFVQRVKEKEAELKEAEKELHEKFDRLKKLHQDEKKKLEDKKKSLDDEVNAFKQRKTAAELLQSQGSQAGGSQTLKRDKEKKNNPWLCTE

SEQ ID NO: 40162 - protein, 427 aa, Homo sapiens
MAATDIARQVGEGCRTVPLAGHVGFDSLPDQLVNKSVSQGFCFNILCVGETGLGKSTLMDTLFNTKFEGEPATHTQPGVQLQSNTYDLQESNVRLKLTIVSTVGFGDQINKEDSYKPIVEFIDAQFEAYLQEELKIRRVLHTYHDSRIHVCLYFIAPTGHSLKSLDLVTMKKLDSKVNIIPIIAKADAISKSELTKFKIKITSELVSNGVQIYQFPTDDESVAEINGTMNAHLPFAVIGSTEELKIGNKMMRARQYPWGTVQVENEAHCDFVKLREMLIRVNMEDLREQTHTRHYELYRRCKLEEMGFKDTDPDSKPFSLQETYEAKRNEFLGELQKKEEEMRQMFVQRVKEKEAELKEAEKELHEKFDRLKKLHQDEKKKLEDKKKSLDDEVNAFKQRKTAAELLQSQGSQAGGSQTLKRDKEKKN

SEQ ID NO: 40163 - protein, 267 aa, Homo sapiens
MAATDIARQVGEGCRTVPLAGHVGFDSLPDQLVNKSVSQGFCFNILCVGETGLGKSTLMDTLFNTKFEGEPATHTQPGVQLQSNTYDLQESNVRLKLTIVSTVGFGDQINKEDSYKPIVEFIDAQFEAYLQEELKIRRVLHTYHDSRIHVCLYFIAPTGHSLKSLDLVTMKKLDSKVNIIPIIAKADAISKSELTKFKIKITSELVSNGVQIYQFPTDDESVAEINGTMNAHLPFAVIGSTEELKIGNKMMRARQYPWGTVQAAREV

SEQ ID NO: 40164 - protein, 429 aa, Homo sapiens
MAATDIARQVGEGCRTVPLAGHVGFDSLPDQLVNKSVSQGFCFNILCVGETGLGKSTLMDTLFNTKFEGEPATHTQPGVQLQSNTYDLQESNVRLKLTIVSTVGFGDQINKEDSYKPIVEFIDAQFEAYLQEELKIRRVLHTYHDSRIHVCLYFIAPTGHSLKSLDLVTMKKLDSKVNIIPIIAKADAISKSELTKFKIKITSELVSNGVQIYQFPTDDESVAEINGTMNAHLPFAVIGSTEELKIGNKMMRARQYPWGTVQVENEAHCDFVKLREMLIRVNMEDLREQTHTRHYELYRRCKLEEMGFKDTDPDSKPFSLQETYEAKRNEFLGELQKKEEEMRQMFVQRVKEKEAELKEAEKELHEKFDRLKKLHQDEKKKLEDKKKSLDDEVNAFKQRKTAAELLQSQGSQAGGSQTLKRDKEKKNFF

SEQ ID NO: 40165 - protein, 553 aa, Homo sapiens
MVQRLWVSRLLRHRKAQLLLVNLLTFGLEVCLAAGITYVPPLLLEVGVEEKFMTMVLGIGPVLGLVCVPLLGSASDHWRGRYGRRRPFIWALSLGILLSLFLIPRAGWLAGLLCPDPRPLELALLILGVGLLDFCGQVCFTPLEALLSDLFRDPDHCRQAYSVYAFMISLGGCLGYLLPAIDWDTSALAPYLGTQEECLFGLLTLIFLTCVAATLLVAEEAALGPTEPAEGLSAPSLSPHCCPCRARLAFRNLGALLPRLHQLCCRMPRTLRRLFVAELCSWMALMTFTLFYTDFVGEGLYQGVPRAEPGTEARRHYDEGVRMGSLGLFLQCAISLVFSLVMDRLVQRFGTRAVYLASVAAFPVAAGATCLSHSVAVVTASAALTGFTFSALQILPYTLASLYHREKQVFLPKYRGDTGGASSEDSLMTSFLPGPKPGAPFPNGHVGAGGSGLLPPPPALCGASACDVSVRVVVGEPTEARVVPGRGICLDLAILDSAFLLSQVAPSLFMGSIVQLSQSVTAYMVSAAGLGLVAIYFATQVVFDKSDLAKYSA

SEQ ID NO: 40166 - protein, 1134 aa, Homo sapiens
MENLPFPLKLLSASSLNTPSSTPWVLDIFLTLVFALGFFFLLLPYFSYLRCDNPPSPSPKKRKRHLVSQRPAGRRGRPRGRMKNHSLRACRECPRGLEETWDLLSQLQSLLGPHLEKGDFGQLSGPDPPGEVGKRTPDGASRSSHEPTEDAAPIVSPLASPDPRTKHPQDLASTPPPGPMTTSVSSLSASQPPEPSLLLEHPSPEPPALFPHPPRTPDPLACSPPPPKGFTPPPLRDSTLLTPSHCDSVALPLDTVPQSLSPREDLAASVPGISGLGGSNSQVSALSWSQETTKTWCVFNSSVQQDHLSRQRDTTMSPLLFQAQPLSHLEPESQPFISSTPQFWPTPMAQAEAQAHLQSSFPVLSPAFLSPMKNTGVACPASQNKVQALSLPETQHPERPLLKKQLEGGLALPSRVQKSQDVFSVSTPNLPQERLTSILPENFPVSPELWRQLEQHMGQRGRIQESLDLMQLQDELPGTSQAKGKPRPWQSSTSTGESSKEAQTVKFQLERDPCPHLGQILGETPQNLSRGMESFPGKVLGATSEESERNLRKPLRSDSGSDLLRRTERNHIENILKAHMSRKLGQTNEGLIPVSVRRSWLAVNQAFPVSNTHVKTSNLAAPKSRKACVNTAQVLSFLEPCTQQVLGAHIVRFWAKHRWGLPLRVLKPIQCFQLEKVSSLSLIQLAGPSSDTCESGAGSKVEVATFLGEPPMASLRKQVLTKPSVHMPERLQASSPACKQFQRAPRGIPSSNDHGSLKAPTAGQEGRWPSKPLTYSLTGSTQQSRSLGAQSSRAGETREAVPQPTVPLGTCMRANLQATSEDVRGFKAPGASKSSLLPRMSVSQDPRKLCLMEEAVSEFEPGKATKSETQPQVSATVVLLPDGQASVVPHASENLASQVPQGHLQSMPTGNMQASQELCDLMSARRSNMGHKEPRNPNCQGSCKSQSPMFPPTHKRENSRKPNLEKHEEMFQGLRTPQLTPGRKTEDTRQNEGVQLLPSKKQPPSISHFGENIKQFFQTIFSKKERKPAPVTAESQKTVKNRSCVYGSSAEAERLMTAVGQILEENMSLCHARHASKVNQQRQQFQAPVCGFPCNHRHPFYSEHSRMLSYAASSQQATLKNQSRPNRDRQIRDQ

SEQ ID NO: 40167 - protein, 230 aa, Homo sapiens
MSFKREGDDWSQLNVLKKRRVGDLLASYIPEDEALMLRDGRFACAICPHRPVLDTLAMLTAHRAGKKHLSSLQLFYGKKQPGKERKQNPKHQNELRREETKAEAPLLTQTRLITQSALHRAPHYNSCCRRKYRPEAPGPSVSLSPMPPSEVKLQSGKISREPEPAAGPQAEESATVSAPAPMSPTRRRALDHYLTLRSSGWIPDGRGRWVKDENVEFDSDEEEPPDLPLD

SEQ ID NO: 40168 - protein, 195 aa, Homo sapiens
MLRDGRFACAICPHRPVLDTLAMLTAHRAGKKHLSSLQLFYGKKQPGKERKQNPKHQNELRREETKAEAPLLTQTRLITQSALHRAPHYNSCCRRKYRPEAPGPSVSLSPMPPSEVKLQSGKISREPEPAAGPQAEESATVSAPAPMSPTRRRALDHYLTLRSSGWIPDGRGRWVKDENVEFDSDEEEPPDLPLD

SEQ ID NO: 40169 - protein, 162 aa, Homo sapiens
MSFKREGDDWSQLNVLKKRRVGDLLASYIPEDEALMLRDGRFACAICPHRPVLDTLAMLTAHRAGKKHLSSLQLFYGKKQPGKERKQNPKHQNELRREETKAEAPLLTQTRLITQSALHRAPHYNSCCRRKYRYGTGKPEVGRLRRRQMALKEFSSVYSEEY

SEQ ID NO: 40170 - protein, 1576 aa, Homo sapiens
MENILCFLNSYTETGLSPDSHWLDIDPNFICLSGLGLFILYLFYVVLTLYSSPTEKNNDIQKHQGRAKRRRKGGTFKGFPDWKSFQREEEEERKLLSLLKSFGPPVSCSPRGQHHDTNHFRRLLCPDPVCRVCKRATADIQQLLSWESLKDAAPSVSPLASSASATESSFTLASTPSATPPEDLILSPRPKASPPPPLILSPDLITTLADLFSPSPLRDPLPPQPVSPLDSKFPIDHSPPQQLPFPLLPPHHIERVESSLQPEASLSLNTIFSFGSTLCQDISQAMNPIDSCARHHGPPIPSALPPEDCTVTQSKSSLTILKTFPEMLSLGGSGGSSTSAPTIKGIDHSHLASSEFTWWQPHAKDSFSSNFVPSDFMEELLTLHSSEAFLGGHSVANLIEPVNISFLSHDILALLERQVKKRGDFLMWKENGKKPGSFPKQLRPNYQLNSSRNMLTSIAVKHDLAESFPFWASKGKLEWQHIHQQPPHSKCFEDHLEQKYVQLFWGLPSLHSESLHPTVLVQRGHSSMFVFFNGITNTSISHESPVLPPPQPLSLPSTQPLPLPQTLPQGQSPHLTQVKSLAQPQSPFRALLPSPLFLIRICGVCFHRPQNEARSLLPSEINHLEWNVLQKVQESLWGLPSVVQKSQEDFCPPAPNPELVRKSFKVHVPISIIPGDFPLSSEVRKKLEQHIRRRLIQRRWGLPRRIHESLSLLRPQSKISELSVSERIHGPLNISLVEGQRCNVLKKSASSFPRSFHERSSNMLSMENVGNYQGYSQETVPKDHLLHGPETSSDKDLRSNSERDLETHMMHLSGNDSGVRLGQKQLENALTVRLSKKFEEINEGRMPGTVHSSWHSVKQTMSLPEKSHSQIKHRNLVTLVSEDHCVDTSQEISFLSSNKQKMLEAHIKTFRMRMLWGLPLKVLESIEIFKSKADLSTSFSHFDLPSSATFISQGDSKDGVSKSRSRSTFQGEKLGTTSSVPILDRPHPVSSPVVQEGQGTLRRQFSDTDHDLIETDSKDGASTSLRRGTTDFQSEKLDSTSSFPILGHSYLVTSPVNQEKQGTLRREFSDTDNDLTESVRTTEDGRQTFLPPPHSIVDEVSQKQTVLASRCSAELPIMQAGAGCESWDKRKSSFHNVDRLQGSRKTFPVTNALQSQTRNNLTTSKSGSCSLTNVKASTSNETEIFPPRISVPQDPKSSYLKNQMLSQLKLVQRKHSQPQSHFTDMSFALDNLSSKDLLTNSQGISSGDMGTSQVVHVHLEDSGIRVAQKQEPRVPTCVLQKCQVTNFPPAVNRVSPVRPKGGELDGGDAGLGTSQRRRKSLPVHNKTSGEVLGSKSSPTLKTQPPPENLFRKWMKTSLQWFNKPSISYEEQESSWEKGSSLSSCVQNIGRVIRAAFTGTTEAQKIRKDTREFLEEKLGHRHGIDITCPQEPLSFPVGLGKAQHNPEVHVRAEPVQGCPCNYRAPSCKVTRTKSCSQQAIFVGQNYPTRIRQIIDKDRQPQKVEAFKGKILCQSHPQSMPHRKPVPHPNPTCRRQVSLVCPAVPTSAKSPVFSDVPFLTGQKMLPKHLQGGKFPPTK

SEQ ID NO: 40171 - protein, 917 aa, Homo sapiens
MENILCFLNSYTETGLSPDSHCLDIDLNFICLSGLGLFILYLFYMVLTLYSSPTEKNNDTQKHQGRARRKRKSVTFKDRKSLQKEAEEERKLHSFLKSFGPPVSCSPLGQHHDTTLFRRLLCPDPVCRVCNRATADIQRLLSWESLKDAAPSVSPLASSASGAESSFTLASTPSATTPEDLILSSRPKPSPPPPLILSPDLITTLADLFSPSPLRDPLPPQPVSPLDSKFPIDHSPPQQLPFPLLPPHHIERVEPSLQPEASLSLNTIFSFGSTLCQDISQAVNRTDSCARHHGPPTPSALPPEDCTVTQSKSNLTVLKTFPEMLSLGGSGGSSTSAPTTKGIDHSCPASSEFSWWQPHAKDSFSSNFVPSDFMEELLTLHSSEASLGGHSVANIIQPVNISFLSHDIPALLERQVKRRGDFLMWKENGKKPGSFPTQLRPNYQLNSSRNMLTSTAVKHDLAESFPFWASKGKLEWQHIHQQPPYSKCFEDHLEQKYVQLFWGLPSLHSESLHPTVFVQHGRSSMFVFFNGITNTSMSHESPVLPPPQPLFLPSTQPLPLPQTLPRGQSLHLTQVKSLAQPQSPFPALPPSPLFLIRVCGVCFHRPQNEARSLMPSEINHLEWNVLQKVQESVWGLPSVVQKSQEDFCPPAPNPVLVRKSFKVHVPISIIPGDFPLSSEVRKKLEQHIRKRLIQRRWGLPRRIHESLSLLRPQNKISELSVSESIHGPLNISLVEGQRCNVLKKSASSFPRSFHERSSNMLSMENVGNYQGCSQETAPKNHLLHDPETSSEEDLRSNSERDLGTHMMHLSGNDSGVRLGQKQLENALTVHLSKKFEEINEGRMPGTVHSSWHSVKQTICLPEKSHSQIKHRNLAALVSEDHRVDTSQEMSFLSSNKQKMLEAHIKSFHMKPILNLSI

SEQ ID NO: 40172 - protein, 768 aa, Homo sapiens
MKMAPQNADPESMQVQELSVPLPDPQKAGGAEAENCETISEGSIDRIPMRLWVMHGAVMFGREFCYAMETALVTPILLQIGLPEQYYSLTWFLSPILGLIFTPLIGSASDRCTLSWGRRRPFILALCVGVLFGVALFLNGSAIGLALGDVPNRQPIGIVLTVLGVVVLDFSADATEGPIRAYLLDVVDSEEQDMALNIHAFSAGLGGAIGYVLGGLDWTQTFLGSWFRTQNQVLFFFAAIIFTVSVALHLFSIDEEQYSPQQERSAEEPGALDGGEPHGVPAFPDEVQSEHELALDYPDVDIMRSKSDSALHVPDTALDLEPELLFLHDIEPSIFHDASYPATPRSTSQELAKTKLPRLATFLKEAAKEDETLLDNHLNEAKVPNGSGSPTKDALGGYTRVDTKPSATSSSMRRRRHAFRRQASSTFSYYGKLGSHCYRYRRANAVVLIKPSRSMSDLYDMQKRQRQHRHRNQSGATTSSGDTESEEGEGETTVRLLWLSMLKMPRELMRLCLCHLLTWFSVIAEAVFYTDFMGQVIFEGDPKAPSNSTAWQAYNAGVKMGCWGLVIYAATGAICSALLQKYLDNYDLSVRVIYVLGTLGFSVGTAVMAMFPNVYVAMVTISTMGIVSMSISYCPYALLGQYHDIKQYIHHSPGNSKRGFGIDCAILSCQVYISQILVASALGGVVDAVGTVRVIPMVASVGSFLGFLTATFLVIYPNVSEEAKEEQKGLSSPLAGEGRAGGNSEKPTVLKLTRKEGLQGPVETESVV

SEQ ID NO: 40173 - protein, 717 aa, Homo sapiens
MGKASPASGLSRPKTLVSPLRSNQWSLQKGLPEQYYSLTWFLSPILGLIFTPLIGSASDRCTLSWGRRRPFILALCVGVLFGVALFLNGSAIGLALGDVPNRQPIGIVLTVLGVVVLDFSADATEGPIRAYLLDVVDSEEQDMALNIHAFSAGLGGAIGYVLGGLDWTQTFLGSWFRTQNQVLFFFAAIIFTVSVALHLFSIDEEQYSPQQERSAEEPGALDGGEPHGVPAFPDEVQSEHELALDYPDVDIMRSKSDSALHVPDTALDLEPELLFLHDIEPSIFHDASYPATPRSTSQELAKTKLPRLATFLKEAAKEDETLLDNHLNEAKVPNGSGSPTKDALGGYTRVDTKPSATSSSMRRRRHAFRRQASSTFSYYGKLGSHCYRYRRANAVVLIKPSRSMSDLYDMQKRQRQHRHRNQSGATTSSGDTESEEGEGETTVRLLWLSMLKMPRELMRLCLCHLLTWFSVIAEAVFYTDFMGQVIFEGDPKAPSNSTAWQAYNAGVKMGCWGLVIYAATGAICSALLQKYLDNYDLSVRVIYVLGTLGFSVGTAVMAMFPNVYVAMVTISTMGIVSMSISYCPYALLGQYHDIKQYIHHSPGNSKRGFGIDCAILSCQVYISQILVASALGGVVDAVGTVRVIPMVASVGSFLGFLTATFLVIYPNVSEEAKEEQKGLSSPLAGEGRAGGNSEKPTVLKLTRKEGLQGPVETESVV

SEQ ID NO: 40174 - protein, 798 aa, Homo sapiens
MGKASPASGLSRPKTLVSPLRSNQWSLQKGLPEQYYSLTWFLSPILGLIFTPLIGSASDRCTLSWGRRRPFILALCVGVLFGVALFLNGSAIGLALGDVPNRQPIGIVLTVLGVVVLDFSADATEGPIRAYLLDVVDSEEQDMALNIHAFSAGLGGAIGYVLGGLDWTQTFLGSWFRTQNQVLFFFAAIIFTVSVALHLFSIDEEQYSPQQERSAEEPGALDGGEPHGVPAFPDEVQSEHELALDYPDVDIMRSKSDSALHVPDTALDLEPELLFLHDIEPSIFHDASYPATPRSTSQELAKTKLPRLATFLKEAAKEDETLLDNHLNEAKVPNGSGSPTKDALGGYTRVDTKPSATSSSMRRRRHAFRRQASSTFSYYGKLGSHCYRYRRANAVVLIKPSRSMSDLYDMQKRQRQHRHRNQSGATTSSGDTESEEGEGETTVRLLWLSMLKMPRELMRLCLCHLLTWFSVIAEAVFYTDFMGQVIFEGDPKAPSNSTAWQAYNAGVKMGCWGLVIYAATGAICSALLQKYLDNYDLSVRVIYVLGTLGFSVGTAVMAMFPNVYVAMVTISTMGIVSMSISYCPYALLGQYHDIKQYIHHSPGNSKRGFGIDCAILSCQVYISQILVASALGGVVDAVGTVRVIPMVASVGSFLGFLTATFLVIYPNVSEEAKEEQKGLSSPLAGEGRAGGNSEKPTVLKLTRKEGLQGPVETERLQVLTSVRSRHIGWCRSCWRVFFFMIILEKKFSFPQCGSLRRMTYLLFLSELDTLCPGQPCPWAATAHQSWEEAGPGGLGRRQ

SEQ ID NO: 40175 - protein, 664 aa, Homo sapiens
MSGVRGLSRLLSARRLALAKAWPTVLQTGTRGFHFTVDGNKRASAKVSDSISAQYPVVDHEFDAVVVGAGGAGLRAAFGLSEAGFNTACVTKLFPTRSHTVAAQGGINAALGNMEEDNWRWHFYDTVKGSDWLGDQDAIHYMTEQAPAAVVELENYGMPFSRTEDGKIYQRAFGGQSLKFGKGGQAHRCCCVADRTGHSLLHTLYGRSLRYDTSYFVEYFALDLLMENGECRGVIALCIEDGSIHRIRAKNTVVATGGYGRTYFSCTSAHTSTGDGTAMITRAGLPCQDLEFVQFHPTGIYGAGCLITEGCRGEGGILINSQGERFMERYAPVAKDLASRDVVSRSMTLEIREGRGCGPEKDHVYLQLHHLPPEQLATRLPGISETAMIFAGVDVTKEPIPVLPTVHYNMGGIPTNYKGQVLRHVNGQDQIVPGLYACGEAACASVHGANRLGANSLLDLVVFGRACALSIEESCRPGDKVPPIKPNAGEESVMNLDKLRFADGSIRTSELRLSMQKSMQNHAAVFRVGSVLQEGCGKISKLYGDLKHLKTFDRGMVWNTDLVETLELQNLMLCALQTIYGAEARKESRGAHAREDYKVRIDEYDYSKPIQGQQKKPFEEHWRKHTLSYVDVGTGKVTLEYRPVIDKTLNEADCATVPPAIRSY

SEQ ID NO: 40176 - protein, 616 aa, Homo sapiens
MSGVRGLSRLLSARRLALAKAWPTVLQTGTRGFHFTVDGNKRASAKVSDSISAQYPVVDHEFDAVVVGAGGAGLRAAFGLSEAGFNTACVTKLFPTRSHTVAAQLENYGMPFSRTEDGKIYQRAFGGQSLKFGKGGQAHRCCCVADRTGHSLLHTLYGRSLRYDTSYFVEYFALDLLMENGECRGVIALCIEDGSIHRIRAKNTVVATGGYGRTYFSCTSAHTSTGDGTAMITRAGLPCQDLEFVQFHPTGIYGAGCLITEGCRGEGGILINSQGERFMERYAPVAKDLASRDVVSRSMTLEIREGRGCGPEKDHVYLQLHHLPPEQLATRLPGISETAMIFAGVDVTKEPIPVLPTVHYNMGGIPTNYKGQVLRHVNGQDQIVPGLYACGEAACASVHGANRLGANSLLDLVVFGRACALSIEESCRPGDKVPPIKPNAGEESVMNLDKLRFADGSIRTSELRLSMQKSMQNHAAVFRVGSVLQEGCGKISKLYGDLKHLKTFDRGMVWNTDLVETLELQNLMLCALQTIYGAEARKESRGAHAREDYKVRIDEYDYSKPIQGQQKKPFEEHWRKHTLSYVDVGTGKVTLEYRPVIDKTLNEADCATVPPAIRSY

SEQ ID NO: 40177 - protein, 519 aa, Homo sapiens
MSGVRGLSRLLSARRLALAKAWPTVLQTGTRGFHFTVDGNKRASAKVSDSISAQYPVVDHEFDAVVVGAGGAGLRAAFGLSEAGFNTACVTKLFPTRSHTVAAQGGINAALGNMEEDNWRWHFYDTSTGDGTAMITRAGLPCQDLEFVQFHPTGIYGAGCLITEGCRGEGGILINSQGERFMERYAPVAKDLASRDVVSRSMTLEIREGRGCGPEKDHVYLQLHHLPPEQLATRLPGISETAMIFAGVDVTKEPIPVLPTVHYNMGGIPTNYKGQVLRHVNGQDQIVPGLYACGEAACASVHGANRLGANSLLDLVVFGRACALSIEESCRPGDKVPPIKPNAGEESVMNLDKLRFADGSIRTSELRLSMQKSMQNHAAVFRVGSVLQEGCGKISKLYGDLKHLKTFDRGMVWNTDLVETLELQNLMLCALQTIYGAEARKESRGAHAREDYKVRIDEYDYSKPIQGQQKKPFEEHWRKHTLSYVDVGTGKVTLEYRPVIDKTLNEADCATVPPAIRSY

SEQ ID NO: 40178 - protein, 917 aa, Homo sapiens
MENILCFLNSYTETGLSPDSHCLDIDLNFICLSGLGLFILYLFYMVLTLYSSPTEKNNDTQKHQGRARRKRKSVTFKDRKSLQKEAEEERKLHSFLKSFGPPVSCSPLGQHHDTTLFRRLLCPDPVCRVCNRATADIQRLLSWESLKDAAPSVSPLASSASGAESSFTLASTPSATTPEDLILSSRPKPSPPPPLILSPDLITTLADLFSPSPLRDPLPPQPVSPLDSKFPIDHSPPQQLPFPLLPPHHIERVEPSLQPEASLSLNTIFSFGSTLCQDISQAVNRTDSCARHHGPPTPSALPPEDCTVTQSKSNLTVLKTFPEMLSLGGSGGSSTSAPTTKGIDHSCPASSEFSWWQPHAKDSFSSNFVPSDFMEELLTLHSSEASLGGHSVANIIQPVNISFLSHDIPALLERQVKRRGDFLMWKENGKKPGSFPTQLRPNYQLNSSRNMLTSTAVKHDLAESFPFWASKGKLEWQHIHQQPPYSKCFEDHLEQKYVQLFWGLPSLHSESLHPTVFVQHGRSSMFVFFNGITNTSMSHESPVLPPPQPLFLPSTQPLPLPQTLPRGQSLHLTQVKSLAQPQSPFPALPPSPLFLIRVCGVCFHRPQNEARSLMPSEINHLEWNVLQKVQESVWGLPSVVQKSQEDFCPPAPNPVLVRKSFKVHVPISIIPGDFPLSSEVRKKLEQHIRKRLIQRRWGLPRRIHESLSLLRPQNKISELSVSESIHGPLNISLVEGQRCNVLKKSASSFPRSFHERSSNMLSMENVGNYQGCSQETAPKNHLLHDPETSSDEDLRSNSERDLGTHMMHLSGNDSGVRLGQKQLENALTVHLSKKFEEINEGRMPGTVHSSWHSVKQTICLPEKSHSQIKHRNLAALVSEDHGVDTSQEMSFLSSNKQKMLEAHIKSFHMKPILNLSI

SEQ ID NO: 40179 - protein, 570 aa, Homo sapiens
MEAPEEPAPVRGGPEATLEVRGSRCLRLSAFREELRALLVLAGPAFLVQLMVFLISFISSVFCGHLGKLELDAVTLAIAVINVTGVSVGFGLSSACDTLISQTYGSQNLKHVGVILQRSALVLLLCCFPCWALFLNTQHILLLFRQDPDVSRLTQTYVTIFIPALPATFLYMLQVKYLLNQGIVLPQIVTGVAANLVNALANYLFLHQLHLGVIGSALANLISQYTLALLLFLYILGKKLHQATWGGWSLECLQDWASFLRLAIPSMLMLCMEWWAYEVGSFLSGILGMVELGAQSIVYELAIIVYMVPAGFSVAASVRVGNALGAGDMEQARKSSTVSLLITVLFAVAFSVLLLSCKDHVGYIFTTDRDIINLVAQVVPIYAVSHLFEALACTSGGVLRGSGNQKVGAIVNTIGYYVVGLPIGIALMFATTLGVMGLWSGIIICTVFQAVCFLGFIIQLNWKKACQQAQVHANLKVNNVPRSGNSALPQDPLHPGCPENLEGILTNDVGKTGEPQSDQQMRQEEPLPEHPQDGAKLSRKQLVLRRGLLLLGVFLILLVGILVRFYVRIQ

SEQ ID NO: 40180 - protein, 290 aa, Homo sapiens
MEAPEEPAPVRGGPEATLEVRGSRCLRLSAFREELRALLVLAGPAFLVQLMVFLISFISSVFCGHLGKLELDAVTLAIAVINVTGVSVGFGLSSACDTLISQTYGSQNLKHVGVILQRSALVLLLCCFPCWALFLNTQHILLLFRQDPDVSRLTQTYVTIFIPALPATFLYMLQVKYLLNQGIVLPQIVTGVAANLVNALANYLFLHQLHLGVIGSALANLISQYTLALLLFLYILGKKLHQATWGGWSLECLQDWASFLRLAIPSMLMLCMEWWAYEVGSFLSGLYEDG

SEQ ID NO: 40181 - protein, 586 aa, Homo sapiens
MEAPEEPAPVRGGPEATLEVRGSRCLRLSAFREELRALLVLAGPAFLVQLMVFLISFISSVFCGHLGKLELDAVTLAIAVINVTGVSVGFGLSSACDTLISQTYGSQNLKHVGVILQRSALVLLLCCFPCWALFLNTQHILLLFRQDPDVSRLTQTYVTIFIPALPATFLYMLQVKYLLNQGIVLPQIVTGVAANLVNALANYLFLHQLHLGVIGSALANLISQYTLALLLFLYILGKKLHQATWGGWSLECLQDWASFLRLAIPSMLMLCMEWWAYEVGSFLSGILGMVELGAQSIVYELAIIVYMVPAGFSVAASVRVGNALGAGDMEQARKSSTVSLLITVLFAVAFSVLLLSCKDHVGYIFTTDRDIINLVAQVVPIYAVSHLFEALACTSGGVLRGSGNQKVGAIVNTIGYYVVGLPIGIALMFATTLGVMGLWSGIIICTVFQAVCFLGFIIQLNWKKACQQAQVHANLKVNNVPRSGNSALPQDPLHPGCPENLEGILTNDVGKTGEPQSDQQMRQEEPLPEHPQDGAKLSRKQLVLRRGLLLLGVFLILLAGVRWCDHSSLQPRTLGLQAILLCQPPE

SEQ ID NO: 40182 - protein, 46 aa, Homo sapiens
MALRSIKSIAGSCLCSRQRRCGSSAAIFPEGIFRCLSPKFGQEFPE

SEQ ID NO: 40183 - protein, 109 aa, Homo sapiens
MNPALGNQTDVAGLFLANSSEALERAVRCCTQASVVTDDGFAEGGPDERSLYIMRVVQIAVMCVLSLTVVFGIFFLGCNLLIKSEGMINFLVKDRRPSKEVEAVVVGPY

SEQ ID NO: 40184 - protein, 374 aa, Homo sapiens
MEESDSEKTTEKENLGPRMDPPLGEPEGSLGWVLPNTAMKKKVLLMGKSGSGKTSMRSIIFANYIARDTRRLGATILDRIHSLQINSSLSTYSLVDSVGNTKTFDVEHSHVRFLGNLVLNLWDCGGQDTFMENYFTSQRDNIFRNVEVLIYVFDVESRELEKDMHYYQSCLEAILQNSPDAKIFCLVHKMDLVQEDQRDLIFKEREEDLRRLSRPLECSCFRTSIWDETLYKAWSSIVYQLIPNVQQLEMNLRNFAEIIEADEVLLFERATFLVISHYQCKEQRDAHRFEKISNIIKQFKLSCSKLAASFQSMEVRNSNFAAFIDIFTSNTYVMVVMSDPSIPSAATLINIRNARKHFEKLERVDGPKQCLLMR

SEQ ID NO: 40185 - protein, 346 aa, Homo sapiens
MEESDSEKTTEKENLGPRMDPPLGEPEGSLGWVLPNTAMKKKVLLMGKSGSGKTSMRSIIFANYIARDTRRLGATIDVEHSHVRFLGNLVLNLWDCGGQDTFMENYFTSQRDNIFRNVEVLIYVFDVESRELEKDMHYYQSCLEAILQNSPDAKIFCLVHKMDLVQEDQRDLIFKEREEDLRRLSRPLECSCFRTSIWDETLYKAWSSIVYQLIPNVQQLEMNLRNFAEIIEADEVLLFERATFLVISHYQCKEQRDAHRFEKISNIIKQFKLSCSKLAASFQSMEVRNSNFAAFIDIFTSNTYVMVVMSDPSIPSAATLINIRNARKHFEKLERVDGPKQCLLMR

SEQ ID NO: 40186 - protein, 399 aa, Homo sapiens
MSLQYGAEETPLAGSYGAADSFPKDFGYGVEEEEEEAAAAGGGVGAGAGGGCGPGGADSSKPRILLMGLRRSGKSSIQKVVFHKMSPNETLFLESTNKIYKDDISNSSFVNFQIWDFPGQMDFFDPTFDYEMIFRGTGALIYVIDAQDDYMEALTRLHITVSKAYKVNPDMNFEVFIHKVDGLSDDHKIETQRDIHQRANDDLADAGLEKLHLSFYLTSIYDHSIFEAFSKVVQKLIPQLPTLENLLNIFISNSGIEKAFLFDVVSKIYIATDSSPVDMQSYELCCDMIDVVIDVSCIYGLKEDGSGSAYDKESMAIIKLNNTTVLYLKEVTKFLALVCILREESFERKGLIDYNFHCFRKAIHEVFEVGVTSHRSCGHQTSASSLKALTHNGTPRNAI

SEQ ID NO: 40187 - protein, 282 aa, Homo sapiens
MAAAAPDSRVSEEENLKKTPKKKMKMVTGAVASVLEDEATDTSDSEGSCGSEKDHFYSDDDAIEADSEGDAEPCDKENENDGESSVGTNMGWADAMAKVLNKKTPESKPTILVKNKKLEKEKEKLKQERLEKIKQRDKRLEWEMMCRVKPDVVQDKETERNLQRIATRGVVQLFNAVQKHQKNVDEKVKEAGSSMRKRAKLISTVSKKDFISVLRGMDGSTNETASSRKKPKAKQTEVKSEEGPGWTILRDDFMMGASMKDWDKESDGPDDSRPESASDSDT

SEQ ID NO: 40188 - protein, 154 aa, Homo sapiens [sequence omitted]

SEQ ID NO: 40189 - protein, 103 aa, Homo sapiens
MEAYDQKIAEEEAKAKEEEGVPDEEGWVKVTRRGRRPVLPRTEAASLRVLERERRKRSQKELLNYAWQHRESKMEHLAQLRKKFEEDKQRIELLRAQRKFRPY

SEQ ID NO: 40190 - protein, 461 aa, Homo sapiens
MVSRVQLPPEIQLAQRLAGNEQVTRDRAVRKLRKYIVARTQRAAGGFTHDELLKVWKGLFYCMWMQDKPLLQEELGRTISQLVHAFQTTEAQHLFLQAFWQTMNREWTGIDRLRLDKFYMLMRMVLNESLKVLKMQGWEERQIEELLELLMTEILHPSSQAPNGVKSHFIEIFLEELTKVGAEELTADQNLKFIDPFCRIAARTKDSLVLNNITRGIFETIVEQAPLAIEDLLNELDTQDEEVASDSDESSEGGERGDALSQKRSEKPPAGSICRAEPEAGEEQAGDDRDSGGPVLQFDYEAVANRLFEMASRQSTPSQNRKRLYKVIRKLQDLAGGIFPEDEIPEKACRRLLEGRRQKKTKKQKRLLRLQQERGKGEKEPPSPGMERKRSRRRGVGADPEARAEAGEQPGTAERALLRDQPRGRGQRGARQRRRTPRPLTSARAKAANVQEPEKKKKRRE

SEQ ID NO: 40191 - protein, 465 aa, Homo sapiens
MNVTSLFSFTSPAVKRLLGWKQGDEEEKWAEKAVDALVKKLKKKKGAMEELEKALSCPGQPSNCVTIPRSLDGRLQVSHRKGLPHVIYCRVWRWPDLQSHHELKPLECCEFPFGSKQKEVCINPYHYKRVESPVLPPVLVPRHSEYNPQHSLLAQFRNLGQNEPHMPLNATFPDSFQQPNSHPFPHSPNSSYPNSPGSSSSTYPHSPTSSDPGSPFQMPADTPPPAYLPPEDPMTQDGSQPMDTNMMAPPLPSEINRGDVQAVAYEEPKHWCSIVYYELNNRVGEAFHASSTSVLVDGFTDPSNNKNRFCLGLLSNVNRNSTIENTRRHIGKGVHLYYVGGEVYAECLSDSSIFVQSRNCNYHHGFHPTTVCKIPSGCSLKIFNNQEFAQLLAQSVNHGFETVYELTKMCTIRMSFVKGWGAEYHRQDVTSTPCWIEIHLHGPLQWLDKVLTQMGSPHNPISSVS

SEQ ID NO: 40192 - protein, 137 aa, Homo sapiens
MFVLLFFPFLFLVLPPVLVPRHSEYNPQHSLLAQFRNLGQNEPHMPLNATFPDSFQQPNSHPFPHSPNSSYPNSPGSSSSTYPHSPTSSDPGSPFQMPGRLECSVMFCSHIRQCYHSVTEKLGQPAVEGGFQPWYMT

SEQ ID NO: 40193 - protein, 302 aa, Homo sapiens
MVWFLDFPNSMAPKRQSPLPLQKKKPRPPPALGLEETSASAGLPKKGEKEQQEAIEHIDEVQNEIDRLNEQDSEEILKVEQKYNKLRQPFFQKRSELIAKIPNFGVTTFVNHPQVSSLLGEEDEEALHYLTKVEVTEFEDIKSGYRIDFYFDENPYFENKVFSKEFHLNESGDPSSKSTKIKWKSGKDVTKRSSQTQNKASRKRQHEEPESFFTWFTDHSDAGADELEEVIKDDIWPNPLQYYLVPDMDDEEGGEDDDDDDDDGDEGEEELEDIDEGDEDEGEEDEDDDEGEEGEEDEGEDD

SEQ ID NO: 40194 - protein, 1493 aa, Homo sapiens
MENRPGSFQYVPVQLQGGAPWGFTLKGGLEHCEPLTVSKIEDGGKAALSQKMRTGDELVNINGTPLYGSRQEALILIKGSFRILKLIVRRRNAPVSRPHSWHVAKLLEGCPEAATTMHFPSEAFSLSWHSGCNTSDVCVQWCPLSRHCSTEKSSSIGSMESLEQPGQATYESHLLPIDQNMYPNQRDSAYSSFSASSNASDCALSLRPEEPASTDCIMQGPGPTKAPSGRPNVAETSGGSRRTNGGHLTPSSQMSSRPQEGYQSGPAKAVRGPPQPPVRRDSLQASRAQLLNGEQRRASEPVVPLPQKEKLSLEPVLPARNPNRFCCLSGHDQVTSEGHQNCEFSQPPESSQQGSEHLLMQASTKAVGSPKACDRASSVDSNPLNEASAELAKASFGRPPHLIGPTGHRHSAPEQLLASHLQHVHLDTRGSKGMELPPVQDGHQWTLSPLHSSHKGKKSPCPPTGGTHDQSSKERKTRQVDDRSLVLGHQSQSSPPHGEADGHPSEKGFLDPNRTSRAASELANQQPSASGSLVQQATDCSSTTKAASGTEAGEEGDSEPKECSRMGGRRSGGTRGRSIQNRRKSERFATNLRNEIQRRKAQLQKSKGPLSQLCDTKEPVEETQEPPESPPLTASNTSLLSSCKKPPSPRDKLFNKSMMLRARSSECLSQAPESHESRTGLEGRISPGQRPGQSSLGLNTWWKAPDPSSSDPEKAHAHCGVRGGHWRWSPEHNSQPLVAAAMEGPSNPGDNKELKASTAQAGEDAILLPFADRRKFFEESSKSLSTSHLPGLTTHSNKTFTQRPKPIDQNFQPMSSSCRELRRHPMDQSYHSADQPYHATDQSYHSMSPLQSETPTYSECFASKGLENSMCCKPLHCGDFDYHRTCSYSCSVQGALVHDPCIYCSGEICPALLKRNMMPNCYNCRCHHHQCIRCSVCYHNPQHSALEDSSLAPGNTWKPRKLTVQEFPGDKWNPITGNRKTSQSGREMAHSKTSFSWATPFHPCLENPALDLSSYRAISSLDLLGDFKHALKKSEETSVYEEGSSLASMPHPLRSRAFSESHISLAPQSTRAWGQHRRELFSKGDETQSDLLGARKKAFPPPRPPPPNWEKYRLFRAAQQQKQQQQQQKQQEEEEEEEEEEEEEEEEEEEEAEEEEEELPPQYFSSETSGSCALNPEEVLEQPQPLSFGHLEGSRQGSQSVPAEQESFALHSSDFLPPIRGHLGSQPEQAQPPCYYGIGGLWRTSGQEATESAKQEFQHFSPPSGAPGIPTSYSAYYNISVAKAELLNKLKDQPEMAEIGLGEEEVDHELAQKKIQLIESISRKLSVLREAQRGLLEDINANSALGEEVEANLKAVCKSNEFEKYHLFVGDLDKVVNLLLSLSGRLARVENALNSIDSEANQEKLVLIEKKQQLTGQLADAKELKEHVDRREKLVFGMVSRYLPQDQLQDYQHFVKMKSALIIEQRELEEKIKLGEEQLKCLRESLLLGPSNF

SEQ ID NO: 40195 - protein, 1377 aa, Homo sapiens
MHFPSEAFSLSWHSGCNTSDVCVQWCPLSRHCSTEKSSSIGSMESLEQPGQATYESHLLPIDQNMYPNQRDSAYSSFSASSNASDCALSLRPEEPASTDCIMQGPGPTKAPSGRPNVAETSGGSRRTNGGHLTPSSQMSSRPQEGYQSGPAKAVRGPPQPPVRRDSLQASRAQLLNGEQRRASEPVVPLPQKEKLSLEPVLPARNPNRFCCLSGHDQVTSEGHQNCEFSQPPESSQQGSEHLLMQASTKAVGSPKACDRASSVDSNPLNEASAELAKASFGRPPHLIGPTGHRHSAPEQLLASHLQHVHLDTRGSKGMELPPVQDGHQWTLSPLHSSHKGKKSPCPPTGGTHDQSSKERKTRQVDDRSLVLGHQSQSSPPHGEADGHPSEKGFLDPNRTSRAASELANQQPSASGSLVQQATDCSSTTKAASGTEAGEEGDSEPKECSRMGGRRSGGTRGRSIQNRRKSERFATNLRNEIQRRKAQLQKSKGPLSQLCDTKEPVEETQEPPESPPLTASNTSLLSSCKKPPSPRDKLFNKSMMLRARSSECLSQAPESHESRTGLEGRISPGQRPGQSSLGLNTWWKAPDPSSSDPEKAHAHCGVRGGHWRWSPEHNSQPLVAAAMEGPSNPGDNKELKASTAQAGEDAILLPFADRRKFFEESSKSLSTSHLPGLTTHSNKTFTQRPKPIDQNFQPMSSSCRELRRHPMDQSYHSADQPYHATDQSYHSMSPLQSETPTYSECFASKGLENSMCCKPLHCGDFDYHRTCSYSCSVQGALVHDPCIYCSGEICPALLKRNMMPNCYNCRCHHHQCIRCSVCYHNPQHSALEDSSLAPGNTWKPRKLTVQEFPGDKWNPITGNRKTSQSGREMAHSKTSFSWATPFHPCLENPALDLSSYRAISSLDLLGDFKHALKKSEETSVYEEGSSLASMPHPLRSRAFSESHISLAPQSTRAWGQHRRELFSKGDETQSDLLGARKKAFPPPRPPPPNWEKYRLFRAAQQQKQQQQQQKQQEEEEEEEEEEEEEEEEEEEEAEEEEEELPPQYFSSETSGSCALNPEEVLEQPQPLSFGHLEGSRQGSQSVPAEQESFALHSSDFLPPIRGHLGSQPEQAQPPCYYGIGGLWRTSGQEATESAKQEFQHFSPPSGAPGIPTSYSAYYNISVAKAELLNKLKDQPEMAEIGLGEEEVDHELAQKKIQLIESISRKLSVLREAQRGLLEDINANSALGEEVEANLKAVCKSNEFEKYHLFVGDLDKVVNLLLSLSGRLARVENALNSIDSEANQEKLVLIEKKQQLTGQLADAKELKEHVDRREKLVFGMVSRYLPQDQLQDYQHFVKMKSALIIEQRELEEKIKLGEEQLKCLRESLLLGPSNF

SEQ ID NO: 40196 - protein, 91 aa, Homo sapiens
MWHSVGLTLLVFVATLLIVLLLMVCGWYFVWHLFLSKFKFLRELVGDTGSQEGDHEPSGSETEEDTSSSPHRIRSARQRRAPADEGHRPLT

SEQ ID NO: 40197 - protein, 99 aa, Homo sapiens
MAEGGFDPCECVCSHEHAMRRLINLLRQSQSYCTDTECLQELPGPSGDNGISVTMILVAWMVIALILFLLRPPNLRGSSLPGKPTSPHNGQDPPAPPVD

SEQ ID NO: 40198 - protein, 275 aa, Homo sapiens
MGPAGVAARPGRFFGVYLLYCLNPRYRGRVYVGFTVNTARRVQQHNGGRKKGGAWRTSGRGPWEMVLVVHGFPSSVAALRFEWAWQHPHASRRLAHVGPRLRGETAFAFHLRVLAHMLRAPPWARLPLTLRWVRPDLRQDLCLPPPPHVPLAFGPPPPQAPAPRRRAGPFDDAEPEPDQGDPGACCSLCAQTIQDEEGPLCCPHPGCLLRAHVICLAEEFLQEEPGQLLPLEGQCPCCEKSLLWGDLIWLCQMDTEKEVEDSELEEAHWTDLLET

SEQ ID NO: 40199 - protein, 161 aa, Homo sapiens
MGPAGVAARPGRFFGVYLLYCLNPRYRGRVYVGFTVNTARRVQQHNGGRKKGGAWRTSGRGPWEMVLVVHGFPSSVAALRDEEGPLCCPHPGCLLRAHVICLAEEFLQEEPGQLLPLEGQCPCCEKSLLWGDLIWLCQMDTEKEVEDSELEEAHWTDLLET

SEQ ID NO: 40200 - protein, 375 aa, Homo sapiens
MLLFLLSALVLLTQPLGYLEAEMKTYSHRTMPSACTLVMCSSVESGLPGRDGRDGREGPRGEKGDPGLPGAAGQAGMPGQAGPVGPKGDNGSVGEPGPKGDTGPSGPPGPPGVPGPAGREGPLGKQGNIGPQGKPGPKGEAGPKGEVGAPGMQGSAGARGLAGPKGERGVPGERGVPGNTGAAGSAGAMGPQGSPGARGPPGLKGDKGIPGDKGAKGESGLPDVASLRQQVEALQGQVQHLQAAFSQYKKVELFPNGQSVGEKIFKTAGFVKPFTEAQLLCTQAGGQLASPRSAAENAALQQLVVAKNEAAFLSMTDSKTEGKFTYPTGESLVYSNWAPGEPNDDGGSEDCVEIFTNGKWNDRACGEKRLVVCEF

SEQ ID NO: 40201 - protein, 223 aa, Homo sapiens
MTEEVDFLGQDSDGGSEEVVLTPAELIERLEQAWMNEKFAPELLESKPEIVECVMEQLEHMEENLRRAKREDLKVSIHQMEMERIRYVLSSYLRCRLMKIEKFFPHVLEKEKTRPEGEPSSLSPEELAFAREFMANTESYLKNVALKHMPPNLQKVDLFRAVPKPDLDSYVFLRVRERQENILVEPDTDEQRDYVIDLEKGSQHLIRYKTIAPLVASGAVQLI

SEQ ID NO: 40202 - protein, 100 aa, Homo sapiens
MTEEVDFLGQDSDGGSEEVVLTPAELIERLEQAWMNEKFAPELLESKPEIVECVMEQLEHMEENLRRAKREDLKVSIHQMEMERIRYVLSSYLRCRLMKV

SEQ ID NO: 40203 - protein, 359 aa, Homo sapiens
MRSIRKRWTICTISLLLIFYKTKEIARTEEHQETQLIGDGELSLSRSLVNSSDKIIRKAGSSIFQHNVEGWKINSSLVLEIRKNILRFLDAERDVSVVKSSFKPGDVIHYVLDRRRTLNISHDLHSLLPEVSPMKNRRFKTCAVVGNSGILLDSECGKEIDSHNFVIRCNLAPVVEFAADVGTKSDFITMNPSVVQRAFGGFRNESDREKFVHRLSMLNDSVLWIPAFMVKGGEKHVEWVNALILKNKLKVRTAYPSLRLIHAVRGYWLTNKVPIKRPSTGLLMYTLATRFCDEIHLYGFWPFPKDLNGKAVKYHYYDDLKYRYFSNASPHRMPLEFKTLNVLHNRGALKLTTGKCVKQ

SEQ ID NO: 40204 - protein, 168 aa, Homo sapiens
MRSIRKRWTICTISLLLIFYKTKEIARTEEHQETQLIGDGELSLSRSLVNSSDKIIRKAGSSIFQHNVEGWKINSSLVLEIRKNILRFLDAERDVSVVKSSFKPGDVIHYVLDRRRTLNISHDLHSLLPEVSPMKNRRFKTCAVVGNSGILLDSECGKEIDSHNFVIR

SEQ ID NO: 40205 - protein, 365 aa, Homo sapiens
MNIMDFNVKKLAADAGTFLSRAVQFTEEKLGQAEKTELDAHLENLLSKAECTKIWTEKIMKQTEVLLQPNPNARIEEFVYEKLDRKAPSRINNPELLGQYMIDAGTEFGPGTAYGNALIKCGETQKRIGTADRELIQTSALNFLTPLRNFIEGDYKTIAKERKLLQNKRLDLDAAKTRLKKAKAAETRNSSEQELRITQSEFDRQAEITRLLLEGISSTHAHHLRCLNDFVEAQMTYYAQCYQYMLDLQKQLGSFPSNYLSNNNQTSVTPVPSVLPNAIGSSAMASTSGLVITSPSNLSDLKECSGSRKARVLYDYDAANSTELSLLADEVITVFSVVGMDSDWLMGERGNQKGKVPITYLELLN

SEQ ID NO: 40206 - protein, 386 aa, Homo sapiens
MNIMDFNVKKLAADAGTFLSRAVQFTEEKLGQAEKTELDAHLENLLSKAECTKIWTEKIMKQTEVLLQPNPNARIEEFVYEKLDRKAPSRINNPELLGQYMIDAGTEFGPGTAYGNALIKCGETQKRIGTADRELIQTSALNFLTPLRNFIEGDYKTIAKERKLLQNKRLDLDAAKTRLKKAKAAETRNSQLNSARLEGDNIMIWAEEVTKSEQELRITQSEFDRQAEITRLLLEGISSTHAHHLRCLNDFVEAQMTYYAQCYQYMLDLQKQLGSFPSNYLSNNNQTSVTPVPSVLPNAIGSSAMASTSGLVITSPSNLSDLKECSGSRKARVLYDYDAANSTELSLLADEVITVFSVVGMDSDWLMGERGNQKGKVPITYLELLN

SEQ ID NO: 40207 - protein, 265 aa, Homo sapiens
MIDAGTEFGPGTAYGNALIKCGETQKRIGTADRELIQTSALNFLTPLRNFIEGDYKTIAKERKLLQNKRLDLDAAKTRLKKAKAAETRNSSEQELRITQSEFDRQAEITRLLLEGISSTHAHHLRCLNDFVEAQMTYYAQCYQYMLDLQKQLGSFPSNYLSNNNQTSVTPVPSVLPNAIGSSAMASTSGLVITSPSNLSDLKECSGSRKARVLYDYDAANSTELSLLADEVITVFSVVGMDSDWLMGERGNQKGKVPITYLELLN

SEQ ID NO: 40208 - protein, 812 aa, Homo sapiens
MEPLGNWRSLRAPLPPMLLLLLLQVAGPVGALAETLLNAPRAMGTSSSPPSPASVVAPGTTLFEESRLPVFTLDYPHVQIPFEITLWILLASLAKIGFHLYHKLPTIVPESCLLIMVGLLLGGIIFGVDEKSPPAMKTDVFFLYLLPPIVLDAGYFMPTRPFFENIGTIFWYAVVGTLWNSIGIGVSLFGICQIEAFGLSDITLLQNLLFGSLISAVDPVAVLAVFENIHVNEQLYILVFGESLLNDAVTVVLYNLFKSFCQMKTIETIDVFAGIANFFVVGIGGVLIGIFLGFIAAFTTRFTHNIRVIEPLFVFLYSYLSYITAEMFHLSGIMAITACAMTMNKYVEENVSQKSYTTIKYFMKMLSSVSETLIFIFMGVSTVGKNHEWNWAFVCFTLAFCLMWRALGVFVLTQVINRFRTIPLTFKDQFIIAYGGLRGAICFALVFLLPAAVFPRKKLFITAAIVVIFFTVFILGITIRPLVEFLDVKRSNKKQQAVSEEIYCRLFDHVKTGIEDVCGHWGHNFWRDKFKKFDDKYLRKLLIRENQPKSSIVSLYKKLEIKHAIEMAETGMISTVPTFASLNDCREEKIRKVTSSETDEIRELLSRNLYQIRQRTLSYNRHSLTADTSERQAKEILIRRRHSLRESIRKDSSLNREHRASTSTSRYLSLPKNTKLPEKLQKRRTISIADGNSSDSDADAGTTVLNLQPRARRFLPEQFSKKSPQSYKMEWKNEVDVDSGRDMPSTPPTPHSREKGTQTSGLLQQPLLSKDQSGSEREDSLTEGIPPKPPPRLVWRASEPGSRKARFGSEKP

SEQ ID NO: 40209 - protein, 119 aa, Homo sapiens [sequence omitted]

SEQ ID NO: 40210 - protein, 142 aa, Homo sapiens
MAFKDTGKTPVEPEVAIHRIRITLTSRNVKSLEKVCADLIRGAKEKNLKVKGPVRMPTKTLRITTRKTPCGEGSKTWDRFQMRIHKRLIDLHSPSEIVKQITSISIEPGVELIESTDAEPMDTEGQQYTLRSVFESPGTCPF

SEQ ID NO: 40211 - protein, 158 aa, Homo sapiens [sequence omitted]

SEQ ID NO: 40212 - protein, 854 aa, Homo sapiens
MASEGPREPESEGIKLSADVKPFVPRFAGLNVAWLESSEACVFPSSAATYYPFVQEPPVTEQKIYTEDMAFGASTFPPQYLSSEITLHPYAYSPYTLDSTQNVYSVPGSQYLYNQPSCYRGFQTVKHRNENTCPLPQEMKALFKKKTYDEKKTYDQQKFDSERADGTISSEIKSARGSHHLSIYAENSLKSDGYHKRTDRKSRIIAKNVSTSKPEFEFTTLDFPELQGAENNMSEIQKQPKWGPVHSVSTDISLLREVVKPAAVLSKGEIVVKNNPNESVTANAATNSPSCTRELSWTPMGYVVRQTLSTELSAAPKNVTSMINLKTIASSADPKNVSIPSSEALSSDPSYNKEKHIIHPTQKSKASQGSDLEQNEASRKNKKKKEKSTSKYEVLTVQEPPRIEDAEEFPNLAVASERRDRIETPKFQSKQQPQDNFKNNVKKSQLPVQLDLGGMLTALEKKQHSQHAKQSSKPVVVSVGAVPVLSKECASGERGRRMSQMKTPHNPLDSSAPLMKKGKQREIPKAKKPTSLKKIILKERQERKQRLQENAVSPAFTSDDTQDGESGGDDQFPEQAELSGPEGMDELISTPSVEDKSEEPPGTELQRDTEASHLAPNHTTFPKIHSRRFRDYCSQMLSKEVDACVTDLLKELVRFQDRMYQKDPVKAKTKRRLVLGLREVLKHLKLKKLKCVIISPNCEKIQSKGGLDDTLHTIIDYACEQNIPFVFALNRKALGRSLNKAVPVSVVGIFSYDGAQDQFHKMVELTVAARQAYKTMLENVQQELVGEPRPQAPPSLPTQGPSCPAEDGPPALKEKEEPHYIEIWKKHLEAYSGCTLELEESLEASTSQMMNLNL

SEQ ID NO: 40213 - protein, 781 aa, Homo sapiens
MVRVLRSMCLPQLCSHILSVCSGTTSDRNVYSVPGSQYLYNQPSCYRGFQTVKHRNENTCPLPQEMKALFKKKTYDEKKTYDQQKFDSERADGTISSEIKSARGSHHLSIYAENSLKSDGYHKRTDRKSRIIAKNVSTSKPEFEFTTLDFPELQGAENNMSEIQKQPKWGPVHSVSTDISLLREVVKPAAVLSKGEIVVKNNPNESVTANAATNSPSCTRELSWTPMGYVVRQTLSTELSAAPKNVTSMINLKTIASSADPKNVSIPSSEALSSDPSYNKEKHIIHPTQKSKASQGSDLEQNEASRKNKKKKEKSTSKYEVLTVQEPPRIEDAEEFPNLAVASERRDRIETPKFQSKQQPQDNFKNNVKKSQLPVQLDLGGMLTALEKKQHSQHAKQSSKPVVVSVGAVPVLSKECASGERGRRMSQMKTPHNPLDSSAPLMKKGKQREIPKAKKPTSLKKIILKERQERKQRLQENAVSPAFTSDDTQDGESGGDDQFPEQAELSGPEGMDELISTPSVEDKSEEPPGTELQRDTEASHLAPNHTTFPKIHSRRFRDYCSQMLSKEVDACVTDLLKELVRFQDRMYQKDPVKAKTKRRLVLGLREVLKHLKLKKLKCVIISPNCEKIQSKGGLDDTLHTIIDYACEQNIPFVFALNRKALGRSLNKAVPVSVVGIFSYDGAQDQFHKMVELTVAARQAYKTMLENVQQELVGEPRPQAPPSLPTQGPSCPAEDGPPALKEKEEPHYIEIWKKHLEAYSGCTLELEESLEASTSQMMNLNL

SEQ ID NO: 40214 - protein, 786 aa, Homo sapiens
MAFGASTFPPQYLSSEITLHPYAYSPYTLDSTQNVYSVPGSQYLYNQPSCYRGFQTVKHRNENTCPLPQEMKALFKKKTYDEKKTYDQQKFDSERADGTISSEIKSARGSHHLSIYAENSLKSDGYHKRTDRKSRIIAKNVSTSKPEFEFTTLDFPELQGAENNMSEIQKQPKWGPVHSVSTDISLLREVVKPAAVLSKGEIVVKNNPNESVTANAATNSPSCTRELSWTPMGYVVRQTLSTELSAAPKNVTSMINLKTIASSADPKNVSIPSSEALSSDPSYNKEKHIIHPTQKSKASQGSDLEQNEASRKNKKKKEKSTSKYEVLTVQEPPRIEDAEEFPNLAVASERRDRIETPKFQSKQQPQDNFKNNVKKSQLPVQLDLGGMLTALEKKQHSQHAKQSSKPVVVSVGAVPVLSKECASGERGRRMSQMKTPHNPLDSSAPLMKKGKQREIPKAKKPTSLKKIILKERQERKQRLQENAVSPAFTSDDTQDGESGGDDQFPEQAELSGPEGMDELISTPSVEDKSEEPPGTELQRDTEASHLAPNHTTFPKIHSRRFRDYCSQMLSKEVDACVTDLLKELVRFQDRMYQKDPVKAKTKRRLVLGLREVLKHLKLKKLKCVIISPNCEKIQSKGGLDDTLHTIIDYACEQNIPFVFALNRKALGRSLNKAVPVSVVGIFSYDGAQDQFHKMVELTVAARQAYKTMLENVQQELVGEPRPQAPPSLPTQGPSCPAEDGPPALKEKEEPHYIEIWKKHLEAYSGCTLELEESLEASTSQMMNLNL

SEQ ID NO: 40215 - protein, 307 aa, Homo sapiens
MPRSFLVKKIKGDGFQCSGVPAPTYHPLETAYVLPGARGPPGDNGYAPHRLPPSSYDADQKPGLELAPAEPAYPPAAPEEYSDPESPQSSLSARYFRGEAAVTDSYSMDAFFISDGRSRRRRGGGGGDAGGSGDAGGAGGRAGRAGAQAGGGHRHACAECGKTYATSSNLSRHKQTHRSLDSQLARKCPTCGKAYVSMPALAMHLLTHNLRHKCGVCGKAFSRPWLLQGHMRSHTGEKPFGCAHCGKAFADRSNLRAHMQTHSAFKHYRCRQCDKSFALKSYLHKHCEAACAKAAEPPPPTPAGPAS

SEQ ID NO: 40216 - protein, 410 aa, Homo sapiens
MAAAAVGAGHGAGGPGAASSSGGAREGARVAALCLLWYALSAGGNVVNKVILSAFPFPVTVSLCHILALCAGLPPLLRAWRVPPAPPVSGPGPSPHPSSGPLLPPRFYPRYVLPLAFGKYFASVSAHVSIWKVPVSYAHTVKATMPIWVVLLSRIIMKEKQSTKVYLSLIPIISGVLLATVTELSFDMWGLVSALAATLCFSLQNIFSKKVLRDSRIHHLRLLNILGCHAVFFMIPTWVLVDLSAFLVSSDLTYVYQWPWTLLLLAVSGFCNFAQNVIAFSILNLVSPLSYSVANATKRIMVITVSLIMLRNPVTSTNVLGMMTAILGVFLYNKTKYDANQQARKHLLPVTTADLSSKERHRSPLEKPHNGLLFPQHGDYQYGRNNILTDHFQYSRQSYPNSYSLNRYDV

SEQ ID NO: 40217 - protein, 110 aa, Homo sapiens
MVITVSLIMLRNPVTSTNVLGMMTAILGVFLYNKTKYDANQQARKHLLPVTTADLSSKERHRSPLEKPHNGLLFPQHGDYQYGRNNILTDHFQYSRQSYPNSYSLNRYDV

SEQ ID NO: 40218 - protein, 104 aa, Homo sapiens
MKEKQSTKVYLSLIPIISGVLLATVTELSFDMWGLVSALAATLCFSLQNIFSKKVLRDSRIHHLRLLNILGCHAVFFMIPTWVLVDLSAFLVSSDLGLPSENVL

SEQ ID NO: 40219 - protein, 338 aa, Homo sapiens
MDPETRGQEIIKVTPLQQMLASCTGAILTSVIVTPLDVVKIRLQAQNNPLPKGKCFVYSNGLMDHLCVCEEGGNKLWYKKPGNFQGTLDAFFKIIRNEGIKSLWSGLPPTLVMAVPATVIYFTCYDQLSALLRSKLGENETCIPIVAGIVARFGAVTVISPLELIRTKMQSKKFSYVELHRFVSKKVSEDGWISLWRGWAPTVLRDVPFSAMYWYNYEILKKWLCEKSGLYEPTFMINFTSGALSGSFAAVATLPFDVVKTQKQTQLWTYESHKISMPLHMSTWIIMKNIVAKNGFSGLFSGLIPRLIKIAPACAIMISTYEFGKAFFQKQNVRRQQY

SEQ ID NO: 40220 - protein, 304 aa, Homo sapiens
MIQNSRPSLLQPQDVGDTVETLMLHPVIKAFLCGSISGTCSTLLFQPLDLLKTRLQTLQPSDHGSRRVGMLAVLLKVVRTESLLGLWKGMSPSIVRCVPGVGIYFGTLYSLKQYFLRGHPPTALESVMLGVGSRSVAGVCMSPITVIKTRYESGKYGYESIYAALRSIYHSEGHRGLFSGLTATLLRDAPFSGIYLMFYNQTKNIVPHDQVDATLIPITNFSCGIFAGILASLVTQPADVIKTHMQLYPLKFQWIGQAVTLIFKDYGLRGFFQGGIPRALRRTLMAAMAWTVYEEMMAKMGLKS

SEQ ID NO: 40221 - protein, 435 aa, Homo sapiens
MEGQTPGSRGLPEKPHPATAAATLSSMGAVFILMKSALGAGLLNFPWAFSKAGGVVPAFLVELVSLVFLISGLVILGYAAAVSGQATYQGVVRGLCGPAIGKLCEACFLLNLLMISVAFLRVIGDQLEKLCDSLLSGTPPAPQPWYADQRFTLPLLSVLVILPLSAPREIAFQKYTSILGTLAACYLALVITVQYYLWPQGLVRESHPSLSPASWTSVFSVFPTICFGFQCHEAAVSIYCSMRKRSLSHWALVSVLSLLACCLIYSLTGVYGFLTFGTEVSADVLMSYPGNDMVIIVARVLFAVSIVTVYPIVLFLGRSVMQDFWRRSCLGGWGPSALADPSGLWVRMPLTILWVTVTLAMALFMPDLSEIVSIIGGISSFFIFIFPGLCLICAMGVEPIGPRVKCCLEVWGVVSVLVGTFIFGQSTAAAVWEMF

SEQ ID NO: 40222 - protein, 391 aa, Homo sapiens
MAEESSCTRDCMSFSVLNWDQVSRLHEVLTEVVPIHGRGNFPTLEITLKDIVQTVRSRLEEAGIKVHDVRLNGSAAGHVLVKDNGLGCKDLDLIFHVALPTEAEFQLVRDVVLCSLLNFLPEGVNKLKISPVTLKEAYVQKLVKVCTDTDRWSLISLSNKNGKNVELKFVDSIRRQFEFSVDSFQIILDSLLFFYDCSNNPISEHFHPTVIGESMYGDFEEAFDHLQNRLIATKNPEEIRGGGLLKYSNLLVRDFRPTDQEEIKTLERYMCSRFFIDFPDILEQQRKLETYLQNHFAEEERSKYDYLMILRRVVNESTVCLMGHERRQTLNLISLLALRVLAEQNIIPSATNVTCYYQPAPYVSDGNFSNYYVAHPPVTYSQPYPTWLPCN

SEQ ID NO: 40223 - protein, 348 aa, Homo sapiens
MPRSFLVKKVKLDAFSSADLESAYGRARSDLGAPLHDKGYLSDYVGPSSVYDGDAEAALLKGPSPEPMYAAAVRGELGPAAAGSAPPPTPRPELATAAGGYINGDAAVSEGYAADAFFITDGRSRRKASNAGSAAAPSTASAAAPDGDAGGGGGAGGRSLGSGPGGRGGTRAGAGTEARAGPGAAGAGGRHACGECGKTYATSSNLSRHKQTHRSLDSQLARRCPTCGKVYVSMPAMAMHLLTHDLRHKCGVCGKAFSRPWLLQGHMRSHTGEKPFGCAHCGKAFADRSNLRAHMQTHSAFKHFQCKRCKKSFALKSYLNKHYESACFKGGAGGPAAPAPPQLSPVQA

SEQ ID NO: 40224 - protein, 606 aa, Homo sapiens
MPSSVTALGQARSSGPGMAPSACCCSPAALQRRLPILAWLPSYSLQWLKMDFVAGLSVGLTAIPQALAYAEVAGLPPQYGLYSAFMGCFVYFFLGTSRDVTLGPTAIMSLLVSFYTFHEPAYAVLLAFLSGCIQLAMGVLRLGFLLDFISYPVIKGFTSAAAVTIGFGQIKNLLGLQNIPRPFFLQVYHTFLRIAETRVGDAVLGLVCMLLLLVLKLMRDHVPPVHPEMPPGVRLSRGLVWAATTARNALVVSFAALVAYSFEVTGYQPFILTGETAEGLPPVRIPPFSVTTANGTISFTEMVQDMGAGLAVVPLMGLLESIAVAKAFASQNNYRIDANQELLAIGLTNMLGSLVSSYPVTGSFGRTAVNAQSGVCTPAGGLVTGVLVLLSLDYLTSLFYYIPKSALAAVIIMAVAPLFDTKIFRTLWRVKRLDLLPLCVTFLLCFWEVQYGILAGALVSLLMLLHSAARPETKVSEGPVLVLQPASGLSFPAMEALREEILSRALEVSPPRCLVLECTHVCSIDYTVVLGLGELLQDFQKQGVALAFVGLQVPVLRVLLSADLKGFQYFSTLEEAEKHLRQEPGTQPYNIREDSILDQKVALLKA

SEQ ID NO: 40225 - protein, 755 aa, Homo sapiens
MARKLSVILILTFALSVTNPLHELKAAAFPQTTEKISPNWESGINVDLAISTRQYHLQQLFYRYGENNSLSVEGFRKLLQNIGIDKIKRIHIHHDHDHHSDHEHHSDHERHSDHEHHSEHEHHSDHDHHSHHNHAASGKNKRKALCPDHDSDSSGKDPRNSQGKGAHRPEHASGRRNVKDSVSASEVTSTVYNTVSEGTHFLETIETPRPGKLFPKDVSSSTPPSVTSKSRVSRLAGRKTNESVSEPRKGFMYSRNTNENPQECFNASKLLTSHGMGIQVPLNATEFNYLCPAIINQIDARSCLIHTSEKKAEIPPKTYSLQIAWVGGFIAISIISFLSLLGVILVPLMNRVFFKFLLSFLVALAVGTLSGDAFLHLLPHSHASHHHSHSHEEPAMEMKRGPLFSHLSSQNIEESAYFDSTWKGLTALGGLYFMFLVEHVLTLIKQFKDKKKKNQKKPENDDDVEIKKQLSKYESQLSTNEEKVDTDDRTEGYLRADSQEPSHFDSQQPAVLEEEEVMIAHAHPQEVYNEYVPRGCKNKCHSHFHDTLGQSDDLIHHHHDYHHILHHHHHQNHHPHSHSQRYSREELKDAGVATLAWMVIMGDGLHNFSDGLAIGAAFTEGLSSGLSTSVAVFCHELPHELGDFAVLLKAGMTVKQAVLYNALSAMLAYLGMATGIFIGHYAENVSMWIFALTAGLFMYVALVDMVPEMLHNDASDHGCSRWGYFFLQNAGMLLGFGIMLLISIFEHKIVFRINF

SEQ ID NO: 40226 - protein, 433 aa, Homo sapiens
MGIQVPLNATEFNYLCPAIINQIDARSCLIHTSEKKAEIPPKTYSLQIAWVGGFIAISIISFLSLLGVILVPLMNRVFFKFLLSFLVALAVGTLSGDAFLHLLPHSHASHHHSHSHEEPAMEMKRGPLFSHLSSQNIEESAYFDSTWKGLTALGGLYFMFLVEHVLTLIKQFKDKKKKNQKKPENDDDVEIKKQLSKYESQLSTNEEKVDTDDRTEGYLRADSQEPSHFDSQQPAVLEEEEVMIAHAHPQEVYNEYVPRGCKNKCHSHFHDTLGQSDDLIHHHHDYHHILHHHHHQNHHPHSHSQRYSREELKDAGVATLAWMVIMGDGLHNFSDGLAIGAAFTEGLSSGLSTSVAVFCHELPHELGDFAVLLKAGMTVKQAVLYNALSAMLAYLGMATGIFIGHYAENVSMWIFALTAGLFMYVALVDMVSF

SEQ ID NO: 40227 - protein, 620 aa, Homo sapiens
MLSAIYTVLAGLLFLPLLVNLCCPYFFQDIGYFLKVAAVGRRVRSYGKRRPARTILRAFLEKARQTPHKPFLLFRDETLTYAQVDRRSNQVARALHDHLGLRQGDCVALLMGNEPAYVWLWLGLVKLGCAMACLNYNIRAKSLLHCFQCCGAKVLLVSPELQAAVEEILPSLKKDDVSIYYVSRTSNTDGIDSFLDKVDEVSTEPIPESWRSEVTFSTPALYIYTSGTTGLPKAAMITHQRIWYGTGLTFVSGLKADDVIYITLPFYHSAALLIGIHGCIVAGATLALRTKFSASQFWDDCRKYNVTVIQYIGELLRYLCNSPQKPNDRDHKVRLALGNGLRGDVWRQFVKRFGDICIYEFYAATEGNIGFMNYARKVGAVGRVNYLQKKIITYDLIKYDVEKDEPVRDENGYCVRVPKGEVGLLVCKITQLTPFNGYAGAKAQTEKKKLRDVFKKGDLYFNSGDLLMVDHENFIYFHDRVGDTFRWKGENVATTEVADTVGLVDFVQEVNVYGVHVPDHEGRIGMASIKMKENHEFDGKKLFQHIADYLPSYARPRFLRIQDTIEITGTFKHRKMTLVEEGFNPAVIKDALYFLDDTAKMYVPMTEDIYNAISAKTLKL

SEQ ID NO: 40228 - protein, 567 aa, Homo sapiens
MLSAIYTVLAGLLFLPLLVNLCCPYFFQDIGYFLKVAAVGRRVRSYGKRRPARTILRAFLEKARQTPHKPFLLFRDETLTYAQVDRRSNQVARALHDHLGLRQGDCVALLMGNEPAYVWLWLGLVKLGCAMACLNYNIRAKSLLHCFQCCGAKVLLVSPELQAAVEEILPSLKKDDVSIYYVSRTSNTDGIDSFLDKVDEVSTEPIPESWRSEVTFSTPALYIYTSGTTGATLALRTKFSASQFWDDCRKYNVTVIQYIGELLRYLCNSPQKPNDRDHKVRLALGNGLRGDVWRQFVKRFGDICIYEFYAATEGNIGFMNYARKVGAVGRVNYLQKKIITYDLIKYDVEKDEPVRDENGYCVRVPKGEVGLLVCKITQLTPFNGYAGAKAQTEKKKLRDVFKKGDLYFNSGDLLMVDHENFIYFHDRVGDTFRWKGENVATTEVADTVGLVDFVQEVNVYGVHVPDHEGRIGMASIKMKENHEFDGKKLFQHIADYLPSYARPRFLRIQDTIEITGTFKHRKMTLVEEGFNPAVIKDALYFLDDTAKMYVPMTEDIYNAISAKTLKL

SEQ ID NO: 40229 - protein, 2016 aa, Homo sapiens [sequence omitted]

SEQ ID NO: 40230 - protein, 2015 aa, Homo sapiens [sequence omitted]

SEQ ID NO: 40231 - protein, 1983 aa, Homo sapiens
MANFLLPRGTSSFRRFTRESLAAIEKRMAEKQARGSTTLQESREGLPEEEAPRPQLDLQASKKLPDLYGNPPQELIGEPLEDLDPFYSTQKTFIVLNKGKTIFRFSATNALYVLSPFHPIRRAAVKILVHSLFNMLIMCTILTNCVFMAQHDPPPWTKYVEYTFTAIYTFESLVKILARGFCLHAFTFLRDPWNWLDFSVIIMAYVSENIKLGNVSALRTFRVLRALKTISVISGLKTIVGALIQSVKKLADVMVLTVFCLSVFALIGLQLFMGNLRHKCVRNFTALNGTNGSVEADGLVWESLDLYLSDPENYLLKNGTSDVLLCGNSSDAGTCPEGYRCLKAGENPDHGYTSFDSFAWAFLALFRLMTQDCWERLYQQTLRSAGKIYMIFFMLVIFLGSFYLVNLILAVVAMAYEEQNQATIAETEEKEKRFQEAMEMLKKEHEALTIRGVDTVSRSSLEMSPLAPVNSHERRSKRRKRMSSGTEECGEDRLPKSDSEDGPRAMNHLSLTRGLSRTSMKPRSSRGSIFTFRRRDLGSEADFADDENSTAGESESHHTSLLVPWPLRRTSAQGQPSPGTSAPGHALHGKKNSTVDCNGVVSLLGAGDPEATSPGSHLLRPVMLEHPPDTTTPSEEPGGPQMLTSQAPCVDGFEEPGARQRALSAVSVLTSALEELEESRHKCPPCWNRLAQRYLIWECCPLWMSIKQGVKLVVMDPFTDLTITMCIVLNTLFMALEHYNMTSEFEEMLQVGNLVFTGIFTAEMTFKIIALDPYYYFQQGWNIFDSIIVILSLMELGLSRMSNLSVLRSFRLLRVFKLAKSWPTLNTLIKIIGNSVGALGNLTLVLAIIVFIFAVVGMQLFGKNYSELRDSDSGLLPRWHMMDFFHAFLIIFRILCGEWIETMWDCMEVSGQSLCLLVFLLVMVIGNLVVLNLFLALLLSSFSADNLTAPDEDREMNNLQLALARIQRGLRFVKRTTWDFCCGLLRQRPQKPAALAAQGQLPSCIATPYSPPPPETEKVPPTRKETRFEEGEQPGQGTPGDPEPVCVPIAVAESDTDDQEEDEENSLGTEEESSKQESQPVSGGPEAPPDSRTWSQVSATASSEAEASASQADWRQQWKAEPQAPGCGETPEDSCSEGSTADMTNTAELLEQIPDLGQDVKDPEDCFTEGCVRRCPCCAVDTTQAPGKVWWRLRKTCYHIVEHSWFETFIIFMILLSSGALAFEDIYLEERKTIKVLLEYADKMFTYVFVLEMLLKWVAYGFKKYFTNAWCWLDFLIVDVSLVSLVANTLGFAEMGPIKSLRTLRALRPLRALSRFEGMRVVVNALVGAIPSIMNVLLVCLIFWLIFSIMGVNLFAGKFGRCINQTEGDLPLNYTIVNNKSQCESLNLTGELYWTKVKVNFDNVGAGYLALLQVATFKGWMDIMYAAVDSRGYEEQPQWEYNLYMYIYFVIFIIFGSFFTLNLFIGVIIDNFNQQKKKLGGQDIFMTEEQKKYYNAMKKLGSKKPQKPIPRPLNKYQGFIFDIVTKQAFDVTIMFLICLNMVTMMVETDDQSPEKINILAKINLLFVAIFTGTVLSDIIQKYFFSPTLFRVIRLARIGRILRLIRGAKGIRTLLFALMMSLPALFNIGLLLFLVMFIYSIFGMANFAYVKWEAGIDDMFNFQTFANSMLCLFQITTSAGWDGLLSPILNTGPPYCDPTLPNSNGSRGDCGSPAVGILFFTTYIIISFLIVVNMYIAIILENFSVATEESTEPLSEDDFDMFYEIWEKFDPEATQFIEYSVLSDFADALSEPLRIAKPNQISLINMDLPMVSGDRIHCMDILFAFTKRVLGESGEMDALKIQMEEKFMAANPSKISYEPITTTLRRKHEEVSAMVIQRAFRRHLLQRSLKHASFLFRQQAGSGLSEEDAPEREGLIAYVMSENFSRPLGPPSSSSISSTSFPPSYDSVTRATSDNLQVRGSDYSHSEDLADFPPSPDRDRESIV

SEQ ID NO: 40232 - protein, 2016 aa, Homo sapiens
MANFLLPRGTSSFRRFTRESLAAIEKRMAEKQARGSTTLQESREGLPEEEAPRPQLDLQASKKLPDLYGNPPQELIGEPLEDLDPFYSTQKTFIVLNKGKTIFRFSATNALYVLSPFHPIRRAAVKILVHSLFNMLIMCTILTNCVFMAQHDPPPWTKYVEYTFTAIYTFESLVKILARGFCLHAFTFLRDPWNWLDFSVIIMAYVSENIKLGNVSALRTFRVLRALKTISVISGLKTIVGALIQSVKKLADVMVLTVFCLSVFALIGLQLFMGNLRHKCVRNFTALNGTNGSVEADGLVWESLDLYLSDPENYLLKNGTSDVLLCGNSSDAGTCPEGYRCLKAGENPDHGYTSFDSFAWAFLALFRLMTQDCWERLYQQTLRSAGKIYMIFFMLVIFLGSFYLVNLILAVVAMAYEEQNQATIAETEEKEKRFQEAMEMLKKEHEALTIRGVDTVSRSSLEMSPLAPVNSHERRSKRRKRMSSGTEECGEDRLPKSDSEDGPRAMNHLSLTRGLSRTSMKPRSSRGSIFTFRRRDLGSEADFADDENSTAGESESHHTSLLVPWPLRRTSAQGQPSPGTSAPGHALHGKKNSTVDCNGVVSLLGAGDPEATSPGSHLLRPVMLEHPPDTTTPSEEPGGPQMLTSQAPCVDGFEEPGARQRALSAVSVLTSALEELEESRHKCPPCWNRLAQRYLIWECCPLWMSIKQGVKLVVMDPFTDLTITMCIVLNTLFMALEHYNMTSEFEEMLQVGNLVFTGIFTAEMTFKIIALDPYYYFQQGWNIFDSIIVILSLMELGLSRMSNLSVLRSFRLLRVFKLAKSWPTLNTLIKIIGNSVGALGNLTLVLAIIVFIFAVVGMQLFGKNYSELRDSDSGLLPRWHMMDFFHAFLIIFRILCGEWIETMWDCMEVSGQSLCLLVFLLVMVIGNLVVLNLFLALLLSSFSADNLTAPDEDREMNNLQLALARIQRGLRFVKRTTWDFCCGLLRQRPQKPAALAAQGQLPSCIATPYSPPPPETEKVPPTRKETRFEEGEQPGQGTPGDPEPVCVPIAVAESDTDDQEEDEENSLGTEEESSKQQESQPVSGGPEAPPDSRTWSQVSATASSEAEASASQADWRQQWKAEPQAPGCGETPEDSCSEGSTADMTNTAELLEQIPDLGQDVKDPEDCFTEGCVRRCPCCAVDTTQAPGKVWWRLRKTCYHIVEHSWFETFIIFMILLSSGALAFEDIYLEERKTIKVLLEYADKMFTYVFVLEMLLKWVAYGFKKYFTNAWCWLDFLIVDVSLVSLVANTLGFAEMGPIKSLRTLRALRPLRALSRFEGMRVVVNALVGAIPSIMNVLLVCLIFWLIFSIMGVNLFAGKFGRCINQTEGDLPLNYTIVNNKSQCESLNLTGELYWTKVKVNFDNVGAGYLALLQVATFKGWMDIMYAAVDSRGYEEQPQWEYNLYMYIYFVIFIIFGSFFTLNLFIGVIIDNFNQQKKKLGGQDIFMTEEQKKYYNAMKKLGSKKPQKPIPRPLNKYQGFIFDIVTKQAFDVTIMFLICLNMVTMMVETDDQSPEKINILAKINLLFVAIFTGECIVKLAALRHYYFTNSWNIFDFVVVILSIVGTVLSDIIQKYFFSPTLFRVIRLARIGRILRLIRGAKGIRTLLFALMMSLPALFNIGLLLFLVMFIYSIFGMANFAYVKWEAGIDDMFNFQTFANSMLCLFQITTSAGWDGLLSPILNTGPPYCDPTLPNSNGSRGDCGSPAVGILFFTTYIIISFLIVVNMYIAIILENFSVATEESTEPLSEDDFDMFYEIWEKFDPEATQFIEYSVLSDFADALSEPLRIAKPNQISLINMDLPMVSGDRIHCMDILFAFTKRVLGESGEMDALKIQMEEKFMAANPSKISYEPITTTLRRKHEEVSAMVIQRAFRRHLLQRSLKHASFLFRQQAGSGLSEEDAPEREGLIAYVMSENFSRPLGPPSSSSISSTSFPPSYDSVTRATSDNLQVRGSDYSHSEDLADFPPSPDRDRESIV

SEQ ID NO: 40233 - protein, 1962 aa, Homo sapiens
MANFLLPRGTSSFRRFTRESLAAIEKRMAEKQARGSTTLQESREGLPEEEAPRPQLDLQASKKLPDLYGNPPQELIGEPLEDLDPFYSTQKTFIVLNKGKTIFRFSATNALYVLSPFHPIRRAAVKILVHSLFNMLIMCTILTNCVFMAQHDPPPWTKYVEYTFTAIYTFESLVKILARGFCLHAFTFLRDPWNWLDFSVIIMAYVSENIKLGNVSALRTFRVLRALKTISVISGLKTIVGALIQSVKKLADVMVLTVFCLSVFALIGLQLFMGNLRHKCVRNFTALNGTNGSVEADGLVWESLDLYLSDPENYLLKNGTSDVLLCGNSSDAGTCPEGYRCLKAGENPDHGYTSFDSFAWAFLALFRLMTQDCWERLYQQTLRSAGKIYMIFFMLVIFLGSFYLVNLILAVVAMAYEEQNQATIAETEEKEKRFQEAMEMLKKEHEALTIRGVDTVSRSSLEMSPLAPVNSHERRSKRRKRMSSGTEECGEDRLPKSDSEDGPRAMNHLSLTRGLSRTSMKPRSSRGSIFTFRRRDLGSEADFADDENSTAGESESHHTSLLVPWPLRRTSAQGQPSPGTSAPGHALHGKKNSTVDCNGVVSLLGAGDPEATSPGSHLLRPVMLEHPPDTTTPSEEPGGPQMLTSQAPCVDGFEEPGARQRALSAVSVLTSALEELEESRHKCPPCWNRLAQRYLIWECCPLWMSIKQGVKLVVMDPFTDLTITMCIVLNTLFMALEHYNMTSEFEEMLQVGNLVFTGIFTAEMTFKIIALDPYYYFQQGWNIFDSIIVILSLMELGLSRMSNLSVLRSFRLLRVFKLAKSWPTLNTLIKIIGNSVGALGNLTLVLAIIVFIFAVVGMQLFGKNYSELRDSDSGLLPRWHMMDFFHAFLIIFRILCGEWIETMWDCMEVSGQSLCLLVFLLVMVIGNLVVLNLFLALLLSSFSADNLTAPDEDREMNNLQLALARIQRGLRFVKRTTWDFCCGLLRQRPQKPAALAAQGQLPSCIATPYSPPPPETEKVPPTRKETRFEEGEQPGQGTPGDPEPVCVPIAVAESDTDDQEEDEENSLGTEEESSKQTPEDSCSEGSTADMTNTAELLEQIPDLGQDVKDPEDCFTEGCVRRCPCCAVDTTQAPGKVWWRLRKTCYHIVEHSWFETFIIFMILLSSGALAFEDIYLEERKTIKVLLEYADKMFTYVFVLEMLLKWVAYGFKKYFTNAWCWLDFLIVDVSLVSLVANTLGFAEMGPIKSLRTLRALRPLRALSRFEGMRVVVNALVGAIPSIMNVLLVCLIFWLIFSIMGVNLFAGKFGRCINQTEGDLPLNYTIVNNKSQCESLNLTGELYWTKVKVNFDNVGAGYLALLQVATFKGWMDIMYAAVDSRGYEEQPQWEYNLYMYIYFVIFIIFGSFFTLNLFIGVIIDNFNQQKKKLGGQDIFMTEEQKKYYNAMKKLGSKKPQKPIPRPLNKYQGFIFDIVTKQAFDVTIMFLICLNMVTMMVETDDQSPEKINILAKINLLFVAIFTGECIVKLAALRHYYFTNSWNIFDFVVVILSIVGTVLSDIIQKYFFSPTLFRVIRLARIGRILRLIRGAKGIRTLLFALMMSLPALFNIGLLLFLVMFIYSIFGMANFAYVKWEAGIDDMFNFQTFANSMLCLFQITTSAGWDGLLSPILNTGPPYCDPTLPNSNGSRGDCGSPAVGILFFTTYIIISFLIVVNMYIAIILENFSVATEESTEPLSEDDFDMFYEIWEKFDPEATQFIEYSVLSDFADALSEPLRIAKPNQISLINMDLPMVSGDRIHCMDILFAFTKRVLGESGEMDALKIQMEEKFMAANPSKISYEPITTTLRRKHEEVSAMVIQRAFRRHLLQRSLKHASFLFRQQAGSGLSEEDAPEREGLIAYVMSENFSRPLGPPSSSSISSTSFPPSYDSVTRATSDNLQVRGSDYSHSEDLADFPPSPDRDRESIV

SEQ ID NO: 40234 - protein, 1998 aa, Homo sapiens
MANFLLPRGTSSFRRFTRESLAAIEKRMAEKQARGSTTLQESREGLPEEEAPRPQLDLQASKKLPDLYGNPPQELIGEPLEDLDPFYSTQKTFIVLNKGKTIFRFSATNALYVLSPFHPIRRAAVKILVHSLFNMLIMCTILTNCVFMAQHDPPPWTKYVEYTFTAIYTFESLVKILARGFCLHAFTFLRDPWNWLDFSVIIMAYVSENIKLGNVSALRTFRVLRALKTISVISGLKTIVGALIQSVKKLADVMVLTVFCLSVFALIGLQLFMGNLRHKCVRNFTALNGTNGSVEADGLVWESLDLYLSDPENYLLKNGTSDVLLCGNSSDAGTCPEGYRCLKAGENPDHGYTSFDSFAWAFLALFRLMTQDCWERLYQQTLRSAGKIYMIFFMLVIFLGSFYLVNLILAVVAMAYEEQNQATIAETEEKEKRFQEAMEMLKKEHEALTIRGVDTVSRSSLEMSPLAPVNSHERRSKRRKRMSSGTEECGEDRLPKSDSEDGPRAMNHLSLTRGLSRTSMKPRSSRGSIFTFRRRDLGSEADFADDENSTAGESESHHTSLLVPWPLRRTSAQGQPSPGTSAPGHALHGKKNSTVDCNGVVSLLGAGDPEATSPGSHLLRPVMLEHPPDTTTPSEEPGGPQMLTSQAPCVDGFEEPGARQRALSAVSVLTSALEELEESRHKCPPCWNRLAQRYLIWECCPLWMSIKQGVKLVVMDPFTDLTITMCIVLNTLFMALEHYNMTSEFEEMLQVGNLVFTGIFTAEMTFKIIALDPYYYFQQGWNIFDSIIVILSLMELGLSRMSNLSVLRSFRLLRVFKLAKSWPTLNTLIKIIGNSVGALGNLTLVLAIIVFIFAVVGMQLFGKNYSELRDSDSGLLPRWHMMDFFHAFLIIFRILCGEWIETMWDCMEVSGQSLCLLVFLLVMVIGNLVVLNLFLALLLSSFSADNLTAPDEDREMNNLQLALARIQRGLRFVKRTTWDFCCGLLRQRPQKPAALAAQGQLPSCIATPYSPPPPETEKVPPTRKETRFEEGEQPGQGTPGDPEPVCVPIAVAESDTDDQEEDEENSLGTEEESSKQQESQPVSGGPEAPPDSRTWSQVSATASSEAEASASQADWRQQWKAEPQAPGCGETPEDSCSEGSTADMTNTAELLEQIPDLGQDVKDPEDCFTEGCVRRCPCCAVDTTQAPGKVWWRLRKTCYHIVEHSWFETFIIFMILLSSGALAFEDIYLEERKTIKVLLEYADKMFTYVFVLEMLLKWVAYGFKKYFTNAWCWLDFLIVDVSLVSLVANTLGFAEMGPIKSLRTLRALRPLRALSRFEGMRVVVNALVGAIPSIMNVLLVCLIFWLIFSIMGVNLFAGKFGRCINQTEGDLPLNYTIVNNKSQCESLNLTGELYWTKVKVNFDNVGAGYLALLQVYEEQPQWEYNLYMYIYFVIFIIFGSFFTLNLFIGVIIDNFNQQKKKLGGQDIFMTEEQKKYYNAMKKLGSKKPQKPIPRPLNKYQGFIFDIVTKQAFDVTIMFLICLNMVTMMVETDDQSPEKINILAKINLLFVAIFTGECIVKLAALRHYYFTNSWNIFDFVVVILSIVGTVLSDIIQKYFFSPTLFRVIRLARIGRILRLIRGAKGIRTLLFALMMSLPALFNIGLLLFLVMFIYSIFGMANFAYVKWEAGIDDMFNFQTFANSMLCLFQITTSAGWDGLLSPILNTGPPYCDPTLPNSNGSRGDCGSPAVGILFFTTYIIISFLIVVNMYIAIILENFSVATEESTEPLSEDDFDMFYEIWEKFDPEATQFIEYSVLSDFADALSEPLRIAKPNQISLINMDLPMVSGDRIHCMDILFAFTKRVLGESGEMDALKIQMEEKFMAANPSKISYEPITTTLRRKHEEVSAMVIQRAFRRHLLQRSLKHASFLFRQQAGSGLSEEDAPEREGLIAYVMSENFSRPLGPPSSSSISSTSFPPSYDSVTRATSDNLQVRGSDYSHSEDLADFPPSPDRDRESIV

SEQ ID NO: 40235 - protein, 643 aa, Homo sapiens
MLLGASLVGVLLFSKLVLKLPWTQVGFSLLFLYLGSGGWRFIRVFIKTIRRDIFGGLVLLKVKAKVRQCLQERRTVPILFASTVRRHPDKTALIFEGTDTHWTFRQLDEYSSSVANFLQARGLASGDVAAIFMENRNEFVGLWLGMAKLGVEAALINTNLRRDALLHCLTTSRARALVFGSEMASAICEVHASLDPSLSLFCSGSWEPGAVPPSTEHLDPLLKDAPKHLPSCPDKGFTDKLFYIYTSGTTGLPKAAIVVHSRYYRMAALVYYGFRMRPNDIVYDCLPLYHSAGNIVGIGQCLLHGMTVVIRKKFSASRFWDDCIKYNCTIVQYIGELCRYLLNQPPREAENQHQVRMALGNGLRQSIWTNFSSRFHIPQVAEFYGATECNCSLGNFDSQVGACGFNSRILSFVYPIRLVRVNEDTMELIRGPDGVCIPCQPGEPGQLVGRIIQKDPLRRFDGYLNQGANNKKIAKDVFKKGDQAYLTGDVLVMDELGYLYFRDRTGDTFRWKGENVSTTEVEGTLSRLLDMADVAVYGVEVPGTEGRAGMAAVASPTGNCDLERFAQVLEKELPLYARPIFLRLLPELHKTGTYKFQKTELRKEGFDPAIVKDPLFYLDAQKGRYVPLDQEAYSRIQAGEEKL

SEQ ID NO: 40236 - protein, 237 aa, Homo sapiens
MPLTLSTLLQPGRIWTGRRAAEPTPGHNAAWSLSGGGAAVLQAGAETALDPGGILPVVPLLGIWRLALHPGLHQDHQAYLTGDVLVMDELGYLYFRDRTGDTFRWKGENVSTTEVEGTLSRLLDMADVAVYGVEVPGTEGRAGMAAVASPTGNCDLERFAQVLEKELPLYARPIFLRLLPELHKTGTYKFQKTELRKEGFDPAIVKDPLFYLDAQKGRYVPLDQEAYSRIQAGEEKL

SEQ ID NO: 40237 - protein, 760 aa, Homo sapiens
MKTWVKIVFGVATSAVLALLVMCIVLRPSRVHNSEENTMRALTLKDILNGTFSYKTFFPNWISGQEYLHQSADNNIVLYNIETGQSYTILSNRTMKSVNASNYGLSPDRQFVYLESDYSKLWRYSYTATYYIYDLSNGEFVRGNELPRPIQYLCWSPVGSKLAYVYQNNIYLKQRPGDPPFQITFNGRENKIFNGIPDWVYEEEMLATKYALWWSPNGKFLAYAEFNDTDIPVIAYSYYGDEQYPRTINIPYPKAGAKNPVVRIFIIDTTYPAYVGPQEVPVPAMIASSDYYFSWLTWVTDERVCLQWLKRVQNVSVLSICDFREDWQTWDCPKTQEHIEESRTGWAGGFFVSTPVFSYDAISYYKIFSDKDGYKHIHYIKDTVENAIQITSGKWEAINIFRVTQDSLFYSSNEFEEYPGRRNIYRISIGSYPPSKKCVTCHLRKERCQYYTASFSDYAKYYALVCYGPGIPISTLHDGRTDQEIKILEENKELENALKNIQLPKEEIKKLEVDEITLWYKMILPPQFDRSKKYPLLIQVYGGPCSQSVRSVFAVNWISYLASKEGMVIALVDGRGTAFQGDKLLYAVYRKLGVYEVEDQITAVRKFIEMGFIDEKRIAIWGWSYGGYVSSLALASGTGLFKCGIAVAPVSSWEYYASVYTERFMGLPTKDDNLEHYKNSTVMARAEYFRNVDYLLIHGTADDNVHFQNSAQIAKALVNAQVDFQAMWYSDQNHGLSGLSTNHLYTHMTHFLKQCFSLSD

SEQ ID NO: 40238 - protein, 239 aa, Homo sapiens
MILPPQFDRSKKYPLLIQVYGGPCSQSVRSVFAVNWISYLASKEGMVIALVDGRGTAFQGDKLLYAVYRKLGVYEVEDQITAVRKFIEMGFIDEKRIAIWGWSYGGYVSSLALASGTGLFKCGIAVAPVSSWEYYASVYTERFMGLPTKDDNLEHYKNSTVMARAEYFRNVDYLLIHGTADDNVHFQNSAQIAKALVNAQVDFQAMWYSDQNHGLSGLSTNHLYTHMTHFLKQCFSLSD

SEQ ID NO: 40239 - protein, 371 aa, Homo sapiens
MPGCPCPGCGMAGPRLLFLTALALELLERAGGSQPALRSRGTATACRLDNKESESWGALLSGERLDTWICSLLGSLMVGLSGVFPLLVIPLEMGTMLRSEAGAWRLKQLLSFALGGLLGNVFLHLLPEAWAYTCSASPGGEGQSLQQQQQLGLWVIAGILTFLALEKMFLDSKEEGTSQAPNKDPTAAAAALNGGHCLAQPAAEPGLGAVVRSIKVSGYLNLLANTIDNFTHGLAVAASFLVSKKIGLLTTMAILLHEIPHEVGDFAILLRAGFDRWSAAKLQLSTALGGLLGAGFAICTQSPKGVVGCSPAAEETAAWVLPFTSGGFLYIALVNVLPDLLEEEDPWRSLQQLLLLCAGIVVMVLFSLFVD

SEQ ID NO: 40240 - protein, 364 aa, Homo sapiens
MPGCPCPGCGMAGPRLLFLTALALELLERAGGSQPALRSRGTATACRLDNKESESWGALLSGERLDTWICSLLGSLMVGLSGVFPLLVIPLEMGTMLRSEAGAWRLKQLLSFALGGLLGNVFLHLLPEAWAYTCSASPGGEGQSLQQQQQLGLWVIAGILTFLALEKMFLDSKEEGTSQAPNKDPTAAAAALNGGHCLAQPAAEPGLGAVVRSIKVSGYLNLLANTIDNFTHGLAVAASFLVSKKIGLLTTMAILLHEIPHEVGDFAILLRAGFDRWSAAKLQLSTALGGLLGAGFAICTQSPKGVEETAAWVLPFTSGGFLYIALVNVLPDLLEEEDPWRSLQQLLLLCAGIVVMVLFSLFVD

SEQ ID NO: 40241 - protein, 683 aa, Homo sapiens
MAALLLLPLLLLLPLLLLKLHLWPQLRWLPADLAFAVRALCCKRALRARALAAAAADPEGPEGGCSLAWRLAELAQQRAAHTFLIHGSRRFSYSEAERESNRAARAFLRALGWDWGPDGGDSGEGSAGEGERAAPGAGDAAAGSGAEFAGGDGAARGGGAAAPLSPGATVALLLPAGPEFLWLWFGLAKAGLRTAFVPTALRRGPLLHCLRSCGARALVLAPEFLESLEPDLPALRAMGLHLWAAGPGTHPAGISDLLAEVSAEVDGPVPGYLSSPQSITDTCLYIFTSGTTGLPKAARISHLKILQCQGFYQLCGVHQEDVIYLALPLYHMSGSLLGIVGCMGIGATVVLKSKFSAGQFWEDCQQHRVTVFQYIGELCRYLVNQPPSKAERGHKVRLAVGSGLRPDTWERFVRRFGPLQVLETYGLTEGNVATINYTGQRGAVGRASWLYKHIFPFSLIRYDVTTGEPIRDPQGHCMATSPGEPGLLVAPVSQQSPFLGYAGGPELAQGKLLKDVFRPGDVFFNTGDLLVCDDQGFLRFHDRTGDTFRWKGENVATTEVAEVFEALDFLQEVNVYGVTVPGHEGRAGMAALVLRPPHALDLMQLYTHVSENLPPYARPRFLRLQESLATTETFKQQKVRMANEGFDPSTLSDPLYVLDQAVGAYLPLTTARYSALLAGNLRI

SEQ ID NO: 40242 - protein, 648 aa, Homo sapiens
MAALLLLPLLLLLPLLLLKLHLWPQLRWLPADLAFAVRALCCKRALRARALAAAAADPEGPEGGCSLAWRLAELAQQRAAHTFLIHGSRRFSYSEAERESNRAARAFLRALGWDWGPDGGDSGEGSAGEGERAAPGAGDAAAGSGAEFAGGDGAARGGGAAAPLSPGATVALLLPAGPEFLWLWFGLAKAGLRTAFVPTALRRGPLLHCLRSCGARALVLAPEFLESLEPDLPALRAMGLHLWAAGPGTHPAGISDLLAEVSAEVDGPVPGYLSSPQSITDTCLYIFTSGTTGLPKAARISHLKILQCQGFYQLCGVHQEDVIYLALPLYHMSGSLLGIVGCMGIGATVVLKSKFSAGQFWEDCQQHRVTVFQYIGELCRYLVNQPPSKAERGHKVRLAVGSGLRPDTWERFVRRFGPLQVLETYGLTEGNVATINYTGQRGAVGRASWLYKHIFPFSLIRYDVTTGEPIRDPQGHCMATSPGEPGLLVAPVSQQSPFLGYAGGPELAQGKLLKDVFRPGDVFFNTGDLLVCDDQGFLRFHDRTGDTFRWKGENVATTEVAEVFEALDFLQEVNVYGVTVPGHEGRAGMAALVLRPPHALDLMQLYTHVSENLPPYARPRFLRLQAVGAYLPLTTARYSALLAGNLRI

SEQ ID NO: 40243 - protein, 229 aa, Homo sapiens
MAALLLLPLLLLLPLLLLKLHLWPQLRWLPADLAFAVRALCCKRALRARALAAAAADPEGPEGGCSLAWRLAELAQQRAAHTFLIHGSRRFSYSEAERESNRAARAFLRALGWDWGPDGGDSGEGSAGEGERAAPGAGDAAAGSGAEFAGGDGAARGGGAAAPLSPGATVALLLPAGPEFLWLWFGLAKAGLRTAFVPTALRRGPLLHCLRSCGARALVLAPGKAGAPN

SEQ ID NO: 40244 - protein, 2155 aa, Homo sapiens
MNYSSFLRIWVSFIFALVQHQAQPRELMYPFWQNDTKTPKVDDGSSSEIKLAIPVFFFGVPYRTVYVNNNGVVSFNVLVSQFTPESFPLTDGRAFVAPFWADVHNGIRGEIYYRETMEPAILKRATKDIRKYFKDMATFSATWVFIVTWEEVTFYGGSSTTPVNTFQAVLVSDGSYTFTLFNYYEINWTTGTASGGDPLTGLGGVMAQAGFNGGNLTNFFSLPGSRTPEIVNIQETTNVNVPGRWAFKVDGKEIDPANGCTSRGQFLRRGEVFWDDLNCTVKCRCLDFNNEIYCQEASCSPYEVCEPKGKFFYCSAVETSTCVVFGEPHYHTFDGFLFHFQGSCAYLLARQCLQTSSLPFFSVEAKNEHRRGSAVSWVKELSVEVNGYKILIPKGSYGRVKVNDLVTSLPVTLDLGTVKIYQSGISTAVETDFGLLVTFDGQHYASISVPGSYINSTCGLCGNYNKNPLDDFLRPDGRPAMSVLDLGESWRVYHADWKCDSGCVDNCTQCDAATEALYFGSDYCGFLNKTDGPLWECGTVVDPTAFVHSCVYDLCSVRDNGTLLCQAIQAYALVCQALGIPIGDWRTQTGCVSTVQCPSFSHYSVCTSSCPDTCSDLTASRNCATPCTEGCECNQGFVLSTSQCVPLHKCGCDFDGHYYTMGEFFWATANCTVQCLCEEGGDVYCFNKTCGSGEVCAVEDGYQGCFPKRETVCLLSQNQVLHTFDGASYAFPSEFSYTLLKTCPERPEYLEIDINKKKPDAGPAWLRGLRILVADQEVKIGGIGASEVKLNGQEVELPFFHPSGKLEIYRNKNSTTVESKGVVTVQYSDIGLLYIRLSTTYFNCTGGLCGFYNANASDEFCLPNGKCTDNLAVFLESWTTFEEICNGECGDLLKACNNDSELLKFYRSRSRCGIINDPSNSSFLECHGVVNVTAYYRTCLFRLCQSGGNESELCDSVARYASACKNADVEVGPWRTYDFCPLECPENSHFEECITCTETCETLTLGPICVDSCSEGCQCDEGYALLGSQCVTRSECGCNFEGHQLATNETFWVDLDCQIFCYCSGTDNRVHCETIPCKDDEYCMEEGGLYYCQARTDASCIVSGYGHYLTFDGFPFDFQTSCPLILCTTGSRPSSDSFPKFVVTAKNEDRDPSLALWVKQVDVTVFGYSIVIHRAYKHTVLVNSERLYLPLKLGQGKINIFSFGFHVVVETDFGLKVVYDWKTFLSITVPRSMQNSTYGLCGRYNGNPDDDLEMPMGLLASSVNEFGQSWVKRDTFCQVGCGDRCPSCAKVEGFSKVQQLCSLIPNQNAAFSKCHSKVNPTFFYKNCLFDSCIDGGAVQTACSWLQNYASTCQTQGITVTGWRNYTSCTVTCPPNSHYESCVSVCQPRCAAIRLKSDCSHYCVEGCHCDAGYVLNGKSCILPHSCGCYSDGKYYEPKQLFWNSDCTRRCRCFRRNVIQCDPRQCKSDEECALRNGVRGCFSTKTSYCLAAGGGVFRTFDGAFLRFPANCAFVLSTICQKLPDISFQLIINFDKWSAPNLTIISPVYFYINEEQILINDRNTVKVNGTQVNVPFITGLATKIYSSEGFLVIDTSPDIQIYYNGFNVIKISISERLQNKVCGLCGNFNGDLTDDYVTLRGKPVVSSVVLAQSWKTNGMQKRPLAPSCNELQFSQYAAMCDNVHIQKMQGDGYCLKLTDMKGFFQPCYGLLDPLPFYESCYLDGCYSHKKFQLCGSLAAYGEACRSFGILSTEWIEKENCSGVVEDPCVGADCPNRTCELGNGRELCGCIEPPPYGNNSHDIIDAEVTCKAAQMEVSISKCKLFQLGFEREGVRINDRQCTGIEGEDFISFQINNTKGNCGNIVQSNGTHIMYKNTLWIESANNTGNIITRDRTINVEFSCAYELDIKISLDSVVKPMLSVINLTVPTQEGSFITKMALYKNASYKHPYRQGEVVLTTRDVLYVGVFVVGADATHLILTLNKCYATPTRDSNDKLRYFIIEGGCQNLKDNTIGIEENAVSLTCRFHVTVFKFIGDYDEVHLHCAVSLCDSEKYSCKITCPHNSRIATDYTKEPKEQIISVGPIRRKRLDWCEDNGGCEQICTSRVDGPLCSCVTGTLQEDGKSCRASNSSMELQVWTLLLIMIQISLWHFVYKSGTTS

SEQ ID NO: 40245 - protein, 329 aa, Homo sapiens
MVTKAFVLLAIFAEASAKSCAPNKADVILVFCYPKTIITKIPECPYGWEVHQLALGGLCYNGVHEGGYYQFVIPDLSPKNKSYCGTQSEYKPPIYHFYSHIVSNDTTVIVKNQPVNYSFSCTYHSTYLVNQAAFDQRVATVHVKNGSMGTFESQLSLNFYTNAKFSIKKEAPFVLEASEIGSDLFAGVEAKGLSIRFKVVLNSCWATPSADFMYPLQWQLINKGCPTDETVLVHENGRDHRATFQFNAFRFQNIPKLSKVWLHCETFICDSEKLSCPVTCDKRKRLLRDQTGGVLVVELSLRSRGFSSLYSFSDVLHHLIMMLGICAVL

SEQ ID NO: 40246 - protein, 551 aa, Homo sapiens
MDELFPLIFPAEPAQASGPYVEIIEQPKQRGMRFRYKCEGRSAGSIPGERSTDTTKTHPTIKINGYTGPGTVRISLVTKDPPHRPHPHELVGKDCRDGFYEAELCPDRCIHSFQNLGIQCVKKRDLEQAISQRIQTNNNPFQVPIEEQRGDYDLNAVRLCFQVTVRDPSGRPLRLPPVLSHPIFDNRAPNTAELKICRVNRNSGSCLGGDEIFLLCDKVQKEDIEVYFTGPGWEARGSFSQADVHRQVAIVFRTPPYADPSLQAPVRVSMQLRRPSDRELSEPMEFQYLPDTDDRHRIEEKRKRTYETFKSIMKKSPFSGPTDPRPPPRRIAVPSRSSASVPKPAPQPYPFTSSLSTINYDEFPTMVFPSGQISQASALAPAPPQVLPQAPAPAPAPAMVSALAQAPAPVPVLAPGPPQAVAPPAPKPTQAGEGTLSEALLQLQFDDEDLGALLGNSTDPAVFTDLASVDNSEFQQLLNQGIPVAPHTTEPMLMEYPEAITRLVTGAQRPPDPAPAPLGAPGLPNGLLSGDEDFSSIADMDFSALLSQISS

SEQ ID NO: 40247 - protein, 537 aa, Homo sapiens
MDELFPLIFPAEQPKQRGMRFRYKCEGRSAGSIPGERSTDTTKTHPTIKINGYTGPGTVRISLVTKDPPHRPHPHELVGKDCRDGFYEAELCPDRCIHSFQNLGIQCVKKRDLEQAISQRIQTNNNPFQVPIEEQRGDYDLNAVRLCFQVTVRDPSGRPLRLPPVLSHPIFDNRAPNTAELKICRVNRNSGSCLGGDEIFLLCDKVQKEDIEVYFTGPGWEARGSFSQADVHRQVAIVFRTPPYADPSLQAPVRVSMQLRRPSDRELSEPMEFQYLPDTDDRHRIEEKRKRTYETFKSIMKKSPFSGPTDPRPPPRRIAVPSRSSASVPKPAPQPYPFTSSLSTINYDEFPTMVFPSGQISQASALAPAPPQVLPQAPAPAPAPAMVSALAQAPAPVPVLAPGPPQAVAPPAPKPTQAGEGTLSEALLQLQFDDEDLGALLGNSTDPAVFTDLASVDNSEFQQLLNQGIPVAPHTTEPMLMEYPEAITRLVTAQRPPDPAPAPLGAPGLPNGLLSGDEDFSSIADMDFSALLSQISS

SEQ ID NO: 40248 - protein, 541 aa, Homo sapiens; identical to SEQ ID NO: 174

SEQ ID NO: 40249 - protein, 548 aa, Homo sapiens; identical to SEQ ID NO: 175

SEQ ID NO: 40250 - protein, 490 aa, Homo sapiens
MEQKPSKVECGSDPEENSARSPDGKRKRKNGQCSLKTSMSGYIPSYLDKDEQCVVCGDKATGYHYRCITCEGCKGFFRRTIQKNLHPTYSCKYDSCCVIDKITRNQCQLCRFKKCIAVGMAMDLVLDDSKRVAKRKLIEQNRERRRKEEMIRSLQQRPEPTPEEWDLIHIATEAHRSTNAQGSHWKQRRKFLPDDIGQSPIVSMPDGDKVDLEAFSEFTKIITPAITRVVDFAKKLPMFSELPCEDQIILLKGCCMEIMSLRAAVRYDPESDTLTLSGEMAVKREQLKNGGLGVVSDAIFELGKSLSAFNLDDTEVALLQAVLLMSTDRSGLLCVDKIEKSQEAYLLAFEHYVNHRKHNIPHFWPKLLMKEREVQSSILYKGAAAEGRPGGSLGVHPEGQQLLGMHVVQGPQVRQLEQQLGEAGSLQGPVLQHQSPKSPQQRLLELLHRSGILHARAVCGEDDSSEADSPSSSEEEPEVCEDLAGNAASP

SEQ ID NO: 40251 - protein, 410 aa, Homo sapiens
MEQKPSKVECGSDPEENSARSPDGKRKRKNGQCSLKTSMSGYIPSYLDKDEQCVVCGDKATGYHYRCITCEGCKGFFRRTIQKNLHPTYSCKYDSCCVIDKITRNQCQLCRFKKCIAVGMAMDLVLDDSKRVAKRKLIEQNRERRRKEEMIRSLQQRPEPTPEEWDLIHIATEAHRSTNAQGSHWKQRRKFLPDDIGQSPIVSMPDGDKVDLEAFSEFTKIITPAITRVVDFAKKLPMFSELPCEDQIILLKGCCMEIMSLRAAVRYDPESDTLTLSGEMAVKREQLKNGGLGVVSDAIFELGKSLSAFNLDDTEVALLQAVLLMSTDRSGLLCVDKIEKSQEAYLLAFEHYVNHRKHNIPHFWPKLLMKVTDLRMIGACHASRFLHMKVECPTELFPPLFLEVFEDQEV

SEQ ID NO: 40252 - protein, 451 aa, Homo sapiens
MEQKPSKVECGSDPEENSARSPDGKRKRKNGQCSLKTSMSGYIPSYLDKDEQCVVCGDKATGYHYRCITCEGCKGFFRRTIQKNLHPTYSCKYDSCCVIDKITRNQCQLCRFKKCIAVGMAMDLVLDDSKRVAKRKLIEQNRERRRKEEMIRSLQQRPEPTPEEWDLIHIATEAHRSTNAQGSHWKQRRKFLPDDIGQSPIVSMPDGDKVDLEAFSEFTKIITPAITRVVDFAKKLPMFSELPCEDQIILLKGCCMEIMSLRAAVRYDPESDTLTLSGEMAVKREQLKNGGLGVVSDAIFELGKSLSAFNLDDTEVALLQAVLLMSTDRSGLLCVDKIEKSQEAYLLAFEHYVNHRKHNIPHFWPKLLMKGPQVRQLEQQLGEAGSLQGPVLQHQSPKSPQQRLLELLHRSGILHARAVCGEDDSSEADSPSSSEEEPEVCEDLAGNAASP

SEQ ID NO: 40253 - protein, 448 aa, Homo sapiens
MEQKPSKVECGSDPEENSARSPDGKRKRKNGQCSLKTSMSGYIPSYLDKDEQCVVCGDKATGYHYRCITCEGCKGFFRRTIQKNLHPTYSCKYDSCCVIDKITRNQCQLCRFKKCIAVGMAMDLVLDDSKRVAKRKLIEQNRERRRKEEMIRSLQQRPEPTPEEWDLIHIATEAHRSTNAQGSHWKQRRKFLPDDIGQSPIVSMPDGDKVDLEAFSEFTKIITPAITRVVDFAKKLPMFSELPCEDQIILLKGCCMEIMSLRAAVRYDPESDTLTLSGEMAVKREQLKNGGLGVVSDAIFELGKSLSAFNLDDTEVALLQAVLLMSTDRSGLLCVDKIEKSQEAYLLAFEHYVNHRKHNIPHFWPKLLMKVRQLEQQLGEAGSLQGPVLQHQSPKSPQQRLLELLHRSGILHARAVCGEDDSSEADSPSSSEEEPEVCEDLAGNAASP

SEQ ID NO: 40254 - protein, 365 aa, Homo sapiens
MDPPAVVAESVSSLTIADAFIAAGESSAPTPPRPALPRRFICSFPDCSANYSKAWKLDAHLCKHTGERPFVCDYEGCGKAFIRDYHLSRHILTHTGEKPFVCAANGCDQKFNTKSNLKKHFERKHENQQKQYICSFEDCKKTFKKHQQLKIHQCQHTNEPLFKCTQEGCGKHFASPSKLKRHAKAHEGYVCQKGCSFVAKTWTELLKHVRETHKEEILCEVCRKTFKRKDYLKQHMKTHAPERDVCRCPREGCGRTYTTVFNLQSHILSFHEESRPFVCEHAGCGKTFAMKQSLTRHAVVHDPDKKKMKLKVKKSREKRSLASHLSGYIPPKRKQGQGLSLCQNGESPNCVEDKMLSTVAVLTLG

SEQ ID NO: 40255 - protein, 340 aa, Homo sapiens
MDPPAVVAESVSSLTIADAFIAAGESSAPTPPRPALPRRFICSFPDCSANYSKAWKLDAHLCKHTGERPFVCDYEGCGKAFIRDYHLSRHILTHTGEKPFVCAANGCDQKFNTKSNLKKHFERKHENQQKQYICSFEDCKKTFKKHQQLKIHQCQHTNEPLFKLCCQKGCSFVAKTWTELLKHVRETHKEEILCEVCRKTFKRKDYLKQHMKTHAPERDVCRCPREGCGRTYTTVFNLQSHILSFHEESRPFVCEHAGCGKTFAMKQSLTRHAVVHDPDKKKMKLKVKKSREKRSLASHLSGYIPPKRKQGQGLSLCQNGESPNCVEDKMLSTVAVLTLG

SEQ ID NO: 40256 - protein, 631 aa, Homo sapiens
MNFNTILEEILIKRSQQKKKTSPLNYKERLFVLTKSMLTYYEGRAEKKYRKGFIDVSKIKCVEIVKNDDGVIPCQNKYPFQVVHDANTLYIFAPSPQSRDLWVKKLKEEIKNNNNIMIKYHPKFWTDGSYQCCRQTEKLAPGCEKYNLFESSIRKALPPAPETKKRRPPPPIPLEEEDNSEEIVVAMYDFQAAEGHDLRLERGQEYLILEKNDVHWWRARDKYGNEGYIPSNYVTGKKSNNLDQYEWYCRNMNRSKAEQLLRSEDKEGGFMVRDSSQPGLYTVSLYTKFGGEGSSGFRHYHIKETTTSPKKYYLAEKHAFGSIPEIIEYHKHNAAGLVTRLRYPVSVKGKNAPTTAGFSYEKWEINPSELTFMRELGSGLFGVVRLGKWRAQYKVAIKAIREGAMCEEDFIEEAKVMMKLTHPKLVQLYGVCTQQKPIYIVTEFMERGCLLNFLRQRQGHFSRDVLLSMCQDVCEGMEYLERNSFIHRDLAARNCLVSEAGVVKVSDFGMARYVLDDQYTSSSGAKFPVKWCPPEVFNYSRFSSKSDVWSFGVLMWEVFTEGRMPFEKYTNYEVVTMVTRGHRLYQPKLASNYVYEVMLRCWQEKPEGRPSFEDLLRTIDELVECEETFGR

SEQ ID NO: 40257 - protein, 301 aa, Homo sapiens
MEDEVVRFAKKMDKMVQKKNAAGALDLLKELKNIPMTLELLQSTRIGMSVNAIRKQSTDEEVTSLAKSLIKSWKKLLDGPSTEKDLDEKKKEPAITSQNSPEAREESTSSGNVSNRKDETNARDTYVSSFPRAPSTSDSVRLKCREMLAAALRTGDDYIAIGADEEELGSQIEEAIYQEIRNTDMKYKNRVRSRISNLKDAKNPNLRKNVLCGNIPPDLFARMTAEEMASDELKEMRKNLTKEAIREHQMAKTGGTQTDLFTCGKCKKKNCTYTQVQTRSADEPMTTFVVCNECGNRWKFC

SEQ ID NO: 40258 - protein, 280 aa, Homo sapiens
MEDEVVRFAKKMDKMVQKKNASTRIGMSVNAIRKQSTDEEVTSLAKSLIKSWKKLLDGPSTEKDLDEKKKEPAITSQNSPEAREESTSSGNVSNRKDETNARDTYVSSFPRAPSTSDSVRLKCREMLAAALRTGDDYIAIGADEEELGSQIEEAIYQEIRNTDMKYKNRVRSRISNLKDAKNPNLRKNVLCGNIPPDLFARMTAEEMASDELKEMRKNLTKEAIREHQMAKTGGTQTDLFTCGKCKKKNCTYTQVQTRSADEPMTTFVVCNECGNRWKFC

SEQ ID NO: 40259 - protein, 588 aa, Homo sapiens
MPQLGGGGGGGGGGSGGGGGSSAGAAGGGDDLGANDELIPFQDEGGEEQEPSSDSASAQRDLDEVKSSLVNESENQSSSSDSEAERRPQPVRDTFQKPRDYFAEVRRPQDSAFFKGPPYPGYPFLMIPDLSSPYLSNGPLSPGGARTYLQMKWPLLDVPSSATVKDTRSPSPAHLSNKVPVVQHPHHMHPLTPLITYSNDHFSPGSPPTHLSPEIDPKTGIPRPPHPSELSPYYPLSPGAVGQIPHPLGWLVPQQGQPMYSLPPGGFRHPYPALAMNASMSSLVSSRFSPHMVAPAHPGLPTSGIPHPAIVSPIVKQEPAPPSLSPAVSVKSPVTVKKEEEKKPHVKKPLNAFMLYMKEMRAKVVAECTLKESAAINQILGRKWHNLSREEQAKYYELARKERQLHSQLYPTWSARDNYGKKKKRKREKQLSQTQSQQQVQEAEGALASKSKKPCVQYLPPEKPCDSPASSHGSMLDSPATPSAALASPAAPAATHSEQAQPLSLTTKPETRAQLALHSAAFLSAKAAASSSGQMGSQPPLLSRPLPLGSMPTALLASPPSFPATLHAHQALPVLQAQPLSLVTKSAH

SEQ ID NO: 40260 - protein, 299 aa, Homo sapiens
MMGKEEEIARIARRLDKMVTKKSAEGAMDLLRELKAMPITLHLLQSTRVGMSVNALRKQSSDEEVIALAKSLIKSWKKLLDASDAKARERGRGMPLPTSSRDASEAPDPSRKRPELPRAPSTPRITTFPPVPVTCDAVRNKCREMLTAALQTDHDHVAIGADCERLSAQIEECIFRDVGNTDMKYKNRVRSRISNLKDAKNPDLRRNVLCGAITPQQIAVMTSEEMASDELKEIRKAMTKEAIREHQMARTGGTQTDLFTCGKCRKKNCTYTQVQTRSSDEPMTTFVVCNECGNRWKFC

SEQ ID NO: 40261 - protein, 272 aa, Homo sapiens
MDLLRELKAMPITLHLLQSTRVGMSVNALRKQSSDEEVIALAKSLIKSWKKLLDASDAKARERGRGMPLPTSSRDASEAPDPSRKRPELPRAPSTPRITTFPPVPVTCDAVRNKCREMLTAALQTDHDHVAIGADCERLSAQIEECIFRDVGNTDMKYKNRVRSRISNLKDAKNPDLRRNVLCGAITPQQIAVMTSEEMASDELKEIRKAMTKEAIREHQMARTGGTQTDLFTCGKCRKKNCTYTQVQTRSSDEPMTTFVVCNECGNRWKFC

SEQ ID NO: 40262 - protein, 495 aa, Homo sapiens
MGRRRQRVDPAAGARAGALPEAIAALSRSLPSGPSPEIFRRAKFDRPEATSALWQLLFRVLSPLPAGNALASLALEVQARLVKSALCSQGYPRLALAQLPEDGSQGSRELLLALSWLLARGPVPEQMLAQARVPLGDEMTVCQCEALASPGPPAPHMEAEGPVDVRHVQWLMGKLRFRWRQLVSSQQEQCALLSKIHLYTRGCHSDQSLSHLSVTEAEMLRDPEGGQQVSGAGAAQNLDLAYPKCLHSFCTPGMGPRTFWNDLWLVCEQPGLLPGDWAAPLDPGGASACSLLSPFRALLRTLERENQRLEAVLAWRRSELVFWRWMDTVLGTCAPEVPAAASQPTFLPWVPERGGGELDLVVRELQALEEELREAAERRRAAWEAKAGGCGRGPEWSAARRASREAVEKELGALQQCWERDGGPAQPHGPHRLVRREDGAAGDRDLRAAVVIRTLRSQEACLEAVLRRLQGQCRQELARLVGARPGLIWIPPPGR

SEQ ID NO: 40263 - protein, 393 aa, Homo sapiens
MGRRRQRVDPAAGARAGALPEAIAALSRSLPSGPSPEIFRRAKFDRPEATSALWQLLFRVLSPLPAGNALASLALEVQARLVKSALCSQGYPRLALAQLPEDGSQGSRELLLALSWLLARGPVPEQMLAQARVPLGDEMTVCQCEALASPGPPAPHMEAEGPVDVRHVQWLMGKLRFRWRQLVSSQQEQCALLSKLLRTLERENQRLEAVLAWRRSELVFWRWMDTVLGTCAPEVPAAASQPTFLPWVPERGGGELDLVVRELQALEEELREAAERRRAAWEAKAGGCGRGPEWSAARRASREAVEKELGALQQCWERDGGPAQPHGPHRLVRREDGAAGDRDLRAAVVIRTLRSQEACLEAVLRRLQGQCRQELARLVGARPGLIWIPPPGR

SEQ ID NO: 40264 - protein, 354 aa, Homo sapiens
MSGQRGDWVQTSALWQLLFRVLSPLPAGNALASLALEVQARLVKSALCSQGYPRLALAQLPEDGSQGSRELLLALSWLLARGPVPEQMLAQARVPLGDEMTVCQCEALASPGPPAPHMEAEGPVDVRHVQWLMGKLRFRWRQLVSSQQEQCALLSKLLRTLERENQRLEAVLAWRRSELVFWRWMDTVLGTCAPEVPAAASQPTFLPWVPERGGGELDLVVRELQALEEELREAAERRRAAWEAKAGGCGRGPEWSAARRASREAVEKELGALQQCWERDGGPAQPHGPHRLVRREDGAAGDRDLRAAVVIRTLRSQEACLEAVLRRLQGQCRQELARLVGARPGLIWIPPPGR

SEQ ID NO: 40265 - protein, 248 aa, Homo sapiens
MLAQARVPLGDEMTVCQIHLYTRGCHSDQSLSHLSVTEAEMLRDPEGGQQLLRTLERENQRLEAVLAWRRSELVFWRWMDTVLGTCAPEVPAAASQPTFLPWVPERGGGELDLVVRELQALEEELREAAERRRAAWEAKAGGCGRGPEWSAARRASREAVEKELGALQQCWERDGGPAQPHGPHRLVRREDGAAGDRDLRAAVVIRTLRSQEACLEAVLRRLQGQCRQELARLVGARPGLIWIPPPGR

SEQ ID NO: 40266 - protein, 352 aa, Homo sapiens
MSGQRGDWTSALWQLLFRVLSPLPAGNALASLALEVQARLVKSALCSQGYPRLALAQLPEDGSQGSRELLLALSWLLARGPVPEQMLAQARVPLGDEMTVCQCEALASPGPPAPHMEAEGPVDVRHVQWLMGKLRFRWRQLVSSQQEQCALLSKLLRTLERENQRLEAVLAWRRSELVFWRWMDTVLGTCAPEVPAAASQPTFLPWVPERGGGELDLVVRELQALEEELREAAERRRAAWEAKAGGCGRGPEWSAARRASREAVEKELGALQQCWERDGGPAQPHGPHRLVRREDGAAGDRDLRAAVVIRTLRSQEACLEAVLRRLQGQCRQELARLVGARPGLIWIPPPGR

SEQ ID NO: 40267 - protein, 426 aa, Homo sapiens
MGRRRQRVDPAAGARAGALPEAIAALSRSLPSGPSPEIFRRAKFDRPEATSALWQLLFRVLSPLPAGNALASLALEVQARLVKSALCSQGYPRLALAQLPEDGSQGSRELLLALSWLLARGPVPEQMLAQARVPLGDEMTVCQCEALASPGPPAPHMEAEGPVDVRHVQWLMGKLRFRWRQLVSSQQEQCALLSKIHLYTRGCHSDQSLSHLSVTEAEMLRDPEGGQQLLRTLERENQRLEAVLAWRRSELVFWRWMDTVLGTCAPEVPAAASQPTFLPWVPERGGGELDLVVRELQALEEELREAAERRRAAWEAKAGGCGRGPEWSAARRASREAVEKELGALQQCWERDGGPAQPHGPHRLVRREDGAAGDRDLRAAVVIRTLRSQEACLEAVLRRLQGQCRQELARLVGARPGLIWIPPPGR

SEQ ID NO: 40268 - protein, 619 aa, Homo sapiens
MPQLNGGGGDDLGANDELISFKDEGEQEEKSSENSSAERDLADVKSSLVNESETNQNSSSDSEAERRPPPRSESFRDKSRESLEEAAKRQDGGLFKGPPYPGYPFIMIPDLTSPYLPNGSLSPTARTLHFQSGSTHYSAYKTIEHQIAVQYLQMKWPLLDVQAGSLQSRQALKDARSPSPAHIVSNKVPVVQHPHHVHPLTPLITYSNEHFTPGNPPPHLPADVDPKTGIPRPPHPPDISPYYPLSPGTVGQIPHPLGWLVPQQGQPVYPITTGGFRHPYPTALTVNASMSRFPPHMVPPHHTLHTTGIPHPAIVTPTVKQESSQSDVGSLHSSKHQDSKKEEEKKKPHIKKPLNAFMLYMKEMRAKVVAECTLKESAAINQILGRRWHALSREEQAKYYELARKERQLHMQLYPGWSARDNYGKKKKRKRDKQPGETNEHSECFLNPCLSLPPITDLSAPKKCRARFGLDQQNNWCGPCRRKKKCVRYIQGEGSCLSPPSSDGSLLDSPPPSPNLLGSPPRDAKSQTEQTQPLSLSLKPDPLAHLSMMPPPPALLLAEATHKASALCPNGALDLPPAALQPAAPSSSIAQPSTSSLHSHSSLAGTQPQPLSLVTKSLE

SEQ ID NO: 40269 - protein, 494 aa, Homo sapiens
MPQLNGGGGDDLGANDELISFKDEGEQEEKSSENSSAERDLADVKSSLVNESETNQNSSSDSEAERRPPPRSESFRDKSRESLEEAAKRQDGGLFKGPPYPGYPFIMIPDLTSPYLPNGSLSPTARTLHFQSGSTHYSAYKTIEHQIAVQYLQMKWPLLDVQAGSLQSRQALKDARSPSPAHIVSNKVPVVQHPHHVHPLTPLITYSNEHFTPGNPPPHLPADVDPKTGIPRPPHPPDISPYYPLSPGTVGQIPHPLGWLVPQQGQPVYPITTGGFRHPYPTALTVNASMSRFPPHMVPPHHTLHTTGIPHPAIVTPTVKQESSQSDVGSLHSSKHQDSKKEEEKKKPHIKKPLNAFMLYMKEMRAKVVAECTLKESAAINQILGRRWHALSREEQAKYYELARKERQLHMQLYPGWSARDNYGKKKKRKRDKQPGETNEHSECFLNPCLSLPPITDLSAPKKCRARFGLDQQNNWCGPCRCKYSKEVSGTVRA

SEQ ID NO: 40270 - protein, 619 aa, Homo sapiens
MPQLNGGGGDDLGANDELISFKDEGEQEEKSSENSSAERDLADVKSSLVNESETNQNSSSDSEAERRPPPRSESFRDKSRESLEEAAKRQDGGLFKGPPYPGYPFIMIPDLTSPYLPNGSLSPTARTLHFQSGSTHYSAYKTIEHQIAVQYLQMKWPLLDVQAGSLQSRQALKDARSPSPAHIVSNKVPVVQHPHHVHPLTPLITYSNEHFTPGNPPPHLPADVDPKTGIPRPPHPPDISPYYPLSPGTVGQIPHPLGWLVPQQGQPVYPITTGGFRHPYPTALTVNASMSRFPPHMVPPHHTLHTTGIPHPAIVTPTVKQESSQSDVGSLHSSKHQDSKKEEEKKKPHIKKPLNAFMLYMKEMRAKVVAECTLKESAAINQILGRRWHALSREEQAKYYELARKERQLHMQLYPGWSARDNYGKKKKRKRDKQPGETNEHSECFLNPCLSLPPITDANTPKKCRALFGLDRQTLWCKPCRRKKKCVRYIQGEGSCLSPPSSDGSLLDSPPPSPNLLGSPPRDAKSQTEQTQPLSLSLKPDPLAHLSMMPPPPALLLAEATHKASALCPNGALDLPPAALQPAAPSSSIAQPSTSSLHSHSSLAGTQPQPLSLVTKSLE

SEQ ID NO: 40271 - protein, 477 aa, Homo sapiens
MPQLNGGGGDDLGANDELISFKDEGEQEEKSSENSSAERDLADVKSSLVNESETNQNSSSDSEAERRPPPRSESFRDKSRESLEEAAKRQDGGLFKGPPYPGYPFIMIPDLTSPYLPNGSLSPTARTLHFQSGSTHYSAYKTIEHQIAVQYLQMKWPLLDVQAGSLQSRQALKDARSPSPAHIVSNKVPVVQHPHHVHPLTPLITYSNEHFTPGNPPPHLPADVDPKTGIPRPPHPPDISPYYPLSPGTVGQIPHPLGWLVPQQGQPVYPITTGGFRHPYPTALTVNASMSRFPPHMVPPHHTLHTTGIPHPAIVTPTVKQESSQSDVGSLHSSKHQDSKKEEEKKKPHIKKPLNAFMLYMKEMRAKVVAECTLKESAAINQILGRRWHALSREEQAKYYELARKERQLHMQLYPGWSARDNYGKKKKRKRDKQPGETNDLSAPKKCRARFGLDQQNNWCGPCRCKYSKEVSGTVRA

SEQ ID NO: 40272 - protein, 602 aa, Homo sapiens
MPQLNGGGGDDLGANDELISFKDEGEQEEKSSENSSAERDLADVKSSLVNESETNQNSSSDSEAERRPPPRSESFRDKSRESLEEAAKRQDGGLFKGPPYPGYPFIMIPDLTSPYLPNGSLSPTARTLHFQSGSTHYSAYKTIEHQIAVQYLQMKWPLLDVQAGSLQSRQALKDARSPSPAHIVSNKVPVVQHPHHVHPLTPLITYSNEHFTPGNPPPHLPADVDPKTGIPRPPHPPDISPYYPLSPGTVGQIPHPLGWLVPQQGQPVYPITTGGFRHPYPTALTVNASMSRFPPHMVPPHHTLHTTGIPHPAIVTPTVKQESSQSDVGSLHSSKHQDSKKEEEKKKPHIKKPLNAFMLYMKEMRAKVVAECTLKESAAINQILGRRWHALSREEQAKYYELARKERQLHMQLYPGWSARDNYGKKKKRKRDKQPGETNDLSAPKKCRARFGLDQQNNWCGPCRRKKKCVRYIQGEGSCLSPPSSDGSLLDSPPPSPNLLGSPPRDAKSQTEQTQPLSLSLKPDPLAHLSMMPPPPALLLAEATHKASALCPNGALDLPPAALQPAAPSSSIAQPSTSSLHSHSSLAGTQPQPLSLVTKSLE

SEQ ID NO: 40273 - protein, 482 aa, Homo sapiens
MPQLNGGGGDDLGANDELISFKDEGEQEEKSSENSSAERDLADVKSSLVNESETNQNSSSDSEAERRPPPRSESFRDKSRESLEEAAKRQDGGLFKGPPYPGYPFIMIPDLTSPYLPNGSLSPTARTLHFQSGSTHYSAYKTIEHQIAVQYLQMKWPLLDVQAGSLQSRQALKDARSPSPAHIVSNKVPVVQHPHHVHPLTPLITYSNEHFTPGNPPPHLPADVDPKTGIPRPPHPPDISPYYPLSPGTVGQIPHPLGWLVPQQGQPVYPITTGGFRHPYPTALTVNASMSRFPPHMVPPHHTLHTTGIPHPAIVTPTVKQESSQSDVGSLHSSKHQDSKKEEEKKKPHIKKPLNAFMLYMKEMRAKVVAECTLKESAAINQILGRRWHALSREEQAKYYELARKERQLHMQLYPGWSARDNYGKKKKRKRDKQPGETNEHSECFLNPCLSLPPITGEKKSAFATYKVKAAASAHPLQMEAY

SEQ ID NO: 40274 - protein, 602 aa, Homo sapiens
MPQLNGGGGDDLGANDELISFKDEGEQEEKSSENSSAERDLADVKSSLVNESETNQNSSSDSEAERRPPPRSESFRDKSRESLEEAAKRQDGGLFKGPPYPGYPFIMIPDLTSPYLPNGSLSPTARTLHFQSGSTHYSAYKTIEHQIAVQYLQMKWPLLDVQAGSLQSRQALKDARSPSPAHIVSNKVPVVQHPHHVHPLTPLITYSNEHFTPGNPPPHLPADVDPKTGIPRPPHPPDISPYYPLSPGTVGQIPHPLGWLVPQQGQPVYPITTGGFRHPYPTALTVNASMSRFPPHMVPPHHTLHTTGIPHPAIVTPTVKQESSQSDVGSLHSSKHQDSKKEEEKKKPHIKKPLNAFMLYMKEMRAKVVAECTLKESAAINQILGRRWHALSREEQAKYYELARKERQLHMQLYPGWSARDNYGKKKKRKRDKQPGETNDANTPKKCRALFGLDRQTLWCKPCRRKKKCVRYIQGEGSCLSPPSSDGSLLDSPPPSPNLLGSPPRDAKSQTEQTQPLSLSLKPDPLAHLSMMPPPPALLLAEATHKASALCPNGALDLPPAALQPAAPSSSIAQPSTSSLHSHSSLAGTQPQPLSLVTKSLE

SEQ ID NO: 40275 - protein, 596 aa, Homo sapiens
MPQLNGGGGDDLGANDELISFKDEGEQEEKSSENSSAERDLADVKSSLVNESETNQNSSSDSEAERRPPPRSESFRDKSRESLEEAAKRQDGGLFKGPPYPGYPFIMIPDLTSPYLPNGSLSPTARTYLQMKWPLLDVQAGSLQSRQALKDARSPSPAHIVSNKVPVVQHPHHVHPLTPLITYSNEHFTPGNPPPHLPADVDPKTGIPRPPHPPDISPYYPLSPGTVGQIPHPLGWLVPQQGQPVYPITTGGFRHPYPTALTVNASMSRFPPHMVPPHHTLHTTGIPHPAIVTPTVKQESSQSDVGSLHSSKHQDSKKEEEKKKPHIKKPLNAFMLYMKEMRAKVVAECTLKESAAINQILGRRWHALSREEQAKYYELARKERQLHMQLYPGWSARDNYGKKKKRKRDKQPGETNEHSECFLNPCLSLPPITDLSAPKKCRARFGLDQQNNWCGPCRRKKKCVRYIQGEGSCLSPPSSDGSLLDSPPPSPNLLGSPPRDAKSQTEQTQPLSLSLKPDPLAHLSMMPPPPALLLAEATHKASALCPNGALDLPPAALQPAAPSSSIAQPSTSSLHSHSSLAGTQPQPLSLVTKSLE

SEQ ID NO: 40276 - protein, 465 aa, Homo sapiens
MPQLNGGGGDDLGANDELISFKDEGEQEEKSSENSSAERDLADVKSSLVNESETNQNSSSDSEAERRPPPRSESFRDKSRESLEEAAKRQDGGLFKGPPYPGYPFIMIPDLTSPYLPNGSLSPTARTLHFQSGSTHYSAYKTIEHQIAVQYLQMKWPLLDVQAGSLQSRQALKDARSPSPAHIVSNKVPVVQHPHHVHPLTPLITYSNEHFTPGNPPPHLPADVDPKTGIPRPPHPPDISPYYPLSPGTVGQIPHPLGWLVPQQGQPVYPITTGGFRHPYPTALTVNASMSRFPPHMVPPHHTLHTTGIPHPAIVTPTVKQESSQSDVGSLHSSKHQDSKKEEEKKKPHIKKPLNAFMLYMKEMRAKVVAECTLKESAAINQILGRRWHALSREEQAKYYELARKERQLHMQLYPGWSARDNYGKKKKRKRDKQPGETNGEKKSAFATYKVKAAASAHPLQMEAY

SEQ ID NO: 40277 - protein, 455 aa, Homo sapiens
MPQLNGGGGDDLGANDELISFKDEGEQEEKSSENSSAERDLADVKSSLVNESETNQNSSSDSEAERRPPPRSESFRDKSRESLEEAAKRQDGGLFKGPPYPGYPFIMIPDLTSPYLPNGSLSPTARTYLQMKWPLLDVQAGSLQSRQALKDARSPSPAHIVSNKVPVVQHPHHVHPLTPLITYSNEHFTPGNPPPHLPADVDPKTGIPRPPHPPDISPYYPLSPGTVGQIPHPLGWQGQPVYPITTGGFRHPYPTALTVNASMSRFPPHMVPPHHTLHTTGIPHPAIVTPTVKQESSQSDVGSLHSSKHQDSKKEEEKKKPHIKKPLNAFMLYMKEMRAKVVAECTLKESAAINQILGRRWHALSREEQAKYYELARKERQLHMQLYPGWSARDNYGKKKKRKRDKQPGETNEHSECFLNPCLSLPPITGEKKSAFATYKVKAAASAHPLQMEAY

SEQ ID NO: 40278 - protein, 489 aa, Homo sapiens
MPQLNGGGGDDLGANDELISFKDEGEQEEKSSENSSAERDLADVKSSLVNESETNQNSSSDSEAERRPPPRSESFRDKSRESLEEAAKRQDGGLFKGPPYPGYPFIMIPDLTSPYLPNGSLSPTARTYLQMKWPLLDVQAGSLQSRQALKDARSPSPAHIVSPLPCCTQGHDCQHFYPPSDFTVSTQVFRDMKRSHSLQKVGEPWCIESNKVPVVQHPHHVHPLTPLITYSNEHFTPGNPPPHLPADVDPKTGIPRPPHPPDISPYYPLSPGTVGQIPHPLGWLVPQQGQPVYPITTGGFRHPYPTALTVNASMSRFPPHMVPPHHTLHTTGIPHPAIVTPTVKQESSQSDVGSLHSSKHQDSKKEEEKKKPHIKKPLNAFMLYMKEMRAKVVAECTLKESAAINQILGRRWHALSREEQAKYYELARKERQLHMQLYPGWSARDNYGKKKKRKRDKQPGETNGEKKSAFATYKVKAAASAHPLQMEAY

SEQ ID NO: 40279 - protein, 459 aa, Homo sapiens
MPQLNGGGGDDLGANDELISFKDEGEQEEKSSENSSAERDLADVKSSLVNESETNQNSSSDSEAERRPPPRSESFRDKSRESLEEAAKRQDGGLFKGPPYPGYPFIMIPDLTSPYLPNGSLSPTARTYLQMKWPLLDVQAGSLQSRQALKDARSPSPAHIVSNKVPVVQHPHHVHPLTPLITYSNEHFTPGNPPPHLPADVDPKTGIPRPPHPPDISPYYPLSPGTVGQIPHPLGWLVPQQGQPVYPITTGGFRHPYPTALTVNASMSRFPPHMVPPHHTLHTTGIPHPAIVTPTVKQESSQSDVGSLHSSKHQDSKKEEEKKKPHIKKPLNAFMLYMKEMRAKVVAECTLKESAAINQILGRRWHALSREEQAKYYELARKERQLHMQLYPGWSARDNYGKKKKRKRDKQPGETNEHSECFLNPCLSLPPITDLSAPKKCRARFGLDQQNNWCGPCSL

SEQ ID NO: 40280 - protein, 579 aa, Homo sapiens
MPQLNGGGGDDLGANDELISFKDEGEQEEKSSENSSAERDLADVKSSLVNESETNQNSSSDSEAERRPPPRSESFRDKSRESLEEAAKRQDGGLFKGPPYPGYPFIMIPDLTSPYLPNGSLSPTARTYLQMKWPLLDVQAGSLQSRQALKDARSPSPAHIVSNKVPVVQHPHHVHPLTPLITYSNEHFTPGNPPPHLPADVDPKTGIPRPPHPPDISPYYPLSPGTVGQIPHPLGWLVPQQGQPVYPITTGGFRHPYPTALTVNASMSRFPPHMVPPHHTLHTTGIPHPAIVTPTVKQESSQSDVGSLHSSKHQDSKKEEEKKKPHIKKPLNAFMLYMKEMRAKVVAECTLKESAAINQILGRRWHALSREEQAKYYELARKERQLHMQLYPGWSARDNYGKKKKRKRDKQPGETNDANTPKKCRALFGLDRQTLWCKPCRRKKKCVRYIQGEGSCLSPPSSDGSLLDSPPPSPNLLGSPPRDAKSQTEQTQPLSLSLKPDPLAHLSMMPPPPALLLAEATHKASALCPNGALDLPPAALQPAAPSSSIAQPSTSSLHSHSSLAGTQPQPLSLVTKSLE

SEQ ID NO: 40281 - protein, 442 aa, Homo sapiens
MPQLNGGGGDDLGANDELISFKDEGEQEEKSSENSSAERDLADVKSSLVNESETNQNSSSDSEAERRPPPRSESFRDKSRESLEEAAKRQDGGLFKGPPYPGYPFIMIPDLTSPYLPNGSLSPTARTYLQMKWPLLDVQAGSLQSRQALKDARSPSPAHIVSNKVPVVQHPHHVHPLTPLITYSNEHFTPGNPPPHLPADVDPKTGIPRPPHPPDISPYYPLSPGTVGQIPHPLGWLVPQQGQPVYPITTGGFRHPYPTALTVNASMSRFPPHMVPPHHTLHTTGIPHPAIVTPTVKQESSQSDVGSLHSSKHQDSKKEEEKKKPHIKKPLNAFMLYMKEMRAKVVAECTLKESAAINQILGRRWHALSREEQAKYYELARKERQLHMQLYPGWSARDNYGKKKKRKRDKQPGETNGEKKSAFATYKVKAAASAHPLQMEAY

SEQ ID NO: 40282 - protein, 447 aa, Homo sapiens
MPQLNGGGGDDLGANDELISFKDEGEQEEKSSENSSAERDLADVKSSLVNESETNQNSSSDSEAERRPPPRSESFRDKSRESLEEAAKRQDGGLFKGPPYPGYPFIMIPDLTSPYLPNGSLSPTARTYLQMKWPLLDVQAGSLQSRQALKDARSPSPAHIVSNKVPVVQHPHHVHPLTPLITYSNEHFTPGNPPPHLPADVDPKTGIPRPPHPPDISPYYPLSPGTVGQIPHPLGWLVPQQGQPVYPITTGGFRHPYPTALTVNASMSSFLSSRFPPHMVPPHHTLHTTGIPHPAIVTPTVKQESSQSDVGSLHSSKHQDSKKEEEKKKPHIKKPLNAFMLYMKEMRAKVVAECTLKESAAINQILGRRWHALSREEQAKYYELARKERQLHMQLYPGWSARDNYGKKKKRKRDKQPGETNGEKKSAFATYKVKAAASAHPLQMEAY

SEQ ID NO: 40283 - protein, 584 aa, Homo sapiens
MPQLNGGGGDDLGANDELISFKDEGEQEEKSSENSSAERDLADVKSSLVNESETNQNSSSDSEAERRPPPRSESFRDKSRESLEEAAKRQDGGLFKGPPYPGYPFIMIPDLTSPYLPNGSLSPTARTYLQMKWPLLDVQAGSLQSRQALKDARSPSPAHIVSNKVPVVQHPHHVHPLTPLITYSNEHFTPGNPPPHLPADVDPKTGIPRPPHPPDISPYYPLSPGTVGQIPHPLGWLVPQQGQPVYPITTGGFRHPYPTALTVNASMSSFLSSRFPPHMVPPHHTLHTTGIPHPAIVTPTVKQESSQSDVGSLHSSKHQDSKKEEEKKKPHIKKPLNAFMLYMKEMRAKVVAECTLKESAAINQILGRRWHALSREEQAKYYELARKERQLHMQLYPGWSARDNYGKKKKRKRDKQPGETNDLSAPKKCRARFGLDQQNNWCGPCRRKKKCVRYIQGEGSCLSPPSSDGSLLDSPPPSPNLLGSPPRDAKSQTEQTQPLSLSLKPDPLAHLSMMPPPPALLLAEATHKASALCPNGALDLPPAALQPAAPSSSIAQPSTSSLHSHSSLAGTQPQPLSLVTKSLE

SEQ ID NO: 40284 - protein, 335 aa, Homo sapiens
MSSFLSSRFPPHMVPPHHTLHTTGIPHPAIVTPTVKQESSQSDVGSLHSSKHQDSKKEEEKKKPHIKKPLNAFMLYMKEMRAKVVAECTLKESAAINQILGRRWHALSREEQAKYYELARKERQLHMQLYPGWSARDNYGKKKKRKRDKQPGETNEHSECFLNPCLSLPPITDLSAPKKCRARFGLDQQNNWCGPCRRKKKCVRYIQGEGSCLSPPSSDGSLLDSPPPSPNLLGSPPRDAKSQTEQTQPLSLSLKPDPLAHLSMMPPPPALLLAEATHKASALCPNGALDLPPAALQPAAPSSSIAQPSTSSLHSHSSLAGTQPQPLSLVTKSLE

SEQ ID NO: 40285 - protein, 188 aa, Homo sapiens
MEGGGGSGDKTTGVLAGFFGAGEAGYSHADLAGVPLTGMNPLCPYLNVDPRYLVQDTDEFILPTGANKTWGRFELAFFTIGGCCMTGAAFGAMNGLRLGLKETQNMAWSKPGNVQILNMVTRQGALWANTLGSLALLYSAFGVIIEKTRGAEDDLNTVAAGTMTGMLYKCTVSEMALDSPFCVLLSGS

SEQ ID NO: 40286 - protein, 140 aa, Homo sapiens
MEGGGGSGDKTTGVLAGFFGAGEAGYSHADLAGVPLTGMNPLCPYLNVDPRYLVQDTDEFILPTGANKTWGRFELAFFTIGGCCMTALLYSAFGVIIEKTRGAEDDLNTVAAGTMTGMLYKCTVSEMALDSPFCVLLSGS

SEQ ID NO: 40287 - protein, 380 aa, Homo sapiens
MGAAAAEAPLRLPAAPPLAFCCYTSVLLLFAFSLPGSRASNQPPGGGGGSGGDCPGGKGKSINCSELNVRESDVRVCDESSCKYGGVCKEDGDGLKCACQFQCHTNYIPVCGSNGDTYQNECFLRRAACKHQKEITVIARGPCYSDNGSGSGEGEEEGSGAEVHRKHSKCGPCKYKAECDEDAENVGCVCNIDCSGYSFNPVCASDGSSYNNPCFVREASCIKQEQIDIRHLGHCTDTDDTSLLGKKDDGLQYRPDVKDASDQREDVYIGNHMPCPENLNGYCIHGKCEFIYSTQKASCRCESGYTGQHCEKTDFSILYVVPSRQKLTHVLIAAIIGAVQIAIIVAIVMCITRKCPKNNRGRRQKQNLGHFTSDTSSRMV

SEQ ID NO: 40288 - protein, 341 aa, Homo sapiens
MLPEQLYFLQSPPEEEPEYHPDASAQELNVRESDVRVCDESSCKYGGVCKEDGDGLKCACQFQCHTNYIPVCGSNGDTYQNECFLRRAACKHQKEITVIARGPCYSDNGSGSGEGEEEGSGAEVHRKHSKCGPCKYKAECDEDAENVGCVCNIDCSGYSFNPVCASDGSSYNNPCFVREASCIKQEQIDIRHLGHCTDTDDTSLLGKKDDGLQYRPDVKDASDQREDVYIGNHMPCPENLNGYCIHGKCEFIYSTQKASCRCESGYTGQHCEKTDFSILYVVPSRQKLTHVLIAAIIGAVQIAIIVAIVMCITRKCPKNNRGRRQKQNLGHFTSDTSSRMV

SEQ ID NO: 40289 - protein, 246 aa, Homo sapiens
MAFLRSMWGVLSALGRSGAELCTGCGSRLRSPFSFVYLPRWFSSVLASCPKKPVSSYLRFSKEQLPIFKAQNPDAKTTELIRRIAQRWRELPDSKKKIYQDAYRAEWQVYKEEISRFKEQLTPSQIMSLEKEIMDKHLKRKAMTKKKELTLLGKPKRPRSAYNVYVAERFQEAKGDSPQEKLKTVKENWKNLSDSEKELYIQHAKEDETRYHNEMKSWEEQMIEVGRKDLLRRTIKKQRKYGAEEC

SEQ ID NO: 40290 - protein, 214 aa, Homo sapiens
MAFLRSMWGVLSALGRSGAELCTGCGSRLRSPFSFVYLPRWFSSVLASCPKKPVSSYLRFSKEQLPIFKAQNPDAKTTELIRRIAQRWRELPDSKKKIYQDAYRAEWQVYKEEISRFKEQLTPSQIMSLEKEIMDKHLKRKAMTKKKEKLKTVKENWKNLSDSEKELYIQHAKEDETRYHNEMKSWEEQMIEVGRKDLLRRTIKKQRKYGAEEC

SEQ ID NO: 40291 - protein, 199 aa, Homo sapiens
MAFALLRPVGAHVLYPDVRLLSEDEENRSESDASDQSFGCCEGPEAARRGPGPGGGRRAGGGGGAGPVVVVRQRQAANARERDRTQSVNTAFTALRTLIPTEPVDRKLSKIETVRLASSYIAHLANVLLLGDSADDGQPCFRAAGSAKGAVPAAADGGRQPRSICTFCLSNQRKGGGRRDLGGSCLKVRGVAPLRGPRR

SEQ ID NO: 40292 - protein, 374 aa, Homo sapiens
MVLWESPRQCSSWTLCEGFCWLLLLPVMLLIVARPVKLAAFPTSLSDCQTPTGWNCSGYDDRENDLFLCDTNTCKFDGECLRIGDTVTCVCQFKCNNDYVPVCGSNGESYQNECYLRQAACKQQSEILVVSEGSCATDAGSGSGDGVHEGSGETSQKETSTCDICQFGAECDEDAEDVWCVCNIDCSQTNFNPLCASDGKSYDNACQIKEASCQKQEKIEVMSLGRCQDNTTTTTKSEDGHYARTDYAENANKLEESAREHHIPCPEHYNGFCMHGKCEHSINMQEPSCRCDAGYTGQHCEKKDYSVLYVVPGPVRFQYVLIAAVIGTIQIAVICVVVLCITRKCPRSNRIHRQKQNTGHYSSDNTTRASTRLI

SEQ ID NO: 40293 - protein, 346 aa, Homo sapiens
MVLWESPRQCSSWTLCEGFCWLLLLPVMLLIVARPVKLAAFPTSLSDCQTPTGWNCSGYDDRENDLFLCDTNTCKFDGECLRIGDTVTCVCQFKCNNDYVPVCGSNGESYQNECYLRQAACKQQSEILVVSEGSCATDAGSGSGDGVHEGSGETSQKETSTCDICQFGAECDEDAEDVWCVCNIDCSQTNFNPLCASDGKSYDNACQIKEASCQKQEKIEVMSLGRCQDNTTTTTKSEDGHYARTDYAENANKLEESAREHHIPCPEHYNGFCMHGKCEHSINMQEPSCRCDAGYTGQHCEKKDYSVLYVVPGPVRFQYVLIAAVIGTIQIAVICVVVLCITRAKL

SEQ ID NO: 40294 - protein, 175 aa, Homo sapiens
MVLWESPRQCSSWTLCEGFCWLLLLPVMLLIVARPVKLAAFPTSLSDCQTPTGWNCSGYDDRENDLFLCDTNTCKFDGECLRIGDTVTCVCQFKCNNDYVPVCGSNGESYQNECYLRQAACKQQSEILVVSEGSCATDAGSGSGDGGRSCLFTYLKIYWWILLCIFTYVCSISDI

SEQ ID NO: 40295 - protein, 345 aa, Homo sapiens
MLPCFQLLRIGGGRGGDLYTFHPPAGAGCTYRLGHRADLCDVALRPQQEPGLISGIHAELHAEPRGDDWRVSLEDHSSQGTLVNNVRLPRGHRLELSDGDLLTFGPEGPPGTSPSEFYFMFQQVRVKPQDFAAITIPRSRGEARVGAGFRPMLPSQGAPQRPLSTFSPAPKATLILNSIGSLSKLRPQPLTFSPSWGGPKSLPVPAPPGEMGTTPSAPPQRNRRKSVHRVLAELDDESEPPENPPPVLMEPRKKLRVDKAPLTPTGNRRGRPRKYPVSAPMAPPAVGGGEPCAAPCCCLPQEETVAWVQCDGCDVWFHVACVGCSIQAAREADFRCPGCRAGIQT

SEQ ID NO: 40296 - protein, 338 aa, Homo sapiens
MEYFMVPTQKVPSLQHFRKTEKEVIGGLCSLANIPLTPETQRDQERRIRREIANSNERRRMQSINAGFQSLKTLIPHTDGEKLSKAAILQQTAEYIFSLEQEKTRLLQQNTQLKRFIQELSGSSPKRRRAEDKDEGIGSPDIWEDEKAEDLRREMIELRQQLDKERSVRMMLEEQVRSLEAHMYPEKLKVIAQQVQLQQQQEQVRLLHQEKLEREQQQLRTQLLPPPAPTHHPTVIVPAPPPPPSHHINVVTMGPSSVINSVSTSRQNLDTIVQAIQHIEGTQEKQELEEEQRRAVIVKPVRSCPEAPTSDTASDSEASDSDAMDQSREEPSGDGELP

SEQ ID NO: 40297 - protein, 360 aa, Homo sapiens
MSGSVLFTAGERWRCFLTPSRSSLYWALHNFCCRKKSTTPKKITPNVTFCDENAKEPENALDKLFSSEQQASILHVLNTASTKELEAFRLLRGRRSINIVEHRENFGPFQNLESLMNVPLFKYKSTVQVCNSILCPKTGREKRKSPENRFLRKLLKPDIERERLKAVNSIISIVFGTRRIAWAHLDRKLTVLDWQQSDRWSLMRGIYSSSVYLEEISSIISKMPKADFYVLEKTGLSIQNSSLFPILLHFHIMEAMLYALLNKTFAQDGQHQVLSMNRNAVGKHFELMIGDSRTSGKELVKQFLFDSILKADPRVFFPSDKIVHYRQMFLSTELQRVEELYDSLLQAIAFYELAVFDSQP

SEQ ID NO: 40298 - protein, 171 aa, Homo sapiens
MSGSVLFTAGERWRCFLTPSRSSLYWALHNFCCRKKSTTPKKITPNVTFCDENAKEPENALDKLFSSEQQASILHVLNTASTKELEAFRLLRGRRSINIVEHRENFGPFQNLESLMNVPLFKYKSTVQVCNSILCPKTGREKRKSPENRFLRKLLKPDIERERLKNCLGSP

SEQ ID NO: 40299 - protein, 461 aa, Homo sapiens
MTPNSMTENGLTAWDKPKHCPDREHDWKLVGMSEACLHRKSHSERRSTLKNEQSSPHLIQTTWTSSIFHLDHDDVNDQSVSSAQTFQTEEKKCKGYIPSYLDKDELCVVCGDKATGYHYRCITCEGCKGFFRRTIQKNLHPSYSCKYEGKCVIDKVTRNQCQECRFKKCIYVGMATDLVLDDSKRLAKRKLIEENREKRRREELQKSIGHKPEPTDEEWELIKTVTEAHVATNAQGSHWKQKRKFLPEDIGQAPIVNAPEGGKVDLEAFSHFTKIITPAITRVVDFAKKLPMFCELPCEDQIILLKGCCMEIMSLRAAVRYDPESETLTLNGEMAVTRGQLKNGGLGVVSDAIFDLGMSLSSFNLDDTEVALLQAVLLMSSDRPGLACVERIEKYQDSFLLAFEHYINYRKHHVTHFWPKLLMKVTDLRMIGACHASRFLHMKVECPTELFPPLFLEVFED

SEQ ID NO: 40300 - protein, 476 aa, Homo sapiens
MNYCMQEIYEVHPAAGSNCYMQSTDYYAYFEDSPGYSGCDAQAVPSNNIYMEQAWAVNQPYTCSYPGNMFKSKDSDLDMALNQYSQPEYFTEEKPTFSQVQSPSYSQKKGYIPSYLDKDELCVVCGDKATGYHYRCITCEGCKGFFRRTIQKNLHPSYSCKYEGKCVIDKVTRNQCQECRFKKCIYVGMATDLVLDDSKRLAKRKLIEENREKRRREELQKSIGHKPEPTDEEWELIKTVTEAHVATNAQGSHWKQKRKFLPEDIGQAPIVNAPEGGKVDLEAFSHFTKIITPAITRVVDFAKKLPMFCELPCEDQIILLKGCCMEIMSLRAAVRYDPESETLTLNGEMAVTRGQLKNGGLGVVSDAIFDLGMSLSSFNLDDTEVALLQAVLLMSSDRPGLACVERIEKYQDSFLLAFEHYINYRKHHVTHFWPKLLMKVTDLRMIGACHASRFLHMKVECPTELFPPLFLEVFED

SEQ ID NO: 40301 - protein, 1960 aa, Homo sapiens [sequence omitted]

SEQ ID NO: 40302 - protein, 1938 aa, Homo sapiens
MQSFREQSSYHGNQQSYPQEVHGSSRLEEFSPRQAQMFQNFGGTGGSSGSSGSGSGGGRRGAAAAAAAMASETSGHQGYQGFRKEAGDFYYMAGNKDPVTTGTPQPPQRRPSGPVQSYGPPQGSSFGNQYGSEGHVGQFQAQHSGLGGVSHYQQDYTGPFSPGSAQYQQQASSQQQQQQVQQLRQQLYQSHQPLPQATGQPASSSSHLQPMQRPSTLPSSAAGYQLRVGQFGQHYQSSASSSSSSSFPSPQRFSQSGQSYDGSYNVNAGSQYEGHNVGSNAQAYGTQSNYSYQPQSMKNFEQAKIPQGTQQGQQQQQPQQQQHPSQHVMQYTNAATKLPLQSQVGQYNQPEVPVRSPMQFHQNFSPISNPSPAASVVQSPSCSSTPSPLMQTGENLQCGQGSVPMGSRNRILQLMPQLSPTPSMMPSPNSHAAGFKGFGLEGVPEKRLTDPGLSSLSALSTQVANLPNTVQHMLLSDALTPQKKTSKRPSSSKKADSCTNSEGSSQPEEQLKSPMAESLDGGCSSSSEDQGERVRQLSGQSTSSDTTYKGGASEKAGSSPAQGAQNEPPRLNASPAAREEATSPGAKDMPLSSDGNPKVNEKTVGVIVSREAMTGRVEKPGGQDKGSQEDDPAATQRPPSNGGAKETSHASLPQPEPPGGGGSKGNKNGDNNSNHNGEGNGQSGHSAAGPGFTSRTEPSKSPGSLRYSYKDSFGSAVPRNVSGFPQYPTGQEKGDFTGHGERKGRNEKFPSLLQEVLQGYHHHPDRRYSRSTQEHQGMAGSLEGTTRPNVLVSQTNELASRGLLNKSIGSLLENPHWGPWERKSSSTAPEMKQINLTDYPIPRKFEIEPQSSAHEPGGSLSERRSVICDISPLRQIVRDPGAHSLGHMSADTRIGRNDRLNPTLSQSVILPGGLVSMETKLKSQSGQIKEEDFEQSKSQASFNNKKSGDHCHPPSIKHESYRGNASPGAATHDSLSDYGPQDSRPTPMRRVPGRVGGREGMRGRSPSQYHDFAEKLKMSPGRSRGPGGDPHHMNPHMTFSERANRSSLHTPFSPNSETLASAYHANTRAHAYGDPNAGLNSQLHYKRQMYQQQPEEYKDWSSGSAQGVIAAAQHRQEGPRKSPRQQQFLDRVRSPLKNDKDGMMYGPPVGTYHDPSAQEAGRCLMSSDGLPNKGMELKHGSQKLQESCWDLSRQTSPAKSSGPPGMSSQKRYGPPHETDGHGLAEATQSSKPGSVMLRLPGQEDHSSQNPLIMRRRVRSFISPIPSKRQSQDVKNSSTEDKGRLLHSSKEGADKAFNSYAHLSHSQDIKSIPKRDSSKDLPSPDSRNCPAVTLTSPAKTKILPPRKGRGLKLEAIVQKITSPNIRRSASSNSAEAGGDTVTLDDILSLKSGPPEGGSVAVQDADIEKRKGEVASDLVSPANQELHVEKPLPRSSEEWRGSVDDKVKTETHAETVTAGKEPPGAMTSTTSQKPGSNQGRPDGSLGGTAPLIFPDSKNVPPVGILAPEANPKAEEKENDTVTISPKQEGFPPKGYFPSGKKKGRPIGSVNKQKKQQQPPPPPPQPPQIPEGSADGEPKPKKQRQRRERRKPGAQPRKRKTKQAVPIVEPQEPEIKLKYATQPLDKTDAKNKSFYPYIHVVNKCELGAVCTIINAEEEEQTKLVRGRKGQRSLTPPPSSTESKALPASSFMLQGPVVTESSVMGHLVCCLCGKWASYRNMGDLFGPFYPQDYAATLPKNPPPKRATEMQSKVKVRHKSASNGSKTDTEEEEEQQQQQKEQRSLAAHPRFKRRHRSEDCGGGPRSLSRGLPCKKAATEGSSEKTVLDSKPSVPTTSEGGPELELQIPELPLDSNEFWVHEGCILWANGIYLVCGRLYGLQEALEIAREMKCSHCQEAGATLGCYNKGCSFRYHYPCAIDADCLLHEENFSVRCPKHKVRLWR

SEQ ID NO: 40303 - protein, 346 aa, Homo sapiens
MAASGKLSTCRLPPLPTIREIIKLLRLQAAKQLSQNFLLDLRLTDKIVRKAGNLTNAYVYEVGPGPGGITRSILNADVAELLVVEKDTRFIPGLQMLSDAAPGKLRIVHGDVLTFKVEKAFSESLKRPWEDDPPNVHIIGNLPFSVSTPLIIKWLENISCRDGPFVYGRTQMTLTFQKEVAERLAANTGSKQRSRLSVMAQYLCNVRHIFTIPGQAFVPKPEVDVGVVHFTPLIQPKIEQPFKLVEKVVQNVFQFRRKYCHRGLRMLFPEAQRLESTGRLLELADIDPTLRPRQLSISHFKSLCDVYRKMCDEDPQLFAYNFREELKRRKSKNEEKEEDDAENYRL

SEQ ID NO: 40304 - protein, 303 aa, Homo sapiens
MSDAGGGKKPPVDPQAGPGPGPGRAAGERGLSGSFPLVLKKLMENPPREARLDKEKGKEKLEEDEAAAASTMAVSASLMPPIWDKTIPYDGESFHLEYMDLDEFLLENGIPASPTHLAHNLLLPVAELEGKESASSSTASPPSSSTAIFQPSETVSSTESSLEKERETPSPIDPNCVEVDVNFNPDPADLVLSSVPGGELFNPRKHKFAEEDLKPQPMIKKAKKVFVPDEQKDEKYWTRRKKNNVAAKRSRDARRLKENQITIRAAFLEKENTALRTEVAELRKEVGKCKTIVSKYETKYGPL

SEQ ID NO: 40305 - protein, 273 aa, Homo sapiens
MDMPEVLKSLLEHSLPWPEKRTDKEKGKEKLEEDEAAAASTMAVSASLMPPIWDKTIPYDGESFHLEYMDLDEFLLENGIPASPTHLAHNLLLPVAELEGKESASSSTASPPSSSTAIFQPSETVSSTESSLEKERETPSPIDPNCVEVDVNFNPDPADLVLSSVPGGELFNPRKHKFAEEDLKPQPMIKKAKKVFVPDEQKDEKYWTRRKKNNVAAKRSRDARRLKENQITIRAAFLEKENTALRTEVAELRKEVGKCKTIVSKYETKYGPL

SEQ ID NO: 40306 - protein, 179 aa, Homo sapiens
MSTGSLSDVEDLQEVEMLECDGLKMDSNKEFVTSNESTEESSNCENGSPQKGRGGLGKRRKAPTKKSPLSGVSQEGKQVQRNAANARERARMRVLSKAFSRLKTTLPWVPPDTKLSKLDTLRLASSYIAHLRQILANDKYENGYIHPVNLTWPFMVAGKPESDLKEVVTASRLCGTTAS

SEQ ID NO: 40307 - protein, 329 aa, Homo sapiens
MGATGDAEQPRGPSGAERGGLELGDAGAAGQLVLTNPWNIMIKHRQVQRRGRRSQMTTSFTDPAISMDLLRAVLQPSINEEIQTVFNKYMKFFQKAALNVRDNVGEEVDAEQLIQEACRSCLEQAKLLFSDGEKVIPRLTHELPGIKRGRQAEEECAHRGSPLPKKRKGRPPGHILSSDRAAAGMVWKPKSCEPIRREGPKWDPARLNESTTFVLGSRANKALGMGGTRGRIYIKHPHLFKYAADPQDKHWLAEQHHMRATGGKMAYLLIEEDIRDLAASDDYRGCLDLKLEELKSFVLPSWMVEKMRKYMETLRTENEHRAVEAPPQT

SEQ ID NO: 40308 - protein, 379 aa, Homo sapiens
MGDSRRRSLGNQPSSEAAGRSEREQDGDPRGLQSSVYESRRVTDPERQDLDNAELGPEDPEEELPPEEVAGEEFPETLDPKEALSELERVLDKDLEEDIPEISRLSISQKLPSTTMTKARKRRRRRRLMELAEPKINWQVLKDRKGRCGKGYAWISPCKMSLHFCLCWPSVYWTERFLEDTTLTITVPAVSRRVEELSRPKRFYLEYYNNNRTTPVWPIPRSSLEYRASSRLKELAAPKIRDNFWSMPMSEVSQVSRAAQMAVPSSRILQLSKPKAPATLLEEWDPVPKPKPHVSDHNRLLHLARPKAQSDKCVPDRDPRWEVLDVTKKVVASPRIISLAKPKVRKGLNEGYDRRPLASMSLPPPKASPEKCDQPRPGL

SEQ ID NO: 40309 - protein, 355 aa, Homo sapiens
MGDSRRRSLGNQPSSEAAGRSEREQDGDPRGLQSSVYESRRVTDPERQDLDNAELGPEDPEEELPPEEVAGEEFPETLDPKEALSELERVLDKDLEEDIPEISRLSISQKLPSTTMTKARKRRRRRRLMELAEPKINWQVLKDRPSVYWTERFLEDTTLTITVPAVSRRVEELSRPKRFYLEYYNNNRTTPVWPIPRSSLEYRASSRLKELAAPKIRDNFWSMPMSEVSQVSRAAQMAVPSSRILQLSKPKAPATLLEEWDPVPKPKPHVSDHNRLLHLARPKAQSDKCVPDRDPRWEVLDVTKKVVASPRIISLAKPKVRKGLNEGYDRRPLASMSLPPPKASPEKCDQPRPGL

SEQ ID NO: 40310 - protein, 500 aa, Homo sapiens
MSGPGPREPPPEAGAAGGEAAVEGAGGGDAALGEPGLSFTTTDLSLVEMTEVEYTQLQHILCSHMEAAADGELETRLNSALLAAAGPGAGAGGFAAGGQGGAAPVYPVLCPSALAADAPCLGHIDFQELRMMLLSEAGAAEKTSGGGDGARARADGAAKEGAGAAAAAAGPDGAPEARAKPAVRVRLEDRFNSIPAEPPPAPRGPEPPEPGGALNNLVTLIRHPSELMNVPLQQQNKCTALVKNKTAATTTALQFTYPLFTTNACSTSGNSNLSQTQSSSNSCSVLEAAKHQDIGLPRAFSFCYQQEIESTKQTLGSRNKVLPEQVWIKVGEAALCKQALKRNRSRMRQLDTNVERRALGEIQNVGEGATATQGAWQSSESSQANLGEQAQSGPQGGRSQRRERHNRMERDRRRRIRICCDELNLLVPFCNAETDKATTLQWTTAFLKYIQERHGDSLKKEFESVFCGKTGRRLKLTRPDSLVTCPAQGSLQSSPSMEIK

SEQ ID NO: 40311 - protein, 452 aa, Homo sapiens
MTEVEYTQLQHILCSHMEAAADGELETRLNSALLAAAGPGAGAGGFAAGGQGGAAPVYPVLCPSALAADAPCLGHIDFQELRMMLLSEAGAAEKTSGGGDGARARADGAAKEGAGAAAAAAGPDGAPEARAKPAVRVRLEDRFNSIPAEPPPAPRGPEPPEPGGALNNLVTLIRHPSELMNVPLQQQNKCTALVKNKTAATTTALQFTYPLFTTNACSTSGNSNLSQTQSSSNSCSVLEAAKHQDIGLPRAFSFCYQQEIESTKQTLGSRNKVLPEQVWIKVGEAALCKQALKRNRSRMRQLDTNVERRALGEIQNVGEGATATQGAWQSSESSQANLGEQAQSGPQGGRSQRRERHNRMERDRRRRIRICCDELNLLVPFCNAETDKATTLQWTTAFLKYIQERHGDSLKKEFESVFCGKTGRRLKLTRPDSLVTCPAQGSLQSSPSMEIK

SEQ ID NO: 40312 - protein, 273 aa, Homo sapiens
MNVPLQQQNKCTALVKNKTAATTTALQFTYPLFTTNACSTSGNSNLSQTQSSSNSCSVLEAAKHQDIGLPRAFSFCYQQEIESTKQTLGSRNKVLPEQVWIKVGEAALCKQALKRNRSRMRQLDTNVERRALGEIQNVGEGATATQGAWQSSESSQANLGEQAQSGPQGGRSQRRERHNRMERDRRRRIRICCDELNLLVPFCNAETDKATTLQWTTAFLKYIQERHGDSLKKEFESVFCGKTGRRLKLTRPDSLVTCPAQGSLQSSPSMEIK

SEQ ID NO: 40313 - protein, 1336 aa, Homo sapiens
MENLPAVTTEEPTPMGRGPVGPSGGGSTRDQVRTVVMRPSVSWEKAGPEEAKAPVRGDEAPPARVAGPAAGTPPCQMGVYPTDLTLQLLAVRRKSRLRDPGLQQTLRGQLRLLENDSREMARVLGELSARLLSIHSDQDRIVVTFKTFEEIWKFSTYHALGFTHHCLANLLMDQAFWLLLPSEEEETAIQVHVDENALRLTHESLLIQEGPFFVLCPDHHVRVMTGPRDAGNGPQALRQASGAPQGEAAPETDSSPPSPSVSSEEVAVAAAPEPLIPFHQWALRIPQDPIDDAMGGPVMPGNPLMAVGLASALADFQGSGPEEMTFRGGDLIEILGAQVPSLPWCVGRHAASGRVGFVRSSLISMQGPVSELESAIFLNEEEKSFFSEGCFSEEDARQLLRRMSGTDVCSVYSLDSVEEAETEQPQEKEIPPPCLSLEPQETLQKVKNVLEQCKTCPGCPQEPASWGLCAASSDVSLQDPEEPSFCLEAEDDWEDPEALSSLLLFLNAPGYKASFRGLYDVALPWLSSVFRSFSDEEELTGRLAQARGAAKKAGLLMALARLCFLLGRLCSRRLKLSQARVYFEEALGALEGSFGDLFLVVAVYANLASIYRKQKNREKCAQVVPKAMALLLGTPDHICSTEAEGELLQLALRRAVGGQSLQAEARACFLLARHHVHLKQPEEALPFLERLLLLHRDSGAPEAAWLSDCYLLLADIYSRKCLPHLVLSCVKVASLRTRGSLAGSLRSVNLVLQNAPQPHSLPAQTSHYLRQALASLTPGTGQALRGPLYTSLAQLYSHHGCHGPAITFMTQAVEASAIAGVRAIVDHLVALAWLHVLHGQSPVALDILQSVRDAVVASEDQEGVIANMVAVALKRTGRTRQAAESYYRALRVARDLGQQRNQAVGLANFGALCLHAGASRLAQHYLLEAVRLFSRLPLGECGRDFTHVLLQLGHLCTRQGPAQQGKGYYEWALLVAVEMGHVESQLRAVQRLCHFYSAVMPSEAQCVIYHELQLSLACKVADKVLEGQLLETISQLYLSLGTERAYKSALDYTKRSLGIFIDLQKKEKEAHAWLQAGKIYYILRQSELVDLYIQVAQNVALYTGDPNLGLELFEAAGDIFFDGAWEREKAVSFYRDRALPLAVTTGNRKAELRLCNKLVALLATLEEPQEGLEFAHMALALSITLGDRLNERVAYHRLAALQHRLGHGELAEHFYLKALSLCNSPLEFDEETLYYVKVYLVLGDIIFYDLKDPFDAAGYYQLALAAAVDLGNKKAQLKIYTRLATIYHNFLLDREKSLFFYQKARTFATELNVRRVNLPPLPLCGWAPWLAPSHPR

SEQ ID NO: 40314 - protein, 372 aa, Homo sapiens
MAGGVMDKEYVGFAALPNQLHRKSVKKGFDFTLMVAGESGLGKSTLINSLFLTNLYEDRQVPEASARLTQTLAIERRGVEIEEGGVKVKLTLVDTPGFGDSVDCSDCWLPVVKFIEEQFEQYLRDESGLNRKNIQDSRVHCCLYFISPFGRGLRPLDVAFLRAVHEKVNIIPVIGKADALMPQETQALKQKIRDQLKEEEIHIYQFPECDSDEDEDFKRQDAEMKESIPFAVVGSCEVVRDGGNRPVRGRRYSWGTVEVENPHHCDFLNLRRMLVQTHLQDLKEVTHDLLYEGYRARCLQSLARPGARDRASRSKLSRQSATEIPLPMLPLADTEKLIREKDEELRRMQEMLEKMQAQMQQSQAQGEQSDAL

SEQ ID NO: 40315 - protein, 172 aa, Homo sapiens
MAGGVMDKEYVGFAALPNQLHRKSVKKGFDFTLMVAGESGLGKSTLINSLFLTNLYEDRQVPEASARLTQTLAIERRGVEIEEGGVKVKLTLVDTPGFGDSVDCSDCWLPVVKFIEEQFEQYLRDESGLNRKNIQDSRVHCCLYFISPFGRGSGGGILGAGAFREGWGVSAP

SEQ ID NO: 40316 - protein, 146 aa, Homo sapiens
MWPAPCSVGRLLIFFMCSSSGYVVQGCGPSPGARTTLGSPLSLWSIKTPSHIFCTRRAINLGFPSPPLVQLIFWSLNAGLDLYLCLISSCGFSQVFWPVEAFCSFSLSFFALALSHKFVICRLDQHIFSGFTKSLKNLPPCHRTDI

SEQ ID NO: 40317 - protein, 1288 aa, Homo sapiens
MGGCFCIPRERSLTRGPGKETPSKDPTVSSECIASSEYKEKCFLPQNINPDLTLSFCVKSRSRRCVNGPLQEAARRRLWALENEDQEVRMLFKDLSARLVSIQSQRAQFLITFKTMEEIWKFSTYLNLGYVSMCLEHLLFDHKYWLNCILVEDTEIQVSVDDKHLETIYLGLLIQEGHFFCRALCSVTPPAEKEGECLTLCKNELISVKMAEAGSELEGVSLVTGQRGLVLVSALEPLPLPFHQWFLKNYPGSCGLSRKRDWTGSYQIGRGRCKALTGYEPGEKDELNFYQGESIEIIGFVIPGLQWFIGKSTSSGQVGFVPTRNIDPDSYSPMSRNSAFLSDEERCSLLALGSDKQTECSSFLHTLARTDITSVYRLSGFESIQNPPNDLSASQPEGFKEVRPGRAWEEHQAVGSRQSSSSEDSSLEEELLSATSDSYRLPEPDDLDDPELLMDLSTGQEEEAENFAPILAFLDHEGYADHFKSLYDFSFSFLTSSFYSFSEEDEFVAYLEASRKWAKKSHMTWAHARLCFLLGRLSIRKVKLSQARVYFEEAIHILNGAFEDLSLVATLYINLAAIYLKQRLRHKGSALLEKAGALLACLPDRESSAKHELDVVAYVLRQGIVVGSSPLEARACFLAIRLLLSLGRHEEVLPFAERLQLLSGHPPASEAVASVLSFLYDKKYLPHLAVASVQQHGIQSAQGMSLPIWQVHLVLQNTTKLLGFPSPGWGEVSALACPMLRQALAACEELADRSTQRALCLILSKVYLEHRSPDGAIHYLSQALVLGQLLGEQESFESSLCLAWAYLLASQAKKALDVLEPLLCSLKETESLTQRGVIYNLLGLALQGEGRVNRAAKSYLRALNRAQEVGDVHNQAVAMANLGHLSLKSWAQHPARNYLLQAVRLYCELQASKETDMELVQVFLWLAQVLVSGHQLTHGLLCYEMALLFGLRHRHLKSQLQATKSLCHFYSSVSPNPEACITYHEHWLALAQQLRDREMEGRLLESLGQLYRNLNTARSLRRSLTCIKESLRIFIDLGETDKAAEAWLGAGRLHYLMQEDELVELCLQAAIQTALKSEEPLLALKLYEEAGDVFFNGTRHRHHAVEYYRAGAVPLARRLKAVRTELRIFNKLTELQISLEGYEKALEFATLAARLSTVTGDQRQELVAFHRLATVYYSLHMYEMAEDCYLKTLSLCPPWLQSPKEALYYAKVYYRLGRLTFCQLKDAHDATEYFLLALAAAVLLGDEELQDTIRSRLDNICQSPLWHSRPSGCSSERARWLSGGGLAL

SEQ ID NO: 40318 - protein, 150 aa, Homo sapiens
MSEQMMQSVGCRISLSVFQFLGDQRQELVAFHRLATVYYSLHMYEMAEDCYLKTLSLCPPWLQSPKEALYYAKVYYRLGRLTFCQLKDAHDATEYFLLALAAAVLLGDEELQDTIRSRLDNICQSPLWHSRPSGCSSERARWLSGGGLAL

SEQ ID NO: 40319 - protein, 125 aa, Homo sapiens
MSEQMMQSVGCRISLSVFQFLGDQRQELVAFHRLATVYYSLHMYEMAEDCYLKTLSLCPPWLQSPKEALYYAKVYYRLGRLTFCQLKVRARLPRFPDSHHPTILLPDSKTMRSLCGGAEKTRVPR

SEQ ID NO: 40320 - protein, 596 aa, Homo sapiens
MDLSTGQEEEAENFAPILAFLDHEGYADHFKSLYDFSFSFLTSSFYSFSEEDEFVAYLEASRKWAKKSHMTWAHARLCFLLGRLSIRKVKLSQARVYFEEAIHILNGAFEDLSLVATLYINLAAIYLKQRLRHKGSALLEKAGALLACLPDRESSAKHELDVVAYVLRQGIVVGSSPLEARACFLAIRLLLSLGRHEEVLPFAERLQLLSGHPPASEAVASVLSFLYDKKYLPHLAVASVQQHGIQSAQGMSLPIWQVHLVLQNTTKLLGFPSPGWGEVSALACPMLRQALAACEELADRSTQRALCLILSKVYLEHRSPDGAIHYLSQALVLGQLLGEQESFESSLCLAWAYLLASQAKKALDVLEPLLCSLKETESLTQRGVIYNLLGLALQGEGRVNRAAKSYLRALNRAQEVGDVHNQAVAMANLGHLSLKSWAQHPARNYLLQAVRLYCELQASKETDMELVQVFLWLAQVLVSGHQLTHGLLCYEMALLFGLRHRHLKSKYVPCCWEAIERSVGSSFIHFLSQVISFMSLLCVQVSFRPPNPSAISTALCPQTLRHASPTMSTGWPWLSNSGTGRWKEGCWSPWGSFIGT

SEQ ID NO: 40321 - protein, 1281 aa, Homo sapiens
MGGCFCIPRERSLTRGPGKETPSKDPTVSSECIASSEYKEKCFLPQNINPDLTLSFCVKSRSRRCVNGPLQEAARRRLWALENEDQEVRMLFKDLSARLVSIQSQRAQFLITFKTMEEIWKFSTYLNLEHLLFDHKYWLNCILVEDTEIQVSVDDKHLETIYLGLLIQEGHFFCRALCSVTPPAEKEGECLTLCKNELISVKMAEAGSELEGVSLVTGQRGLVLVSALEPLPLPFHQWFLKNYPGSCGLSRKRDWTGSYQIGRGRCKALTGYEPGEKDELNFYQGESIEIIGFVIPGLQWFIGKSTSSGQVGFVPTRNIDPDSYSPMSRNSAFLSDEERCSLLALGSDKQTECSSFLHTLARTDITSVYRLSGFESIQNPPNDLSASQPEGFKEVRPGRAWEEHQAVGSRQSSSSEDSSLEEELLSATSDSYRLPEPDDLDDPELLMDLSTGQEEEAENFAPILAFLDHEGYADHFKSLYDFSFSFLTSSFYSFSEEDEFVAYLEASRKWAKKSHMTWAHARLCFLLGRLSIRKVKLSQARVYFEEAIHILNGAFEDLSLVATLYINLAAIYLKQRLRHKGSALLEKAGALLACLPDRESSAKHELDVVAYVLRQGIVVGSSPLEARACFLAIRLLLSLGRHEEVLPFAERLQLLSGHPPASEAVASVLSFLYDKKYLPHLAVASVQQHGIQSAQGMSLPIWQVHLVLQNTTKLLGFPSPGWGEVSALACPMLRQALAACEELADRSTQRALCLILSKVYLEHRSPDGAIHYLSQALVLGQLLGEQESFESSLCLAWAYLLASQAKKALDVLEPLLCSLKETESLTQRGVIYNLLGLALQGEGRVNRAAKSYLRALNRAQEVGDVHNQAVAMANLGHLSLKSWAQHPARNYLLQAVRLYCELQASKETDMELVQVFLWLAQVLVSGHQLTHGLLCYEMALLFGLRHRHLKSQLQATKSLCHFYSSVSPNPEACITYHEHWLALAQQLRDREMEGRLLESLGQLYRNLNTARSLRRSLTCIKESLRIFIDLGETDKAAEAWLGAGRLHYLMQEDELVELCLQAAIQTALKSEEPLLALKLYEEAGDVFFNGTRHRHHAVEYYRAGAVPLARRLKAVRTELRIFNKLTELQISLEGYEKALEFATLAARLSTVTGDQRQELVAFHRLATVYYSLHMYEMAEDCYLKTLSLCPPWLQSPKEALYYAKVYYRLGRLTFCQLKDAHDATEYFLLALAAAVLLGDEELQDTIRSRLDNICQSPLWHSRPSGCSSERARWLSGGGLAL

SEQ ID NO: 40322 - protein, 437 aa, Homo sapiens
MSVSARSAAAEERSVNSSTMVAQQKNLEGYVGFANLPNQVYRKSVKRGFEFTLMVVGESGLGKSTLINSLFLTDLYSPEYPGPSHRIKKTVQVEQSKVLIKEGGVQLLLTIVDTPGFGDAVDNSNCWQPVIDYIDSKFEDYLNAESRVNRRQMPDNRVQCCLYFIAPSGHGLKPLDIEFMKRLHEKVNIIPLIAKADTLTPEECQQFKKQIMKEIQEHKIKIYEFPETDDEEENKLVKKIKDRLPLAVVGSNTIIEVNGKRVRGRQYPWGVAEVENGEHCDFTILRNMLIRTHMQDLKDVTNNVHYENYRSRKLAAVTYNGVDNNKNKGQLTKSPLAQMEEERREHVAKMKKMEMEMEQVFEMKVKEKVQKLKDSEAELQRRHEQMKKNLEAQHKELEEKRRQFEDEKANWEAQQRILEQQNSSRTLEKNKKKGKIF

SEQ ID NO: 40323 - protein, 436 aa, Homo sapiens
MSVSARSAAAEERSVNSSTMAQQKNLEGYVGFANLPNQVYRKSVKRGFEFTLMVVGESGLGKSTLINSLFLTDLYSPEYPGPSHRIKKTVQVEQSKVLIKEGGVQLLLTIVDTPGFGDAVDNSNCWQPVIDYIDSKFEDYLNAESRVNRRQMPDNRVQCCLYFIAPSGHGLKPLDIEFMKRLHEKVNIIPLIAKADTLTPEECQQFKKQIMKEIQEHKIKIYEFPETDDEEENKLVKKIKDRLPLAVVGSNTIIEVNGKRVRGRQYPWGVAEVENGEHCDFTILRNMLIRTHMQDLKDVTNNVHYENYRSRKLAAVTYNGVDNNKNKGQLTKSPLAQMEEERREHVAKMKKMEMEMEQVFEMKVKEKVQKLKDSEAELQRRHEQMKKNLEAQHKELEEKRRQFEDEKANWEAQQRILEQQNSSRTLEKNKKKGKIF

SEQ ID NO: 40324 - protein, 1445 aa, Homo sapiens
MGNLVIPLGKGRAGRVESGQRIPPPAPRPSVECTGDDIALQMEKMLFPLKSPSATWLSPSSTPWMMDFILTSVCGLVLLFLLLLYVHSDPPSPPPGRKRSSREPQRERSGRSRSRKISALKACRILLRELEETRDLNYLLESHLRKLAGEGSSHLPLGGDPLGDVCKPVPAKAHQPHGKCMQDPSPASLSPPAPPAPLASTLSPGPMTFSEPFGPHSTLSASGPPEPLLPLKCPATQPHVVFPPSPQPHGPLASSPPPPDSSLAGLQCGSTTCPVPQSSPLHNQVLPPPTRVISGLGCSSDPIWDLYCWREAATTWGLSTYSHGKSQPRHLPDHTSEASFWGDPTPKHMEVGGCTFIHPDVQKLLETLIAKRALMKMWQEKERKRADHPHMTSLGKEWDITTLNPFWNVSTQPQQLPRPQQVSDATTVGNHLQQKRSQLFWDLPSLNSESLATTVWVSRNPSSQNAHSVPLDKASTSLPGEPEVEASSQLSQAPPQPHHMAQPQHFTPAWPQSQPPPLAEIQTQAHLSPPVPSLGCSSPPQIRGCGASYPTSQERTQSVIPTGKEYLEWPLKKRPKWKRVLPSLLKKSQAVLSQPTAHLPQERPASWSPKSAPILPGVVTSPELPEHWWQGRNAIHQEQSCGPPSRLQASGDLLQPDGEFPGRPQSQAEDTQQALLPSQPSDFAGKGRKDVQKTGFRSSGRFSDKGCLGSKLGPDPSRDQGSGRTSVKALDEDKEAEGDLRRSWKYQSVSSTPRDPDKEHLENKLQIHLARKVGEIKEGWIPMPVRRSWLMAKCAVPKSDTHRKPGKLASWRGGKAHVNTSQELSFLHPCTQQILEVHLVRFCVRHSWGTDLQSLEPINVWSGEAQAPPFPQSTFTPWASWVSRVESVPKVPIFLGKRPQNGPGDNRTTSKSVPTVSGPLAAPPPEQEGVQRPPRGSQSADTHGRSEAFPTGHKGRGCSQPPTCSLVGRTWQSRTVLESGKPKPRLEGSMGSEMAGNEAWLESESMSPGDPCSSRALQVLSIGSQWARAEDALQALKVGEKPPTWEVTLGASVRASSGSVQEDLRSTGALGTTGNPSASSVCVAQDPEQLHLKAQVVSEIALIVQVDSEEQLPGRAPGILLQDGATGLCLPGRHMDMLTAADRLPTQAPLSTSQSVSGKNMTASQGPCALLWKGGDSPGQQEPGSPKAKAPQKSQKTLGCADKGEAHRRPRTGEQGHRSKGPRTSEASGRSHPAQAREIGDKQERKYNQLQLEKGQTPPESHFQRKISHHPQGLHPRKGGTRWEDVLQKGKPGADAFQSWGSGPPRQFMDCMADKAWTISRVVGQILVDKLGLQWGRGPSEVNRHKGDFRAQENVPSCCHRGHCHQERSREMRALACSPKATPKGHHCPVKNRGIRDRDSSWAPPPREPVSPAGPHHHRPRMASTSGGPHPQLQELMSAQRCLAS

SEQ ID NO: 40325 - protein, 1382 aa, Homo sapiens
MLRKLTIEQINDWFTIGKTVTNVELLGAPPAFPAGAAREEVQRQDVAPGAGPAAQAPALAQAPARPAAAFERSLSQRSSEVEYINKYRQLEAQELDVCRSVQPTSGPGPRPSLAKLSSVTCIPGTTYKYPDLPISRYKEEVVSLIESNSVVIIHGATGSGKSTQLPQYILDHYVQRSAYCSIVVTQPRKIGASSIARWISKERAWTLGGVVGYQVGLEKIATEDTRLIYMTTGVLLQKIVSAKSLMEFTHIIIDEVHERTEEMDFLLLVVRKLLRTNSRFVKVVLMSATISCKEFADYFAVPVQNKMNPAYIFEVEGKPHSVEEYYLNDLEHIHHSKLSPHLLEEPVITKDIYEVAVSLIQMFDDLDMKESGNKAWSGAQFVLERSSVLVFLPGLGEINYMHELLTSLVHKRLQVYPLHSSVALEEQNNVFLSPVPGYRKIILSTNIAESSVTVPDVKYVIDFCLTRTLVCDEDTNYQSLRLSWASKTSCNQRKGRAGRVSRGYCYRLVHKDFWDNSIPDHVVPEMLRCPLGSTILKVKLLDMGEPRALLATALSPPGLSDIERTILLLKEVGALAVSGQREDENPHDGELTFLGRVLAQLPVNQQLGKLIVLGHVFGCLDECLIIAAALSLKNFFAMPFRQHLDGYRNKVNFSGSSKSDCIALVEAFKTWKACRQTGELRYPKDELNWGRLNYIQIKRIREVAELYEELKTRISQFNMHVDSRRPVMDQEYIYKQRFILQVVLAGAFYPNYFTFGQPDEEMAVRELAGKDPKTTVVLKHIPPYGFLYYKQLQSLFRQCGQVKSIVFDGAKAFVEFSRNPTERFKTLPAVYMAIKMSQLKVSLELSVHSAEEIEGKVQGMNVSKLRNTRVNVDFQKQTVDPMQVSFNTSDRSQTVTDLLLTIDVTEVVEVGHFWGYRIDENNSEILKKLTAEINQLTLVPLPTHPHPDLVCLAPFADFDKQRYFRAQVLYVSGNSAEVFFVDYGNKSHVDLHLLMEIPCQFLELPFQALEFKICKMRPSAKSLVCGKHWSDGASQWFASLVSGCTLLVKVFSVVHSVLHVDVYQYSGVQDAINIRDVLIQQGYAELTEESYESKQSHEVLKGLFSKSVENMTDGSVPFPMKDDEKYLIRILLESFSTNKLGTPNCKAELHGPFNPYELKCHSLTRISKFRCVWIEKESINSVIISDAPEDLHQRMLVAASLSINATGSTMLLRETSLMPHIPGLPALLSMLFAPVIELRIDQNGKYYTGVLCGLGWNPATGASILPEHDMELAFDVQFSVEDVVEVNILRAAINKLVCDGPNGCKCLGPERVAQLQDIARQKLLGLFCQSKPREKIVPKWHEKPYEWNQVDPKLVMEQADRESSRGKNTFLYQLHKLVVLGT

SEQ ID NO: 40326 - protein, 1191 aa, Homo sapiens
MLRKLTIEQINDWFTIGKTVTNVELLGAPPAFPAGAAREEVQRQDVAPGAGPAAQAPALAQAPARPAAAFERSLSQRSSEVEYINKYRQLEAQELDVCRSVQPTSGPGPRPSLAKLSSVTCIPGTTYKYPDLPISRYKEEVVSLIESNSVVIIHGATGSGKSTQLPQYILDHYVQRSAYCSIVVTQPRKIGASSIARWISKERAWTLGGVVGYQVGLEKIATEDTRLIYMTTGVLLQKIVSAKSLMEFTHIIIDEVHERTEEMDFLLLVVRKLLRTNSRFVKVVLMSATISCKEFADYFAVPVQNKMNPAYIFEVEGKPHSVEEYYLNDLEHIHHSKLSPHLLEEPVITKDIYEVAVSLIQMFDDLDMKESGNKAWSGAQFVLERSSVLVFLPGLGEINYMHELLTSLVHKRLQVYPLHSSVALEEQNNVFLSPVPGYRKIILSTNIAESSVTVPDVKYVIDFCLTRTLVCDEDTNYQSLRLSWASKTSCNQRKGRAGRVSRGYCYRLVHKDFWDNSIPDHVVPEMLRCPLGSTILKVKLLDMGEPRALLATALSPPGLSDIERTILLLKEVGALAVSGQREDENPHDGELTFLGRVLAQLPVNQQLGKLIVLGHVFGCLDECLIIAAALSLKNFFAMPFRQHLDGYRNKVNFSGSSKSDCIALVEAFKTWKACRQTGELRYPKDELNWGRLNYIQIKRIREVAELYEELKTRISQFNMHVDSRRPVMDQEYIYKQRFILQVVLAGAFYPNYFTFGQPDEEMAVRELAGKDPKTTVVLKHIPPYGFLYYKQLQSLFRQCGQVKSIVFDGAKAFVEFSRNPTERFKTLPAVYMAIKMSQLKVSLELSVHSAEEIEGKVQGMNVSKLRNTRVNVDFQKQTVDPMQVSFNTSDRSQTVTDLLLTIDVTEVVEVGHFWGYRIDENNSEILKKLTAEINQLTLVPLPTHPHPDLVCLAPFADFDKQRYFRAQVLYVSGNSAEVFFVDYGNKSHVDLHLLMEIPCQFLELPFQALEFKICKMRPSAKSLVCGKHWSDGASQWFASLVSGCTLLVKVFSVVHSVLHVDVYQYSGVQDAINIRDVLIQQGYAELTEESYESKVNILRAAINKLVCDGPNGCKCLGPERVAQLQDIARQKLLGLFCQSKPREKIVPKWHEKPYEWNQVDPKLVMEQADRESSRGKNTFLYQLHKLVVLGT

SEQ ID NO: 40327 - protein, 188 aa, Homo sapiens
MDCRKMARFSYSVIWIMAISKVFELGLVAGLGHQEFARPSRGYLAFRDDSIWPQEEPAIRPRSSQRVPPMGIQHSKELNRTCCLNGGTCMLGSFCACPPSFYGRNCEHDVRKENCGSVPHDTWLPKKCSLCKCWHGQLRCFPQAFLPGCDGLVMDEHLVASRTPELPPSARTTTFMLVGICLSIQSYY

SEQ ID NO: 40328 - protein, 461 aa, Homo sapiens
MKILFVEPAIFLSAFAMTLTGPLTTQYVYRRIWEETGNYTFSSDSNISECEKNKSSPIFAFQEEVQKKVSRFNLQMDISGLIPGLVSTFILLSISDHYGRKFPMILSSVGALATSVWLCLLCYFAFPFQLLIASTFIGAFCGNYTTFWGACFAYIVDQCKEHKQKTIRIAIIDFLLGLVTGLTGLSSGYFIRELGFEWSFLIIAVSLAVNLIYILFFLGDPVKECSSQNVTMSCSEGFKNLFYRTYMLFKNASGKRRFLLCLLLFTVITYFFVVIGIAPIFILYELDSPLCWNEVFIGYGSALGSASFLTSFLGIWLFSYCMEDIHMAFIGIFTTMTGMAMTAFASTTLMMFLARVPFLFTIVPFSVLRSMLSKVVRSTEQGTLFACIAFLETLGGVTAVSTFNGIYSATVAWYPGFTFLLSAGLLLLPAISLCVVKCTSWNEGSYELLIQEESSEDASDR

SEQ ID NO: 40329 - protein, 463 aa, Homo sapiens
MKILFVEPAIFLSAFAMTLTGPLTTQYVYRRIWEETGNYTFSSDSNISECEKNKSSPIFAFQEEVQKKVSRFNLQMDISGLIPGLVSTFILLSISDHYGRKFPMILSSVGALATSVWLCLLCYFAFPFQLLIASTFIGAFCGNYTTFWGACFAYIVDQCKEHKQKTIRIAIIDFLLGLVTGLTGLSSGYFIRELGFEWSFLIIAVSLAVNLIYILFFLGDPVKECSSQNVTMSCSEGFKNLFYRTYMLFKNASGKRRFLLCLLLFTVITYFFVVIGIAPIFILYELDSPLCWNEVFIGYGSALGSASFLTSFLGIWLFSYCMEDIHMAFIGIFTTMTGMAMTAFASTTLMMFLARVPFLFTIVPFSVLRSMLSKVVRSTEQGTLFACIAFLETLGGVTAVSTFNGIYSATVAWYPGFTFLLSAGLLLLPAISLCVVKCTSWNEGSYELLIQEESSEDASDRAC

SEQ ID NO: 40330 - protein, 386 aa, Homo sapiens
MDISGLIPGLVSTFILLSISDHYGRKFPMILSSVGALATSVWLCLLCYFAFPFQLLIASTFIGAFCGNYTTFWGACFAYIVDQCKEHKQKTIRIAIIDFLLGLVTGLTGLSSGYFIRELGFEWSFLIIAVSLAVNLIYILFFLGDPVKECSSQNVTMSCSEGFKNLFYRTYMLFKNASGKRRFLLCLLLFTVITYFFVVIGIAPIFILYELDSPLCWNEVFIGYGSALGSASFLTSFLGIWLFSYCMEDIHMAFIGIFTTMTGMAMTAFASTTLMMFLARVPFLFTIVPFSVLRSMLSKVVRSTEQGTLFACIAFLETLGGVTAVSTFNGIYSATVAWYPGFTFLLSAGLLLLPAISLCVVKCTSWNEGSYELLIQEESSEDASDR

SEQ ID NO: 40331 - protein, 350 aa, Homo sapiens
MSAACWEEPWGLPGGFAKRVLVTGGAGFIASHMIVSLVEDYPNYMIINLDKLDYCASLKNLETISNKQNYKFIQGDICDSHFVKLLFETEKIDIVLHFAAQTHVDLSFVRAFEFTYVNVYGTHVLVSAAHEARVEKFIYVSTDEVYGGSLDKEFDESSPKQPTNPYASSKAAAECFVQSYWEQYKFPVVITRSSNVYGPHQYPEKVIPKFISLLQHNRKCCIHGSGLQTRNFLYATDVVEAFLTVLKKGKPGEIYNIGTNFEMSVVQLAKELIQLIKETNSESEMENWVDYVNDRPTNDMRYPMKSEKIHGLGWRPKVPWKEGIKKTIEWYRENFHNWKNVEKALEPFPV

SEQ ID NO: 40332 - protein, 166 aa, Homo sapiens
MAVSTVFSTSSLMLALSRHSLLSPLLSVTSFRRFYRGDSPTDSQKDMIEIPLPPWQERTDESIETKRARLLYESRKRGMLENCILLSLFAKEHLQHMTEKQLNLYDRLINEPSNDWDIYYWATEAKPAPEIFENEVMALLRDFAKNKNKEQRLRAPDLEYLFEKPR

SEQ ID NO: 40333 - protein, 121 aa, Homo sapiens
MASCLALRMALLLVSGVLAPAVLTDDVPQEPVPTLWNEPAELPSGEGPVESTSPGREPVDTGPPAPTVAPGPEDSTAQERLDQGGGSLGPGAIAAIVIAALLATCVVLALVVVALRKFSAS

SEQ ID NO: 40334 - protein, 390 aa, Homo sapiens
MNSLSEANTKFMFDLFQQFRKSKENNIFYSPISITSALGMVLLGAKDNTAQQISKVLHFDQVTENTTEKAATYHVDRSGNVHHQFQKLLTEFNKSTDAYELKIANKLFGEKTYQFLQEYLDAIKKFYQTSVESTDFANAPEESRKKINSWVESQTNEKIKNLFPDGTIGNDTTLVLVNAIYFKGQWENKFKKENTKEEKFWPNKNTYKSVQMMRQYNSFNFALLEDVQAKVLEIPYKGKDLSMIVLLPNEIDGLQKLEEKLTAEKLMEWTSLQNMRETCVDLHLPRFKMEESYDLKDTLRTMGMVNIFNGDADLSGMTWSHGLSVSKVLHKAFVEVTEEGVEAAAATAVVVVELSSPSTNEEFCCNHPFLFFIRQNKTNSILFYGRFSSP

SEQ ID NO: 40335 - protein, 315 aa, Homo sapiens
MVQQRGARAKRDGGPPPPGPGPAEEGAREPGWCKTPSGHIKRPMNAFMVWSQHERRKIMDQWPDMHNAEISKRLGRRWQLLQDSEKIPFVREAERLRLKHMADYPDYKYRPRKKSKGAPAKARPRPPGGSGGGSRLKPGPQLPGRGGRRAAGGPLGGGAAAPEDDDEDDDEELLEVRLVETPGRELWRMVPAGRAARGQAERAQGPSGEGAAAAAAASPTPSEDEEPEEEEEEAAAAEEGEEETVASGEESLGFLSRLPPGPAGLDCSALDRDPDLQPPSGTSHFEFPDYCTPEVTEMIAGDWRPSSIADLVFTY

SEQ ID NO: 40336 - protein, 756 aa, Homo sapiens
MNGAPSPEDGASPSSPPLPPPPPPSWREFCESHARAAALDFARRFRLYLASHPQYAGPGAEAAFSRRFAELFLQHFEAEVARASGSLSPPILAPLSPGAEISPHDLSLESCRVGGPLAVLGPSRSSEDLAGPLPSSVSSSSTTSSKPKLKKRFSLRSVGRSVRGSVRGILQWRGTVDPPSSAGPLETSSGPPVLGGNSNSNSSGGAGTVGRGLVSDGTSPGERWTHRFERLRLSRGGGALKDGAGMVQREELLSFMGAEEAAPDPAGVGRGGGVAGPPSGGGGQPQWQKCRLLLRSEGEGGGGSRLEFFVPPKASRPRLSIPCSSITDVRTTTALEMPDRENTFVVKVEGPSEYIMETVDAQHVKAWVSDIQECLSPGPCPATSPRPMTLPLAPGTSFLTRENTDSLELSCLNHSESLPSQDLLLGPSESNDRLSQGAYGGLSDRPSASISPSSASIAASHFDSMELLPPELPPRIPIEEGPPTGTVHPLSAPYPPLDTPETATGSFLFQGEPEGGEGDQPLSGYPWFHGMLSRLKAAQLVLTGGTGSHGVFLVRQSETRRGEYVLTFNFQGKAKHLRLSLNEEGQCRVQHLWFQSIFDMLEHFRVHPIPLESGGSSDVVLVSYVPSSQRQQEPTTSHDPPQPPEPPSWTDPPQPGAEEASRAPEVAAAAAAAAKERQEKEKAGGGGVPEELVPVVELVPVVELEEAIAPGSEAQGAGSGGDAGVPPMVQLQQSPLGGDGEEGGHPRAINNQYSFV

SEQ ID NO: 40337 - protein, 671 aa, Homo sapiens
MNGAPSPEDGASPSSPPLPPPPPPSWREFCESHARAAALDFARRFRLYLASHPQYAGPGAEAAFSRRFAELFLQHFEAEVARASGSLSPPILAPLSPGAEISPHDLSLESCRVGGPLAVLGPSRSSEDLAGPLPSSVSSSSTTSSKPKLKKRFSLRSVGRSVRGSVRGILQWRGTVDPPSSAGPLETSSGPPVLGGNSNSNSSGGAGTVGRGLVSDGTSPGERWTHRFERLRLSRGGGALKDGAGMVQREELLSFMGAEEAAPDPAGVGRGGGVAGPPSGGGGQPQWQKCRLLLRSEGEGGGGSRLEFFVPPKASRPRLSIPCSSITDVRTTTALEMPDRENTFVVKVEGPSEYIMETVDAQHVKAWVSDIQECLSPGPCPATSPRPMTLPLAPGTSFLTRENTDSLELSCLNHSESLPSQDLLLGPSESNDRLSQGAYGGLSDRPSASISPSSASIAASHFDSMELLPPELPPRIPIEEGPPTGTVHPLSAPYPPLDTPETATGSFLFQGEPEGGEGDQPLSGYPWFHGMLSRLKAAQLVLTGGTGSHGVFLVRQSETRRGEYVLTFNFQGKAKHLRLSLNEEGQCRVQHLWFQSIFDMLEHFRVHPIPLESGGSSDVVLVSYVPSSQRQQGREQAGSHAGVCEGDGCHPDASCTLMPFGASDCVTDHLP

SEQ ID NO: 40338 - protein, 683 aa, Homo sapiens
MNGAPSPEDGASPSSPPLPPPPPPSWREFCESHARAAALDFARRFRLYLASHPQYAGPGAEAAFSRRFAELFLQHFEAEVARASGSLSPPILAPLSPGAEISPHDLSLESCRVGGPLAVLGPSRSSEDLAGPLPSSVSSSSTTSSKPKLKKRFSLRSVGRSVRGSVRGILQWRGTVDPPSSAGPLETSSGPPVLGGNSNSNSSGGAGTVGRGLVSDGTSPGERWTHRFERLRLSRGGGALKDGAGMVQREELLSFMGAEEAAPDPAGVGRGGGVAGPPSGGGGQPQWQKCRLLLRSEGEGGGGSRLEFFVPPKASRPRLSIPCSSITDVRTTTALEMPDRENTFVVKVEGPSEYIMETVDAQHVKAWVSDIQECLSPGPCPATSPRPMTLPLAPGTSFLTRENTDSLELSCLNHSESLPSQDLLLGPSESNDRLSQGAYGGLSDRPSASISPSSASIAASHFDSMELLPPELPPRIPIEEGPPTGTVHPLSAPYPPLDTPETATGSFLFQGEPEGGEGDQPLSGYPWFHGMLSRLKAAQLVLTGGTGSHGVFLVRQSETRRGEYVLTFNFQGKAKHLRLSLNEEGQCRVQHLWFQSIFDMLEHFRVHPIPLESGGSSDVVLVSYVPSSQRQQGEQSRSAGEEVPVHPRSEAGSRLGAMRGCAREMDATPMPPAPSCPSERVTV

SEQ ID NO: 40339 - protein, 101 aa, Homo sapiens
MDQYVSTAPPRFPIAQLGTFKQDSAGMGRIFKGNLLQKKALTTFENEHHIRFFTLLVLFHVMVLLRNHSRIQGVSEDWKRANSIFRNFLRLKSSRNTAEAE

SEQ ID NO: 40340 - protein, 390 aa, Homo sapiens
MNSLSEANTKFMFDLFQQFRKSKENNIFYSPISITSALGMVLLGAKDNTAQQIKKVLHFDQVTENTTGKAATYHVDRSGNVHHQFQKLLTEFNKSTDAYELKIANKLFGEKTYLFLQEYLDAIKKFYQTSVESVDFANAPEESRKKINSWVESQTNEKIKNLIPEGNIGSNTTLVLVNAIYFKGQWEKKFNKEDTKEEKFWPNKNTYKSIQMMRQYTSFHFASLEDVQAKVLEIPYKGKDLSMIVLLPNEIDGLQKLEEKLTAEKLMEWTSLQNMRETRVDLHLPRFKVEESYDLKDTLRTMGMVDIFNGDADLSGMTGSRGLVLSGVLHKAFVEVTEEGAEAAAATAVVGFGSSPTSTNEEFHCNHPFLFFIRQNKTNSILFYGRFSSP

SEQ ID NO: 40341 - protein, 338 aa, Homo sapiens
MNSLSEANTKFMFDLFQQFRKSKENNIFYSPISITSALGMVLLGAKDNTAQQIKKVLHFDQVTENTTGKAATYHVDRSGNVHHQFQKLLTEFNKSTDAYELKIANKLFGEKTYLFLQEYLDAIKKFYQTSVESVDFANAPEESRKKINSWVESQTNEKIKNLIPEGNIGSNTTLVLVNAIYFKGQWEKKFNKEDTKEEKFWPNKLEEKLTAEKLMEWTSLQNMRETRVDLHLPRFKVEESYDLKDTLRTMGMVDIFNGDADLSGMTGSRGLVLSGVLHKAFVEVTEEGAEAAAATAVVGFGSSPTSTNEEFHCNHPFLFFIRQNKTNSILFYGRFSSP

SEQ ID NO: 40342 - protein, 60 aa, Homo sapiens
MDAVSQVPMEVVLPKHILDIWVIVLIILATIVIMTSLLLCPATAVIIYRMRTHPILSGAV

SEQ ID NO: 40343 - protein, 640 aa, Homo sapiens
MKISTTQIERRFEISSSLVGLIDGSFEIGNLFVIVFVSYFGSKLHRPKLIGIGCFLMGTGSILMALPHFFMGYYRYSKETNIDPSENSTSNLPNCLINQMLSLNRTPSEIIERGCVKESGSHMWIYVFMGNMLRGIGETPIVPLGISYIDDFAKEGHSSLYLGTVNVMGMTGLVFAFMLGSLFAKMYVDIGYVDLSTIRITPKDSRWVGAWWLGFLVSGIVSIISSIPFFFLPLNPNKPQKERKVSLFLHVLKTNDKRNQIANLTNRRKYITKNVTGFFQSLKSILTNPLYVIFVIFTLLHMSSYIASLTYIIKMVEQQYGWSASKTNFLLGVLALPAVAIGMFSGGYIIKKFKLSLVGLAKLAFCSATVHLLSQVLYFFLICESKSVAGLTLTYDGNSPVRSHVDVPLSYCNSECNCDESQWEPVCGNNGITYLSPCLAGCKSSSGNKEPIVFYNCSCVEVIGLQNKNYSAHLGECPRDDACTRKSYVYFVIQVLDAFLCAVGLTSYSVLVIRIVQPELKALAIGFHSMIMRSLGGILVPIYFGALIDTTCMKWSTNSCGARGACRIYNSTYLGRAFFGLKVALIFPVLVLLTVFIFVVRKKSHGKDTKVLENERQVMDEANLEFLNDSEHFVPSAEEQ

SEQ ID NO: 40344 - protein, 70 aa, Homo sapiens
MFTRAQVRRILQRVPGKQRFGIYRFLPFFFVLGGTMEWIMIKVRVGQETFYDVYRRKASERQYQRRLEDE

SEQ ID NO: 40345 - protein, 575 aa, Homo sapiens
MNGPALQPSSPSSAPSASPAAAPRGWSEFCELHAVAAARELARQYWLFAREHPQHAPLRAELVSLQFTDLFQRYFCREVRDGRAPGRDYRDTGRGPPAKAEASPEPGPGPAAPGLPKARSSEELAPPRPPGPCSFQHFRRSLRHIFRRRSAGELPAAHTAAAPGTPGEAAETPARPGLAKKFLPWSLAREPPPEALKEAVLRYSLADEASMDSGARWQRGRLALRRAPGPDGPDRVLELFDPPKSSRPKLQAACSSIQEVRWCTRLEMPDNLYTFVLKVKDRTDIIFEVGDEQQLNSWMAELSECTGRGLESTEAEMHIPSALEPSTSSSPRGSTDSLNQGASPGGLLDPACQKTDHFLSCYPWFHGPISRVKAAQLVQLQGPDAHGVFLVRQSETRRGEYVLTFNFQGIAKHLRLSLTERGQCRVQHLHFPSVVDMLHHFQRSPIPLECGAACDVRLSSYVVVVSQPPGSCNTVLFPFSLPHWDSESLPHWGSELGLPHLSSSGCPRGLSPEGLPGRSSPPEQIFHLVPSPEELANSLQHLEHEPVNRARDSDYEMDSSSRSHLRAIDNQYTPL

SEQ ID NO: 40346 - protein, 1709 aa, Homo sapiens
MGFLPKLLLLASFFPAGQASWGVSSPQDVQGVKGSCLLIPCIFSFPADVEVPDGITAIWYYDYSGQRQVVSHSADPKLVEARFRGRTEFMGNPEHRVCNLLLKDLQPEDSGSYNFRFEISEVNRWSDVKGTLVTVTEEPRVPTIASPVELLEGTEVDFNCSTPYVCLQEQVRLQWQGQDPARSVTFNSQKFEPTGVGHLETLHMAMSWQDHGRILRCQLSVANHRAQSEIHLQVKYAPKGVKILLSPSGRNILPGELVTLTCQVNSSYPAVSSIKWLKDGVRLQTKTGVLHLPQAAWSDAGVYTCQAENGVGSLVSPPISLHIFMAEVQVSPAGPILENQTVTLVCNTPNEAPSDLRYSWYKNHVLLEDAHSHTLRLHLATRADTGFYFCEVQNVHGSERSGPVSVVVNHPPLTPVLTAFLETQAGLVGILHCSVVSEPLATLVLSHGGHILASTSGDSDHSPRFSGTSGPNSLRLEIRDLEETDSGEYKCSATNSLGNATSTLDFHANAARLLISPAAEVVEGQAVTLSCRSGLSPTPDARFSWYLNGALLHEGPGSSLLLPAASSTDAGSYHCRARDGHSASGPSSPAVLTVLYPPRQPTFTTRLDLDAAGAGAGRRGLLLCRVDSDPPARLQLLHKDRVVATSLPSGGGCSTCGGCSPRMKVTKAPNLLRVEIHNPLLEEEGLYLCEASNALGNASTSATFNGQATVLAIAPSHTLQEGTEANLTCNVSREAAGSPANFSWFRNGVLWAQGPLETVTLLPVARTDAALYACRILTEAGAQLSTPVLLSVLYPPDRPKLSALLDMGQGHMALFICTVDSRPLALLALFHGEHLLATSLGPQVPSHGRFQAKAEANSLKLEVRELGLGDSGSYRCEATNVLGSSNTSLFFQVRGAWVQVSPSPELQEGQAVVLSCQVHTGVPEGTSYRWYRDGQPLQESTSATLRFAAITLTQAGAYHCQAQAPGSATTSLAAPISLHVSYAPRHVTLTTLMDTGPGRLGLLLCRVDSDPPAQLRLLHGDRLVASTLQGVGGPEGSSPRLHVAVAPNTLRLEIHGAMLEDEGVYICEASNTLGQASASADFDAQAVNVQVWPGATVREGQLVNLTCLVWTTHPAQLTYTWYQDGQQRLDAHSIPLPNVTVRDATSYRCGVGPPGRAPRLSRPITLDVLYAPRNLRLTYLLESHGGQLALVLCTVDSRPPAQLALSHAGRLLASSTAASVPNTLRLELRGPQPRDEGFYSCSARSPLGQANTSLELRLEGVRVILAPEAAVPEGAPITVTCADPAAHAPTLYTWYHNGRWLQEGPAASLSFLVATRAHAGAYSCQAQDAQGTRSSRPAALQVLYAPQDAVLSSFRDSRARSMAVIQCTVDSEPPAELALSHDGKVLATSSGVHSLASGTGHVQVARNALRLQVQDVPAGDDTYVCTAQNLLGSISTIGRLQVEGARVVAEPGLDVPEGAALNLSCRLLGGPGPVGNSTFAWFWNDRRLHAEPVPTLAFTHVARAQAGMYHCLAELPTGAAASAPVMLRVLYPPKTPTMMVFVEPEGGLRGILDCRVDSEPLASLTLHLGSRLVASSQPQGAPAEPHIHVLASPNALRVDIEALRPSDQGEYICSASNVLGSASTSTYFGVRALHRLHQFQQLLWVLGLLVGLLLLLLGLGACYTWRRRRVCKQSMGENSVEMAFQKETTQLIDPDAATCETSTCAPPLG

SEQ ID NO: 40347 - protein, 1649 aa, Homo sapiens
MGFLPKLLLLASFFPAGQASWGVSSPQDVQGVKGSCLLIPCIFSFPADVEVPDGITAIWYYDYSGQRQVVSHSADPKLVEARFRGRTEFMGNPEHRVCNLLLKDLQPEDSGSYNFRFEISEVNRWSDVKGTLVTVTEEPRVPTIASPVELLEGTEVDFNCSTPYVCLQEQVRLQWQGQDPARSVTFNSQKFEPTGVGHLETLHMAMSWQDHGRILRCQLSVANHRAQSEIHLQVKYAPKGVKILLSPSGRNILPGELVTLTCQVNSSYPAVSSIKWLKDGVRLQTKTGVLHLPQAAWSDAGVYTCQAENGVGSLVSPPISLHIFMAEVQVSPAGPILENQTVTLVCNTPNEAPSDLRYSWYKNHVLLEDAHSHTLRLHLATRADTGFYFCEVQNVHGSERSGPVSVVVNHPPLTPVLTAFLETQAGLVGILHCSVVSEPLATLVLSHGGHILASTSGDSDHSPRFSGTSGPNSLRLEIRDLEETDSGEYKCSATNSLGNATSTLDFHANAARLLISPAAEVVEGQAVTLSCRSGLSPTPDARFSWYLNGALLHEGPGSSLLLPAASSTDAGSYHCRARDGHSASGPSSPAVLTVLYPPRQPTFTTRLDLDAAGAGAGRRGLLLCRVDSDPPARLQLLHKDRVVATSLPSGGGCSTCGGCSPRMKVTKAPNLLRVEIHNPLLEEEGLYLCEASNALGNASTSATFNGQATVLAIAPSHTLQEGTEANLTCNVSREAAGSPANFSWFRNGVLWAQGPLETVTLLPVARTDAALYACRILTEAGAQLSTPVLLSVLYPPDRPKLSALLDMGQGHMALFICTVDSRPLALLALFHGEHLLATSLGPQVPSHGRFQAKAEANSLKLEVRELGLGDSGSYRCEATNVLGSSNTSLFFQVRGAWVQVSPSPELQEGQAVVLSCQVHTGVPEGTSYRWYRDGQPLQESTSATLRFAAITLTQAGAYHCQAQAPGSATTSLAAPISLHVSYAPRHVTLTTLMDTGPGRLGLLLCRVDSDPPAQLRLLHGDRLVASTLQGVGGPEGSSPRLHVAVAPNTLRLEIHGAMLEDEGVYICEASNTLGQASASADFDAQAVNVQVWPGATVREGQLVNLTCLVWTTHPAQLTYTWYQDGQQRLDAHSIPLPNVTVRDATSYRCGVGPPGRAPRLSRPITLDVLYAPRNLRLTYLLESHGGQLALVLCTVDSRPPAQLALSHAGRLLASSTAASVPNTLRLELRGPQPRDEGFYSCSARSPLGQANTSLELRLEGVRVILAPEAAVPEGAPITVTCADPAAHAPTLYTWYHNGRWLQEGPAASLSFLVATRAHAGAYSCQAQDAQGTRSSRPAALQVLYAPQDAVLSSFRDSRARSMAVIQCTVDSEPPAELALSHDGKVLATSSGVHSLASGTGHVQVARNALRLQVQDVPAGDDTYVCTAQNLLGSISTIGRLQVEGARVVAEPGLDVPEGAALNLSCRLLGGPGPVGNSTFAWFWNDRRLHAEPVPTLAFTHVARAQAGMYHCLAELPTGAAASAPVMLRVLYPPKTPTMMVFVEPEGGLRGILDCRVDSEPLASLTLHLGSRLVASSQPQGAPAEPHIHVLASPNALRVDIEALRPSDQGEYICSASNVLGSASTSTYFGVRGEGRGLHLPGHSAQKPSS

SEQ ID NO: 40348 - protein, 1701 aa, Homo sapiens
MGFLPKLLLLASFFPAGQASWGVSSPQDVQGVKGSCLLIPCIFSFPADVEVPDGITAIWYYDYSGQRQVVSHSADPKLVEARFRGRTEFMGNPEHRVCNLLLKDLQPEDSGSYNFRFEISEVNRWSDVKGTLVTVTEEPRVPTIASPVELLEGTEVDFNCSTPYVCLQEQVRLQWQGQDPARSVTFNSQKFEPTGVGHLETLHMAMSWQDHGRILRCQLSVANHRAQSEIHLQVKYAPKGVKILLSPSGRNILPGELVTLTCQVNSSYPAVSSIKWLKDGVRLQTKTGVLHLPQAAWSDAGVYTCQAENGVGSLVSPPISLHIFMAEVQVSPAGPILENQTVTLVCNTPNEAPSDLRYSWYKNHVLLEDAHSHTLRLHLATRADTGFYFCEVQNVHGSERSGPVSVVVNHPPLTPVLTAFLETQAGLVGILHCSVVSEPLATLVLSHGGHILASTSGDSDHSPRFSGTSGPNSLRLEIRDLEETDSGEYKCSATNSLGNATSTLDFHANAARLLISPAAEVVEGQAVTLSCRSGLSPTPDARFSWYLNGALLHEGPGSSLLLPAASSTDAGSYHCRARDGHSASGPSSPAVLTVLYPPRQPTFTTRLDLDAAGAGAGRRGLLLCRVDSDPPARLQLLHKDRVVATSLPSGGGCSTCGGCSPRMKVTKAPNLLRVEIHNPLLEEEGLYLCEASNALGNASTSATFNGQATVLAIAPSHTLQEGTEANLTCNVSREAAGSPANFSWFRNGVLWAQGPLETVTLLPVARTDAALYACRILTEAGAQLSTPVLLSVLYPPDRPKLSALLDMGQGHMALFICTVDSRPLALLALFHGEHLLATSLGPQVPSHGRFQAKAEANSLKLEVRELGLGDSGSYRCEATNVLGSSNTSLFFQVRGAWVQVSPSPELQEGQAVVLSCQVHTGVPEGTSYRWYRDGQPLQESTSATLRFAAITLTQAGAYHCQAQAPGSATTSLAAPISLHVSYAPRHVTLTTLMDTGPGRLGLLLCRVDSDPPAQLRLLHGDRLVASTLQGVGGPEGSSPRLHVAVAPNTLRLEIHGAMLEDEGVYICEASNTLGQASASADFDAQAVNVQVWPGATVREGQLVNLTCLVWTTHPAQLTYTWYQDGQQRLDAHSIPLPNVTVRDATSYRCGVGPPGRAPRLSRPITLDVLYAPRNLRLTYLLESHGGQLALVLCTVDSRPPAQLALSHAGRLLASSTAASVPNTLRLELRGPQPRDEGFYSCSARSPLGQANTSLELRLEGVRVILAPEAAVPEGAPITVTCADPAAHAPTLYTWYHNGRWLQEGPAASLSFLVATRAHAGAYSCQAQDAQGTRSSRPAALQVLYAPQDAVLSSFRDSRARSMAVIQCTVDSEPPAELALSHDGKVLATSSGVHSLASGTGHVQVARNALRLQVQDVPAGDDTYVCTAQNLLGSISTIGRLQVEGARVVAEPGLDVPEGAALNLSCRLLGGPGPVGNSTFAWFWNDRRLHAEPVPTLAFTHVARAQAGMYHCLAELPTGAAASAPVMLRVLYPPKTPTMMVFVEPEGGLRGILDCRVDSEPLASLTLHLGSRLVASSQPQGAPAEPHIHVLASPNALRVDIEALRPSDQGEYICSASNVLGSASTSTYFGVRALHRLHQFQQLLWVLGLLVGLLLLLLGLGACYTWSSLILMQPHVRPQPVPHPWADQWCCLPSGGESGQNL

SEQ ID NO: 40349 - protein, 132 aa, Homo sapiens
MDLPYYHGRLTKQDCETLLLKEGVDGNFLLRDSESIPGVLCLCVSFKNIVYTYRIFREKHGYYRIQTAEGSPKQVFPSLKELISKFEKPNQGMVVHLLKPIKRTSPSLRWRGLKLELETFVNSNSDYVDVLP

SEQ ID NO: 40350 - protein, 77 aa, Homo sapiens
MDLPYYHGRLTKQDCETLLLKEGVDGNFLLRDSESIPGVLCLCVSFKNIVYTYRIFREKHGYYRIQNSNSDYVDVLP

SEQ ID NO: 40351 - protein, 483 aa, Homo sapiens
MAADEVAGGARKATKSKLFEFLVHGVRPGMPSGARMPHQGAPMGPPGSPYMGSPAVRPGLAPAGMEPARKRAAPPPGQSQAQSQGQPVPTAPARSRSAKRRKMADKILPQRIRELVPESQAYMDLLAFERKLDQTIMRKRVDIQEALKRPMKQKRKLRLYISNTFNPAKPDAEDSDGSIASWELRVEGKLLDDPSKQKRKFSSFFKSLVIELDKDLYGPDNHLVEWHRTPTTQETDGFQVKRPGDLSVRCTLLLMLDYQPPQFKLDPRLARLLGLHTQSRSAIVQALWQYVKTNRLQDSHDKEYINGDKYFQQIFDCPRLKFSEIPQRLTALLLPPDPIVINHVISVDPSDQKKTACYDIDVEVEEPLKGQMSSFLLSTANQQEISALDSKIHETIESINQLKIQRDFMLSFSRDPKGYVQDLLRSQSRDLKVMTDVAGNPEEERRAEFYHQPWSQEAVSRYFYCKIQQRRQELEQSLVVRNT

SEQ ID NO: 40352 - protein, 470 aa, Homo sapiens
MTPGLQHPPTVVQRPGMPSGARMPHQGAPMGPPGSPYMGSPAVRPGLAPAGMEPARKRAAPPPGQSQAQSQGQPVPTAPARSRSAKRRKMADKILPQRIRELVPESQAYMDLLAFERKLDQTIMRKRVDIQEALKRPMKQKRKLRLYISNTFNPAKPDAEDSDGSIASWELRVEGKLLDDPSKQKRKFSSFFKSLVIELDKDLYGPDNHLVEWHRTPTTQETDGFQVKRPGDLSVRCTLLLMLDYQPPQFKLDPRLARLLGLHTQSRSAIVQALWQYVKTNRLQDSHDKEYINGDKYFQQIFDCPRLKFSEIPQRLTALLLPPDPIVINHVISVDPSDQKKTACYDIDVEVEEPLKGQMSSFLLSTANQQEISALDSKIHETIESINQLKIQRDFMLSFSRDPKGYVQDLLRSQSRDLKVMTDVAGNPEEERRAEFYHQPWSQEAVSRYFYCKIQQRRQELEQSLVVRNT

SEQ ID NO: 40353 - protein, 88 aa, Homo sapiens
MNMSKQPVSNVRAIQANINIPMGAFRPGAGQPPRRKECTPEVEEGVPPTSDEEKKPIPGAKKLPGPAVNLSEIQNIKSELKYVPKAEQ

SEQ ID NO: 40354 - protein, 753 aa, Homo sapiens
MAPDSDPFPEGPLLKLLPLDARDRGTQRCRLGPAALHALGARLGSAVKISLPDGGSCLCTAWPRRDGADGFVQLDPLCASPGAAVGASRSRRSLSLNRLLLVPCPPLRRVAVWPVLRERAGAPGARNTAAVLEAAQELLRNRPISLGHVVVAPPGAPGLVAALHIVGGTPSPDPAGLVTPRTRVSLGGEPPSEAQPQPEVPLGGLSEAADSLRELLRLPLRYPRALTALGLAVPRGVLLAGPPGVGKTQLVRAVAREAGAELLAVSAPALQGSRPGETEENVRRVFQRARELASRGPSLLFLDEMDALCPQRGSRAPESRVVAQVLTLLDGASGDREVVVVGATNRPDALDPALRRPGRFDREVVIGTPTLKQRKEILQVITSKMPISSHVDLGLLAEMTVGYVGADLTALCREAAMHALLHSEKNQDNPVIDEIDFLEAFKNIQPSSFRSVIGLMDIKPVDWEEIGGLEDVKLKLKQSIEWPLKFPWEFVRMGLTQPKGVLLYGPPGCAKTTLVRALATSCHCSFVSVSGADLFSPFVGDSEKVLSQIFRQARASTPAILFLDEIDSILGARSASKTGCDVQERVLSVLLNELDGVGLKTIERRGSKSSQQEFQEVFNRSVMIIAATNRPDVLDTALLRPGRLDKIIYIPPPDHKGRLSILKVCTKTMPIGPDVSLENLAAETCFFSGADLRNLCTEAALLALQENGLDATTVKQEHFLKSLKTVKPSLSCKDLALYENLFKKEGFSNVEGI

SEQ ID NO: 40355 - protein, 620 aa, Homo sapiens
MAPDSDPFPEGPLLKLLPLDARDRGTQRCRLGPAALHALGARLGSAVKISLPDGGSCLCTAWPRRDGADGFVQLDPLCASPGAAVGASRSRRSLSLNRLLLVPCPPLRRVAVWPVLRERAGAPGARNTAAVLEAAQELLRNRPISLGHVVVAPPGAPGLVAALHIVGGTPSPDPAGLVTPRTRVSLGGEPPSEAQPQPEVPLGGLSEAADSLRELLRLPLRYPRALTALGLAVPRGVLLAGPPGVGKTQLVRAVAREAGAELLAVSAPALQGSRPGETEENVRRVFQRARELASRGPSLLFLDEMDALCPQRGSRAPESRVVAQVLTLLDGASGDREVVVVGATNRPDALDPALRRPGRFDREVVIGTPTLKQRKEILQVITSKMPISSHVDLGLLAEMTVGYVGADLTALCREAAMHALLHSEKNQDNPVIDEIDFLEAFKNIQPSSFRSVIGLMDIKPVDWEEIGGLEDVKLKLKQSIEWPLKFPWEFVRMGLTQPKGVLLYGPPGCAKTTLVRALATSCHCSFVSVSGADLFSPFVGDSEKVLSQIFRQARASTPAILFLDEIDSILGARSASKTGCDVQERVLSVLLNELDGVGLKTIERRGSKSSQQGKYKELKK

SEQ ID NO: 40356 - protein, 392 aa, Homo sapiens
MAPDSDPFPEGPLLKLLPLDARDRGTQRCRLGPAALHALGARLGSAVKISLPDGGSCLCTAWPRRDGADGFVQLDPLCASPGAAVGASRSRRSLSLNRLLLVPCPPLRRVAVWPVLRERAGAPGARNTAAVLEAAQELLRNRPISLGHVVVAPPGAPGLVAALHIVGGTPSPDPAGLVTPRTRVSLGGEPPSEAQPQPEVPLGGLSEAADSLRELLRLPLRYPRALTALGLAVPRGVLLAGPPGVGKTQLVRAVAREAGAELLAVSAPALQGSRPGETEENVRRVFQRARELASRGPSLLFLDEMDALCPQRGSRAPESRVVAQVLTLLDGASGDREVVVVGATNRPDALDPALRRPGRFDREVNGLGGFAHCRWNLGRFWRHLAAPEAFAS

SEQ ID NO: 40357 - protein, 103 aa, Homo sapiens
MRQRLLPSVTSLLLVALLFPGSSQARHVNHSATEALGELRERAPGQGTNGFQLLRHAVKRDLLPPRTPPYQVHISHREARGPSFRICVDFLGPRWARGCSTGN

SEQ ID NO: 40358 - protein, 50 aa, Homo sapiens
MKVFFLFAVLFCLVQTNSVHISHREARGPSFRICVDFLGPRWARGCSTGN

SEQ ID NO: 40359 - protein, 113 aa, Homo sapiens
MRQRLLPSVTSLLLVALLFPGSSQARHVNHSATEALGELRERAPGQGTNGFQLLRHAVKRDLLPPRTPPYQEPASDLKVVDCRRSEGFCQEYCNYMETQVGYCSKKKDACCLH

SEQ ID NO: 40360 - protein, 133 aa, Homo sapiens
MRQRLLPSVTSLLLVALLFPGSSQARHVNHSATEALGELRERAPGQGTNGFQLLRHAVKRDLLPPRTPPYQGDVPPGIRNTICHMQQGICRLFFCHSGEKKRDICSDPWNRCCVSNTDEEGKEKPEMDGRSGI

SEQ ID NO: 40361 - protein, 80 aa, Homo sapiens
MKVFFLFAVLFCLVQTNSGDVPPGIRNTICHMQQGICRLFFCHSGEKKRDICSDPWNRCCVSNTDEEGKEKPEMDGRSGI

SEQ ID NO: 40362 - protein, 403 aa, Homo sapiens
METYAEVGKEGKPSCASVDLQGDSSLQVEISDAVSERDKVKFTVQTKSCLPHFAQTEFSVVRQHEEFIWLHDAYVENEEYAGLIIPPAPPRPDFEASREKLQKLGEGDSSVTREEFAKMKQELEAEYLAIFKKTVAMHEVFLQRLAAHPTLRRDHNFFVFLEYGQDLSVRGKNRKELLGGFLRNIVKSADEALITGMSGLKEVDDFFEHERTFLLEYHTRIRDACLRADRVMRAHKCLADDYIPISAALSSLGTQEVNQLRTSFLKLAELFERLRKLEGRVASDEDLKLSDMLRYYMRDSQAAKDLLYRRLRALADYENANKALDKARTRNREVRPAESHQQLCCQRFERLSDSAKQELMDFKSRRVSSFRKNLIELAELELKHAKASTLILRNTLVALKGEP

SEQ ID NO: 40363 - protein, 277 aa, Homo sapiens
METYAEVGKEGKPSCASVDLQGDSSLQVEISDAVSERDKVKFTVQTKSCLPHFAQTEFSVVRQHEEFIWLHDAYVENEEYAGLIIPPAPPRPDFEASREKLQKLGEGDSSVTREEFAKMKQELEAEYLAIFKKTVAMHEVFLQRLAAHPTLRRDHNFFVFLEYGQDLSVRGKNRKELLGGFLRNIVKSADEALITGMSGLKEVDDFFEHERTFLLEYHTRIRDACLRADRVMRAHKCTQGPRGPGSPCPSPQRFNSLGERREQGVPCCLSVATSTKA

SEQ ID NO: 40364 - protein, 312 aa, Homo sapiens
MAAQKINEGLEHLAKAEKYLKTGFLKWKPDYDSAASEYGKAAVAFKNAKQFEQAKDACLREAVAHENNRALFHAAKAYEQAGMMLKEMQKLPEAVQLIEKASMMYLENGTPDTAAMALERAGKLIENVDPEKAVQLYQQTANVFENEERLRQAVELLGKASRLLVRGRRFDEAALSIQKEKNIYKEIENYPTCYKKTIAQVLVHLHRNDYVAAERCVRESYSIPGFNGSEDCAALEQLLEGYDQQDQDQVSDVCNSPLFKYMDNDYAKLGLSLVVPGGGIKKKSPATPQAKPDGVTATAADEEEDEYSGGLC

SEQ ID NO: 40365 - protein, 230 aa, Homo sapiens
MMLKEMQKLPEAVQLIEKASMMYLENGTPDTAAMALERAGKLIENVDPEKAVQLYQQTANVFENEERLRQAVELLGKASRLLVRGRRFDEAALSIQKEKNIYKEIENYPTCYKKTIAQVLVHLHRNDYVAAERCVRESYSIPGFNGSEDCAALEQLLEGYDQQDQDQVSDVCNSPLFKYMDNDYAKLGLSLVVPGGGIKKKSPATPQAKPDGVTATAADEEEDEYSGGLC

SEQ ID NO: 40366 - protein, 270 aa, Homo sapiens
MPQAFLLGSIHEPAGALMEPQPCPGSLAESFLEEELRLNAELSQLQFSEPVGIIYNPVEYAWEPHRNYVTRYCQGPKEVLFLGMNPGPFGMAQTGVPFGEVSMVRDWLGIVGPVLTPPQEHPKRPVLGLECPQSEVSGARFWGFFRNLCGQPEVFFHHCFVHNLCPLLFLAPSGRNLTPAELPAKQREQLLGICDAALCRQVQLLGVRLVVGVGRLAEQRARRALAGLMPEVQVEGLLHPSPRNPQANKGWEAVAKERLNELGLLPLLLK

SEQ ID NO: 40367 - protein, 177 aa, Homo sapiens
MPQAFLLGSIHEPAGALMEPQPCPGSLAESFLEEELRLNAELSQLQFSEPVGIIYNPVEYAWEPHRNYVTRYCQGPKEVLFLGMNPGPFGMAQTGVPFGEVSMVRDWLGIVGPVLTPPQEHPKRPVLGLECPQSEGPRQSMGHEIKSELLMGGCSWIRGKIQCDRVQVRRPGFSSQL

SEQ ID NO: 40368 - protein, 616 aa, Homo sapiens
MNSPGGRGKKKGSGGASNPVPPRPPPPCLAPAPPAAGPAPPPESPHKRNLYYFSYPLFVGFALLRLVAFHLGLLFVWLCQRFSRALMAAKRSSGAAPAPASASAPAPVPGGEAERVRVFHKQAFEYISIALRIDEDEKAGQKEQAVEWYKKGIEELEKGIAVIVTGQGEQCERARRLQAKMMTNLVMAKDRLQLLEKMQPVLPFSKSQTDVYNDSTNLACRNGHLQSESGAVPKRKDPLTHTSNSLPRSKTVMKTGSAGLSGHHRAPSYSGLSMVSGVKQGSGPAPTTHKGTPKTNRTNKPSTPTTATRKKKDLKNFRNVDSNLANLIMNEIVDNGTAVKFDDIAGQDLAKQALQEIVILPSLRPELFTGLRAPARGLLLFGPPGNGKTMLAKAVAAESNATFFNISAASLTSKYVGEGEKLVRALFAVARELQPSIIFIDEVDSLLCERREGEHDASRRLKTEFLIEFDGVQSAGDDRVLVMGATNRPQELDEAVLRRFIKRVYVSLPNEETRLLLLKNLLCKQGSPLTQKELAQLARMTDGYSGSDLTALAKDAALGPIRELKPEQVKNMSASEMRNIRLSDFTESLKKIKRSVSPQTLEAYIRWNKDFGDTTV

SEQ ID NO: 40369 - protein, 584 aa, Homo sapiens
MNSPGGRGKKKGSGGASNPVPPRPPPPCLAPAPPAAGPAPPPESPHKRNLYYFSYPLFVGFALLRLVAFHLGLLFVWLCQRFSRALMAAKRSSGAAPAPASASAPAPVPGGEAERVRVFHKQAFEYISIALRIDEDEKAGQKEQAVEWYKKGIEELEKGIAVIVTGQGEQCERARRLQAKMMTNLVMAKDRLQLLESGAVPKRKDPLTHTSNSLPRSKTVMKTGSAGLSGHHRAPSYSGLSMVSGVKQGSGPAPTTHKGTPKTNRTNKPSTPTTATRKKKDLKNFRNVDSNLANLIMNEIVDNGTAVKFDDIAGQDLAKQALQEIVILPSLRPELFTGLRAPARGLLLFGPPGNGKTMLAKAVAAESNATFFNISAASLTSKYVGEGEKLVRALFAVARELQPSIIFIDEVDSLLCERREGEHDASRRLKTEFLIEFDGVQSAGDDRVLVMGATNRPQELDEAVLRRFIKRVYVSLPNEETRLLLLKNLLCKQGSPLTQKELAQLARMTDGYSGSDLTALAKDAALGPIRELKPEQVKNMSASEMRNIRLSDFTESLKKIKRSVSPQTLEAYIRWNKDFGDTTV

SEQ ID NO: 40370 - protein, 530 aa, Homo sapiens
MAAKRSSGAAPAPASASAPAPVPGGEAERVRVFHKQAFEYISIALRIDEDEKAGQKEQAVEWYKKGIEELEKGIAVIVTGQGEQCERARRLQAKMMTNLVMAKDRLQLLEKMQPVLPFSKSQTDVYNDSTNLACRNGHLQSESGAVPKRKDPLTHTSNSLPRSKTVMKTGSAGLSGHHRAPSYSGLSMVSGVKQGSGPAPTTHKGTPKTNRTNKPSTPTTATRKKKDLKNFRNVDSNLANLIMNEIVDNGTAVKFDDIAGQDLAKQALQEIVILPSLRPELFTGLRAPARGLLLFGPPGNGKTMLAKAVAAESNATFFNISAASLTSKYVGEGEKLVRALFAVARELQPSIIFIDEVDSLLCERREGEHDASRRLKTEFLIEFDGVQSAGDDRVLVMGATNRPQELDEAVLRRFIKRVYVSLPNEETRLLLLKNLLCKQGSPLTQKELAQLARMTDGYSGSDLTALAKDAALGPIRELKPEQVKNMSASEMRNIRLSDFTESLKKIKRSVSPQTLEAYIRWNKDFGDTTV

SEQ ID NO: 40371 - protein, 498 aa, Homo sapiens
MAAKRSSGAAPAPASASAPAPVPGGEAERVRVFHKQAFEYISIALRIDEDEKAGQKEQAVEWYKKGIEELEKGIAVIVTGQGEQCERARRLQAKMMTNLVMAKDRLQLLESGAVPKRKDPLTHTSNSLPRSKTVMKTGSAGLSGHHRAPSYSGLSMVSGVKQGSGPAPTTHKGTPKTNRTNKPSTPTTATRKKKDLKNFRNVDSNLANLIMNEIVDNGTAVKFDDIAGQDLAKQALQEIVILPSLRPELFTGLRAPARGLLLFGPPGNGKTMLAKAVAAESNATFFNISAASLTSKYVGEGEKLVRALFAVARELQPSIIFIDEVDSLLCERREGEHDASRRLKTEFLIEFDGVQSAGDDRVLVMGATNRPQELDEAVLRRFIKRVYVSLPNEETRLLLLKNLLCKQGSPLTQKELAQLARMTDGYSGSDLTALAKDAALGPIRELKPEQVKNMSASEMRNIRLSDFTESLKKIKRSVSPQTLEAYIRWNKDFGDTTV

SEQ ID NO: 40372 - protein, 350 aa, Homo sapiens
MEKQPQNSRRGLAPREVPPAVGLLLIMALMNTLLYLCLDHFFIAPRQSTVDPTHCPYGHFRIGQMKNCSPWLSCEELRTEVRQLKRVGEGAVKRVFLSEWKEHKVALSQLTSLEMKDDFLHGLQMLKSLQGTHVVTLLGYCEDDNTMLTEYHPLGSLSNLEETLNLSKYQNVNTWQHRLELAMDYVSIINYLHHSPVGTRVMCDSNDLPKTLSQYLLTSNFSILANDLDALPLVNHSSGMLVKCGHRELHGDFVAPEQLWPYGEDVPFHDDLMPSYDEKIDIWKIPDISSFLLGHIEGSDMVRFHLFDIHKACKSQTPSERPTAQDVLETYQKVLDTLRDAMMSQAREML

SEQ ID NO: 40373 - protein, 757 aa, Homo sapiens
MSNPGTRRNGSSIKIRLTVLCAKNLAKKDFFRLPDPFAKIVVDGSGQCHSTDTVKNTLDPKWNQHYDLYVGKTDSITISVWNHKKIHKKQGAGFLGCVRLLSNAISRLKDTGYQRLDLCKLNPSDTDAVRGQIVVSLQTRDRIGTGGSVVDCRGLLENEGTVYEDSGPGRPLSCFMEEPAPYTDSTGAAAGGGNCRFVESPSQDQRLQAQRLRNPDVRGSLQTPQNRPHGHQSPELPEGYEQRTTVQGQVYFLHTQTGVSTWHDPRIPSPSGTIPGGDAAFLYEFLLQGHTSEPRDLNSVNCDELGPLPPGWEVRSTVSGRIYFVDHNNRTTQFTDPRLHHIMNHQCQLKEPSQPLPLPSEGSLEDEELPAQRYERDLVQKLKVLRHELSLQQPQAGHCRIEVSREEIFEESYRQIMKMRPKDLKKRLMVKFRGEEGLDYGGVAREWLYLLCHEMLNPYYGLFQYSTDNIYMLQINPDSSINPDHLSYFHFVGRIMGLAVFHGHYINGGFTVPFYKQLLGKPIQLSDLESVDPELHKSLVWILENDITPVLDHTFCVEHNAFGRILQHELKPNGRNVPVTEENKKEYVRLYVNWRFMRGIEAQFLALQKGFNELIPQHLLKPFDQKELELIIGGLDKIDLNDWKSNTRLKHCVADSNIVRWFWQAVETFDEERRARLLQFVTGSTRVPLQGFKALQGSTGAAGPRLFTIHLIDANTDNLPKAHTCFNRIDIPPYESYEKLYEKLLTAVEETCGFAVE

SEQ ID NO: 40374 - protein, 731 aa, Homo sapiens
MSNPGTRRNGSSIKIRLTVLCAKNLAKKDFFRLPDPFAKIVVDGSGQCHSTDTVKNTLDPKWNQHYDLYVGKTDSITISVWNHKKIHKKQGAGFLGCVRLLSNAISRLKDTGYQRLDLCKLNPSDTDAVRGQIVVSLQTRDRIGTGGSVVDCRGLLENEGTVYEDSGPGRPLSCFMEEPAPYTDSTGAAAGGGNCRFVESPSQDQRLQAQRLRNPDVRGSLQTPQNRPHGHQSPELPEGYEQRTTVQGQVYFLHTQTGVSTWHDPRIPRDLNSVNCDELGPLPPGWEVRSTVSGRIYFVDHNNRTTQFTDPRLHHIMNHQCQLKEPSQPLPLPSEGSLEDEELPAQRYERDLVQKLKVLRHELSLQQPQAGHCRIEVSREEIFEESYRQIMKMRPKDLKKRLMVKFRGEEGLDYGGVAREWLYLLCHEMLNPYYGLFQYSTDNIYMLQINPDSSINPDHLSYFHFVGRIMGLAVFHGHYINGGFTVPFYKQLLGKPIQLSDLESVDPELHKSLVWILENDITPVLDHTFCVEHNAFGRILQHELKPNGRNVPVTEENKKEYVRLYVNWRFMRGIEAQFLALQKGFNELIPQHLLKPFDQKELELIIGGLDKIDLNDWKSNTRLKHCVADSNIVRWFWQAVETFDEERRARLLQFVTGSTRVPLQGFKALQGSTGAAGPRLFTIHLIDANTDNLPKAHTCFNRIDIPPYESYEKLYEKLLTAVEETCGFAVE

SEQ ID NO: 40375 - protein, 748 aa, Homo sapiens
MSNPGGRRNGPVKLRLTVLCAKNLVKKDFFRLPDPFAKVVVDGSGQCHSTDTVKNTLDPKWNQHYDLYIGKSDSVTISVWNHKKIHKKQGAGFLGCVRLLSNAINRLKDTGYQRLDLCKLGPNDNDTVRGQIVVSLQSRDRIGTGGQVVDCSRLFDNDLPDGWEERRTASGRIQYLNHITRTTQWERPTRPASEYSSPGRPLSCFVDENTPISGTNGATCGQSSDPRLAERRVRSQRHRNYMSRTHLHTPPDLPEGYEQRTTQQGQVYFLHTQTGVSTWHDPRVPRDLSNINCEELGPLPPGWEIRNTATGRVYFVDHNNRTTQFTDPRLSANLHLVLNRQNQLKDQQQQQVVSLCPDDTECLTVPRYKRDLVQKLKILRQELSQQQPQAGHCRIEVSREEIFEESYRQVMKMRPKDLWKRLMIKFRGEEGLDYGGVAREWLYLLSHEMLNPYYGLFQYSRDDIYTLQINPDSAVNPEHLSYFHFVGRIMGMAVFHGHYIDGGFTLPFYKQLLGKSITLDDMELVDPDLHNSLVWILENDITGVLDHTFCVEHNAYGEIIQHELKPNGKSIPVNEENKKEYVRLYVNWRFLRGIEAQFLALQKGFNEVIPQHLLKTFDEKELELIICGLGKIDVNDWKVNTRLKHCTPDSNIVKWFWKAVEFFDEERRARLLQFVTGSSRVPLQGFKALQGAAGPRLFTIHQIDACTNNLPKAHTCFNRIDIPPYESYEKLYEKLLTAIEETCGFAVE

SEQ ID NO: 40376 - protein, 223 aa, Homo sapiens
MESGAYGVAEAGGSFDLRPFLTQPQVVARALCLVFALIVFSCIYGEGYSNTHKSKQMYCVFNHNEDACRYGSAIGVLAFLASAFLVVDAYFPQISNATDRKYLVIGDLLFSALWTFLWFVGFCFLTNQWAVTDPEDVLVGADSARAAITFSFFSIFSWGVLASLTYQRYKAGVDDFIQNYVDPSPDPNTAYASYPGASVDNYQQPPFTQNAETTEGYQPPPVY

SEQ ID NO: 40377 - protein, 290 aa, Homo sapiens
MQKHYTVAWFLYSAPGVDPSPPCRSLGWKRKKEWSDESEEEPEKELAPEPEETWVVEMLCGLKMKLKQQRVSPILPEHHKDFNSQLAPGVDPSPPHRSFCWKRKREWWDESEESLEEEPRKVLAPEPEEIWVAEMLCGLKMKLKRRRVSLVLPEHHEAFNRLLEDPVIKRFLAWDKDLRVSDKYLLAMVIAYFSRAGLPSWQYQRIHFFLALYLANDMEEDDEDPKQNIFYFLYGKTRSRIPLIALFQKLRFQFFCSMSGRAWVSREELEEIQAYDPEHWVWARDRARLS

SEQ ID NO: 40378 - protein, 336 aa, Homo sapiens
MQKHYTVAWFLYSAPGVDPSPPCRSLGWKRKREWSDESEEEPEKELAPEPEETWVVETLCGLKMKLKQQRVSPILLEHHKDFNSQLAPGVDPSPPHRSFCWKRKMEWWDKSEESEEEPRKVLAPEPEEIWVAEMLCGLKMKLKRRRVSLVLPEHHEAFNRLLEDPVIKRFLAWDKDLRVSDKYLLAMVIAYFSRAGFPSWQYQRLHFFLALYLANDMEEDDEDSKQNIFHFLYGKNRSRIPLLRKRRFQLYRSMNPRARKNRSHIPLVRKRRFQLRRCMNPRARKNRSQIVLFQKRRFHFFCSMSCRAWVSPEELEEIQAYDPEHWVWARDRARLS

SEQ ID NO: 40379 - protein, 955 aa, Homo sapiens
MSKTNKSKSGSRSSRSRSASRSRSRSFSKSRSRSRSLSRSRKRRLSSRSRSRSYSPAHNRERNHPRVYQNRDFRGHNRGYRRPYYFRGRNRGFYPWGQYNRGGYGNYRSNWQNYRQAYSPRRGRSRSRSPKRRSPSPRSRSHSRNSDKSSSDRSRRSSSSRSSSNHSRVESSKRKSAKEKKSSSKDSRPSQAAGDNQGDEAKEQTFSGGTSQDTKASESSKPWPDATYGTGSASRASAVSELSPRERSPALKSPLQSVVVRRRSPRPSPVPKPSPPLSSTSQMGSTLPSGAGYQSGTHQGQFDHGSGSLSPSKKSPVGKSPPSTGSTYGSSQKEESAASGGAAYTKRYLEEQKTENGKDKEQKQTNTDKEKIKEKGSFSDTGLGDGKMKSDSFAPKTDSEKPFRGSQSPKRYKLRDDFEKKMADFHKEEMDDQDKDKAKGRKESEFDDEPKFMSKVIGANKNQEEEKSGKWEGLVYAPPGKEKQRKTEELEEESFPERSKKEDRGKRSEGGHRGFVPEKNFRVTAYKAVQEKSSSPPPRKTSESRDKLGAKGDFPTGKSSFSITREAQVNVRMDSFDEDLARPSGLLAQERKLCRDLVHSNKKEQEFRSIFQHIQSAQSQRSPSELFAQHIVTIVHHVKEHHFGSSGMTLHERFTKYLKRGTEQEAAKNKKSPEIHRRIDISPSTFRKHGLAHDEMKSPREPGYKAEGKYKDDPVDLRLDIERRKKHKERDLKRGKSRESVDSRDSSHSRERSAEKTEKTHKGSKKQKKHRRARDRSRSSSSSSQSSHSYKAEEYTEETEEREESTTGFDKSRLGTKDFVGPSERGGGRARGTFQFRARGRGWGRGNYSGNNNNNSNNDFQKRNREEEWDPEYTPKSKKYYLHDDREGEGSDKWVSRGRGRGAFPRGRGRFMFRKSSTSPKWAHDKFSGEEGEIEDDESGTENREEKDNIQPTTE

SEQ ID NO: 40380 - protein, 797 aa, Homo sapiens
MAAAPVAAGSGAGRGRRSAATVAAWGGWGGRPRPGNILLQLRQGQLTGRGLVRAVQFTETFLTERDKQSKWSGIPQLLLKLHTTSHLHSDFVECQNILKEISPLLSMEAMAFVTEERKLTQETTYPNTYIFDLFGGVDLLVEILMRPTISIRGQKLKISDEMSKDCLSILYNTCVCTEGVTKRLAEKNDFVIFLFTLMTSKKTFLQTATLIEDILGVKKEMIRLDEVPNLSSLVSNFDQQQLANFCRILAVTISEMDTGNDDKHTLLAKNAQQKKSLSLGPSAAEINQAALLSIPGFVERLCKLATRKVSESTGTASFLQELEEWYTWLDNALVLDALMRVANEESEHNQASIVFPPPGASEENGLPHTSARTQLPQSMKIMHEIMYKLEVLYVLCVLLMGRQRNQVHRMIAEFKLIPGLNNLFDKLIWRKHSASALVLHGHNQNCDCSPDITLKIQFLRLLQSFSDHHENKYLLLNNQELNELSAISLKANIPEVEAVLNTDRSLVCDGKRGLLTRLLQVMKKEPAESSFRFWQARAVESFLRGTTSYADQMFLLKRGLLEHILYCIVDSECKSRDVLQSYFDLLGELMKFNVDAFKRFNKYINTDAKFQVFLKQINSSLVDSNMLVRCVTLSLDRFENQVDMKVAEVLSECRLLAYISQVPTQMSFLFRLINIIHVQTLTQENVSCLNTSLVILMLARRKERLPLYLRLLQRMEHSKKYPGFLLNNFHNLLRFWQQHYLHKDKDSTCLENSSCISFSYWKETVSILLNPDRQSPSALVSYIEEPYMDIDRDFTEE

SEQ ID NO: 40381 - protein, 532 aa, Homo sapiens
MAAAPVAAGSGAGRGRRSAATVAAWGGWGGRPRPGNILLQLRQGQLTGRGLVRAVQFTETFLTERDKQSKWSGIPQLLLKLHTTSHLHSDFVECQNILKEISPLLSMEAMAFVTEERKLTQETTYPNTYIFDLFGGVDLLVEILMRPTISIRGQKLKISDEMSKDCLSILYNTCVCTEGVTKRLAEKNDFVIFLFTLMTSKKTFLQTATLIEDILGVKKEMIRLDEVPNLSSLVSNFDQQQLANFCRILAVTISEMDTGNDDKHTLLAKNAQQKKSLSLGPSAAEINQAALLSIPGFVERLCKLATRKVSESTGTASFLQELEEWYTWLDNALVLDALMRVANEESEHNQASIVFPPPGASEENGLPHTSARTQLPQSMKIMHEIMYKLEVLYVLCVLLMGRQRNQVHRMIAEFKLIPGLNNLFDKLIWRKHSASALVLHGHNQNCDCSPDITLKIQFLRLLQSFSDHHENKYLLLNNQELNELSAISLKANIPEVEAVLNTDRSLVCDGKRGLLTRLLQVMKKEPAESSFR

SEQ ID NO: 40382 - protein, 789 aa, Homo sapiens
MAAAPVAAGSGAGRGRRSAATVAAWGGWGGRPRPGNILLQLRQGQLTGRGLVRAVQFTETFLTERDKQSKWSGIPQLLLKLHTTSHLHSDFVECQNILKEISPLLSMEAMAFVTEERKLTQETTYPNTYIFDLFGGVDLLVEILMRPTISIRGQKLKISDEMSKDCLSILYNTCVCTEGVTKRLAEKNDFVIFLFTLMTSKKTFLQTATLIEDILGVKKEMIRLDEVPNLSSLVSNFDQQQLANFCRILAVTISEMDTGNDDKHTLLAKNAQQKKSLSLGPSAAEINQAALLSIPGFVERLCKLATRKVSESTGTASFLQELEEWYTWLDNALVLDALMRVANEESEHNQGASEENGLPHTSARTQLPQSMKIMHEIMYKLEVLYVLCVLLMGRQRNQVHRMIAEFKLIPGLNNLFDKLIWRKHSASALVLHGHNQNCDCSPDITLKIQFLRLLQSFSDHHENKYLLLNNQELNELSAISLKANIPEVEAVLNTDRSLVCDGKRGLLTRLLQVMKKEPAESSFRFWQARAVESFLRGTTSYADQMFLLKRGLLEHILYCIVDSECKSRDVLQSYFDLLGELMKFNVDAFKRFNKYINTDAKFQVFLKQINSSLVDSNMLVRCVTLSLDRFENQVDMKVAEVLSECRLLAYISQVPTQMSFLFRLINIIHVQTLTQENVSCLNTSLVILMLARRKERLPLYLRLLQRMEHSKKYPGFLLNNFHNLLRFWQQHYLHKDKDSTCLENSSCISFSYWKETVSILLNPDRQSPSALVSYIEEPYMDIDRDFTEE

SEQ ID NO: 40383 - protein, 828 aa, Homo sapiens
MPSALAIFTCRPNSHPFQERHVYLDEPIKIGRSVARCRPAQNNATFDCKVLSRNHALVWFDHKTGKFYLQDTKSSNGTFINSQRLSRGSEESPPCEILSGDIIQFGVDVTENTRKVTHGCIVSTIKLFLPDGMEARLRSDVIHAPLPSPVDKVAANTPSMYSQELFQLSQYLQEALHREQMLEQKLATLQRLLAITQEASDTSWQALIDEDRLLSRLEVMGNQLQACSKNQTEDSLRKELIALQEDKHNYETTAKESLRRVLQEKIEVVRKLSEVERSLSNTEDECTHLKEMNERTQEELRELANKYNGAVNEIKDLSDKLKVAEGKQEEIQQKGQAEKKELQHKIDEMEEKEQELQAKIEALQADNDFTNERLTALQVRLEHLQEKTLKECSSLEHLLSKSGGDCTFIHQFIECQKKLIVEGHLTKAVEETKLSKENQTRAKESDFSDTLSPSKEKSSDDTTDAQMDEQDLNEPLAKVSLLKDDLQGAQSEIEAKQEIQHLRKELIEAQELARTSKQKCFELQALLEEERKAYRNQVEESTKQIQVLQAQLQRLHIDTENLREEKDSEITSTRDELLSARDEILLLHQAAAKVASERDTDIASLQEELKKVRAELERWRKAASEYEKEITSLQNSFQLRCQQCEDQQREEATRLQGELEKLRKEWNALETECHSLKRENVLLSSELQRQEKELHNSQKQSLELTSDLSILQMSRKELENQVGSLKEQHLRDSADLKTLLSKAENQAKDVQKEYEKTQTVLSELKLKFEMTEQEKQSITDELKQCKNNLKLLREKGNNKPWPWMPMLAALVAVTAIVLYVPGLARASP

SEQ ID NO: 40384 - protein, 790 aa, Homo sapiens
MPSALAIFTCRPNSHPFQERHVYLDEPIKIGRSVARCRPAQNNATFDCKVLSRNHALVWFDHKTGKFYLQDTKSSNGTFINSQRLSRGSEESPPCEILSGDIIQFGVDVTENTRKVTHGCIVSTIKLFLPDGMEARLRSDVIHAPLPSPVDKVAANTPSMYSQELFQLSQYLQEALHREQMLEQKLATLQRLLAITQEASDTSWQALIDEDRLLSRLEVMGNQLQACSKNQTEDSLRKELIALQEDKHNYETTAKESLRRVLQEKIEVVRKLSEVERSLSNTEDECTHLKEMNERTQEELRELANKYNGAVNEIKDLSDKLKVAEGKQEEIQQKGQAEKKELQHKIDEMEEKEQELQAKIEALQADNDFTNERLTALQEKLIVEGHLTKAVEETKLSKENQTRAKESDFSDTLSPSKEKSSDDTTDAQMDEQDLNEPLAKVSLLKDDLQGAQSEIEAKQEIQHLRKELIEAQELARTSKQKCFELQALLEEERKAYRNQVEESTKQIQVLQAQLQRLHIDTENLREEKDSEITSTRDELLSARDEILLLHQAAAKVASERDTDIASLQEELKKVRAELERWRKAASEYEKEITSLQNSFQLRCQQCEDQQREEATRLQGELEKLRKEWNALETECHSLKRENVLLSSELQRQEKELHNSQKQSLELTSDLSILQMSRKELENQVGSLKEQHLRDSADLKTLLSKAENQAKDVQKEYEKTQTVLSELKLKFEMTEQEKQSITDELKQCKNNLKLLREKGNNKPWPWMPMLAALVAVTAIVLYVPGLARASP

SEQ ID NO: 40385 - protein, 811 aa, Homo sapiens
MPSALAIFTCRPNSHPFQERHVYLDEPIKIGRSVARCRPAQNNATFDCKVLSRNHALVWFDHKTGKFYLQDTKSSNGTFINSQRLSRGSEESPPCEILSGDIIQFGVDVTENTRKVTHGCIVSTIKLFLPDGMEARLRSDVIHAPLPSPVDKVAANTPSMYSQELFQLSQYLQEALHREQMLEQKLATLQRLLAITQEASDTSWQALIDEDRLLSRLEVMGNQLQACSKNQTEDSLRKELIALQEDKHNYETTAKESLRRVLQEKIEVVRKLSEVERSLSNTEDECTHLKEMNERTQEELRELANKYNGAVNEIKDLSDKLKVAEGKQEEIQQKGQAEKKELQHKIDEMEEKEQELQAKIEALQADNDFTNERLTALQEHLLSKSGGDCTFIHQFIECQKKLIVEGHLTKAVEETKLSKENQTRAKESDFSDTLSPSKEKSSDDTTDAQMDEQDLNEPLAKVSLLKDDLQGAQSEIEAKQEIQHLRKELIEAQELARTSKQKCFELQALLEEERKAYRNQVEESTKQIQVLQAQLQRLHIDTENLREEKDSEITSTRDELLSARDEILLLHQAAAKVASERDTDIASLQEELKKVRAELERWRKAASEYEKEITSLQNSFQLRCQQCEDQQREEATRLQGELEKLRKEWNALETECHSLKRENVLLSSELQRQEKELHNSQKQSLELTSDLSILQMSRKELENQVGSLKEQHLRDSADLKTLLSKAENQAKDVQKEYEKTQTVLSELKLKFEMTEQEKQSITDELKQCKNNLKLLREKGNNKPWPWMPMLAALVAVTAIVLYVPGLARASP

SEQ ID NO: 40386 - protein, 452 aa, Homo sapiens
MEEKEQELQAKIEALQADNDFTNERLTALQENQTRAKESDFSDTLSPSKEKSSDDTTDAQMDEQDLNEPLAKVSLLKDDLQGAQSEIEAKQEIQHLRKELIEAQELARTSKQKCFELQALLEEERKAYRNQVEESTKQIQVLQAQLQRLHIDTENLREEKDSEITSTRDELLSARDEILLLHQAAAKVASERDTDIASLQEELKKVRAELERWRKAASEYEKEITSLQNSFQLRCQQCEDQQREEATRLQGELEKLRKEWNALETECHSLKRENVLLSSELQRQEKELHNSQKQSLELTSDLSILQMSRKELENQVGSLKEQHLRDSADLKTLLSKAENQAKDVQKEYEKTQTVLSELKLKFEMTEQEKQSITDELKQCKNNLKLLREKGNNPSILQPVPARIHRPIPGFPDMVIRSIVERKKPWPWMPMLAALVAVTAIVLYVPGLARASP

SEQ ID NO: 40387 - protein, 359 aa, Homo sapiens
MDEQDLNEPLAKVSLLKDDLQGAQSEIEAKQEIQHLRKELIEAQELARTSKQKCFELQALLEEERKAYRNQVEESTKQIQVLQAQLQRLHIDTENLREEKDSEITSTRDELLSARDEILLLHQAAAKVASERDTDIASLQEELKKVRAELERWRKAASEYEKEITSLQNSFQLRCQQCEDQQREEATRLQGELEKLRKEWNALETECHSLKRENVLLSSELQRQEKELHNSQKQSLELTSDLSILQMSRKELENQVGSLKEQHLRDSADLKTLLSKAENQAKDVQKEYEKTQTVLSELKLKFEMTEQEKQSITDELKQCKNNLKLLREKGNNPSILQPVPAVFIGLFLAFLFWCFGPLW

SEQ ID NO: 40388 - protein, 506 aa, Homo sapiens
MPSALAIFTCRPNSHPFQERHVYLDEPIKIGRSVARCRPAQNNATFDCKVLSRNHALVWFDHKTGKFYLQDTKSSNGTFINSQRLSRGSEESPPCEILSGDIIQFGVDVTENTRKVTHGCIVSTIKLFLPDGMEARLRSDVIHAPLPSPVDKVAANTPSMYSQELFQLSQYLQEALHREQMLEQKLATLQRLLAITQEASDTSWQALIDEDRLLSRLEVMGNQLQACSKNQTEDSLRKELIALQEDKHNYETTAKESLRRVLQEKIEVVRKLSEVERSLSNTEDECTHLKEMNERTQEELRELANKYNGAVNEIKDLSDKLKVAEGKQEEIQQKGQAEKKELQHKIDEMEEKEQELQAKIEALQADNDFTNERLTALQVRLEHLQEKTLKECSSLGIQVDDFLPKINGSTEKEKLIVEGHLTKAVEETKLSKENQTRAKESDFSDTLSPSKEKSSDDTTDAQMDEQDLNEPLAKVSLLKGTLTCFYDIVNQGIKSPFAIKSVLDIM

SEQ ID NO: 40389 - protein, 428 aa, Homo sapiens
MPSALAIFTCRPNSHPFQERHVYLDEPIKIGRSVARCRPAQNNATFDCKVLSRNHALVWFDHKTGKFYLQDTKSSNGTFINSQRLSRGSEESPPCEILSGDIIQFGVDVTENTRKVTHGCIVSTIKLFLPDGMEARLRSDVIHAPLPSPVDKVAANTPSMYSQELFQLSQYLQEALHREQMLEQKLATLQRLLAITQEASDTSWQALIDEDRLLSRLEVMGNQLQACSKNQTEDSLRKELIALQEDKHNYETTAKESLRRVLQEKIEVVRKLSEVERSLSNTEDECTHLKEMNERTQEELRELANKYNGAVNEIKDLSDKLKVAEGKQEEIQQKGQAEKKELQHKIDEMEEKEQELQAKIEALQADNDFTNERLTALQVRLEHLQEKTLKECSSLADRRRASNQSGRRNKAFKRFVFCFSMFFDSSFG

SEQ ID NO: 40390 - protein, 271 aa, Homo sapiens
MDEQDLNEPLAKVSLLKALLEEERKAYRNQVEESTKQIQVLQAQLQRLHIDTENLREEKDSEITSTRDELLSARDEILLLHQAAAKVASERDTDIASLQEELKKVRAELERWRKAASEYEKEITSLQNSFQLRCQQCEDQQREEATRLQGELEKLRKEWNALETECHSLKRENVLLSSELQRQEKELHNSQKQSLELTSDLSILQMSRKELENQVGSLKEQHLRDSADLKTLLSKAENQAKDVQKEVKRKDIMSPIMVGLKAKSKSDIHAS

SEQ ID NO: 40391 - protein, 307 aa, Homo sapiens
MEDVGQNPLDDVKNIFFASSLEAVKQNLDCLNSDLEKDLQKLDMENQVLLRKIKEKEETISSLERKLALSLEEAKEEEELNYVIDEQEESLRELELETAKLEKSNAILSRNVVEVQKKISGLFTNIGLEEETTKQILEEMKARLQKSTESCAKQEEELAKIESDYQSVSDLCKDQVYYIKKYQEVLRKMKEEKETLLLEKQISKAQDDSSQTVKPGSILADTTQRNMERTTIKKQERRCWYKYFQYLTFMVLVFIRLLAYVIFHLQYINPDLLVDVLPLVLSRGTLESLRKVSHPFLTLAVEEALPH

SEQ ID NO: 40392 - protein, 248 aa, Homo sapiens
MWLCPLALNLILMAASGAACEVKDVCVGSPGIPGTPGSHGLPGRDGRDGVKGDPGPPGPMGPPGETPCPPGNNGLPGAPGVPGERGEKGEAGERGPPGLPAHLDEELQATLHDFRHQILQTRGALSLQGSIMTVGEKVFSSNGQSITFDAIQEACARAGGRIAVPRNPEENEAIASFVKKYNTYAYVGLTEGPSPGDFRYSDGTPVNYTNWYRGEPAGRGKEQCVEMYTDGQWNDRNCLYSRLTICEF

SEQ ID NO: 40393 - protein, 1006 aa, Homo sapiens
MSAYYRNNWSEEDPDYPDYSGSQNRTQGYLKTQGYPDVPGPLNNPDYPGTRSNPYSVASRTRPDYPGSLAEPNYPRSLSNPDYSGTRSNAYSAASRTSPDHPTSLPEPDYSEFQSHPYHRASSRQPDYPGSQRNPDFAGSSSSGNYAGSRTHPDHFGSLEPDYPGAQSNSDHPGPRANLNHPGSRKNLEHTSFRINPYADSLGKPDYPGADIQPNSPPFFGEPDYPSAEDNQNLPSTWREPDYSDAENGHDYGSSETPKMTRGVLSRTSSIQPSFRHRSDDPVGSLWGENDYPEGIEMASMEMANSYGHSLPGAPGSGYVNPAYVGESGPVHAYGNPPLSECDWHKSPQGQKLIASLIPMTSRDRIKAIRNQPRTMEEKRNLRKIVDKEKSKQTHRILQLNCCIQCLNSISRAYRRSKNSLSEILNSISLWQKTLKIIGGKFGTSVLSYFNFLRWLLKFNIFSFILNFSFIIIPQFTVAKKNTLQFTGLEFFTGVGYFRDTVMYYGFYTNSTIQHGNSGASYNMQLAYIFTIGACLTTCFFSLLFSMAKYFRNNFINPHIYSGGITKLIFCWDFTVTHEKAVKLKQKNLSTEIRENLSELRQENSKLTFNQLLTRFSAYMVAWVVSTGVAIACCAAVYYLAEYNLEFLKTHSNPGAVLLLPFVVSCINLAVPCIYSMFRLVERYEMPRHEVYVLLIRNIFLKISIIGILCYYWLNTVALSGEECWETLIGQDIYRLLLMDFVFSLVNSFLGEFLRRIIGMQLITSLGLQEFDIARNVLELIYAQTLVWIGIFFCPLLPFIQMIMLFIMFYSKNISLMMNFQPPSKAWRASQMMTFFIFLLFFPSFTGVLCTLAITIWRLKPSADCGPFRGLPLFIHSIYSWIDTLSTRPGYLWVVWIYRNLIGSVHFFFILTLIVLIITYLYWQITEGRKIMIRLLHEQIINEGKDKMFLIEKLIKLQDMEKKANPSSLVLERREVEQQGFLHLGEHDGSLDLRSRRSVQEGNPRA

SEQ ID NO: 40394 - protein, 948 aa, Homo sapiens
MSAYYRNNWSEEDPDYPDYSGSQNRTQGYLKTQGYPDVPGPLNNPDYPGTRSNPYSVASRTRPDYPGSLAEPNYPRSLSNPDYSGTRSNAYSAASRTSPDHPTSLPEPDYSEFQSHPYHRASSRQPDYPGSQRNPDFAGSSSSGNYAGSRTHPDHFGSLEPDYPGAQSNSDHPGPRANLNHPGSRKNLEHTSFRINPYADSLGKPDYPGADIQPNSPPFFGEPDYPSAEDNQNLPSTWREPDYSDAENGHDYGSSETPKMTRGVLSRTSSIQPSFRHRSDDPVGSLWGENDYPEGIEMASMEMANSYGHSLPGAPGSGYVNPAYVGESGPVHAYGNPPLSECDWHKSPQGQKLIASLIPMTSRDRIKAIRNQPRTMEEKRNLRKIVDKEKSKQTHRILQLNCCIQCLNSISRAYRRSKNSLSEILNSISLWQKTLKIIGGKFGTSVLSYFNFLRWLLKFNIFSFILNFSFIIIPQFTVAKKNTLQFTGLEFFTGVGYFRDTVMYYGFYTNSTIQHGNSGASYNMQLAYIFTIGACLTTCFFSLLFSMAKYFRNNFINPHIYSGGITKLIFCWDFTVTHEKAVKLKQKNLSTEIRENLSELRQENSKLTFNQLLTRFSAYMVAWVVSTGVAIACCAAVYYLAEYNLEFLKTHSNPGAVLLLPFVVSCINLAVPCIYSMFRLVERYEMPRHEVYVLLIRNIFLKISIIGILCYYWLNTVALSGEECWETLIGQDIYRLLLMDFVFSLVNSFLGEFLRRIIGMQLITSLGLQEFDIARNVLELIYAQTLVWIGIFFCPLLPFIQMIMLFIMFYSKNISLMMNFQPPSKAWRASQMMTFFIFLLFFPSFTGVLCTLAITIWRIITYLYWQITEGRKIMIRLLHEQIINEGKDKMFLIEKLIKLQDMEKKANPSSLVLERREVEQQGFLHLGEHDGSLDLRSRRSVQEGNPRA

SEQ ID NO: 40395 - protein, 760 aa, Homo sapiens
MLSDDHVNEIIIQVENVSSGVQSHPSSNQIFQEKVLLDSSINMVLSISDIDVIDSQTVSKRNDQKGNQVLRFSTSLNESMSQTLHSLECMGIDTPGSSHETVQGQKLIASLIPMTSRDRIKAIRNQPRTMEEKRNLRKIVDKEKSKQTHRILQLNCCIQCLNSISRAYRRSKNSLSEILNSISLWQKTLKIIGGKFGTSVLSYFNFLRWLLKFNIFSFILNFSFIIIPQFTVAKKNTLQFTGLEFFTGVGYFRDTVMYYGFYTNSTIQHGNSGASYNMQLAYIFTIGACLTTCFFSLLFSMAKYFRNNFINPHIYSGGITKLIFCWDFTVTHEKAVKLKQKNLSTEIRENLSELRQENSKLTFNQLLTRFSAYMVAWVVSTGVAIACCAAVYYLAEYNLEFLKTHSNPGAVLLLPFVVSCINLAVPCIYSMFRLVERYEMPRHEVYVLLIRNIFLKISIIGILCYYWLNTVALSGEECWETLIGQDIYRLLLMDFVFSLVNSFLGEFLRRIIGMQLITSLGLQEFDIARNVLELIYAQTLVWIGIFFCPLLPFIQMIMLFIMFYSKNISLMMNFQPPSKAWRASQMMTFFIFLLFFPSFTGVLCTLAITIWRLKPSADCGPFRGLPLFIHSIYSWIDTLSTRPGYLWVVWIYRNLIGSVHFFFILTLIVLIITYLYWQITEGRKIMIRLLHEQIINEGKDKMFLIEKLIKLQDMEKKANPSSLVLERREVEQQGFLHLGEHDGSLDLRSRRSVQEGNPRA

SEQ ID NO: 40396 - protein, 647 aa, Homo sapiens
MTSRDRIKAIRNQPRTMEEKRNLRKIVDKEKSKQTHRILQLNCCIQCLNSISRAYRRSKNSLSEILNSISLWQKTLKIIGGKFGTSVLSYFNFLRWLLKFNIFSFILNFSFIIIPQFTVAKKNTLQFTGLEFFTGVGYFRDTVMYYGFYTNSTIQHGNSGASYNMQLAYIFTIGACLTTCFFSLLFSMAKYFRNNFINPHIYSGGITKLIFCWDFTVTHEKAVKLKQKNLSTEIRENLSELRQENSKLTFNQLLTRFSAYMVAWVVSTGVAIACCAAVYYLAEYNLEFLKTHSNPGAVLLLPFVVSCINLAVPCIYSMFRLVERYEMPRHEVYVLLIRNIFLKISIIGILCYYWLNTVALSGEECWETLIGQDIYRLLLMDFVFSLVNSFLGEFLRRIIGMQLITSLGLQEFDIARNVLELIYAQTLVWIGIFFCPLLPFIQMIMLFIMFYSKNISLMMNFQPPSKAWRASQMMTFFIFLLFFPSFTGVLCTLAITIWRLKPSADCGPFRGLPLFIHSIYSWIDTLSTRPGYLWVVWIYRNLIGSVHFFFILTLIVLIITYLYWQITEGRKIMIRLLHEQIINEGKDKMFLIEKLIKLQDMEKKANPSSLVLERREVEQQGFLHLGEHDGSLDLRSRRSVQEGNPRA

SEQ ID NO: 40397 - protein, 1162 aa, Homo sapiens
MAHAGGGSGGSGAGGPAGRGLSGARWGRSGSAGHEKLPVHVEDALTYLDQVKIRFGSDPATYNGFLEIMKEFKSQSIDTPGVIRRVSQLFHEHPDLIVGFNAFLPLGYRIDIPKNGKLNIQSPLTSQENSHNHGDGAEDFKQQVPYKEDKPQVPLESDSVEFNNAISYVNKIKTRFLDHPEIYRSFLEILHTYQKEQLNTRGRPFRGMSEEEVFTEVANLFRGQEDLLSEFGQFLPEAKRSLFTGNGPCEMHSVQKNEHDKTPEHSRKRSRPSLLRPVSAPAKKKMKLRGTKDLSIAAVGKYGTLQEFSFFDKVRRVLKSQEVYENFLRCIALFNQELVSGSELLQLVSPFLGKFPELFAQFKSFLGVKELSFAPPMSDRSGDGISREIDYASCKRIGSSYRALPKTYQQPKCSGRTAICKELDHWTLLQGSWTDDYCMSKFKNTCWIPGYSAGVLNDTWVSFPSWSEDSTFVSSKKTPYEEQLHRCEDERFELDVVLETNLATIRVLESVQKKLSRMAPEDQEKFRLDDSLGGTSEVIQRRAIYRIYGDKAPEIIESLKKNPVTAVPVVLKRLKAKEEEWREAQQGFNKIWREQYEKAYLKSLDHQAVNFKQNDTKALRSKSLLNEIESVYDEHQEQHSEGRSAPSSEPHLIFVYEDRQILEDAAALISYYVKRQPAIQKEDQGTIHQLLHQFVPSLFFSQQLDLGASEESADEDRDSPQGQTTDPSERKKPAPGPHSSPPEEKGAFGDAPATEQPPLPPPAPHKPLDDVYSLFFANNNWYFFLRLHQTLCSRLLKIYRQAQKQLLEYRTEKEREKLLCEGRREKGSDPAMELRLKQPSEVELEEYYPAFLDMVRSLLEGSIDPTQYEDTLREMFTIHAYVGFTMDKLVQNIARQLHHLVSDDVCLKVVELYLNEKKRGAAGGNLSSRCVRAARETSYQWKAERCMADENCFKVMFLQRKGQVIMTIELLDTEEAQTEDPVEVQHLARYVEQYVGTEGASSSPTEGFLLKPVFLQRNLKKFRRRWQSEQARALRGEARSSWKRLVGVESACDVDCRFKLSTHKMVFIVNSEDYMYRRGTLCRAKQVQPLVLLRHHQHFEEWHSRWLEDNVTVEAASLVQDWLMGEEDEDMVPCKTLCETVHVHGLPVTRYRVQYSRRPASP

SEQ ID NO: 40398 - protein, 1130 aa, Homo sapiens
MAHAGGGSGGSGAGGPAGRGLSGARWGRSGSAGHEKLPVHVEDALTYLDQVKIRFGSDPATYNGFLEIMKEFKSQSIDTPGVIRRVSQLFHEHPDLIVGFNAFLPLGYRIDIPKNGKLNIQSPLTSQENSHNHGDGAEDFKQQVPYKEDKPQVPLESDSVEFNNAISYVNKIKTRFLDHPEIYRSFLEILHTYQKEQLNTRGRPFRGMSEEEVFTEVANLFRGQEDLLSEFGQFLPEAKRSLFTGNGPCEMHSVQKNEHDKTPEHSRKRSRPSLLRPVSAPAKKKMKLRGTKDLSIAAVGKYGTLQEFSFFDKVRRVLKSQEVYENFLRCIALFNQELVSGSELLQLVSPFLGKFPELFAQFKSFLGVKELSFAPPMSDRSGDGISREIDYASCKRIGSSYRALPKTYQQPKCSGRTAICKEVLNDTWVSFPSWSEDSTFVSSKKTPYEEQLHRCEDERFELDVVLETNLATIRVLESVQKKLSRMAPEDQEKFRLDDSLGGTSEVIQRRAIYRIYGDKAPEIIESLKKNPVTAVPVVLKRLKAKEEEWREAQQGFNKIWREQYEKAYLKSLDHQAVNFKQNDTKALRSKSLLNEIESVYDEHQEQHSEGRSAPSSEPHLIFVYEDRQILEDAAALISYYVKRQPAIQKEDQGTIHQLLHQFVPSLFFSQQLDLGASEESADEDRDSPQGQTTDPSERKKPAPGPHSSPPEEKGAFGDAPATEQPPLPPPAPHKPLDDVYSLFFANNNWYFFLRLHQTLCSRLLKIYRQAQKQLLEYRTEKEREKLLCEGRREKGSDPAMELRLKQPSEVELEEYYPAFLDMVRSLLEGSIDPTQYEDTLREMFTIHAYVGFTMDKLVQNIARQLHHLVSDDVCLKVVELYLNEKKRGAAGGNLSSRCVRAARETSYQWKAERCMADENCFKVMFLQRKGQVIMTIELLDTEEAQTEDPVEVQHLARYVEQYVGTEGASSSPTEGFLLKPVFLQRNLKKFRRRWQSEQARALRGEARSSWKRLVGVESACDVDCRFKLSTHKMVFIVNSEDYMYRRGTLCRAKQVQPLVLLRHHQHFEEWHSRWLEDNVTVEAASLVQDWLMGEEDEDMVPCKTLCETVHVHGLPVTRYRVQYSRRPASP

SEQ ID NO: 40399 - protein, 353 aa, Homo sapiens
MAHAGGGSGGSGAGGPAGRGLSGARWGRSGSAGHEKLPVHVEDALTYLDQVKIRFGSDPATYNGFLEIMKEFKSQSIDTPGVIRRVSQLFHEHPDLIVGFNAFLPLGYRIDIPKNGKLNIQSPLTSQENSHNHGDGAEDFKQQVPYKEDKPQVPLESDSVEFNNAISYVNKIKTRFLDHPEIYRSFLEILHTYQKEQLNTRGRPFRGMSEEEVFTEVANLFRGQEDLLSEFGQFLPEAKRSLFTGNGPCEMHSVQKNEHDKTPEHSRKRSRPSLLRPVSAPAKKKMKLRGTKDLSIAAVGKYGTLQEFSFFDKVRRVLKSQEVYENFLRCIALFNQELVSGSELLQLVSPFLG

SEQ ID NO: 40400 - protein, 17 aa, Homo sapiens
SYNSPLHFGNGTRLTVT

SEQ ID NO: 40401 - protein, 454 aa, Homo sapiens
MGENDPPAVEAPFSFRSLFGLDDLKISPVAPDADAVAAQILSLLPLKFFPIIVIGIIALILALAIGLGIHFDCSGKYRCRSSFKCIELIARCDGVSDCKDGEDEYRCVRVGGQNAVLQVFTAASWKTMCSDDWKGHYANVACAQLGFPSYVSSDNLRVSSLEGQFREEFVSIDHLLPDDKVTALHHSVYVREGCASGHVVTLQCTACGHRRGYSSRIVGGNMSLLSQWPWQASLQFQGYHLCGGSVITPLWIITAAHCVYDLYLPKSWTIQVGLVSLLDNPAPSHLVEKIVYHSKYKPKRLGNDIALMKLAGPLTFNEMIQPVCLPNSEENFPDGKVCWTSGWGATEDGAGDASPVLNHAAVPLISNKICNHRDVYGGIISPSMLCAGYLTGGVDSCQGDSGGPLVCQERRLWKLVGATSFGIGCAEVNKPGVYTRVTSFLDWIHEQMERDLKT

SEQ ID NO: 40402 - protein, 327 aa, Homo sapiens
MCSDDWKGHYANVACAQLGFPSYVSSDNLRVSSLEGQFREEFVSIDHLLPDDKVTALHHSVYVREGCASGHVVTLQCTACGHRRGYSSRIVGGNMSLLSQWPWQASLQFQGYHLCGGSVITPLWIITAAHCVYDLYLPKSWTIQVGLVSLLDNPAPSHLVEKIVYHSKYKPKRLGNDIALMKLAGPLTFNEMIQPVCLPNSEENFPDGKVCWTSGWGATEDGAGDASPVLNHAAVPLISNKICNHRDVYGGIISPSMLCAGYLTGGVDSCQGDSGGPLVCQERRLWKLVGATSFGIGCAEVNKPGVYTRVTSFLDWIHEQMERDLKT

SEQ ID NO: 40403 - protein, 344 aa, Homo sapiens
MGENDPPAVEAPFSFRSLFGLDDLKISPVAPDADAVAAQILSLLPLKFFPIIVIGIIALILALAIGLGIHFDCSGKYRCRSSFKCIELIARCDGVSDCKDGEDEYRCVRVGGQNAVLQVFTAASWKTMCSDDWKGHYANVACAQLGFPSYVSSDNLRVSSLEGQFREEFVSIDHLLPDDKVTALHHSVYVREGCASGHVVTLQCTACGHRRGYSSRIVGGNMSLLSQWPWQASLQFQGYHLCGGSVITPLWIITAAHCVYDLYLPKSWTIQVGLVSLLDNPAPSHLVEKIVYHSKYKPKRLGNDIALMKLAGPLTFNGTSGSLCGSAALPLFQEDLQLLIEAFL

SEQ ID NO: 40404 - protein, 293 aa, Homo sapiens
MGENDPPAVEAPFSFRSLFGLDDLKISPVAPDADAVAAQILSLLPLKFFPIIVIGIIALILALAIGLGIHFDCSGKYRCRSSFKCIELIARCDGVSDCKDGEDEYRCVRVGGQNAVLQVFTAASWKTMCSDDWKGHYANVACAQLGFPSYVSSDNLRVSSLEGQFREEFVSIDHLLPDDKVTALHHSVYVREGCASGHVVTLQCTACGHRRGYSSRIVGGNMSLLSQWPWQASLQFQGYHLCGGSVITPLWIITAAHCVYEIVAPRERADRRGRKLLCWRKPTKMKGPRPSHS

SEQ ID NO: 40405 - protein, 453 aa, Homo sapiens
MGENDPPAVEAPFSFRSLFGLDDLKISPVAPDADAVAAQILSLLPLKFFPIIVIGIIALILALAIGLGIHFDCSGKYRCRSSFKCIELIARCDGVSDCKDGEDEYRCVRVGGQNAVLQVFTAASWKTMCSDDWKGHYANVACAQLGFPSYVSSDNLRVSSLEGQFREEFVSIDHLLPDDKVTALHHSVYVREGCASGHVVTLQCTACGHRRGYSSRIVGGNMSLLSQWPWQASLQFQGYHLCGGSVITPLWIITAAHCVYDLYLPKSWTIQVGLVSLLDNPAPSHLVEKIVYHSKYKPKRLGNDIALMKLAGPLTFNEMIQPVCLPNSEENFPDGKVCWTSGWGATEDGGDASPVLNHAAVPLISNKICNHRDVYGGIISPSMLCAGYLTGGVDSCQGDSGGPLVCQERRLWKLVGATSFGIGCAEVNKPGVYTRVTSFLDWIHEQMERDLKT

SEQ ID NO: 40406 - protein, 538 aa, Homo sapiens
MQAVGPKPLPTLLCGGRTGHRTARVLSFLIRSCPCEPGKGCVYGKPVTLWPTISSVVPSTFLGLGNYEVEVEAEPDVRGPEIVTMGENDPPAVEAPFSFRSLFGLDDLKISPVAPDADAVAAQILSLLPLKFFPIIVIGIIALILALAIGLGIHFDCSGKYRCRSSFKCIELIARCDGVSDCKDGEDEYRCVRVGGQNAVLQVFTAASWKTMCSDDWKGHYANVACAQLGFPSYVSSDNLRVSSLEGQFREEFVSIDHLLPDDKVTALHHSVYVREGCASGHVVTLQCTACGHRRGYSSRIVGGNMSLLSQWPWQASLQFQGYHLCGGSVITPLWIITAAHCVYDLYLPKSWTIQVGLVSLLDNPAPSHLVEKIVYHSKYKPKRLGNDIALMKLAGPLTFNEMIQPVCLPNSEENFPDGKVCWTSGWGATEDGAGDASPVLNHAAVPLISNKICNHRDVYGGIISPSMLCAGYLTGGVDSCQGDSGGPLVCQERRLWKLVGATSFGIGCAEVNKPGVYTRVTSFLDWIHEQMERDLKT

SEQ ID NO: 40407 - protein, 16 aa, Homo sapiens
SYNEQFFGPGTRLTVL

SEQ ID NO: 40408 - protein, 322 aa, Homo sapiens
MEADLSGFNIDAPRWDQRTFLGRVKHFLNITDPRTVFVSERELDWAKVMVEKSRMGVVPPGTQVEQLLYAKKLYDSAFHPDTGEKMNVIGRMSFQLPGGMIITGFMLQFYRTMPAVIFWQWVNQSFNALVNYTNRNAASPTSVRQMALSYFTATTTAVATAVGMNMLTKKAPPLVGRWVPFAAVAAANCVNIPMMRQQELIKGICVKDRNENEIGHSRRAAAIGITQVVISRITMSAPGMILLPVIMERLEKLHFMQKVKVLHAPLQVMLSGCFLIFMVPVACGLFPQKCELPVSYLEPKLQDTIKAKYGELEPYVYFNKGL

SEQ ID NO: 40409 - protein, 16 aa, Homo sapiens
AKNIQYFGAGTRLSVL

SEQ ID NO: 40410 - protein, 437 aa, Homo sapiens
MLQDPDSDQPLNSLDVKPLRKPRIPMETFRKVGIPIIIALLSLASIIIVVVLIKVILDKYYFLCGQPLHFIPRKQLCDGELDCPLGEDEEHCVKSFPEGPAVAVRLSKDRSTLQVLDSATGNWFSACFDNFTEALAETACRQMGYSSKPTFRAVEIGPDQDLDVVEITENSQELRMRNSSGPCLSGSLVSLHCLACGKSLKTPRVVGVEEASVDSWPWQVSIQYDKQHVCGGSILDPHWVLTAAHCFRKHTDVFNWKVRAGSDKLGSFPSLAVAKIIIIEFNPMYPKDNDIALMKLQFPLTFSGTVRPICLPFFDEELTPATPLWIIGWGFTKQNGGKMSDILLQASVQVIDSTRCNADDAYQGEVTEKMMCAGIPEGGVDTCQGDSGGPLMYQSDQWHVVGIVSWGYGCGGPSTPGVYTKVSAYLNWIYNVWKAEL

SEQ ID NO: 40411 - protein, 432 aa, Homo sapiens
MLQDPDSDQPLNSLDVKPLRKPRIPMETFRKVGIPIIIALLSLASIIIVVVLIKVILDKYYFLCGQPLHFIPRKQLCDGELDCPLGEDEEHCVKSFPEGPAVAVRLSKDRSTLQVLDSATGNWFSACFDNFTEALAETACRQMGYSRAVEIGPDQDLDVVEITENSQELRMRNSSGPCLSGSLVSLHCLACGKSLKTPRVVGVEEASVDSWPWQVSIQYDKQHVCGGSILDPHWVLTAAHCFRKHTDVFNWKVRAGSDKLGSFPSLAVAKIIIIEFNPMYPKDNDIALMKLQFPLTFSGTVRPICLPFFDEELTPATPLWIIGWGFTKQNGGKMSDILLQASVQVIDSTRCNADDAYQGEVTEKMMCAGIPEGGVDTCQGDSGGPLMYQSDQWHVVGIVSWGYGCGGPSTPGVYTKVSAYLNWIYNVWKAEL

SEQ ID NO: 40412 - protein, 435 aa, Homo sapiens
MDPDSDQPLNSLDVKPLRKPRIPMETFRKVGIPIIIALLSLASIIIVVVLIKVILDKYYFLCGQPLHFIPRKQLCDGELDCPLGEDEEHCVKSFPEGPAVAVRLSKDRSTLQVLDSATGNWFSACFDNFTEALAETACRQMGYSSKPTFRAVEIGPDQDLDVVEITENSQELRMRNSSGPCLSGSLVSLHCLACGKSLKTPRVVGVEEASVDSWPWQVSIQYDKQHVCGGSILDPHWVLTAAHCFRKHTDVFNWKVRAGSDKLGSFPSLAVAKIIIIEFNPMYPKDNDIALMKLQFPLTFSGTVRPICLPFFDEELTPATPLWIIGWGFTKQNGGKMSDILLQASVQVIDSTRCNADDAYQGEVTEKMMCAGIPEGGVDTCQGDSGGPLMYQSDQWHVVGIVSWGYGCGGPSTPGVYTKVSAYLNWIYNVWKAEL

SEQ ID NO: 40413 - protein, 397 aa, Homo sapiens
MDPDSDQPLNSLVKVILDKYYFLCGQPLHFIPRKQLCDGELDCPLGEDEEHCVKSFPEGPAVAVRLSKDRSTLQVLDSATGNWFSACFDNFTEALAETACRQMGYSSKPTFRAVEIGPDQDLDVVEITENSQELRMRNSSGPCLSGSLVSLHCLACGKSLKTPRVVGVEEASVDSWPWQVSIQYDKQHVCGGSILDPHWVLTAAHCFRKHTDVFNWKVRAGSDKLGSFPSLAVAKIIIIEFNPMYPKDNDIALMKLQFPLTFSGTVRPICLPFFDEELTPATPLWIIGWGFTKQNGGKMSDILLQASVQVIDSTRCNADDAYQGEVTEKMMCAGIPEGGVDTCQGDSGGPLMYQSDQWHVVGIVSWGYGCGGPSTPGVYTKVSAYLNWIYNVWKAEL

SEQ ID NO: 40414 - protein, 15 aa, Homo sapiens
QETQYFGPGTRLLVL

SEQ ID NO: 40415 - protein, 17 aa, Homo sapiens
SGANVLTFGAGSRLTVL

SEQ ID NO: 40416 - protein, 361 aa, Homo sapiens
MGNVLAASSPPAGPPPPPAPALVGLPPPPPSPPGFTLPPLGGSLGAGTSTSRSSERTPGAATASASGAAEDGACGCLPNPGTFEECHRKCKELFPIQMEGVKLTVNKGLSNHFQVNHTVALSTIGESNYHFGVTYVGTKQLSPTEAFPVLVGDMDNSGSLNAQVIHQLGPGLRSKMAIQTQQSKFVNWQVDGEYRGSDFTAAVTLGNPDVLVGSGILVAHYLQSITPCLALGGELVYHRRPGEEGTVMSLAGKYTLNNWLATVTLGQAGMHATYYHKASDQLQVGVEFEASTRMQDTSVSFGYQLDLPKANLLFKGSVDSNWIVGATLEKKLPPLPLTLALGAFLNHRKNKFQCGFGLTIG

SEQ ID NO: 40417 - protein, 329 aa, Homo sapiens
MGNVLAASSPPAGPPPPPAPALVGLPPPPPSPPGFTLPPLGGSLGAGTSTSRSSERTPGAATASASGAAEDGACGCLPNPGTFEECHRKCKELFPIQMEGVKLTVNKGLSNHFQVNHTVALSTIGESNYHFGVTYVGTKQLSPTEAFPVLVGDMDNSGSLNAQVIHQLGPGLRSKMAIQTQQSKFVNWQVDGEYRGSDFTAAVTLGNPDVLVGSGILVAHYLQSITPCLALGGELVYHRRPGEEGTVMSLAGKYTLNNWLATVTLGQAGMHATYYHKASDQLQVGVEFEASTRMQDTSVSFGYQLDLPKANLLFKGKGLGSPTRETGRR

SEQ ID NO: 40418 - protein, 15 aa, Homo sapiens
SYEQYFGPGTRLTVT

SEQ ID NO: 40419 - protein, 457 aa, Homo sapiens
MSLMLDDQPPMEAQYAEEGPGPGIFRAEPGDQQHPISQAVCWRSMRRGCAVLGALGLLAGAGVGSWLLVLYLCPAASQPISGTLQDEEITLSCSEASAEEALLPALPKTVSFRINSEDFLLEAQVRDQPRWLLVCHEGWSPALGLQICWSLGHLRLTHHKGVNLTDIKLNSSQEFAQLSPRLGGFLEEAWQPRNNCTSGQVVSLRCSECGARPLASRIVGGQSVAPGRWPWQASVALGFRHTCGGSVLAPRWVVTAAHCMHSFRLARLSSWRVHAGLVSHSAVRPHQGALVERIIPHPLYSAQNHDYDVALLRLQTALNFSDTVGAVCLPAKEQHFPKGSRCWVSGWGHTHPSHTYSSDMLQDTVVPLFSTQLCNSSCVYSGALTPRMLCAGYLDGRADACQGDSGGPLVCPDGDTWRLVGVVSWGRGCAEPNHPGVYAKVAEFLDWIHDTAQDSLL

SEQ ID NO: 40420 - protein, 408 aa, Homo sapiens
MRTDSGARLEEGHLRPPRALPPVPSQDDIPLSRPKKKKPRTKNTPASASLEGLAQTAGRRPSEGNEPSTKELKEHPEAPVQRRQKKTRLPLELETSSTQKKSSSSSLLRNENGIDAEPAEEAVIQKPRRKTKKTQPAELQYANELGVEDEDIITDEQTTVEQQSVFTAPTGISQPVGKVFVEKSRRFQAADRSELIKTTENIDVSMDVKPSWTTRDVALTVHRAFRMIGLFSHGFLAGCAVWNIVVIYVLAGDQLSNLSNLLQQYKTLAYPFQSLLYLLLALSTISAFDRIDFAKISVAIRNFLALDPTALASFLYFTALILSLSQQMTSDRIHLYTPSSVNGSLWEAGIEEQILQPWIVVNLVVALLVGLSWLFLSYRPGMDLSEELMFSSEVEEYPDKEKEIKASS

SEQ ID NO: 40421 - protein, 400 aa, Homo sapiens
MGKNPVRPPRALPPVPSQDDIPLSRPKKKKPRTKNTPASASLEGLAQTAGRRPSEGNEPSTKELKEHPEAPVQRRQKKTRLPLELETSSTQKKSSSSSLLRNENGIDAEPAEEAVIQKPRRKTKKTQPAELQYANELGVEDEDIITDEQTTVEQQSVFTAPTGISQPVGKVFVEKSRRFQAADRSELIKTTENIDVSMDVKPSWTTRDVALTVHRAFRMIGLFSHGFLAGCAVWNIVVIYVLAGDQLSNLSNLLQQYKTLAYPFQSLLYLLLALSTISAFDRIDFAKISVAIRNFLALDPTALASFLYFTALILSLSQQMTSDRIHLYTPSSVNGSLWEAGIEEQILQPWIVVNLVVALLVGLSWLFLSYRPGMDLSEELMFSSEVEEYPDKEKEIKASS

SEQ ID NO: 40422 - protein, 432 aa, Homo sapiens
MTHCACARDRAREGWGARCLGARRPPRPAKRRMGKNPVRPPRALPPVPSQDDIPLSRPKKKKPRTKNTPASASLEGLAQTAGRRPSEGNEPSTKELKEHPEAPVQRRQKKTRLPLELETSSTQKKSSSSSLLRNENGIDAEPAEEAVIQKPRRKTKKTQPAELQYANELGVEDEDIITDEQTTVEQQSVFTAPTGISQPVGKVFVEKSRRFQAADRSELIKTTENIDVSMDVKPSWTTRDVALTVHRAFRMIGLFSHGFLAGCAVWNIVVIYVLAGDQLSNLSNLLQQYKTLAYPFQSLLYLLLALSTISAFDRIDFAKISVAIRNFLALDPTALASFLYFTALILSLSQQMTSDRIHLYTPSSVNGSLWEAGIEEQILQPWIVVNLVVALLVGLSWLFLSYRPGMDLSEELMFSSEVEEYPDKEKEIKASS

SEQ ID NO: 40423 - protein, 313 aa, Homo sapiens
MRTDSGARLEEGHLRPPRALPPVPSQDDIPLSRPKTKKTQPAELQYANELGVEDEDIITDEQTTVEQQSVFTAPTGISQPVGKVFVEKSRRFQAADRSELIKTTENIDVSMDVKPSWTTRDVALTVHRAFRMIGLFSHGFLAGCAVWNIVVIYVLAGDQLSNLSNLLQQYKTLAYPFQSLLYLLLALSTISAFDRIDFAKISVAIRNFLALDPTALASFLYFTALILSLSQQMTSDRIHLYTPSSVNGSLWEAGIEEQILQPWIVVNLVVALLVGLSWLFLSYRPGMDLSEELMFSSEVEEYPDKEKEIKASS

SEQ ID NO: 40424 - protein, 413 aa, Homo sapiens
MRTDSGARLEEGHLRPPRALPPVPSQDDIPLSRPKKKKPRTKNTPASASLEGLAQTAGRRPSEGNEPSTKELKEHPEAPVQRRQKKTRLPLELETSSTQKKSSSSSLLRNENGIDAEPAEEAVIQKPRRKTKRPYYRKTQPAELQYANELGVEDEDIITDEQTTVEQQSVFTAPTGISQPVGKVFVEKSRRFQAADRSELIKTTENIDVSMDVKPSWTTRDVALTVHRAFRMIGLFSHGFLAGCAVWNIVVIYVLAGDQLSNLSNLLQQYKTLAYPFQSLLYLLLALSTISAFDRIDFAKISVAIRNFLALDPTALASFLYFTALILSLSQQMTSDRIHLYTPSSVNGSLWEAGIEEQILQPWIVVNLVVALLVGLSWLFLSYRPGMDLSEELMFSSEVEEYPDKEKEIKASS

SEQ ID NO: 40425 - protein, 290 aa, Homo sapiens
MAAVEKRRQAVPPPAGFTDSGRQSVSRAAGAAESEEDFLRQVGVTEMLRAALLKVLEARPEEPIAFLAHYFENMGLRSPVNGGAGEPPGQLLLQQQRLGRALWHLRLAHHSQRAAFNNNVSVAYECLSAGGRRKRPGLDGRTYSELLRRICRDGQAPEEVVAPLLRKVQCRDHEAVPLSVFRAGTLTCFVLLEFVARAGALFQLLEDSAAAVADRRVGQAVLDTLEGALQASDAAAPARFLEAGSRLGPDSLALALDRAVGGRRPSAPMTREEFLERAAALFIAKVKPVG

SEQ ID NO: 40426 - protein, 271 aa, Homo sapiens
MAAVEKRRQAVPPPAGFTDSGRQSVSRAAGAAESEEDFLRQVGVTEMLRAALLKVLEARPEEPIAFLAHYFENMGLRSPVNGGAGEPPGQLLLQQQRLGRALWHLRLAHHSQRAAFNNNVSVAYECLSAGGRRKRPGLDGRTYSELLRRICRDGQAPEEVVAPLLRKVQCRDHEAVPLSVFRAGTLTCFVLLEFVARAGALFQLLEDSAAAVADRRVGQAVLDTLEGALQASDAAAPARFLEAGSRLAPMTREEFLERAAALFIAKVKPVG

SEQ ID NO: 40427 - protein, 583 aa, Homo sapiens
MPGRTWELCLLLLLGLGLGSQEALPPPCESEIYCHGELLNQVQMAKLYQDDKQFVDMPLSIAPEQVLQTFTELSRDHNHSIPREQLQAFVHEHFQAKGQELQPWTPADWKDSPQFLQKISDAKLRAWAGQLHQLWKKLGKKMKPEVLSHPERFSLIYSEHPFIVPGGRFVEFYYWDSYWVMEGLLLSEMAETVKGMLQNFLDLVKTYGHVPNGGRVYYLQRSQPPLLTLMMDCYLTHTNDTAFLQENIETLALELDFWTKNRTVSVSLEGKNYLLNRYYVPYGGPRPESYSKDVELADTLPEGDREALWAELKAGAESGWDFSSRWLIGGPNPNSLSGIRTSKLVPVDLNAFLCQAEELMSNFYSRLGNDSQATKYRILRSQRLAALNTVLWDEQTGAWFDYDLEKKKKNREFYPSNLTPLWAGCFSDPGVADKALKYLEDNRILTYQYGIPTSLQKTGQQWDFPNAWAPLQDLVIRGLAKAPLRRAQEVAFQLAQNWIRTNFDVYSQKSAMYEKYDVSNGGQPGGGGEYEVQEGFGWTNGVVLMLLDRYGDRLTSGAKLAFLEPHCLAATLLPSLLLSLLPW

SEQ ID NO: 40428 - protein, 552 aa, Homo sapiens
MPGRTWELCLLLLLGLGLGSQEALPPPCESEIYCHGELLNQVQMAKLYQDDKQFVDMPLSIAPEQVLQTFTELSRDHNHSIPREQLQAFVHEHFQAKGQELQPWTPADWKDSPQFLQKISDAKLRAWAGQLHQLWKKLGKKMKPEVLSHPERFSLIYSEHPFIVPGGRFVEFYYCYGHVPNGGRVYYLQRSQPPLLTLMMDCYLTHTNDTAFLQENIETLALELDFWTKNRTVSVSLEGKNYLLNRYYVPYGGPRPESYSKDVELADTLPEGDREALWAELKAGAESGWDFSSRWLIGGPNPNSLSGIRTSKLVPVDLNAFLCQAEELMSNFYSRLGNDSQATKYRILRSQRLAALNTVLWDEQTGAWFDYDLEKKKKNREFYPSNLTPLWAGCFSDPGVADKALKYLEDNRILTYQYGIPTSLQKTGQQWDFPNAWAPLQDLVIRGLAKAPLRRAQEVAFQLAQNWIRTNFDVYSQKSAMYEKYDVSNGGQPGGGGEYEVQEGFGWTNGVVLMLLDRYGDRLTSGAKLAFLEPHCLAATLLPSLLLSLLPW

SEQ ID NO: 40429 - protein, 176 aa, Homo sapiens
MAAAPAVCASQGSPPGAPSAPAAAPAPAAGLGRCRMALLLAVALDVAGMAALLTGVFAQLQVRGRDFGDLLIYSGALLVFLSLLGWILWYTGNIEISRQELERDYGLRPSALARLARKLSRRWSAPAAAGQRPAPGSRRARRAARAPPPPAAGSRRVRLQLATLEAGPGAAGAGSE

SEQ ID NO: 40430 - protein, 300 aa, Homo sapiens
MEEEASSPGLGCSKPHLEKLTLGITRILESSPGVTEVTIIEKPPAERHMISSWEQKNNCVMPEDVKNFYLMTNGFHMTWSVKLDEHIIPLGSMAINSISKLTQLTQSSMYSLPNAPTLADLEDDTHEASDDQPEKPHFDSRSVIFELDSCNGSGKVCLVYKSGKPALAEDTEIWFLDRALYWHFLTDTFTAYYRLLITHLGLPQWQYAFTSYGISPQAKQWFSMYKPITYNTNLLTEETDSFVNKLDPSKVFKSKNKIVIPKKKGPVQPAGGQKGPSGPSGPSTSSTSKSSSGSGNPTRK

SEQ ID NO: 40431 - protein, 257 aa, Homo sapiens
MEEEASSPGLGCSKPHLEKLTLGITRILESSPGVTEVTIIEKPPAERHMISSWEQKNNCVMPEDVKNFYLMTNGFHMTWSVKLDASDDQPEKPHFDSRSVIFELDSCNGSGKVCLVYKSGKPALAEDTEIWFLDRALYWHFLTDTFTAYYRLLITHLGLPQWQYAFTSYGISPQAKQWFSMYKPITYNTNLLTEETDSFVNKLDPSKVFKSKNKIVIPKKKGPVQPAGGQKGPSGPSGPSTSSTSKSSSGSGNPTRK

SEQ ID NO: 40432 - protein, 227 aa, Homo sapiens
MEEEASSPGLGCSKPHLEKLTLGITRILESSPGVTEVTIIEKPPAERHMISSWEQKNNCVMPEDVKNFYLMTNGFHMTWSVKLDEHIIPLGSMAINSISKLTQLTQSSMYSLPNAPTLADLEDDTHEASDDQPEKPHFDSRSVIFELDSCNGSGKVCLVYKSGKPALAEDTEIWFLDRALYWHFLTDTFTAYYRLLITHLGLPQWQYAFTSYGISPQAKVREEHLPL

SEQ ID NO: 40433 - protein, 265 aa, Homo sapiens
MEEEASSPGLGCSKPHLEKLTLGITRILESSPGVTEVTIIEKPPAERHMISSWEQKNNCVMPEDVKNFYLMTNGFHMTWSVKLDDLEDDTHEASDDQPEKPHFDSRSVIFELDSCNGSGKVCLVYKSGKPALAEDTEIWFLDRALYWHFLTDTFTAYYRLLITHLGLPQWQYAFTSYGISPQAKQWFSMYKPITYNTNLLTEETDSFVNKLDPSKVFKSKNKIVIPKKKGPVQPAGGQKGPSGPSGPSTSSTSKSSSGSGNPTRK

SEQ ID NO: 40434 - protein, 304 aa, Homo sapiens
MEEEASSPGLGCSKPHLEKLTLGITRILESSPGVTEVTIIEKPPAERHMISSWEQKNNCVMPEDVKNFYLMTNGFHMTWSVKLDEHIIPLGSMAINSISKLTQLTQSSMYSLPNAPTLADLEDDTHEASDDQPEKPHFDSRSVIFELDSCNGSGKVCLVYKSGKPALAEDTEIWFLDRALYWHFLTDTFTAYYRLLITHLGLPQWQYAFTSYGISPQAKITYNIKMNRRKCVHWKLAVEPLQWELRSCVSAGMGTGHKQRVSSMKPRSCSVCSRRQSNSMGTTVSQSFLSYGKNVLFFTVRCCF

SEQ ID NO: 40435 - protein, 811 aa, Homo sapiens
MLLLFHSKRMPVAEAPQVAGGQGDGGDGEEAEPEGMFKACEDSKRKARGYLRLVPLFVLLALLVLASAGVLLWYFLGYKAEVMVSQVYSGSLRVLNRHFSQDLTRRESSAFRSETAKAQKMLKELITSTRLGTYYNSSSVYSFGEGPLTCFFWFILQIPEHRRLMLSPEVVQALLVEELLSTVNSSAAVPYRAEYEVDPEGLVILEASVKDIAALNSTLGCYRYSYVGQGQVLRLKGPDHLASSCLWHLQGPKDLMLKLRLEWTLAECRDRLAMYDVAGPLEKRLITSVYGCSRQEPVVEVLASGAIMAVVWKKGLHSYYDPFVLSVQPVVFQACEVNLTLDNRLDSQGVLSTPYFPSYYSPQTHCSWHLTVPSLDYGLALWFDAYALRRQKYDLPCTQGQWTIQNRRLCGLRILQPYAERIPVVATAGITINFTSQISLTGPGVRVHYGLYNQSDPCPGEFLCSVNGLCVPACDGVKDCPNGLDERNCVCRATFQCKEDSTCISLPKVCDGQPDCLNGSDEEQCQEGVPCGTFTFQCEDRSCVKKPNPQCDGRPDCRDGSDEEHCDCGLQGPSSRIVGGAVSSEGEWPWQASLQVRGRHICGGALIADRWVITAAHCFQEDSMASTVLWTVFLGKVWQNSRWPGEVSFKVSRLLLHPYHEEDSHDYDVALLQLDHPVVRSAAVRPVCLPARSHFFEPGLHCWITGWGALREGGPISNALQKVDVQLIPQDLCSEVYRYQVTPRMLCAGYRKGKKDACQGDSGGPLVCKALSGRWFLAGLVSWGLGCGRPNYFGVYTRITGVISWIQQVVT

SEQ ID NO: 40436 - protein, 802 aa, Homo sapiens
MPVAEAPQVAGGQGDGGDGEEAEPEGMFKACEDSKRKARGYLRLVPLFVLLALLVLASAGVLLWYFLGYKAEVMVSQVYSGSLRVLNRHFSQDLTRRESSAFRSETAKAQKMLKELITSTRLGTYYNSSSVYSFGEGPLTCFFWFILQIPEHRRLMLSPEVVQALLVEELLSTVNSSAAVPYRAEYEVDPEGLVILEASVKDIAALNSTLGCYRYSYVGQGQVLRLKGPDHLASSCLWHLQGPKDLMLKLRLEWTLAECRDRLAMYDVAGPLEKRLITSVYGCSRQEPVVEVLASGAIMAVVWKKGLHSYYDPFVLSVQPVVFQACEVNLTLDNRLDSQGVLSTPYFPSYYSPQTHCSWHLTVPSLDYGLALWFDAYALRRQKYDLPCTQGQWTIQNRRLCGLRILQPYAERIPVVATAGITINFTSQISLTGPGVRVHYGLYNQSDPCPGEFLCSVNGLCVPACDGVKDCPNGLDERNCVCRATFQCKEDSTCISLPKVCDGQPDCLNGSDEEQCQEGVPCGTFTFQCEDRSCVKKPNPQCDGRPDCRDGSDEEHCDCGLQGPSSRIVGGAVSSEGEWPWQASLQVRGRHICGGALIADRWVITAAHCFQEDSMASTVLWTVFLGKVWQNSRWPGEVSFKVSRLLLHPYHEEDSHDYDVALLQLDHPVVRSAAVRPVCLPARSHFFEPGLHCWITGWGALREGGPISNALQKVDVQLIPQDLCSEVYRYQVTPRMLCAGYRKGKKDACQGDSGGPLVCKALSGRWFLAGLVSWGLGCGRPNYFGVYTRITGVISWIQQVVT

SEQ ID NO: 40437 - protein, 461 aa, Homo sapiens
MLLLFHSKRMPVAEAPQVAGGQGDGGDGEEAEPEGMFKACEDSKRKARGYLRLVPLFVLLALLVLASAGVLLWYFLGYKAEVMVSQVYSGSLRVLNRHFSQDLTRRESSAFRSETAKAQKMLKELITSTRLGTYYNSSSVYSFGEGPLTCFFWFILQIPEHRRLMLSPEVVQALLVEELLSTVNSSAAVPYRAEYEVDPEGLVILEASVKDIAALNSTLGCYRYSYVGQGQVLRLKGPDHLASSCLWHLQGPKDLMLKLRLEWTLAECRDRLAMYDVAGPLEKRLITSVYGCSRQEPVVEVLASGAIMAVVWKKGLHSYYDPFVLSVQPVVFQACEVNLTLDNRLDSQGVLSTPYFPSYYSPQTHCSWHLTVPSLDYGLALWFDAYALRRQKYDLPCTQGQWTIQNRRYHFLSSLWLPFLPPPPSLPSSTVTPSLEAQVPNLRGAARGASRGWGWCQACCP

SEQ ID NO: 40438 - protein, 824 aa, Homo sapiens
MPVAEAPQVAGGQGDGGDGEEAEPEGMFKACEDSKRKARGYLRLVPLFVLLALLVLASAGVLLWYFLGYKAEVMVSQVYSGSLRVLNRHFSQDLTRRESSAFRSETAKAQKMLKELITSTRLGTYYNSSSVYSFGEGPLTCFFWFILQIPEHRRLMLSPEVVQALLVEELLSTVNSSAAVPYRAEYEVDPEGLVILEASVKDIAALNSTLGCYRYSYVGQGQVLRLKGPDHLASSCLWHLQGPKDLMLKLRLEWTLAECRDRLAMYDVAGPLEKRLITSVYGCSRQEPVVEVLASGAIMAVVWKKGLHSYYDPFVLSVQPVVFQACEVNLTLDNRLDSQGVLSTPYFPSYYSPQTHCSWHLTVPSLDYGLALWFDAYALRRQKYDLPCTQGQWTIQNRRLCGLRILQPYAERIPVVATAGITINFTSQISLTGPGVRVHYGLYNQSDPCPGEFLCSVNGLCVPACDGVKDCPNGLDERNCVCRATFQCKEDSTCISLPKVCDGQPDCLNGSDEEQCQEGVPCGTFTFQCEDRSCVKKPNPQCDGRPDCRDGSDEEHCDCGLQGPSSRIVGGAVSSEGEWPWQASLQVRGRHICGGALIADRWVITAAHCFQEDSMASTVLWTVFLGKVWQNSRWPGEVSFKVSRLLLHPYHEEDSHDYDVALLQLDHPVVRSAAVRPVCLPARSHFFEPGLHCWITGWGALREGALRADAVALFYGWRNQGSETCCCPISNALQKVDVQLIPQDLCSEVYRYQVTPRMLCAGYRKGKKDACQGDSGGPLVCKALSGRWFLAGLVSWGLGCGRPNYFGVYTRITGVISWIQQVVT

SEQ ID NO: 40439 - protein, 195 aa, Homo sapiens
MRVGTWICLPGRPGRCRKQHDLGNCPEVPGIFKTLALSPGAPDMMQQPRVETDTIGAGEGPQQAVPWSAWVTRHGWVRWWVSHMPPSWIQWWSTSNWRQPLQRLLWGLEGILYLLLALMLCHALFTTGSHLLSSLWPVVAAVWRHLLPALLLLVLSALPALLFTASFLLLFSTLLSLVGLLTSMTHPGDTQDLDQ

SEQ ID NO: 40440 - protein, 152 aa, Homo sapiens
MMQQPRVETDTIGAGEGPQQAVPWSAWVTRHGWVRWWVSHMPPSWIQWWSTSNWRQPLQRLLWGLEGILYLLLALMLCHALFTTGSHLLSSLWPVVAAVWRHLLPALLLLVLSALPALLFTASFLLLFSTLLSLVGLLTSMTHPGDTQDLDQ

SEQ ID NO: 40441 - protein, 51 aa, Homo sapiens
MFRIEGLAPKLDPEEMKRKMREDVISSIRNFLIYVALLRVTPFILKKLDSI

SEQ ID NO: 40442 - protein, 92 aa, Homo sapiens
MFRIEGLAPKLDPEEMKRKMREDVISSIRNFLIYVALLRVSECLPGCDCETSGELTDGHPLTLRGHRGLRTELNGSGEQGGCALKATGICAV

SEQ ID NO: 40443 - protein, 85 aa, Homo sapiens
MFRIEGLAPKLDPEEMKRKMREDVISSIRNFLIYVALLRVSECLPGCDCETSGELTDGHPLTLRGHRGLRTELNAPFILKKLDSI

SEQ ID NO: 40444 - protein, 575 aa, Homo sapiens
MTSKKLVNSVAGCADDALAGLVACNPNLQLLQGHRVALRSDLDSLKGRVALLSGGGSGHEPAHAGFIGKGMLTGVIAGAVFTSPAVGSILAAIRAVAQAGTVGTLLIVKNYTGDRLNFGLAREQARAEGIPVEMVVIGDDSAFTVLKKAGRRGLCGTVLIHKVAGALAEAGVGLEEIAKQVNVVAKAMGTLGVSLSSCSVPGSKPTFELSADEVELGLGIHGEAGVRRIKMATADEIVKLMLDHMTNTTNASHVPVQPGSSVVMMVNNLGGLSFLELGIIADATVRSLEGRGVKIARALVGTFMSALEMPGISLTLLLVDEPLLKLIDAETTAAAWPNVAAVSITGRKRSRVAPAEPQEAPDSTAAGGSASKRMALVLERVCSTLLGLEEHLNALDRAAGDGDCGTTHSRAARAIQEWLKEGPPPASPAQLLSKLSVLLLEKMGGSSGALYGLFLTAAAQPLKAKTSLPAWSAAMDAGLEAMQKYGKAAPGDRTMLDSLWAAGQELQAWKSPGADLLQVLTKAVKSAEAAAEATKNMEAGAGRASYISSARLEQPDPGAVAAAAILRAILEVLQS

SEQ ID NO: 40445 - protein, 534 aa, Homo sapiens
MTSKKLVNSVAGCADDALAGLVACNPNLQLLQGHRVALRSDLDSLKGRVALLSGGGSGHEPAHAGFIGKGMLTGVIAGAVFTSPAVGSILAAIRAVAQAGTVGTLLIVKNYTGDRLNFGLAREQARAEGIPVEMVVIGDDSAFTVLKKAGRRGLCGTVLIHKVAGALAEAGVGLEEIAKQVNVVAKAMGTLGVSLSSCSVPGSKPTFELSADEVELGLGIHGEAGVRRIKMATADEIVKLMLDHMTNTTNASHVPVQPGSSVVMMVNNLGGLSFLELGIIADATVRSLEGRGVKIARALVGTFMSALEMPGISLTLLLVDEPLLKLIDAETTAAAWPNVAAVSITGRKRSRVAPAEPQEAPDSTAAGGSASKRMALVLERVCSTLLGLEEHLNALDRAAGDGDCGTTHSRAARAIQEWLKEGPPPASPAQLLSKLSVLLLEKMGGSSGALYGLFLTAAAQPLKAKTSLPAWSAAMDAGLEAMQKYGKAAPGDRTMLDSLWAAGQELQAWKSPGADLLQVLTKAVKEGGGLVICP

SEQ ID NO: 40446 - protein, 113 aa, Homo sapiens
MLPCLALLLLMELSVCTVAGDGGEEQTLSTEAETWVIVALEEGAGPSIQLQLQEVKTGKASQFFGLMGKRVGGRPLIQPRRKKAYQLEHTFQGLLGKRSLFTEGREDEAQGSE

SEQ ID NO: 40447 - protein, 96 aa, Homo sapiens
MLPCLALLLLMELSVCTVAGDGGEEQTLSTEAETWEGAGPSIQLQLQEVKTGKASQFFGLMGKRVGAYQLEHTFQGLLGKRSLFTEGREDEAQGSE

SEQ ID NO: 40448 - protein, 87 aa, Homo sapiens
MLPCLALLLLMELSVCTVAGDGGEEQTLSTEAETWEGAGPSIQLQLQEVKTGKASQFFGLMGKRVGGRPLIQPRRKKGREDEAQGSE

SEQ ID NO: 40449 - protein, 76 aa, Homo sapiens
MLPCLALLLLMELSVCTVAGDGGEEQTLSTEAETWEGAGPSIQLQLQEVKTGKASQFFGLMGKRVGGREDEAQGSE

SEQ ID NO: 40450 - protein, 107 aa, Homo sapiens
MLPCLALLLLMELSVCTVAGDGGEEQTLSTEAETWEGAGPSIQLQLQEVKTGKASQFFGLMGKRVGGRPLIQPRRKKAYQLEHTFQGLLGKRSLFTEGREDEAQGSE

SEQ ID NO: 40451 - protein, 124 aa, Homo sapiens
MGSSSEASFRSAQASCSGARRQGLGRGDQNLSVMPPNGRAQTHTPGWVSDPLVLGAQVHGGCRGIEALSVSSGSWSSATVWILTGLGLGLSRPFLPGATVLRDRPLGSAFELSYDQKKAPLRLQ

SEQ ID NO: 40452 - protein, 86 aa, Homo sapiens
MGSSSEASFRSAQASCSGARRQGLGRGDQNLSVMPPNGRAQTHTPGWVSDPLVLGAQVHGGCRGIEALSVSSGSWSSATVWILTVQ

SEQ ID NO: 40453 - protein, 108 aa, Homo sapiens
MGSSSEASFRSAQASCSGARRQGLGRGDQNLSVMPPNGRAQTHTPGWVSPCSENRDGLLPATAPGRLCSHRGADIPSFQTHQDPVTASGSSELHADCPQFRALDRAGN

SEQ ID NO: 40454 - protein, 120 aa, Homo sapiens
MGSSSEASFRSAQASCSGARRQGLGRGDQNLSVMPPNGRAQTHTPGWVSDPLVLGAQVHGGCRGIEALSVSSGSWSSATVWILTGLSRPFLPGATVLRDRPLGSAFELSYDQKKAPLRLQ

SEQ ID NO: 40455 - protein, 879 aa, Homo sapiens [sequence omitted]

SEQ ID NO: 40456 - protein, 431 aa, Homo sapiens
MIIWLEKMLDKIISIFIIFLLVIGTLLLALLLTAKVHQESVHMIEVTSNLINETLANHPEWANWLPEAQVVQRALNSAANNVYQYGREWITHKLHKILGDKVNNTAVIEKQVLELWDRLYHSWFVKNVTHSGRHKGQKLHVSRQNSWLGDILDWQDIVSFVHENIETFLSILESLWIVMSRNVSLLFTTVTTLLTILFYSGTALLNFVLSLIIFLTTLFYLLSSSDEYYKPVKWVISLTPLSQPGPSSNIIGQSVEEAIRGVFDASLKMAGFYGLYTWLTHTMFGINIVFIPSALAAILGAVPFLGTYWAAVPAVLDLWLTQGLGCKAILLLIFHLLPTYFVDTAIYSDISGGGHPYLTGLAVAGGAYYLGLEGAIIGPILLCILVVASNIYSAMLVSPTNSVPTPNQTPWPAQPQRTFRDISEDLKSSVG

SEQ ID NO: 40457 - protein, 503 aa, Homo sapiens
MADGGGPKDAPSLRSSPGPAPRVPRAVGPSGGGGETPRTAALALRFDKPIKQAFYNTGAVLFVCLCCGAAVLVYFILEAFLRPLLWAVLCGTFLHPFKSSLTRLGRHWLQRLHRAHTPIVLAALLLPLCFVDYGVEALGEQALRRRRLLLLLGAGGPLLYGLYCLGSYLGVQVLLVHAATLICRGLDYFSSLWIWTLVVGYVLTVSFKWNASTERYLRAVSIPVWIILLFHLASLAGSWRIPVFLVIVFLMSVGTLYEKQNGKESSGAELPGQVISMAASTLANLAISITGYESSSEDQPSTQPAEAVDRGESAPTLSTSPSPSSPSPTSPSPTLGRRRPEIGTFLRKKKTSDIYFVSLVWAIVVMQIWLNLWIVQLLPVPIAVWILKKLVIHFGVVDFLEKRYHVWWGIIESFLKERQGALAPWPIVGLGKFLLKVDSKMIIWLEKMLDKIISIFIIFLLVIGTLLLALLLTAKVHQESVHMIEVTSNLINETLANHPEWAK

SEQ ID NO: 40458 - protein, 55 aa, Homo sapiens
MVKLSKEAKQRLQQLFKGSQFAIRWGFIPLVIYLGFKRGADPGMPEPTVLSLLWG

SEQ ID NO: 40459 - protein, 219 aa, Homo sapiens
MAAEDREMMEARGAGESCPTFPKMVPGDSKSEGKPRAYLEAESQKPDSSYDYLEEMEACEDGGCQGPLKSLSPKSCRATKGQAGDGPKPAELPPTPGTERNPEMELEKVRMEFELTRLKYLHEKNQRQRQHEVVMEQLQRERQHEVVMEQLQQEAAPRLFSGGLQNFLLPQNQFAMFLYCFIFIHIIYVTKEMVFFLFAKHYLFCIAAILLCLIKTFWS

SEQ ID NO: 40460 - protein, 470 aa, Homo sapiens
MADSGLREPQEDSQKDLENDPSVNSQAQETTIIASNAEEAEILHSACGLSKDHQEVETEGPESADTGDKSESPDEANVGKHPKDKTEDENKQSFLDGGKGHHLPSENLGKEPLDPDPSHSPSDKVGRADAHLGSSSVALPKEASDGTGASQEPPTTDSQEAQSPGHSSAGQEGEDTLRRRLLAPEAGSHPQQTQKLEEIKENAQDTMRQINKKGFWSYGPVILVVLVVAVVASSVNSYYSSPAQQVPKNPALEAFLAQFSQLEDKFPGQSSFLWQRGRKFLQKHLNASNPTEPATIIFTAAREGRETLKCLSHHVADAYTSSQKVSPIQIDGAGRTWQDSDTVKLLVDLELSYGFENGQKAAVVHHFESFPAGSTLIFYKYCDHENAAFKDVALVLTVLLEEETLEASVGPRETEEKVRDLLWAKFTNSDTPTSFNHMDSDKLSGLWSRISHLVLPVQPVSSIEEQGCLF

SEQ ID NO: 40461 - protein, 121 aa, Homo sapiens
MRIMLLFTAILAFSLAQSFGAVCKEPQEEVVPGGGRSKRDPDLYQLLQRLFKSHSSLEGLLKALSQASTDPKESTSPEKRDMHDFFVGLMGKRSVQPDSPTDVNQENVPSFGILKYPPRAE

SEQ ID NO: 40462 - protein, 135 aa, Homo sapiens
MRIMLLFTAILAFSLAQSFGAVCKEPQEEVVPGGGRSKRDPDLYQLLQRLFKSHSSLEGLLKALSQASTDPKESTSPEKRDMHDFFVGLMGKRSVQPEGKTGPFLPSVRVPRPLHPNQLGSTGKSSLGTEEQRPL

SEQ ID NO: 40463 - protein, 103 aa, Homo sapiens
MRIMLLFTAILAFSLAQSFGAVCKEPQEEVVPGGGRSKRDPDLYQLLQRLFKSHSSLEGLLKALSQASTDPKESTSPEKHSPTDVNQENVPSFGILKYPPRAE

SEQ ID NO: 40464 - protein, 314 aa, Homo sapiens
MFSINPLENLKVYISSRPPLVVFMISVSAMAIAFLTLGYFFKIKEIKSPEMAEDWNTFLLRFNDLDLCVSENETLKHLTNDTTTPESTMTSGQARASTQSPQALEDSGPVNISVSITLTLDPLKPFGGYSRNVTHLYSTILGHQIGLSGREAHEEINITFTLPTAWSSDDCALHGHCEQVVFTACMTLTASPGVFPVTVQPPHCVPDTYSNATLWYKIFTTARDANTKYAQDYNPFWCYKGAIGKVYHALNPKLTVIVPDDDRSLINLHLMHTSYFLFVMVITMFCYAVIKGRPSKLRQSNPEFCPEKVALAEA

SEQ ID NO: 40465 - protein, 203 aa, Homo sapiens
MFSINPLENLKVYISSRPPLVVFMISVSAMAIAFLTLGYFFKIKEIKSPEMAEDWNTFLLRFNDLDLCVSENETLKHLTNDTTTPESTMTSGQARASTQSPQALEDSGPVNISVSITLTLDPLKPFGGYSRNVTHLYSTILGHQIGLSGREAHEEINITFTLPTAWSSDDCALHGHCEQVVFTACMTLTASPGVFPVTVMTVH

SEQ ID NO: 40466 - protein, 488 aa, Homo sapiens; identical to SEQ ID NO: 191

SEQ ID NO: 40467 - protein, 515 aa, Homo sapiens; identical to SEQ ID NO: 192

SEQ ID NO: 40468 - protein, 464 aa, Homo sapiens; identical to SEQ ID NO: 193

SEQ ID NO: 40469 - protein, 506 aa, Homo sapiens; identical to SEQ ID NO: 194

SEQ ID NO: 40470 - protein, 291 aa, Homo sapiens
MGTPWRKRKGIAGPGLPDLSCALVLQPRAQVGTMSPAIALAFLPLVVTLLVRYRHYFRLLVRTVLLRSLRDCLSGLRIEERAFSYVLTHALPGDPGHILTTLDHWSSRCEYLSHMGPVKGQILMRLVEEKAPACVLELGTYCGYSTLLIARALPPGGRLLTVERDPRTAAVAEKLIRLAGFDEHMVELIVGSSEDVIPCLRTQYQLSRADLVLLAHRPRCYLRDLQLLEAHALLPAGATVLADHVLFPGAPRFLQYAKSCGRYRCRLHHTGLPDFPAIKDGIAQLTYAGPG

SEQ ID NO: 40471 - protein, 251 aa, Homo sapiens
MGTPWRKRKGIAGPGLPDLSCALVLQPSLRDCLSGLRIEERAFSYVLTHALPGDPGHILTTLDHWSSRCEYLSHMGPVKGQILMRLVEEKAPACVLELGTYCGYSTLLIARALPPGGRLLTVERDPRTAAVAEKLIRLAGFDEHMVELIVGSSEDVIPCLRTQYQLSRADLVLLAHRPRCYLRDLQLLEAHALLPAGATVLADHVLFPGAPRFLQYAKSCGRYRCRLHHTGLPDFPAIKDGIAQLTYAGPG

SEQ ID NO: 40472 - protein, 882 aa, Homo sapiens
MVVTTSARGGGGDRTPSRRRGCGLAPAGAAALLAGASCLCYGRSLQGEFVHDDVWAIVNNPDVRPGAPLRWGIFTNDFWGKGMAENTSHKSYRPLCVLTFKLNIFLTGMNPFYFHAVNIILHCLVTLVLMYTCDKTVFKNRGLAFVTALLFAVHPIHTEAVAGIVGRADVLACLLFLLAFLSYNRSLDQGCVGGSFPSTVSPFFLLLSLFLGTCAMLVKETGITVFGVCLVYDLFSLSNKQDKSSNGALCPRSPQQPGSPQPSSLPGHPHRENGKQQRFPHKGAWGGCHSPLPPEPKSSGFPVSPRAVWSMMRFLTYSYLLAFNVWLLLAPVTLCYDWQVGSIPLVETIWDMRNLATIFLAVVMALLSLHCLAAFKRLEHKEVLVGLLFLVFPFIPASNLFFRVGFVVAERVLYMPSMGYCILFVHGLSKLCTWLNRCGATTLIVSTVLLLLLFSWKTVKQNEIWLSRESLFRSGVQTLPHNAKVHYNYANFLKDQGRNKEAIYHYRTALKLYPRHASALNNLGTLTRDTAEAKMYYQRALQLHPQHNRALFNLGNLLKSQEKKEEAITLLKDSIKYGPEFADAYSSLASLLAEQERFKEAEEIYQTGIKNCPDSSDLHNNYGVFLVDTGLPEKAVAHYQQAIKLSPSHHVAMVNLGRLYRSLGENSMAEEWYKRALQVAHKAEILSPLGALYYNTGRYEEALQIYQEAAALQPSQRELRLALAQVLAVMGQTKEAEKMTNHIVSEETGCLECYRLLSAIYSKQENHDKALDAIDKALQLKPKDPKVISELFFTKGNQLREQNLLDKAFESYRVAVQLNPDQAQAWMNMGGIQHIKGKYVSARAYYERALQLVPDSKLLKENLAKLDRLEKRLQEVREKDQT

SEQ ID NO: 40473 - protein, 774 aa, Homo sapiens
MNPFYFHAVNIILHCLVTLVLMYTCDKTVFKNRGLAFVTALLFAVHPIHTEAVAGIVGRADVLACLLFLLAFLSYNRSLDQGCVGGSFPSTVSPFFLLLSLFLGTCAMLVKETGITVFGVCLVYDLFSLSNKQDKSSNGALCPRSPQQPGSPQPSSLPGHPHRENGKQQRFPHKGAWGGCHSPLPPEPKSSGFPVSPRAVWSMMRFLTYSYLLAFNVWLLLAPVTLCYDWQVGSIPLVETIWDMRNLATIFLAVVMALLSLHCLAAFKRLEHKEVLVGLLFLVFPFIPASNLFFRVGFVVAERVLYMPSMGYCILFVHGLSKLCTWLNRCGATTLIVSTVLLLLLFSWKTVKQNEIWLSRESLFRSGVQTLPHNAKVHYNYANFLKDQGRNKEAIYHYRTALKLYPRHASALNNLGTLTRDTAEAKMYYQRALQLHPQHNRALFNLGNLLKSQEKKEEAITLLKDSIKYGPEFADAYSSLASLLAEQERFKEAEEIYQTGIKNCPDSSDLHNNYGVFLVDTGLPEKAVAHYQQAIKLSPSHHVAMVNLGRLYRSLGENSMAEEWYKRALQVAHKAEILSPLGALYYNTGRYEEALQIYQEAAALQPSQRELRLALAQVLAVMGQTKEAEKMTNHIVSEETGCLECYRLLSAIYSKQENHDKALDAIDKALQLKPKDPKVISELFFTKGNQLREQNLLDKAFESYRVAVQLNPDQAQAWMNMGGIQHIKGKYVSARAYYERALQLVPDSKLLKENLAKLDRLEKRLQEVREKDQT

SEQ ID NO: 40474 - protein, 645 aa, Homo sapiens
MTKQDSASKKKKKRYLRASSNRNFLLTMRPFLKRAILVLSYVLVILYFRLWIMGGSMPLFSEQDNPASFSPYILTRFLTYSYLLAFNVWLLLAPVTLCYDWQVGSIPLVETIWDMRNLATIFLAVVMALLSLHCLAAFKRLEHKEVLVGLLFLVFPFIPASNLFFRVGFVVAERVLYMPSMGYCILFVHGLSKLCTWLNRCGATTLIVSTVLLLLLFSWKTVKQNEIWLSRESLFRSGVQTLPHNAKVHYNYANFLKDQGRNKEAIYHYRTALKLYPRHASALNNLGTLTRDTAEAKMYYQRALQLHPQHNRALFNLGNLLKSQEKKEEAITLLKDSIKYGPEFADAYSSLASLLAEQERFKEAEEIYQTGIKNCPDSSDLHNNYGVFLVDTGLPEKAVAHYQQAIKLSPSHHVAMVNLGRLYRSLGENSMAEEWYKRALQVAHKAEILSPLGALYYNTGRYEEALQIYQEAAALQPSQRELRLALAQVLAVMGQTKEAEKMTNHIVSEETGCLECYRLLSAIYSKQENHDKALDAIDKALQLKPKDPKVISELFFTKGNQLREQNLLDKAFESYRVAVQLNPDQAQAWMNMGGIQHIKGKYVSARAYYERALQLVPDSKLLKENLAKLDRLEKRLQEVREKDQT

SEQ ID NO: 40475 - protein, 574 aa, Homo sapiens
MNPFYFHAVNIILHCLVTLVLMYTCDKTVFKNRGLAFVTALLFAVHPIHTEAVAGIVGRADVLACLLFLLAFLSYNRSLDQGCVGGSFPSTVSPFFLLLSLFLGTCAMLVKETGITVFGVCLVYDLFSLSNKQDKSSNGALCPRSPQQPGSPQPSSLPGHPHRENGKQQRFPHKGAWGGCHSPLPPEPKSSGFPVSPRAVWSMMRYLRASSNRNFLLTMRPFLKRAILVLSYVLVILYFRLWIMGGSMPLFSEQDNPASFSPYILTRFLTYSYLLAFNVWLLLAPVTLCYDWQVGSIPLVETIWDMRNLATIFLAVVMALLSLHCLAAFKRLEHKEVLVGLLFLVFPFIPASNLFFRVGFVVAERVLYMPSMGYCILFVHGLSKLCTWLNRCGATTLIVSTVLLLLLFSWKTVKQNEIWLSRESLFRSGVQTLPHNAKVHYNYANFLKDQGRNKEAIYHYRTALKLYPRHASALNNLGTLTRDTAEAKMYYQRALQLHPQHNRALFNLGNLLKSQEKKEEAITLLKDSIKYGPEFADAYSSLASLLAEQVIVSHSSFFQCYCYMYKLMLHRFLY

SEQ ID NO: 40476 - protein, 227 aa, Homo sapiens
MVNLGRLYRSLGENSMAEECALQVAHKAEILSPLGALYYNTGRYEEALQIYQEAAALQPSQRELRLALAQVLAVMGQTKEAEKMTNHIVSEETGCLECYRLLSAIYSKQENHDKALDAIDKALQLKPKDPKVISELFFTKGNQLREQNLLDKAFESYRVAVQLNPDQAQAWMNMGGIQHIKGKYVSARAYYERALQLVPDSKLLKENLAKLDRLEKRLQEVREKDQT

SEQ ID NO: 40477 - protein, 235 aa, Homo sapiens
MPKGRAGSLPTTSIGWRFQLWFLGLTCPERHLARRLKNNSFYPFVQQEPNVFVLEYYLDTLWKGMLLFIISVVLVSFSSLREVQKQETWVFLVYGVGVGLWLVISSLPRRRLVLNHTRGVYHFSIQGRTVCQGPLHLVYVRLALSSDAHGRCFFHLVLGGHRLEPLVLVQLSEHYEQMEYLGRYIARKLNINYFDYLATSYRHVVRHWPPPGAGTVMGKSPMGHKPSSSQSSLEV

SEQ ID NO: 40478 - protein, 576 aa, Homo sapiens
MDVRFYPAAAGDPASLDFAQCLGYYGYSKFGNNNNYMNMAEANNAFFAASEQTFHTPSLGDEEFEIPPITPPPESDPALGMPDVLLPFQALSDPLPSQGSEFTPQFPPQSLDLPSITISRNLVEQDGVLHSSGLHMDQSHTQVSQYRQDPSLIMRSIVHMTDAARSGVMPPAQLTTINQSQLSAQLGLNLGGASMPHTSPSPPASKSATPSPSSSINEEDADEANRAIGEKRAAPDSGKKPKTPKKKKKKDPNEPQKPVSAYALFFRDTQAAIKGQNPNATFGEVSKIVASMWDSLGEEQKQVYKRKTEAAKKEYLKALAAYRASLVSKAAAESAEAQTIRSVQQTLASTNLTSSLLLNTPLSQHGTVSASPQTLQQSLPRSIAPKPLTMRLPMNQIVTSVTIAANMPSNIGAPLISSMGTTMVGSAPSTQVSPSVQTQQHQMQLQQQQQQQQQQMQQMQQQQLQQHQMHQQIQQQMQQQHFQHHMQQHLQQQQQHLQQQINQQQLQQQLQQRLQLQQLQHMQHQSQPSPRQHSPVASQITSPIPAIGSPQPASQQHQSQIQSQTQTQVLSQVSIF

SEQ ID NO: 40479 - protein, 571 aa, Homo sapiens
MKCQPRSGARRIEERLHYLITTYLKFGNNNNYMNMAEANNAFFAASETFHTPSLGDEEFEIPPITPPPESDPALGMPDVLLPFQALSDPLPSQGSEFTPQFPPQSLDLPSITISRNLVEQDGVLHSSGLHMDQSHTQVSQYRQDPSLIMRSIVHMTDAARSGVMPPAQLTTINQSQLSAQLGLNLGGASMPHTSPSPPASKSATPSPSSSINEEDADEANRAIGEKRAAPDSGKKPKTPKKKKKKDPNEPQKPVSAYALFFRDTQAAIKGQNPNATFGEVSKIVASMWDSLGEEQKQVYKRKTEAAKKEYLKALAAYRASLVSKAAAESAEAQTIRSVQQTLASTNLTSSLLLNTPLSQHGTVSASPQTLQQSLPRSIAPKPLTMRLPMNQIVTSVTIAANMPSNIGAPLISSMGTTMVGSAPSTQVSPSVQTQQHQMQLQQQQQQQQQQMQQMQQQQLQQHQMHQQIQQQMQQQHFQHHMQQHLQQQQQHLQQQINQQQLQQQLQQRLQLQQLQHMQHQSQPSPRQHSPVASQITSPIPAIGSPQPASQQHQSQIQSQTQTQVLSQVSIF

SEQ ID NO: 40480 - protein, 600 aa, Homo sapiens
MRSCLWRCRHLSQGVQWSLLLAVLVFFLFALPSFIKEPQTKPSRHQRTENIKERSLQSLAKPKSQAPTRARRTTIYAEPVPENNALNTQTQPKAHTTGDRGKEANQAPPEEQDKVPHTAQRAAWKSPEKEKTMVNTLSPRGQDAGMASGRTEAQSWKSQDTKTTQGNGGQTRKLTASRTVSEKHQGKAATTAKTLIPKSQHRMLAPTGAVSTRTRQKGVTTAVIPPKEKKPQATPPPAPFQSPTTQRNQRLKAANFKSEPRWDFEEKYSFEIGGLQTTCPDSVKIKASKSLWLQKLFLPNLTLFLDSRHFNQSEWDRLEHFAPPFGFMELNYSLVQKVVTRFPPVPQQQLLLASLPAGSLRCITCAVVGNGGILNNSHMGQEIDSHDYVFRLSGALIKGYEQDVGTRTSFYGFTAFSLTQSLLILGNRGFKNVPLGKDVRYLHFLEGTRDYEWLEALLMNQTVMSKNLFWFRHRPQEAFREALHMDRYLLLHPDFLRYMKNRFLRSKTLDGAHWRIYRPTTGALLLLTALQLCDQVSAYGFITEGHERFSDHYYDTSWKRLIFYINHDFKLEREVWKRLHDEGIIRLYQRPGPGTAKAKN

SEQ ID NO: 40481 - protein, 410 aa, Homo sapiens
MPGVCDRAPDFLSPSEDQVLRPALGSSVALNCTAWVVSGPHCSLPSVQWLKDGLPLGIGGHYSLHEYSWVKANLSEVLVSSVLGVNVTSTEVYGAFTCSIQNISFSSFTLQRAGPTSHVAAVLASLLVLLALLLAALLYVKCRLNVLLWYQDAYGEVEINDGKLYDAYVSYSDCPEDRKFVNFILKPQLERRRGYKLFLDDRDLLPRAEPSADLLVNLSRCRRLIVVLSDAFLSRAWCSHSFREGLCRLLELTRRPIFITFEGQRRDPAHPALRLLRQHRHLVTLLLWRPGSVTPSSDFWKEVQLALPRKVQYRPVEGDPQTQLQDDKDPMLILRGRVPEGRALDSEVDPDPEGDLGVRGPVFGEPSAPPHTSGVSLGESRSSEVDVSDLGSRNYSARTDFYCLVSKDDM

SEQ ID NO: 40482 - protein, 504 aa, Homo sapiens
MPGVCDRAPDFLSPSEDQVLRPALGSSVALNCTAWVVSGPHCSLPSVQWLKDGLPLGIGGHYSLHEYSWVKANLSEVLVSSVLGVNVTSTEVYGAFTCSIQNISFSSFTLQRAGPTSHVAAVLASLLVLLALLLAALLYVKCRLNVLLWYQDAYGEVEINDGKLYDAYVSYSDCPEDRKFVNFILKPQLERRRGYKLFLDDRDLLPRAEPSADLLVNLSRCRRLIVVLSDAFLSRAWCSHSFREGLCRLLELTRRPIFITFEGQRRDPAHPALRLLRQHRHLVTLLLWRPGSVTPSSDFWKEVQLALPRKVQYRPVEGDPQTQLQDDKDPMLILRGRVPEGRALDSEVDPDPEGDLGMPAQPHSPTGEAQHRAEWGQAQGTGPGGALGVEDSSRHREPLHGLCPGGARPSVCLGTSWASQAITAGGEQGQPLAVGLGQGCGWPPQASRSPHPRCPGACFWRAISSTAHQWGLAGREPEQRSGRLGSRLAKLQCPHRLLLPGVQG

SEQ ID NO: 40483 - protein, 374 aa, Homo sapiens
MGLPRGSFFWLLLLLTAACSGLLFALYFSAVQRYPGPAAGARDTTSFEAFFQSKASNSWTGKGQACRHLLHLAIQRHPHFRGLFNLSIPVLLWGDLFTPALWDRLSQHKAPYGWRGLSHQVIASTLSLLNGSESAKLFAPPRDTPPKCIRCAVVGNGGILNGSRQGPNIDAHDYVFRLNGAVIKGFERDVGTKTSFYGFTVNTMKNSLVSYWNLGFTSVPQGQDLQYIFIPSDIRDYVMLRSAILGVPVPEGLDKGDRPHAYFGPEASASKFKLLHPDFISYLTERFLKSKLINTHFGDLYMPSTGALMLLTALHTCDQVSAYGFITSNYWKFSDHYFERKMKPLIFYANHDLSLEAALWRDLHKAGILQLYQR

SEQ ID NO: 40484 - protein, 1217 aa, Homo sapiens
MFLYNLTLQRATGISFAIHGNFSGTKQQEIVVSRGKILELLRPDPNTGKVHTLLTVEVFGVIRSLMAFRLTGGTKDYIVVGSDSGRIVILEYQPSKNMFEKIHQETFGKSGCRRIVPGQFLAVDPKGRAVMISAIEKQKLVYILNRDAAARLTISSPLEAHKANTLVYHVVGVDVGFENPMFACLEMDYEEADNDPTGEAAANTQQTLTFYELDLGLNHVVRKYSEPLEEHGNFLITVPGGSDGPSGVLICSENYITYKNFGDQPDIRCPIPRRRNDLDDPERGMIFVCSATHKTKSMFFFLAQTEQGDIFKITLETDEDMVTEIRLKYFDTVPVAAAMCVLKTGFLFVASEFGNHYLYQIAHLGDDDEEPEFSSAMPLEEGDTFFFQPRPLKNLVLVDELDSLSPILFCQIADLANEDTPQLYVACGRGPRSSLRVLRHGLEVSEMAVSELPGNPNAVWTVRRHIEDEFDAYIIVSFVNATLVLSIGETVEEVTDSGFLGTTPTLSCSLLGDDALVQVYPDGIRHIRADKRVNEWKTPGKKTIVKCAVNQRQVVIALTGGELVYFEMDPSGQLNEYTERKEMSADVVCMSLANVPPGEQRSRFLAVGLVDNTVRIISLDPSDCLQPLSMQALPAQPESLCIVEMGGTEKQDELGERGSIGFLYLNIGLQNGVLLRTVLDPVTGDLSDTRTRYLGSRPVKLFRVRMQGQEAVLAMSSRSWLSYSYQSRFHLTPLSYETLEFASGFASEQCPEGIVAISTNTLRILALEKLGAVFNQVAFPLQYTPRKFVIHPESNNLIIIETDHNAYTEATKAQRKQQMAEEMVEAAGEDERELAAEMAAAFLNENLPESIFGAPKAGNGQWASVIRVMNPIQGNTLDLVQLEQNEAAFSVAVCRFSNTGEDWYVLVGVAKDLILNPRSVAGGFVYTYKLVNNGEKLEFLHKTPVEEVPAAIAPFQGRVLIGVGKLLRVYDLGKKKLLRKCENKHIANYISGIQTIGHRVIVSDVQESFIWVRYKRNENQLIIFADDTYPRWVTTASLLDYDTVAGADKFGNICVVRLPPNTNDEVDEDPTGNKALWDRGLLNGASQKAEVIMNYHVGETVLSLQKTTLIPGGSESLVYTTLSGGIGILVPFTSHEDHDFFQHVEMHLRSEHPPLCGRDHLSFRSYYFPVKNVIDGDLCEQFNSMEPNKQKNVSEELDRTPPEVSKKLEDIRTRYAF

SEQ ID NO: 40485 - protein, 275 aa, Homo sapiens
MFLYNLTLQRATGISFAIHGNFSGTKQQEIVVSRGKILELLRPDPNTGKVHTLLTVEVFGVIRSLMAFRLTGGTKDYIVVGSDSGRIVILEYQPSKNMFEKIHQETFGKSGCRRIVPGQFLAVDPKGRAVMISAIEKQKLVYILNRDAAARLTISSPLEAHKANTLVYHVVGVDVGFENPMFACLEMDYEEADNDPTGEAAANTQQTLTFYELDLGLNHVVRKYSEPLEEHGNFLITVPGGSDGPSGVLNLSPPFPKAIPALICLDSPVYFCTHP

SEQ ID NO: 40486 - protein, 399 aa, Homo sapiens
MAEEMVEAAGEDERELAAEMAAAFLNENLPESIFGAPKAGNGQWASVIRVMNPIQGNTLDLVQLEQNEAAFSVAVCRFSNTGEDWYVLVGVAKDLILNPRSVAGGFVYTYKLVNNGEKLEFLHKTPVEEVPAAIAPFQGRVLIGVGKLLRVYDLGKKKLLRKCENKHIANYISGIQTIGHRVIVSDVQESFIWVRYKRNENQLIIFADDTYPRWVTTASLLDYDTVAGADKFGNICVVRLPPNTNDEVDEDPTGNKALWDRGLLNGASQKAEVIMNYHVGETVLSLQKTTLIPGGSESLVYTTLSGGIGILVPFTSHEDHDFFQHVEMHLRSEHPPLCGRDHLSFRSYYFPVKNVIDGDLCEQFNSMEPNKQKNVSEELDRTPPEVSKKLEDIRTRYAF

SEQ ID NO: 40487 - protein, 194 aa, Homo sapiens
MAAAAPNAGGSAPETAGSAEAPLQYSLLLQYLVGDKRQPRLLEPGSLGGIPSPAKSEEQKMIEKAMESCAFKAALACVGGFVLGGAFGVFTAGIDTNVGFDPKDPYRTPTAKEVLKDMGQRGMSYAKNFAIVGAMFSCTECLIESYRGTSDWKNSVISGCITGGAIGFRAGLKAGAIGCGGFAAFSAAIDYYLR

SEQ ID NO: 40488 - protein, 291 aa, Homo sapiens
MDSPWDELALAFSRTSMFPFFDIAHYLVSVMAVKRQPGAAALAWKNPISSWFTAMLHCFGGGILSCLLLAEPPLKFLANHTNILLASSIWYITFFCPHDLVSQGYSYLPVQLLASGMKEVTRTWKIVGGVTHANSYYKNGWIVMIAIGWARGAGGTIITNFERLVKGDWKPEGDEWLKMSYPAKVTLLGSVIFTFQHTQHLAISKHNLMFLYTIFIVATKITMMTTQTSTMTFAPFEDTLSWMLFGWQQPFSSCEKKSEAKSPSNGVGSLASKPVDVASDNVKKKHTKKNE

SEQ ID NO: 40489 - protein, 217 aa, Homo sapiens
MGSTVPRSASVLLLLLLLRRAEQPCGAELTFELPDNAKQCFHEEVEQGVKFSLDYQVITGGHYDVDCYVEDPQGNTIYRETKKQYDSFTYRAEVKGVYQFCFSNEFSTFSHKTVYFDFQVGDEPPILPDMGNRVTALTQMESACVTIHEALKTVIDSQTHYRLREAQDRARAEDLNSRVSYWSVGETIALFVVSFSQVLLLKSFFTEKRPISRAVHS

SEQ ID NO: 40490 - protein, 173 aa, Homo sapiens
MGSTVPRSASVLLLLLLLRRAEQPCGAELTFELPDNAKQCFHEEVEQGVKFSLDYQVITGGHYDVDCYVEDPQGNTIYRETKKQYDSFTYRAEVKGVYQFCFSNEFSTFSHKTVYFDFQVGDEPPILPDMGNRVTALTQRFRGAYWKEVDKMVDYMQPGGTPATEGLGRLAPS

SEQ ID NO: 40491 - protein, 707 aa, Homo sapiens
MSPHGDGRGQAQGRAVRVGLRRSGGIRGGVAVFAAVAAVFTFTLPPSVPGGDSGELITAAHELGVAHPPGYPLFTLVAKLAITLFPFGSIAYRVNLLCGLFGAVAASLLFFTVFRLSGSSAGGILAAGVFSFSRLTWQWSIAAEVFSLNNLFVGLLMALTVHFEEAATAKERSKVAKIGAFCCGLSLCNQHTIILYVLCIIPWILFQLLKKKELSLGSLLKLSLYFSAGLLPYVHLPISSYLNHARWTWGDQTTLQGFLTHFLREEYGTFSLAKSEIGSSMSEILLSQVTNMRTELSFNIQALAVCANICLATKDRQNPSLVWLFTGMFCIYSLFFAWRANLDISKPLFMGVVERFWMQSNAVVAVLAGIGLAAVVSETNRVLNSNGLQCLEWLSATLFVVYQIYSNYSVCDQRTNYVIDKFAKNLLTSMPHDAIILLRGDLPGNSLRYMHYCEGLRPDISLVDQEMMTYEWYLPKMAKHLPGVNFPGNRWNPVEGILPSGMVTFNLYHFLEVNKQKETFVCIGIHEGDPTWKKNYSLWPWGSCDKLVPLEIVFNPEEWIKLTKSIYNWTEEYGRFDPSSWESVANEEMWQARMKTPFFIFNLAETAHMPSKVKAQLYAQAYDLYKEIVYLQKEHPVNWHKNYAIACERMLRLQARDADPEVLLSETIRHFRLYSQKAPNDPQQADILGALKHLRKELQSLRNRKNV

SEQ ID NO: 40492 - protein, 286 aa, Homo sapiens
MSPHGDGRGQAQGRAVRVGLRRSGGIRGGVAVFAAVAAVFTFTLPPSVPGGDSGELITAAHELGVAHPPGYPLFTLVAKLAITLFPFGSIAYRVNLLCGLFGAVAASLLFFTVFRLSGSSAGGILAAGVFSFSRLTWQWSIAAEVFSLNNLFVGLLMALTVHFEEAATAKERSKVAKIGAFCCGLSLCNQHTIILYVLCIIPWILFQLLKKKELSLGSLLKLSLYFSAGLLPYVHLPISSYLNHARWTWGDQTTLQGFLTHFLREEYGTFSLAKSEIGSSMSEILL

SEQ ID NO: 40493 - protein, 409 aa, Homo sapiens
MSPHGDGRGQAQGRAVRVGLRRSGGIRGGVAVFAAVAAVFTFTLPPSVPGGDSGELITAAHELGVAHPPGYPLFTLVAKLAITLFPFGSIAYRVNLLCGLFGAVAASLLFFTVFRLSGSSAGGILAAGVFSFSRLTWQWSIAAEVFSLNNLFVGLLMALTVHFEEAATAKERSKVAKIGAFCCGLSLCNQHTIILYVLCIIPWILFQLLKKKELSLGSLLKLSLYFSAGLLPYVHLPISSYLNHARWTWGDQTTLQGFLTHFLREEYGTFSLAKSEIGSSMSEILLSQVTNMRTELSFNIQALAVCANICLATKDRQNPSLVWLFTGMFCIYSLFFAWRANLDISKPLFMGVVERFWMQSNAVVAVLAGIGLAAVVSETNRVLNSNGLQCLEWLSATLFVVYQIYSNYR

SEQ ID NO: 40494 - protein, 116 aa, Homo sapiens
MWLQDRIATFFFPKGMMLTTAALMLFFLHLGIFIRDVHNFCITYHYDHMSFHYTVVLMFSQVISICWAAMGSLYAEMTENKYVCFSALTILMLNGAMFFNRLSLEFLAIEYREEHH

SEQ ID NO: 40495 - protein, 601 aa, Homo sapiens
MRVVRLLRLRAALTLLGEVPRRPASRGVPGSRRTQKGSGARWEKEKHEDGVKWRQLEHKGPYFAPPYEPLPDGVRFFYEGRPVRLSVAAEEVATFYGRMLDHEYTTKEVFRKNFFNDWRKEMAVEEREVIKSLDKCDFTEIHRYFVDKAAARKVLSREEKQKLKEEAEKLQQEFGYCILDGHQEKIGNFKIEPPGLFRGRGDHPKMGMLKRRITPEDVVINCSRDSKIPEPPAGHQWKEVRSDNTVTWLAAWTESVQNSIKYIMLNPCSKLKGETAWQKFETARRLRGFVDEIRSQYRADWKSREMKTRQRAVALYFIDKLALRAGNEKEDGEAADTVGCCSLRVEHVQLHPEADGCQHVVEFDFLGKDCIRYYNRVPVEKPVYKNLQLFMENKDPRDDLFDRLTTTSLNKHLQELMDGLTAKVFRTYNASITLQEQLRALTRAEDSIAAKILSYNRANRVVAILCNHQRATPSTFEKSMQNLQTKIQAKKEQVAEARAELRRARAEHKAQGDGKSRSVLEKKRRLLEKLQEQLAQLSVQATDKEENKQVALGTSKLNYLDPRISIAWCKRFRVPVEKIYSKTQRERFAWALAMAGEDFEF

SEQ ID NO: 40496 - protein, 503 aa, Homo sapiens
MLDHEYTTKEVFRKNFFNDWRKEMAVEEREVIKSLDKCDFTEIHRYFVDKAAARKVLSREEKQKLKEEAEKLQQEFGYCILDGHQEKIGNFKIEPPGLFRGRGDHPKMGMLKRRITPEDVVINCSRDSKIPEPPAGHQWKEVRSDNTVTWLAAWTESVQNSIKYIMLNPCSKLKGETAWQKFETARRLRGFVDEIRSQYRADWKSREMKTRQRAVALYFIDKLALRAGNEKEDGEAADTVGCCSLRVEHVQLHPEADGCQHVVEFDFLGKDCIRYYNRVPVEKPVYKNLQLFMENKDPRDDLFDRLTTTSLNKHLQELMDGLTAKVFRTYNASITLQEQLRALTRAEDSIAAKILSYNRANRVVAILCNHQRATPSTFEKSMQNLQTKIQAKKEQVAEARAELRRARAEHKAQGDGKSRSVLEKKRRLLEKLQEQLAQLSVQATDKEENKQVALGTSKLNYLDPRISIAWCKRFRVPVEKIYSKTQRERFAWALAMAGEDFEF

SEQ ID NO: 40497 - protein, 157 aa, Homo sapiens
MSGFLEGLRCSECIDWGEKRNTIASIAAGVLFFTGWWIIIDAAVIYPTMKDFNHSYHACGVIATIAFLMINAVSNGQVRGDSYSEGCLGQTGARIWLFVGFMLAFGSLIASMWILFGGYVAKEKDIVYPGIAVFFQNAFIFFGGLVFKFGRTEDLWQ

SEQ ID NO: 40498 - protein, 158 aa, Homo sapiens
MAGFLDNFRWPECECIDWSERRNAVASVVAGILFFTGWWIMIDAAVVYPKPEQLNHAFHTCGVFSTLAFFMINAVSNAQVRGDSYESGCLGRTGARVWLFIGFMLMFGSLIASMWILFGAYVTQNTDVYPGLAVFFQNALIFFSTLIYKFGRTEELWT

SEQ ID NO: 40499 - protein, 772 aa, Homo sapiens
MYPQGRHPAPHQPGQPGFKFTVAESCDRIKDEFQFLQAQYHSLKVEYDKLANEKTEMQRHYVMYYEMSYGLNIEMHKQTEIAKRLNTILAQIMPFLSQEHQQQVAQAVERAKQVTMTELNAIIGQQQLQAQHLSHATHGPPVQLPPHPSGLQPPGIPPVTGSSSGLLALGALGSQAHLTVKDEKNHHELDHRERESSANNSVSPSESLRASEKHRGSADYSMEAKKRKAEEKDSLSRYDSDGDKSDDLVVDVSNEDPATPRVSPAHSPPENGLDKARSLKKDAPTSPASVASSSSTPSSKTKDLGHNDKSSTPGLKSNTPTPRNDAPTPGTSTTPGLRSMPGKPPGMDPIGIMASALRTPISITSSYAAPFAMMSHHEMNGSLTSPGAYAGLHNIPPQMSAAAAAAAAAYGRSPMVSFGAVGFDPHPPMRATGLPSSLASIPGGKPAYSFHVSADGQMQPVPFPHDALAGPGIPRHARQINTLSHGEVVCAVTISNPTRHVYTGGKGCVKIWDISQPGSKSPISQLDCLNRDNYIRSCKLLPDGRTLIVGGEASTLTIWDLASPTPRIKAELTSSAPACYALAISPDAKVCFSCCSDGNIAVWDLHNQTLVRQFQGHTDGASCIDISHDGTKLWTGGLDNTVRSWDLREGRQLQQHDFTSQIFSLGYCPTGEWLAVGMESSNVEVLHHTKPDKYQLHLHESCVLSLKFAYCGKWFVSTGKDNLLNAWRTPYGASIFQSKESSSVLSCDISADDKYIVTGSGDKKATVYEVIY

SEQ ID NO: 40500 - protein, 760 aa, Homo sapiens
MYPQGRHPAPHQPGQPGFKFTVAESCDRIKDEFQFLQAQYHSLKVEYDKLANEKTEMQRHYVMYYEMSYGLNIEMHKQTEIAKRLNTILAQIMPFLSQEHQQQVAQAVERAKQVTMTELNAIIGQQQLQAQHLSHATHGPPVQLPPHPSGLQPPGIPPVTGSSSGLLALGALGSQAHLTVKDEKNHHELDHRERESSANNSVSPSESLRASEKHRGSADYSMEAKKRKAEEKDSLSRYDSDGDKSDDLVVDVSNEDPATPRVSPAHSPPENGLDKARSLKKDAPTSPASVASSSSTPSSKTKDLGHNDKSSTPGLKSNTPTPRNDAPTPGTSTTPGLRSMPASALRTPISITSSYAAPFAMMSHHEMNGSLTSPGAYAGLHNIPPQMSAAAAAAAAAYGRSPMVSFGAVGFDPHPPMRATGLPSSLASIPGGKPAYSFHVSADGQMQPVPFPHDALAGPGIPRHARQINTLSHGEVVCAVTISNPTRHVYTGGKGCVKIWDISQPGSKSPISQLDCLNRDNYIRSCKLLPDGRTLIVGGEASTLTIWDLASPTPRIKAELTSSAPACYALAISPDAKVCFSCCSDGNIAVWDLHNQTLVRQFQGHTDGASCIDISHDGTKLWTGGLDNTVRSWDLREGRQLQQHDFTSQIFSLGYCPTGEWLAVGMESSNVEVLHHTKPDKYQLHLHESCVLSLKFAYCGKWFVSTGKDNLLNAWRTPYGASIFQSKESSSVLSCDISADDKYIVTGSGDKKATVYEVIY

SEQ ID NO: 40501 - protein, 764 aa, Homo sapiens
MYPQGRHPAPHQPGQPGFKFTVAESCDRIKDEFQFLQAQYHSLKVEYDKLANEKTEMQRHYVMYYEMSYGLNIEMHKQTEIAKRLNTILAQIMPFLSQEHQQQVAQAVERAKQVTMTELNAIIGQQQLQAQHLSHATHGPPVQLPPHPSGLQPPGIPPVTGSSSGLLALGALGSQAHLTVKDEKNHHELDHRERESSANNSVSPSESLRASEKHRGSADYSMEAKKRKAEEKDSLSRYDSDGDKSDDLVVDVSNEDPATPRVSPAHSPPENGLDKARSLKKDAPTSPASVASSSSTPSSKTKDLGHNDKSSTPGLKSNTPTPRNDAPTPGTSTTPGLRSMPGKPPGMDPIASALRTPISITSSYAAPFAMMSHHEMNGSLTSPGAYAGLHNIPPQMSAAAAAAAAAYGRSPMVGFDPHPPMRATGLPSSLASIPGGKPAYSFHVSADGQMQPVPFPHDALAGPGIPRHARQINTLSHGEVVCAVTISNPTRHVYTGGKGCVKIWDISQPGSKSPISQLDCLNRDNYIRSCKLLPDGRTLIVGGEASTLTIWDLASPTPRIKAELTSSAPACYALAISPDAKVCFSCCSDGNIAVWDLHNQTLVRQFQGHTDGASCIDISHDGTKLWTGGLDNTVRSWDLREGRQLQQHDFTSQIFSLGYCPTGEWLAVGMESSNVEVLHHTKPDKYQLHLHESCVLSLKFAYCGKWFVSTGKDNLLNAWRTPYGASIFQSKESSSVLSCDISADDKYIVTGSGDKKATVYEVIY

SEQ ID NO: 40502 - protein, 772 aa, Homo sapiens
MPPPPPLSCLRGLQAPHQPGQPGFKFTVAESCDRIKDEFQFLQAQYHSLKVEYDKLANEKTEMQRHYVMYYEMSYGLNIEMHKQTEIAKRLNTILAQIMPFLSQEHQQQVAQAVERAKQVTMTELNAIIGQQLQAQHLSHATHGPPVQLPPHPSGLQPPGIPPVTGSSSGLLALGALGSQAHLTVKDEKNHHELDHRERESSANNSVSPSESLRASEKHRGSADYSMEAKKRKAEEKDSLSRYDSDGDKSDDLVVDVSNEDPATPRVSPAHSPPENGLDKARSLKKDAPTSPASVASSSSTPSSKTKDLGHNDKSSTPGLKSNTPTPRNDAPTPGTSTTPGLRSMPGKPPGMDPIGIMASALRTPISITSSYAAPFAMMSHHEMNGSLTSPGAYAGLHNIPPQMSAAAAAAAAAYGRSPMVGFDPHPPMRATGLPSSLASIPGGKPAYSFHVSADGQMQPVPFPHDALAGPGIPRHARQINTLSHGEVVCAVTISNPTRHVYTGGKGCVKIWDISQPGSKSPISQLDCLNRDNYIRSCKLLPDGRTLIVGGEASTLTIWDLASPTPRIKAELTSSAPACYALAISPDAKVCFSCCSDGNIAVWDLHNQTLVRQFQGHTDGASCIDISHDGTKLWTGGLDNTVRSWDLREGRQLQQHDFTSQIFSLGYCPTGEWLAVGMESSNVEVLHHTKPDKYQLHLHESCVLSLKFAYCGKWFVSTGKDNLLNAWRTPYGASIFQSKESSSVLSCDISADDKYIVTGSGDKKATVYEVIY

SEQ ID NO: 40503 - protein, 769 aa, Homo sapiens
MYPQGRHPAPHQPGQPGFKFTVAESCDRIKDEFQFLQAQYHSLKVEYDKLANEKTEMQRHYVMYYEMSYGLNIEMHKQTEIAKRLNTILAQIMPFLSQEHQQQVAQAVERAKQVTMTELNAIIGQQQLQAQHLSHATHGPPVQLPPHPSGLQPPGIPPVTGSSSGLLALGALGSQAHLTVKDEKNHHELDHRERESSANNSVSPSESLRASEKHRGSADYSMEAKKRKAEEKDSLSRYDSDGDKSDDLVVDVSNEDPATPRVSPAHSPPENGLDKARSLKKDAPTSPASVASSSSTPSSKTKDLGHNDKSSTPGLKSNTPTPRNDAPTPGTSTTPGLRSMPGKPPGMDPIASALRTPISITSSYAAPFAMMSHHEMNGSLTSPGAYAGLHNIPPQMSAAAAAAAAAYGRSPMVSFGAVGFDPHPPMRATGLPSSLASIPGGKPAYSFHVSADGQMQPVPFPHDALAGPGIPRHARQINTLSHGEVVCAVTISNPTRHVYTGGKGCVKIWDISQPGSKSPISQLDCLNRDNYIRSCKLLPDGRTLIVGGEASTLTIWDLASPTPRIKAELTSSAPACYALAISPDAKVCFSCCSDGNIAVWDLHNQTLVRQFQGHTDGASCIDISHDGTKLWTGGLDNTVRSWDLREGRQLQQHDFTSQIFSLGYCPTGEWLAVGMESSNVEVLHHTKPDKYQLHLHESCVLSLKFAYCGKWFVSTGKDNLLNAWRTPYGASIFQSKESSSVLSCDISADDKYIVTGSGDKKATVYEVIY

SEQ ID NO: 40504 - protein, 767 aa, Homo sapiens
MYPQGRHPAPHQPGQPGFKFTVAESCDRIKDEFQFLQAQYHSLKVEYDKLANEKTEMQRHYVMYYEMSYGLNIEMHKQTEIAKRLNTILAQIMPFLSQEHQQQVAQAVERAKQVTMTELNAIIGQQQLQAQHLSHATHGPPVQLPPHPSGLQPPGIPPVTGSSSGLLALGALGSQAHLTVKDEKNHHELDHRERESSANNSVSPSESLRASEKHRGSADYSMEAKKRKAEEKDSLSRYDSDGDKSDDLVVDVSNEDPATPRVSPAHSPPENGLDKARSLKKDAPTSPASVASSSSTPSSKTKDLGHNDKSSTPGLKSNTPTPRNDAPTPGTSTTPGLRSMPGKPPGMDPIGIMASALRTPISITSSYAAPFAMMSHHEMNGSLTSPGAYAGLHNIPPQMSAAAAAAAAAYGRSPMVGFDPHPPMRATGLPSSLASIPGGKPAYSFHVSADGQMQPVPFPHDALAGPGIPRHARQINTLSHGEVVCAVTISNPTRHVYTGGKGCVKIWDISQPGSKSPISQLDCLNRDNYIRSCKLLPDGRTLIVGGEASTLTIWDLASPTPRIKAELTSSAPACYALAISPDAKVCFSCCSDGNIAVWDLHNQTLVRQFQGHTDGASCIDISHDGTKLWTGGLDNTVRSWDLREGRQLQQHDFTSQIFSLGYCPTGEWLAVGMESSNVEVLHHTKPDKYQLHLHESCVLSLKFAYCGKWFVSTGKDNLLNAWRTPYGASIFQSKESSSVLSCDISADDKYIVTGSGDKKATVYEVIY

SEQ ID NO: 40505 - protein, 762 aa, Homo sapiens
MAPHQPGQPGFKFTVAESCDRIKDEFQFLQAQYHSLKVEYDKLANEKTEMQRHYVMYYEMSYGLNIEMHKQTEIAKRLNTILAQIMPFLSQEHQQQVAQAVERAKQVTMTELNAIIGQQQLQAQHLSHATHGPPVQLPPHPSGLQPPGIPPVTGSSSGLLALGALGSQAHLTVKDEKNHHELDHRERESSANNSVSPSESLRASEKHRGSADYSMEAKKRKAEEKDSLSRYDSDGDKSDDLVVDVSNEDPATPRVSPAHSPPENGLDKARSLKKDAPTSPASVASSSSTPSSKTKDLGHNDKSSTPGLKSNTPTPRNDAPTPGTSTTPGLRSMPGKPPGMDPIASALRTPISITSSYAAPFAMMSHHEMNGSLTSPGAYAGLHNIPPQMSAAAAAAAAAYGRSPMVSFGAVGFDPHPPMRATGLPSSLASIPGGKPAYSFHVSADGQMQPVPFPHDALAGPGIPRHARQINTLSHGEVVCAVTISNPTRHVYTGGKGCVKIWDISQPGSKSPISQLDCLNRDNYIRSCKLLPDGRTLIVGGEASTLTIWDLASPTPRIKAELTSSAPACYALAISPDAKVCFSCCSDGNIAVWDLHNQTLVRQFQGHTDGASCIDISHDGTKLWTGGLDNTVRSWDLREGRQLQQHDFTSQIFSLGYCPTGEWLAVGMESSNVEVLHHTKPDKYQLHLHESCVLSLKFAYCGKWFVSTGKDNLLNAWRTPYGASIFQSKESSSVLSCDISADDKYIVTGSGDKKATVYEVIY

SEQ ID NO: 40506 - protein, 97 aa, Homo sapiens
MDSSSSSSAAGLGAVDPQLQHFIEVETQKQRFQQLVHQMTELCWEKCMDKPGPKLDSRAEACFVNCVERFIDTSQFILNRLEQTQKSKPVFSESLSD

SEQ ID NO: 40507 - protein, 710 aa, Homo sapiens
MKLVFLVLLFLGALGLCLAGRRRSVQWCAVSQPEATKCFQWQRNMRKVRGPPVSCIKRDSPIQCIQAIAENRADAVTLDGGFIYEAGLAPYKLRPVAAEVYGTERQPRTHYYAVAVVKKGGSFQLNELQGLKSCHTGLRRTAGWNVPIGTLRPFLNWTGPPEPIEAAVARFFSASCVPGADKGQFPNLCRLCAGTGENKCAFSSQEPYFSYSGAFKCLRDGAGDVAFIRESTVFEDLSDEAERDEYELLCPDNTRKPVDKFKDCHLARVPSHAVVARSVNGKEDAIWNLLRQAQEKFGKDKSPKFQLFGSPSGQKDLLFKDSAIGFSRVPPRIDSGLYLGSGYFTAIQNLRKSEEEVAARRARVVWCAVGEQELRKCNQWSGLSEGSVTCSSASTTEDCIALVLKGEADAMSLDGGYVYTAGKCGLVPVLAENYKSQQSSDPDPNCVDRPVEGYLAVAVVRRSDTSLTWNSVKGKKSCHTAVDRTAGWNIPMGLLFNQTGSCKFDEYFSQSCAPGSDPRSNLCALCIGDEQGENKCVPNSNERYYGYTGAFRCLAENAGDVAFVKDVTVLQNTDGNNNEAWAKDLKLADFALLCLDGKRKPVTEARSCHLAMAPNHAVVSRMDKVERLKQVLLHQQAKFGRNGSDCPDKFCLFQSETKNLLFNDNTECLARLHGKTTYEKYLGPQYVAGITNLKKCSTSPLLEACEFLRK

SEQ ID NO: 40508 - protein, 666 aa, Homo sapiens
MRKVRGPPVSCIKRDSPIQCIQAIAENRADAVTLDGGFIYEAGLAPYKLRPVAAEVYGTERQPRTHYYAVAVVKKGGSFQLNELQGLKSCHTGLRRTAGWNVPIGTLRPFLNWTGPPEPIEAAVARFFSASCVPGADKGQFPNLCRLCAGTGENKCAFSSQEPYFSYSGAFKCLRDGAGDVAFIRESTVFEDLSDEAERDEYELLCPDNTRKPVDKFKDCHLARVPSHAVVARSVNGKEDAIWNLLRQAQEKFGKDKSPKFQLFGSPSGQKDLLFKDSAIGFSRVPPRIDSGLYLGSGYFTAIQNLRKSEEEVAARRARVVWCAVGEQELRKCNQWSGLSEGSVTCSSASTTEDCIALVLKGEADAMSLDGGYVYTAGKCGLVPVLAENYKSQQSSDPDPNCVDRPVEGYLAVAVVRRSDTSLTWNSVKGKKSCHTAVDRTAGWNIPMGLLFNQTGSCKFDEYFSQSCAPGSDPRSNLCALCIGDEQGENKCVPNSNERYYGYTGAFRCLAENAGDVAFVKDVTVLQNTDGNNNEAWAKDLKLADFALLCLDGKRKPVTEARSCHLAMAPNHAVVSRMDKVERLKQVLLHQQAKFGRNGSDCPDKFCLFQSETKNLLFNDNTECLARLHGKTTYEKYLGPQYVAGITNLKKCSTSPLLEACEFLRK

SEQ ID NO: 40509 - protein, 1692 aa, Homo sapiens
MRRPPPLGPTTASGPEGNVRNLQKRQAPGPGAAGGCGPEAGGCRENKQKRRMVARATPGRGEVESDKSVAASGAGKAARRQVEGRRGPVSPSDSSDPRGLEAAKEAELPLQTERHTKEKRKVTEASSDDPQPGLDLVRKESLTSSESFQTVECLQSLGKESIIEGIKRRIRNKKLKSLENPPLKITENEATQNIKVEFQDELYKNTPKYSCNILSPEVENNSVLKLRDCNCFPHSKGCNDENNLPYKPDGGCMHVAENFSKKENLRSLAEKSDTNSIPQLLQTEENVMGVNKLLPEESDLYQSKTNGLLSCLQHEKNKYSIEESSVGRKPRKRMKLSEKADETVTEMNFSNEYNKSELMLQENQMIADGKEAETKSPLNVLRKVSHNTVSLMDHLLSVPETVEKETSSEHHVNAVFQKTIEPLLKEETENASEPLGYESMASKEDFKSMKSFIGKSPNEYHIERRSSREDLRSASEELKLSCQRTIPMTGKRTWPYYSCARISAWCWKKASLPESSYFLRGSQESCRQVDVPKHQTNQTHLTDSKLLLQSSLTETNTESSSKEKLDSNSNCLSSVSAVEPTLMVIKEPIIKDDKKIKSEELSRRGSEVISNTTEDTQLTSETQSLTGNKKKARGNLTKLNLTATSKDGQEANNSAGKTIHRKACIAQQTFIVPDLVKILNTGRLTNFKIPLLKNKSEKRKEVNAKSSEREAYSPLELLDNLSGADVRQNRSKENVSMMMLGPQTLSIRNSVTPVQASSDSFYNKKSYSISPSFTKQGNNSKPSNHVSEPGNIVSNKEVASLTVENNAFSCDPGYVEKSPSFCCNEQETFRPVSSEVRGRKITKNFSEVGFPDILKAYEDDVLLIDVIQDDPDLFGVSNEGELSFTSEVPKISQEPNVAGEHQSTDSKYMETPVKKEPSDDLRELPVLDCGWIKPDICASNSAESEIKRDPKDVNTSLGEVANETSENETLGDFSEQIKGSDLDEKHRFTDKVITKEEKENIYEVCKSKDSRNADFMVGECQFAVPVPKPLCLLVPPLNLSGRQEDTILNTWMNDFRFLGKHSVLKLQNPETCEIFKREKNVGVFQKSLGLMIPYKYCKFHFNTLRGCERPLCKFAHVPEQGDEKVCMDVFKKYININELCLLQRAVNIFMEYYRKFPPGVYFDLQVLNDLLNSLLKHCLLKEVFQIVNLSIMVKMLPSLKILLNIFEYVATMKLRNAVPALIDIFCKLVEAGMVLDPEHFNYIVKLLYQVQASKQEITAVLEMKSRLQMRRFKKNWKCDLDSALNKLEHCKEKGDWTKLGKLYINVKMGCEKFADFQTFCACIAETLTKNYEDERPDIPFCEFAETVSKDPQNSKVDKGVLGRIGISAMYFYHKLLQWSKGRKVLEKLYELKIHFTSLKGLIGPEKLASRCQIVNVAAEIFLKSGSLDGAIWVMRESEWIINTPLWPCDRLDVLNRHNLLCTIAHEILAKSLYRQTFEVLQNLPGFQNSQETVEVSQYSLLFNKLLGSCIESSSLGMSSSVAEFMISKSIPIDFSFLRRLITSLGRSRLWLKARAHYKSALSLGCYPPLEGNLYRKLLLIPSYLSEIEMLLAIEIFMVSNASSIQSPGTSTQILQIVLKRCEDNQSRSNDDYQAAVERLIMAARISDPKLFVKHMTVNVNKEQVYSLEHCSALKWLKENMKWAGKVWLFSNH

SEQ ID NO: 40510 - protein, 349 aa, Homo sapiens
MAGGRCGPQLTALLAAWIAAVAATAGPEEAALPPEQSRVQPMTASNWTLVMEGEWMLKFYAPWCPSCQQTDSEWEAFAKNGEILQISVGKVDVIQEPGLSGRFFVTTLPAFFHAKDGIFRRYRGPGIFEDLQNYILEKKWQSVEPLTGWKSPASLTMSGMAGLFSISGKIWHLHNYFTVTLGIPAWCSYVFFVIATLVFGLFMGLVLVVISECFYVPLPRHLSERSEQNRRSEEAHRAEQLQDAEEEKDDSNEEENKDSLVDDEEEKEDLGDEDEAEEEEEEDNLAAGVDEERSEANDQGPPGEDGVTREEVEPEEAEEGISEQPCPADTEVVEDSLRQRKSQHADKGL

SEQ ID NO: 40511 - protein, 342 aa, Homo sapiens
MACEPQVDPGATGPLPPSSPGWSALPGGSPPGWGQELHNGQVLTVLRIDNTCAPISFDLGAAEEQLQTWGIQVPADQYRSLAESALLEPQVRRYIIYNSRPMRLAFAVVFYVVVWANIYSTSQMFALGNHWAGMLLVTLAAVSLTLTLVLVFERHQKKANTNTDLRLAAANGALLRHRVLLGVTDTVEGCQSVIQLWFVYFDLENCVQFLSDHVQEMKTSQESLLRSRLSQLCVVMETGVSPATAEGPENLEDAPLLPGNSCPNERPLMQTELHQLVPEAEPEEMARQLLAVFGGYYIRLLVTSQLPQAMGTRHTNSPRIPCPCQLIEAYILGTGCCPFLAR

SEQ ID NO: 40512 - protein, 321 aa, Homo sapiens
MVITQPDEASGLLPELHNGQVLTVLRIDNTCAPISFDLGAAEEQLQTWGIQVPADQYRSLAESALLEPQVRRYIIYNSRPMRLAFAVVFYVVVWANIYSTSQMFALGNHWAGMLLVTLAAVSLTLTLVLVFERHQKKANTNTDLRLAAANGALLRHRVLLGVTDTVEGCQSVIQLWFVYFDLENCVQFLSDHVQEMKTSQESLLRSRLSQLCVVMETGVSPATAEGPENLEDAPLLPGNSCPNERPLMQTELHQLVPEAEPEEMARQLLAVFGGYYIRLLVTSQLPQAMGTRHTNSPRIPCPCQLIEAYILGTGCCPFLAR

SEQ ID NO: 40513 - protein, 343 aa, Homo sapiens
MACEPQVDPGATGPLPPSSPGWSALPGGSPPGWGQELHNGQVLTVLRIDNTCAPISFDLGAAEEQLQTWGIQQVPADQYRSLAESALLEPQVRRYIIYNSRPMRLAFAVVFYVVVWANIYSTSQMFALGNHWAGMLLVTLAAVSLTLTLVLVFERHQKKANTNTDLRLAAANGALLRHRVLLGVTDTVEGCQSVIQLWFVYFDLENCVQFLSDHVQEMKTSQESLLRSRLSQLCVVMETGVSPATAEGPENLEDAPLLPGNSCPNERPLMQTELHQLVPEAEPEEMARQLLAVFGGYYIRLLVTSQLPQAMGTRHTNSPRIPCPCQLIEAYILGTGCCPFLAR

SEQ ID NO: 40514 - protein, 230 aa, Homo sapiens
MEPLRLLILLFVTELSGAHNTTVFQGVAGQSLQVSCPYDSMKHWGRRKAWCRQLGEKGPCQRVVSTHNLWLLSFLRRWNGSTAITDDTLGGTLTITLRNLQPHDAGLYQCQSLHGSEADTLRKVLVEVLADPLDHRDAGDLWFPGESESFEDAHVEHSISRSLLEGEIPFPPTSILLLLACIFLIKILAASALWAAAWHGQKPGTHPPSELDCGHDPGYQLQTLPGLRDT

SEQ ID NO: 40515 - protein, 219 aa, Homo sapiens
MEPLRLLILLFVTELSGAHNTTVFQGVAGQSLQVSCPYDSMKHWGRRKAWCRQLGEKGPCQRVVSTHNLWLLSFLRRWNGSTAITDDTLGGTLTITLRNLQPHDAGLYQCQSLHGSEADTLRKVLVEVLADPLDHRDAGDLWFPGESESFEDAHVEHSISRAERHVKEDDGRKSPGEVPPGTSPACILATWPPGLLVLLWQETTLPEHCFSWTLEAGTG

SEQ ID NO: 40516 - protein, 222 aa, Homo sapiens
MEPLRLLILLFVTELSGAHNTTVFQGVAGQSLQVSCPYDSMKHWGRRKAWCRQLGEKGPCQRVVSTHNLWLLSFLRRWNGSTAITDDTLGGTLTITLRNLQPHDAGLYQCQSLHGSEADTLRKVLVEVLADPLDHRDAGDLWFPGESESFEDAHVEHSISRPSQGSHLPSCLSKEPLGRRNPLPTHFHPSPPGLHLSHQDSSSQRPLGCSLAWTEARDTSTQ

SEQ ID NO: 40517 - protein, 245 aa, Homo sapiens
MGEGPHTPCILGHGASGDHDQSHSQINEVSWKDVTSALSLANMVLGLFSIIFSFSRKCHYASRMLLVSFLLDMAVRAMTSHINICSKLGAELNDFAVFTTFGLASALLLGVDGLLSGILAIIYVSAASFHLCFYSPGVPSTYKGLPCPYASCILASTSLLTKGNRFILCCMASLMILFMMDQSYYPYDKILESENWKKLVYIGGVIMLFFSPLSLSAFYCLMWSLSYIFFPDALWGKAACLSPQH

SEQ ID NO: 40518 - protein, 285 aa, Homo sapiens
MDDSTEREQSRLTSCLKKREEMKLKECVSILPRKESPSVRSSKDGKLLAATLLLALLSCCLTVVSFYQVAALQGDLASLRAELQGHHAEKLPAGAGAPKAGLEEAPAVTAGLKIFEPPAPGEGNSSQNSRNKRAVQGPEETVTQDCLQLIADSETPTIQKGSYTFVPWLLSFKRGSALEEKENKILVKETGYFFIYGQVLYTDKTYAMGHLIQRKKVHVFGDELSLVTLFRCIQNMPETLPNNSCYSAGIAKLEEGDELQLAIPRENAQISLDGDVTFFGALKLL

SEQ ID NO: 40519 - protein, 266 aa, Homo sapiens
MDDSTEREQSRLTSCLKKREEMKLKECVSILPRKESPSVRSSKDGKLLAATLLLALLSCCLTVVSFYQVAALQGDLASLRAELQGHHAEKLPAGAGAPKAGLEEAPAVTAGLKIFEPPAPGEGNSSQNSRNKRAVQGPEETGSYTFVPWLLSFKRGSALEEKENKILVKETGYFFIYGQVLYTDKTYAMGHLIQRKKVHVFGDELSLVTLFRCIQNMPETLPNNSCYSAGIAKLEEGDELQLAIPRENAQISLDGDVTFFGALKLL

SEQ ID NO: 40520 - protein, 164 aa, Homo sapiens
MDDSTEREQSRLTSCLKKREEMKLKECVSILPRKESPSVRSSKDGKLLAATLLLALLSCCLTVVSFYQVAALQGDLASLRAELQGHHAEKLPAGAGAPKAGLEEAPAVTAGLKIFEPPAPGEGNSSQNSRNKRAVQGPEETVTQDCLQLIADSETPTIQKGFIY

SEQ ID NO: 40521 - protein, 623 aa, Homo sapiens
MESYHKPDQQKLQALKDTANRLRISSIQATTAAGSGHPTSCCSAAEIMAVLFFHTMRYKSQDPRNPHNDRFVLSKGHAAPILYAVWAEAGFLAEAELLNLRKISSDLDGHPVPKQAFTDVATGSLGQGLGAACGMAYTGKYFDKASYRVYCLLGDGELSEGSVWEAMAFASIYKLDNLVAILDINRLGQSDPAPLQHQMDIYQKRCEAFGWHAIIVDGHSVEELCKAFGQAKHQPTAIIAKTFKGRGITGVEDKESWHGKPLPKNMAEQIIQEIYSQIQSKKKILATPPQEDAPSVDIANIRMPSLPSYKVGDKIATRKAYGQALAKLGHASDRIIALDGDTKNSTFSEIFKKEHPDRFIECYIAEQNMVSIAVGCATRNRTVPFCSTFAAFFTRAFDQIRMAAISESNINLCGSHCGVSIGEDGPSQMALEDLAMFRSVPTSTVFYPSDGVATEKAVELAANTKGICFIRTSRPENAIIYNNNEDFQVGQAKVVLKSKDDQVTVIGAGVTLHEALAAAELLKKEKINIRVLDPFTIKPLDRKLILDSARATKGRILTVEDHYYEGGIGEAVSSAVVGEPGITVTHLAVNRVPRSGKPAELLKMFGIDRDAIAQAVRGLITKA

SEQ ID NO: 40522 - protein, 631 aa, Homo sapiens
MESYHKPDQQKLQALKDTANRLRISSIQATTAAGSGHPTSCCSAAEIMAVLFFHTMRYKSQDPRNPHNDRFVLSKGHAAPILYAVWAEAGFLAEAELLNLRKISSDLDGHPVPKQAFTDVATGSLGQGLGAACGMAYTGKYFDKASLPSSWDYSYRVYCLLGDGELSEGSVWEAMAFASIYKLDNLVAILDINRLGQSDPAPLQHQMDIYQKRCEAFGWHAIIVDGHSVEELCKAFGQAKHQPTAIIAKTFKGRGITGVEDKESWHGKPLPKNMAEQIIQEIYSQIQSKKKILATPPQEDAPSVDIANIRMPSLPSYKVGDKIATRKAYGQALAKLGHASDRIIALDGDTKNSTFSEIFKKEHPDRFIECYIAEQNMVSIAVGCATRNRTVPFCSTFAAFFTRAFDQIRMAAISESNINLCGSHCGVSIGEDGPSQMALEDLAMFRSVPTSTVFYPSDGVATEKAVELAANTKGICFIRTSRPENAIIYNNNEDFQVGQAKVVLKSKDDQVTVIGAGVTLHEALAAAELLKKEKINIRVLDPFTIKPLDRKLILDSARATKGRILTVEDHYYEGGIGEAVSSAVVGEPGITVTHLAVNRVPRSGKPAELLKMFGIDRDAIAQAVRGLITKA

SEQ ID NO: 40523 - protein, 834 aa, Homo sapiens
MWGLGARGPDRGLLLALALGGLARAGGVEVEPGGAHGESGGFQVVTFEWAHVQDPYVIALWILVASLAKIGFHLSHKVTSVVPESALLIVLGLVLGGIVWAADHIASFTLTPTVFFFYLLPPIVLDAGYFMPNRLFFGNLGTILLYAVVGTVWNAATTGLSLYGVFLSGLMGDLQIGLLDFLLFGSLMAAVDPVAVLAVFEEVHVNEVLFIIVFGESLLNDAVTVVLYNVFESFVALGGDNVTGVDCVKGIVSFFVVSLGGTLVGVVFAFLLSLVTRFTKHVRIIEPGFVFIISYLSYLTSEMLSLSAILAITFCGICCQKYVKANISEQSATTVRYTMKMLASSAETIIFMFLGISAVNPFIWTWNTAFVLLTLVFISVYRAIGVVLQTWLLNRYRMVQLEPIDQVVLSYGGLRGAVAFALVVLLDGDKVKEKNLFVSTTIIVVFFTVIFQGLTIKPLVQWLKVKRSEHREPRLNEKLHGRAFDHILSAIEDISGQIGHNYLRDKWSHFDRKFLSRVLMRRSAQKSRDRILNVFHELNLKDAISYVAEGERRGSLAFIRSPSTDNVVNVDFTPRSSTVEASVSYLLRENVSAVCLDMQSLEQRRRSIRDAEDMVTHHTLQQYLYKPRQEYKHLYSRHELTPTEDEKQDREIFHRTMRKRLESFKSTKLGLNQNKKAAKLYKRERAQKRRNSSIPNGKLPMESPAQNFTIKEKDLELSDTEEPPNYDEEMSGGIEFLASVTKDTASDSPAGIDNPVFSPDEALDRSLLARLPPWLSPGETVVPSQRARTQIPYSPGTFCRLMPFRLSSKSVDSFLQADGPEERPPAALPESTHM

SEQ ID NO: 40524 - protein, 825 aa, Homo sapiens
MWGLGARGPDRGLLLALALGGLARAGGVEVEPGGAHGESGGFQVVTFEWAHVQDPYVIALWILVASLAKIGFHLSHKVTSVVPESALLIVLGLVLGGIVWAADHIASFTLTPTVFFFYLLPPIVLDAGYFMPNRLFFGNLGTILLYAVVGTVWNAATTGLSLYGVFLSGLMGDLQIGLLDFLLFGSLMAAVDPVAVLAVFEEVHVNEVLFIIVFGESLLNDAVTVVLYNVFESFVALGGDNVTGVDCVKGIVSFFVVSLGGTLVGVVFAFLLSLVTRFTKHVRIIEPGFVFIISYLSYLTSEMLSLSAILAITFCGICCQKYVKANISEQSATTVRYTMKMLASSAETIIFMFLGISAVNPFIWTWNTAFVLLTLVFISVYRAIGVVLQTWLLNRYRMVQLEPIDQVVLSYGGLRGAVAFALVVLLDGDKVKEKNLFVSTTIIVVFFTVIFQWLKVKRSEHREPRLNEKLHGRAFDHILSAIEDISGQIGHNYLRDKWSHFDRKFLSRVLMRRSAQKSRDRILNVFHELNLKDAISYVAEGERRGSLAFIRSPSTDNVVNVDFTPRSSTVEASVSYLLRENVSAVCLDMQSLEQRRRSIRDAEDMVTHHTLQQYLYKPRQEYKHLYSRHELTPTEDEKQDREIFHRTMRKRLESFKSTKLGLNQNKKAAKLYKRERAQKRRNSSIPNGKLPMESPAQNFTIKEKDLELSDTEEPPNYDEEMSGGIEFLASVTKDTASDSPAGIDNPVFSPDEALDRSLLARLPPWLSPGETVVPSQRARTQIPYSPGTFCRLMPFRLSSKSVDSFLQADGPEERPPAALPESTHM

SEQ ID NO: 40525 - protein, 66 aa, Homo sapiens
MVAKQRIRMANEKHSKNITQRGNVAKTSRNAPEEKASVGPWLLALFIFVVCGSAIFQIIQSIRMGM

SEQ ID NO: 40526 - protein, 265 aa, Homo sapiens
MEALPPVRSSLLGILLQVTRLSVLLVQNRDHLYNFLLLKINLFNHWVSGLAQEARGSCNWQAHLPLGAAACPLGQALWAGLALIQVPVWLVLQGPRLMWAGMWGSTKGLGLALLSAWEQLGLSVAIWTDLFLSCLHGLMLVALLLVVVTWRVCQKSHCFRLGRQLSKALQVNCVVRKLLVQLRRLYWWVETMTALTSWHLAYLITWTTCLASHLLQAAFEHTTQLAEAQEVEPQEVSGSSLLPSLSASSDSESGTVLPEQETPRE

SEQ ID NO: 40527 - protein, 60 aa, Homo sapiens
MEALPPVRSSLLGILLQVTRLSVLRQGLALSPSLERSGAGSARCSLQLPVSSNPPPSASK

SEQ ID NO: 40528 - protein, 250 aa, Homo sapiens
MTTEVILHYRPCESDPTQLPKIAEKAIQDFPTRPLSRFIPWFPYDGSKLPLRPKRSPPVISEEAAEDVKQYLTISEHDAKSHSYDCTVDLLEFQPSLKKQHLTWSHTLKEQTNSGNLGKQSEKGKQHKRRSWSISLPSNNCTKNVSPLSKKLQDSLKALNLHSLYRARWTIEHTICNSQTLEDIWTKLNQIIRHNELPSCNATIQRHLGQIWVFCDIMYCEYVGSLLKGRLALTGKINLFVHKYGVIFSM

SEQ ID NO: 40529 - protein, 65 aa, Homo sapiens
MVAKQRIRMANEKHSKNITQRGNVAKTLRPQEEKYPVGPWLLALFVFVVCGSAIFQIIQSIRMGM

SEQ ID NO: 40530 - protein, 669 aa, Homo sapiens
MARRGWRRAPLRRGVGSSPRARRLMRPLWLLLAVGVFDWAGASDGGGGEARAMDEEIVSEKQAEESHRQDSANLLIFILLLTLTILTIWLFKHRRARFLHETGLAMIYGLLVGLVLRYGIHVPSDVNNVTLSCEVQSSPTTLLVTFDPEVFFNILLPPIIFYAGYSLKRRHFFRNLGSILAYAFLGTAISCFVIGSIMYGCVTLMKVTGQLAGDFYFTDCLLFGAIVSATDPVTVLAIFHELQVDVELYALLFGESVLNDAVAIVLSSSIVAYQPAGDNSHTFDVTAMFKSIGIFLGIFSGSFAMGAATGVVTALVTKFTKLREFQLLETGLFFLMSWSTFLLAEAWGFTGVVAVLFCGITQAHYTYNNLSTESQHRTKQLFELLNFLAENFIFSYMGLTLFTFQNHVFNPTFVVGAFVAIFLGRAANIYPLSLLLNLGRRSKIGSNFQHMMMFAGLRGAMAFALAIRDTATYARQMMFSTTLLIVFFTVWVFGGGTTAMLSCLHIRVGVDSDQEHLGVPENERRTTKAESAWLFRMWYNFDHNYLKPLLTHSGPPLTTTLPACCGPIARCLTSPQAYENQEQLKDDDSDLILNDGDISLTYGDSTVNTEPATSSAPRRFMGNSSEDALDRELAFGDHELVIRGTRLVLPMDDSEPPLNLLDNTRHGPA

SEQ ID NO: 40531 - protein, 701 aa, Homo sapiens
MARRGWRRAPLRRGVGSSPRARRLMRPLWLLLAVGVFDWAGASDGGGGEARAMDEEIVSEKQAEESHRQDSANLLIFILLLTLTILTIWLFKHRRARFLHETGLAMIYGLLVGLVLRYGIHVPSDVNNVTLSCEVQSSPTTLLVNVSGKFYEYMLKGEISSHELNNVQDNEMLRKVTFDPEVFFNILLPPIIFYAGYSLKRRHFFRNLGSILAYAFLGTAISCFVIGSIMYGCVTLMKVTGQLAGDFYFTDCLLFGAIVSATDPVTVLAIFHELQVDVELYALLFGESVLNDAVAIVLSSSIVAYQPAGDNSHTFDVTAMFKSIGIFLGIFSGSFAMGAATGVVTALVTKFTKLREFQLLETGLFFLMSWSTFLLAEAWGFTGVVAVLFCGITQAHYTYNNLSTESQHRTKQLFELLNFLAENFIFSYMGLTLFTFQNHVFNPTFVVGAFVAIFLGRAANIYPLSLLLNLGRRSKIGSNFQHMMMFAGLRGAMAFALAIRDTATYARQMMFSTTLLIVFFTVWVFGGGTTAMLSCLHIRVGVDSDQEHLGVPENERRTTKAESAWLFRMWYNFDHNYLKPLLTHSGPPLTTTLPACCGPIARCLTSPQAYENQEQLKDDDSDLILNDGDISLTYGDSTVNTEPATSSAPRRFMGNSSEDALDRELAFGDHELVIRGTRLVLPMDDSEPPLNLLDNTRHGPA

SEQ ID NO: 40532 - protein, 649 aa, Homo sapiens
MDEEIVSEKQAEESHRQDSANLLIFILLLTLTILTIWLFKHRRARFLHETGLAMIYGLLVGLVLRYGIHVPSDVNNVTLSCEVQSSPTTLLVNVSGKFYEYMLKGEISSHELNNVQDNEMLRKVTFDPEVFFNILLPPIIFYAGYSLKRRHFFRNLGSILAYAFLGTAISCFVIGSIMYGCVTLMKVTGQLAGDFYFTDCLLFGAIVSATDPVTVLAIFHELQVDVELYALLFGESVLNDAVAIVLSSSIVAYQPAGDNSHTFDVTAMFKSIGIFLGIFSGSFAMGAATGVVTALVTKFTKLREFQLLETGLFFLMSWSTFLLAEAWGFTGVVAVLFCGITQAHYTYNNLSTESQHRTKQLFELLNFLAENFIFSYMGLTLFTFQNHVFNPTFVVGAFVAIFLGRAANIYPLSLLLNLGRRSKIGSNFQHMMMFAGLRGAMAFALAIRDTATYARQMMFSTTLLIVFFTVWVFGGGTTAMLSCLHIRVGVDSDQEHLGVPENERRTTKAESAWLFRMWYNFDHNYLKPLLTHSGPPLTTTLPACCGPIARCLTSPQAYENQEQLKDDDSDLILNDGDISLTYGDSTVNTEPATSSAPRRFMGNSSEDALDRELAFGDHELVIRGTRLVLPMDDSEPPLNLLDNTRHGPA

SEQ ID NO: 40533 - protein, 480 aa, Homo sapiens
MIVADSECRAELKDYLRFAPGGVGDSGPGEEQRESRARRGPRGPSAFIPVEEVLREGAESLEQHLGLEALMSSGRVDNLAVVMGLHPDYFTSFWRLHYLLLHTDGPLASSWRHYIAIMAAARHQCSYLVGSHMAEFLQTGGDPEWLLGLHRAPEKLRKLSEINKLLAHRPWLITKEHIQALLKTGEHTWSLAELIQALVLLTHCHSLSSFVFGCGILPEGDADGSPAPQAPTPPSEQSSPPSRDPLNNSGGFESARDVEALMERMQQLQESLLRDEGTSQEEMESRFELEKSESLLVTPSADILEPSPHPDMLCFVEDPTFGYEDFTRRGAQAPPTFRAQDYTWEDHGYSLIQRLYPEGGQLLDEKFQAAYSLTYNTIAMHSGVDTSVLRRAIWNYIHCVFGIRYDDYDYGEVNQLLERNLKVYIKTVACYPEKTTRRMYNLFWRHFRHSEKVHVNLLLLEARMQAALLYALRAITRYMT

SEQ ID NO: 40534 - protein, 187 aa, Homo sapiens
MPGGLEKTCHQCISKIASNACFVVVLCAFLALPLSMTFIGMKFLEDCPIQPLIPLYLLVGGIVGTLKVSLLLYDSTRMRRLLSKAVVIDDDDDDEYPWRQNAHRYYIHLLLSLFLFLWFILGNYWVFSVYLPDFLPPFQQPQDYCDKTLYLFAVGVLALSHTVLVLLLLCSGCVYLCSRWRLAADED

SEQ ID NO: 40535 - protein, 121 aa, Homo sapiens
MVSLLLYDSTRMRRLLSKAVVIDDDDDDEYPWRQNAHRYYIHLLLSLFLFLWFILGNYWVFSVYLPDFLPPFQQPQDYCDKTLYLFAVGVLALSHTVLVLLLLCSGCVYLCSRWRLAADED

SEQ ID NO: 40536 - protein, 105 aa, Homo sapiens
MNLGVSMLRILFLLDVGGAQVLATGKTPGAEIDFKYALIGTAVGVAISAGFLALKICMIRRHLFDDDSSDLKSTPGGLSDTIPLKKRAPRRNHNFSKRDAQVIEL

SEQ ID NO: 40537 - protein, 172 aa, Homo sapiens
MNLGVSMLRILFLLDVGGAQVLATGKTPGAEIDFKYALIGTAVGVAISAGFLALKICMIRRHLFDDDSSDLKSTPGGLSDTIPLKKRAPRAHVLRDGPALGPLHLLFSVIGMLFARKLQASTLFSFKSLLQCHHCIMEGLFKAKPQFLQKHLARSVQIHQLQKVKSFPKYAY

SEQ ID NO: 40538 - protein, 159 aa, Homo sapiens
MNLGVSMLRILFLLDVGGAQVLATGKTPGAEIDFKYALIGTAVGVAISAGFLALKICMIRRHLFDDDSSDLKSTPGGLSDTIPLKKRAPRAHVLRDGPALGPLHLLFSVIGMLFARKLQASTLFSFKSLLQCHHCIMEGLFKAKPQFLQKVSCKSDHLS

SEQ ID NO: 40539 - protein, 129 aa, Homo sapiens
MNLGVSMLRILFLLDVGGAQVLATGKTPGAEIDFKYALIGTAVGVAISAGFLALKICMIRRHLFDDDSSDLKSTPGGLSDTIPLKKRAPRKLQASTLFSFKSLLQCHHCIMEGLFKAKPQFLQKRCTGD

SEQ ID NO: 40540 - protein, 282 aa, Homo sapiens
MVLQENGYGVEEDIPTLLMAASSMDDLLAITGFNTCLSIVFYSGGMINNAIASLRNVCISLLAGIVLGFFVRYFPSEDQKKITLKRGFLVLITFVSAVLGSQPIGLHGSGGLCTLVLHFIEWTKWSQEKMKVQKIITNVWDIFQPLLFGLVGAEVSVSLLESNIVGISVSTLSLALCVRILNIYLLMCFAGFSFKEKIFIALAWMPKATVQAVLGPLALETARVSTPHLETYAKDVMTVAFLAIMITAPNGALLMGILGPKMLTRHYDPSKIKLQLSTLEHH

SEQ ID NO: 40541 - protein, 177 aa, Homo sapiens
MPPAEKSEGPPVPAPAERARGRVPGLPSPALCCACGLCALLAGVNVTLAGAFASFLPEHNALLVVGLALLVLALGFFAACCVCSRRGLAPRGRSAAAAGPGQGGGRAGPVALEMESSEPTAQDTTAVQLSPAVSAASSGCSSPGPSPLALEAPAPAAVCALRSEGVQLNPPRARAAP

SEQ ID NO: 40542 - protein, 249 aa, Homo sapiens
MKLNERSLAFYATCDAPVDNAGFLYKKGGRHAAYHRRWFVLRGNMLFYFEDAASREPVGVIILEGCTVELVEAAEEFAFAVRFAGTRARTYVLAAESQDAMEGWVKALSRASFDYLRLVVRELEQQLAAVRGGGGMALPQPQPQSLPLPPSLPSALAPVPSLPSAPAPVPALPLPRRPSALPPKENGCAVWSTEATFRPGPEPPPPPPRRRASAPHGPLDMAPFARLHECYGQEIRALRGQWLSSRVQP

SEQ ID NO: 40543 - protein, 126 aa, Homo sapiens
MQKQRPREMNSLPGVPQPQPQSLPLPPSLPSALAPVPSLPSAPAPVPALPLPRRPSALPPKENGCAVWSTEATFRPGPEPPPPPPRRRASAPHGPLDMAPFARLHECYGQEIRALRGQWLSSRVQP

SEQ ID NO: 40544 - protein, 88 aa, Homo sapiens
MKLNERSLAFYATCDAPVDNAGFLYKKGGRHAAYHRRWFVLRGNMLFYFEDAASREPVGVIILVAVALWPRALSVSPWWLSQGSPDTP

SEQ ID NO: 40545 - protein, 262 aa, Homo sapiens
MAPGSPPGPAIATMKLNERSLAFYATCDAPVDNAGFLYKKGGRHAAYHRRWFVLRGNMLFYFEDAASREPVGVIILEGCTVELVEAAEEFAFAVRFAGTRARTYVLAAESQDAMEGWVKALSRASFDYLRLVVRELEQQLAAVRGGGGMALPQPQPQSLPLPPSLPSALAPVPSLPSAPAPVPALPLPRRPSALPPKENGCAVWSTEATFRPGPEPPPPPPRRRASAPHGPLDMAPFARLHECYGQEIRALRGQWLSSRVQP

SEQ ID NO: 40546 - protein, 719 aa, Homo sapiens
MGEKNGDAKTFWMELEDDGKVDFIFEQVQNVLQSLKQKIKDGSATNKEYIQAMILVNEATIINSSTSIKGASQKEVNAQSSDPMPVTQKEQENKSNAFPSTSCENSFPEDCTFLTTENKEILSLEDKVVDFREKDSSSNLSYQSHDCSGACLMKMPLNLKGENPLQLPIKCHFQRRHAKTNSHSSALHVSYKTPCGRSLRNVEEVFRYLLETECNFLFTDNFSFNTYVQLARNYPKQKEVVSDVDISNGVESVPISFCNEIDSRKLPQFKYRKTVWPRAYNLTNFSSMFTDSCDCSEGCIDITKCACLQLTARNAKTSPLSSDKITTGYKYKRLQRQIPTGIYECSLLCKCNRQLCQNRVVQHGPQVRLQVFKTEQKGWGVRCLDDIDRGTFVCIYSGRLLSRANTEKSYGIDENGRDENTMKNIFSKKRKLEVACSDCEVEVLPLGLETHPRTAKTEKCPPKFSNNPKELTVETKYDNISRIQYHSVIRDPESKTAIFQHNGKKMEFVSSESVTPEDNDGFKPPREHLNSKTKGAQKDSSSNHVDEFEDNLLIESDVIDITKYREETPPRSRCNQATTLDNQNIKKAIEVQIQKPQEGRSTACQRQQVFCDEELLSETKNTSSDSLTKFNKGNVFLLDATKEGNVGRFLNHSCCPNLLVQNVFVETHNRNFPLVAFFTNRYVKARTELTWDYGYEAGTVPEKEIFCQCGVNKCRKKIL

SEQ ID NO: 40547 - protein, 707 aa, Homo sapiens
MGEKNGDAKTFWMELEDDGKVDFIFEQVQNVLQSLKQKIKDGSATNKEYIQAMILVNEATIINSSTSIKDPMPVTQKEQENKSNAFPSTSCENSFPEDCTFLTTENKEILSLEDKVVDFREKDSSSNLSYQSHDCSGACLMKMPLNLKGENPLQLPIKCHFQRRHAKTNSHSSALHVSYKTPCGRSLRNVEEVFRYLLETECNFLFTDNFSFNTYVQLARNYPKQKEVVSDVDISNGVESVPISFCNEIDSRKLPQFKYRKTVWPRAYNLTNFSSMFTDSCDCSEGCIDITKCACLQLTARNAKTSPLSSDKITTGYKYKRLQRQIPTGIYECSLLCKCNRQLCQNRVVQHGPQVRLQVFKTEQKGWGVRCLDDIDRGTFVCIYSGRLLSRANTEKSYGIDENGRDENTMKNIFSKKRKLEVACSDCEVEVLPLGLETHPRTAKTEKCPPKFSNNPKELTVETKYDNISRIQYHSVIRDPESKTAIFQHNGKKMEFVSSESVTPEDNDGFKPPREHLNSKTKGAQKDSSSNHVDEFEDNLLIESDVIDITKYREETPPRSRCNQATTLDNQNIKKAIEVQIQKPQEGRSTACQRQQVFCDEELLSETKNTSSDSLTKFNKGNVFLLDATKEGNVGRFLNHSCCPNLLVQNVFVETHNRNFPLVAFFTNRYVKARTELTWDYGYEAGTVPEKEIFCQCGVNKCRKKIL

SEQ ID NO: 40548 - protein, 718 aa, Homo sapiens
MGEKNGDAKTFWMELEDDGKVDFIFEQVQNVLQSLKQKIKDGSATNKEYIQAMILVNEATIINSSTSIKGASQKEVNAQSSDPMPVTQKEQENKSNAFPSTSCENSFPEDCTFLTTENKEILSLEDKVVDFREKDSSSNLSYQSHDCSGACLMKMPLNLKGENPLQLPIKCHFQRRHAKTNSHSSALHVSYKTPCGRSLRNVEEVFRYLLETECNFLFTDNFSFNTYVQLARNYPKQKEVVSDVDISNGVESVPISFCNEIDSRKLPQFKYRKTVWPRAYNLTNFSSMFTDSCDCSEGCIDITKCACLQLTARNAKTSPLSSDKITTGYKYKRLQRQIPTGIYECSLLCKCNRQLCQNRVVQHGPQVRLQVFKTEQKGWGVRCLDDIDRGTFVCIYSGRLLSRANTEKSYGIDENGRDENTMKNIFSKKRKLEVACSDCEVEVLPLGLETHPRTAKTEKCPPKFSNNPKELTVETKYDNISRIQYHSVIRDPESKTAIFQHNGKKMEFVSSESVTPEDNDGFPPREHLNSKTKGAQKDSSSNHVDEFEDNLLIESDVIDITKYREETPPRSRCNQATTLDNQNIKKAIEVQIQKPQEGRSTACQRQQVFCDEELLSETKNTSSDSLTKFNKGNVFLLDATKEGNVGRFLNHSCCPNLLVQNVFVETHNRNFPLVAFFTNRYVKARTELTWDYGYEAGTVPEKEIFCQCGVNKCRKKIL

SEQ ID NO: 40549 - protein, 435 aa, Homo sapiens
MKRRASDRGAGETSARAKALGSGISGNNAKRAGPFILGPRLGNSPVPSIVQCLARKDGTDDFYQLKILTLEERGDQGIESQEERQGKMLLHTEYSLLSLLHTQDGVVHHHGLFQDRTCEIVEDTESSRMVKKMKKRICLVLDCLCAHDFSDKTADLINLQHYVIKEKRLSERETVVIFYDVVRVVEALHQKNIVHRDLKLGNMVLNKRTHRITITNFCLGKHLVSEGDLLKDQRGSPAYISPDVLSGRPYRGKPSDMWALGVVLFTMLYGQFPFYDSIPQELFRKIKAAEYTIPEDGRVSENTVCLIRKLLVLDPQQRLAAADVLEALSAIIASWQSLSSLSGPLQVVPDIDDQMSNADSSQEAKVTEECSQYEFENYMRQQLLLAEEKSSIHDARSWVPKRQFGSAPPVRRLGHDAQPMTSLDTAILAQRYLRK

SEQ ID NO: 40550 - protein, 173 aa, Homo sapiens
MGLRQGNGTVSLGILATDPAPPTEPSSPTPCLRDGRVSENTVCLIRKLLVLDPQQRLAAADVLEALSAIIASWQSLSSLSGPLQVVPDIDDQMSNADSSQEAKVTEECSQYEFENYMRQQLLLAEEKSSIHDARSWVPKRQFGSAPPVRRLGHDAQPMTSLDTAILAQRYLRK

SEQ ID NO: 40551 - protein, 417 aa, Homo sapiens
MKRRASDRGAGETSARAKALGSGISGNNAKRAGPFILGPRLGNSPVPSIVQCLARKDGTDDFYQLKILTLEERGDQGIESQEERQGKMLLHTEYSLLSLLHTQDGVVHHHGLFQDRTCEIVEDTESSRMVKKMKKRICLVLDCLCAHDFSDKTADLINLQHYVIKEKRLSERETVVIFYDVVRVVEALHQKNIVHRDLKLGNMVLNKRTHRITITNFCLGKHLVSEGDLLKDQRGSPAYISPDVLSGRPYRGKPSDMWALGVVLFTMLYGQFPFYDSIPQELFRKIKAAEYTIPEDGRVSENTVCLIRKLLVLDPQQRLAAADVLEALSAIIASWQSLSSLSGPLQVVPDIDDQMSNADSSQEVSWGGQMGHYPAPRDRLLGAGRARAEVAATRRPQSFLGLLPQPWGGKGRLQSSA

SEQ ID NO: 40552 - protein, 440 aa, Homo sapiens
MKRRASDRGAGETSARAKALGSGISGNNAKRAGPFILALCAVGPRLGNSPVPSIVQCLARKDGTDDFYQLKILTLEERGDQGIESQEERQGKMLLHTEYSLLSLLHTQDGVVHHHGLFQDRTCEIVEDTESSRMVKKMKKRICLVLDCLCAHDFSDKTADLINLQHYVIKEKRLSERETVVIFYDVVRVVEALHQKNIVHRDLKLGNMVLNKRTHRITITNFCLGKHLVSEGDLLKDQRGSPAYISPDVLSGRPYRGKPSDMWALGVVLFTMLYGQFPFYDSIPQELFRKIKAAEYTIPEDGRVSENTVCLIRKLLVLDPQQRLAAADVLEALSAIIASWQSLSSLSGPLQVVPDIDDQMSNADSSQEAKVTEECSQYEFENYMRQQLLLAEEKSSIHDARSWVPKRQFGSAPPVRRLGHDAQPMTSLDTAILAQRYLRK

SEQ ID NO: 40553 - protein, 245 aa, Homo sapiens
MESRKDITNQEEIWKMKPRRNLEDNDYLQTAHADEFDCPSELQHAQELFPQWHLPIKIAAVMASLTFLYTLLREVIHPLATSHQQYFYKIPILVINKVLPMVSITLLALVYLPGVIAAIVQVHNGTKYKKFPHWLDKWMLTRKQFGLLSLFFAVLHAIYTLSYAMRRSYRYKLLNWAYQQVQQNKEDAWIEHDVWRMEIYVSLGIVGLAILALLAVTSIPSVSDSLTWREFHYIQVHGRINFLTL

SEQ ID NO: 40554 - protein, 342 aa, Homo sapiens
MESRKDITNQEEIWKMKPRRNLEDNDYLHEDTGETSMLKRPVLLHLQQTAHADEFDCPSELQHAQELFPQWHLPIKIAAVMASLTFLYTLLREVIHPLATSHQQYFYKIPILVINKVLPMVSITLLALVYLPGVIAAIVQVHNGTKYKKFPHWLDKWMLTRKQFGLLSLFFAVLHAIYTLSYAMRRSYRYKLLNWAYQQVQQNKEDAWIEHDVWRMEIYVSLGIVGLAILALLAVTSIPSVSDSLTWREFHYIQAILTGSLVALCNFQATKLAKTQLVGTPNFWQEQQCGIHFPPPSKTRSYIYFILSAASPSKGNVSSHMFQLHLENLNKKDKLLLIIFQI

SEQ ID NO: 40555 - protein, 340 aa, Homo sapiens
MCAQYCISFADVEKAHINIRDSIHLTPVLTSSILNQLTGRNLFFKCELFQKTGSFKIRGALNAVRSLVPDALERKPKAVVTHSSGNHGQALTYAAKLEGIPAYIVVPQTAPDCKKLAIQAYGASIVYCEPSDESRENVAKRVTEETEGIMVHPNQEPAVIAGQGTIALEVLNQVPLVDALVVPVGGGGMLAGIAITVKALKPSVKVYAAEPSNADDCYQSKLKGKLMPNLYPPETIADGVKSSIGLNTWPIIRDLVDDIFTVTEDEIKCATQLVWERMKLLIEPTAGVGVAAVLSQHFQTVSPEVKNICIVLSGGNVDLTSSITWVKQAERPASYQSVSV

SEQ ID NO: 40556 - protein, 125 aa, Homo sapiens
MAKYLAQIIVMGVQVVGRAFARALRQEFAASRAAADARGRAGHRSAAASNLSGLSLQEAQQILNVSKLSPEEVQKNYEHLFKVNDKSVGGSFYLQSKVVRAKERLDEELKIQAQEDREKGQMPHT

SEQ ID NO: 40557 - protein, 487 aa, Homo sapiens
METVQLRNPPRRQLKKLDEDSLTKQPEEVFDVLEKLGEGSYGSVYKAIHKETGQIVAIKQVPVESDLQEIIKEISIMQQCDSPHVVKYYGSYFKNTDLWIVMEYCGAGSVSDIIRLRNKTLTEDEIATILQSTLKGLEYLHFMRKIHRDIKAGNILLNTEGHAKLADFGVAGQLTDTMAKRNTVIGTPFWMAPEVIQEIGYNCVADIWSLGITAIEMAEGKPPYADIHPMRAIFMIPTNPPPTFRKPELWSDNFTDFVKQCLVKSPEQRATATQLLQHPFVRSAKGVSILRDLINEAMDVKLKRQESQQREVDQDDEENSEEDEMDSGTMVRAVGDEMGTVRVASTMTDGANTMIEHDDTLPSQLGTMVINAEDEEEEGTMKRRDETMQPAKPSFLEYFEQKEKENQINSFGKSVPGPLKNSSDWKIPQDGDYEFLKSWTVEDLQKRLLALDPMMEQEIEEIRQKYQSKRQPILDAIEAKKRRQQNF

SEQ ID NO: 40558 - protein, 462 aa, Homo sapiens
METVQLRNPPRRQLKKLDEDSLTKQPEEVFDVLEKLGEGSYGSVYKAIHKETGQIVAIKQVPVESDLQEIIKEISIMQQCDSPHVVKYYGSYFKNTDLWIVMEYCGAGSVSDIIRLRNKTLTEDEIATILQSTLKGLEYLHFMRKIHRDIKAGNILLNTEGHAKLADFGVAGQLTDTMAKRNTVIGTPFWMAPEVIQEIGYNCVADIWSLGITAIEMAEGKPPYADIHPMRAIFMIPTNPPPTFRKPELWSDNFTDFVKQCLVKSPEQRATATQLLQHPFVRSAKGVSILRDLINEAMDVKLKRQESQQREVDQDDEENSEEDEMDSGTMVRAVGDEMGTVRVASTMTDGANTMIEHDDTLPSQLGTMVINAEDEEEEGTMKRRDETMQPAKPSFLEYFEQKEKENQINSFGKSVPGPLKNSSDWKIPQDGDYEFKTSQEQQSGKDICIQNCQGNLLCRYAF

SEQ ID NO: 40559 - protein, 1775 aa, Homo sapiens
MALSLWPLLLLLLLLLLLSFAVTLAPTGPHSLDPGLSFLKSLLSTLDQAPQGSLSRSRFFTFLANISSSFEPGRMGEGPVGEPPPLQPPALRLHDFLVTLRGSPDWEPMLGLLGDMLALLGQEQTPRDFLVHQAGVLGGLVEVLLGALVPGGPPTPTRPPCTRDGPSDCVLAADWLPSLLLLLEGTRWQALVQVQPSVDPTNATGLDGREAAPHFLQGLLGLLTPTGELGSKEALWGGLLRTVGAPLYAAFQEGLLRVTHSLQDEVFSILGQPEPDTNGQCQGGNLQQLLLWGVRHNLSWDVQALGFLSGSPPPPPALLHCLSTGVPLPRASQPSAHISPRQRRAITVEALCENHLGPAPPYSISNFSIHLLCQHTKPATPQPHPSTTAICQTAVWYAVSWAPGAQGWLQACHDQFPDEFLDAICSNLSFSALSGSNRRLVKRLCAGLLPPPTSCPEGLPPVPLTPDIFWGCFLENETLWAERLCGEASLQAVPPSNQAWVQHVCQGPTPDVTASPPCHIGPCGERCPDGGSFLVMVCANDTMYEVLVPFWPWLAGQCRISRGGNDTCFLEGLLGPLLPSLPPLGPSPLCLTPGPFLLGMLSQLPRCQSSVPALAHPTRLHYLLRLLTFLLGPGAGGAEAQGMLGRALLLSSLPDNCSFWDAFRPEGRRSVLRTIGEYLEQDEEQPTPSGFEPTVNPSSGISKMELLACFSPVLWDLLQREKSVWALQILVQAYLHMPPENLQQLVLSAEREAAQGFLTLMLQGKLQGKLQVPPSEEQALGRLTALLLQRYPRLTSQLFIDLSPLIPFLAVSDLMRFPPSLLANDSVLAAIRDYSPGMRPEQKEALAKRLLAPELFGEVPAWPQELLWAVLPLLPHLPLENFLQLSPHQIQALEDSWPAAGLGPGHARHVLRSLVNQSVQDGEEQVRRLGPLACFLSPEELQSLVPLSDPTGPVERGLLECAANGTLSPEGRVAYELLGVLRSSGGAVLSPRELRVWAPLFSQLGLRFLQELSEPQLRAMLPVLQGTSVTPAQAVLLLGRLLPRHDLSLEELCSLHLLLPGLSPQTLQAIPRRVLVGACSCLAPELSRLSACQTAALLQTFRVKDGVKNMGTTGAGPAVCIPGQPIPTTWPDCLLPLLPLKLLQLDSLALLANRRRYWELPWSEQQAQFLWKKMQVPTNLTLRNLQALGTLAGGMSCEFLQQINSMVDFLEVVHMIYQLPTRVRGSLRACIWAELQRRMAMPEPEWTTVGPELNGLDSKLLLDLPIQLMDRLSNESIMLVVELVQRAPEQLLALTPLHQAALAERALQNLAPKETPVSGEVLETLGPLVGFLGTESTRQIPLQILLSHLSQLQGFCLGETFATELGWLLLQESVLGKPELWSQDEVEQAGRLVFTLSTEAISLIPREALGPETLERLLEKQQSWEQSRVGQLCREPQLAAKKAALVAGVVRPAAEDLPEPVPNCADVRGTFPAAWSATQIAEMELSDFEDCLTLFAGDPGLGPEELRAAMGKAKQLWGPPRGFRPEQILQLGRLLIGLGDRELQELILVDWGVLSTLGQIDGWSTTQLRIVVSSFLRQSGRHVSHLDFVHLTALGYTLCGLRPEELQHISSWEFSQAALFLGTLHLQCSEEQLEVLAHLLVLPGGFGPISNWGPEIFTEIGTIAAGIPDLALSALLRGQIQGVTPLAISVIPPPKFAVVFSPIQLSSLTSAQAVAVTPEQMAFLSPEQRRAVAWAQHEGKESPEQQGRSTAWGLQDWSRPSWSLVLTISFLGHLL

SEQ ID NO: 40560 - protein, 188 aa, Homo sapiens
MNGDDAFAKRPRDDAKASEKRSKAFDDIAKYFSKEEWEKMKFSEKISCVHMKRKYEAMTKLGFNVTLSLFMRNKRATDSQRNDSDNDRNRGNEVERPQMTFGRLQRIIPKIMPEKPAEEGSDSKGVPEASGPQNDGKKLCPPGKASSSEKIHERSGPKRGKHAWTHRLRERKQLVIYEEISDPEEDDK

SEQ ID NO: 40561 - protein, 188 aa, Homo sapiens
MNGDDAFARRPRAGSQIPEKIQKAFDDIAKYFSKKEWEKMKSSEKIIYVYMKRKYEAMTKLGFKATLPPFMCNTGATDLQGNDFDNDRNHRNQVERSQMTFGRLQGIFPKIMPKKPAEVGNDSKEVPEASGLQNDGKQLCPPGKPTTSEKINKASGPKRGKHAWTHRLRERKQLVIYEEISDPEEDDE

SEQ ID NO: 40562 - protein, 248 aa, Homo sapiens
MSGGGVIRGPAGNNDCRIYVGNLPPDIRTKDIEDVFYKYGAIRDIDLKNRRGGPPFAFVEFEDPRDAEDAVYGRDGYDYDGYRLRVEFPRSGRGTGRGGGGGGGGGAPRGRYGPPSRRSENRVVVSGLPPSGSWQDLKDHMREAGDVCYADVYRDGTGVVEFVRKEDMTYAVRKLDNTKFRSHEGETAYIRVKVDGPRSPSYGRSRSRSRSRSRSRSRSNSRSRSYSPRRSRGSPRYSPRHSRSRSRT

SEQ ID NO: 40563 - protein, 292 aa, Homo sapiens
MSGGGVIRGPAGNNDCRIYVGNLPPDIRTKDIEDVFYKYGAIRDIDLKNRRGGPPFAFVEFEDPRDAEDAVYGRDGYDYDGYRLRVEFPRSGRGTGRGGGGGGGGGAPRGRYGPPSRRSENRVVVSGLPPSGSWQDLKDHMREAGDVCYADVYRDGTGVVEFVRKEDMTYAVRKLDNTKFRSHEFCLSNREKLPTSGLKLMGPEVQVMEDLDLEAVVVAEAVAEATAGVAVTPQGEAEDHHAILPVIADLALVHKMIGDTFCRTHVVYSFPLFSTIFSFFNSNCFVQNGLKC

SEQ ID NO: 40564 - protein, 201 aa, Homo sapiens
MSGGGVIRGPAGNNDCRIYVGNLPPDIRTKDIEDVFYKYGAIRDIDLKNRRGGPPFAFVEFEDPRDAEDAVYGRDGYDYDGYRLRVEFPRSGRGTGRGGGGGGGGGAPRGRYGPPSRRSENRVVVSGLPPSGSWQDLKDHMREAGDVCYADVYRDGTGVVEFVRKEDMTYAVRKLDNTKFRSHEVGYTRILFFDQNWIQWS

SEQ ID NO: 40565 - protein, 257 aa, Homo sapiens
MLLTLAGGALFFPGLFALCTWALRRSQPGWSRTDCVMISTRLVSSVHAVLATGSGIVIIRSCDDVITGRHWLAREYVWFLIPYMIYDSYAMYLCEWCRTRDQNRAPSLTLRNFLSRNRLMITHHAVILFVLVPVAQRLRGDLGDFFVGCIFTAELSTPFVSLGRVLIQLKQQHTLLYKVNGILTLATFLSCRILLFPFMYWSYGRQQGLSLLQVPFSIPFYCNVANAFLVAPQIYWFCLLCRKAVRLFDTPQAKKDG

SEQ ID NO: 40566 - protein, 225 aa, Homo sapiens
MLLTLAGGALFFPGLFALCTWALRRSQPGWSRTDCVMISTRLVSSVHAVLATGSGIVIIRSCDDVITGRHWLAREYVWFLIPYMIYDSYAMYLCEWCRTRDQNRAPSLTLRNFLSRNRLMITHHAVILFVLVPVAQLKQQHTLLYKVNGILTLATFLSCRILLFPFMYWSYGRQQGLSLLQVPFSIPFYCNVANAFLVAPQIYWFCLLCRKAVRLFDTPQAKKDG

SEQ ID NO: 40567 - protein, 274 aa, Homo sapiens
MLTPMVAGGVVFPGLFLLSKNTLQRLPQLRWEEADAVIVSARLVSSVQAIMASTAGYIVSTSCKHIIDDQHWLSSAYTQFAVPYFIYDIYAMFLCHWHKHQVKGHGGDDGAARAPGSTWAIARGYLHKEFLMVLHHAAMVLVCFPLSVVWRQGKGDFFLGCMLMAEVSTPFVCLGKILIQYKQQHTLLHKVNGALMLLSFLCCRVLLFPYLYWAYGRHAGLPLLAVPLAIPAHVNLGAALLLAPQLYWFFLICRGACRLFWPRSRPPPACQAQD

SEQ ID NO: 40568 - protein, 224 aa, Homo sapiens
MASTAGYIVSTSCKHIIDDQHWLSSAYTQFAVPYFIYDIYAMFLCHWHKHQVKGHGGDDGAARAPGSTWAIARGYLHKEFLMVLHHAAMVLVCFPLSVVWRQGKGDFFLGCMLMAEVSTPFVCLGKILIQYKQQHTLLHKVNGALMLLSFLCCRVLLFPYLYWAYGRHAGLPLLAVPLAIPAHVNLGAALLLAPQLYWFFLICRGACRLFWPRSRPPPACQAQD

SEQ ID NO: 40569 - protein, 229 aa, Homo sapiens
MGDKIWLPFPVLLLAALPPVLLPGAAGFTPSLDSDFTFTLPAGQKECFYQPMPLKASLEIEYQVLDGAGLDIDFHLASPEGKTLVFEQRKSDGVHTVETEVGDYMFCFDNTFSTISEKVIFFELILDNMGEQAQEQEDWKKYITGTDILDMKLEDILESINSIKSRLSKSGHIQTLLRAFEARDRNIQESNFDRVNFWSMVNLVVMVVVSAIQVYMLKSLFEDKRKSRT

SEQ ID NO: 40570 - protein, 193 aa, Homo sapiens
MGDKIWLPFPVLLLAALPPVLLPGAAGFTPSLDSDFTFTLPAGQKECFYQPMPLKASLEIEYQVLDGAGLDIDFHLASPEGKTLVFEQRKSDGVHTVETEVGDYMFCFDNTFSTISEKVIFFELILDNMGEQAQEQEDWKKYITGTDILDMKLEDILDPIIKIASDVQIRLHLGIHQQHQVQTKQKWAHTNSA

SEQ ID NO: 40571 - protein, 149 aa, Homo sapiens
MASSDIQVKELEKRASGQAFELILSPRSKESVPEFPLSPPKKKDLSLEEIQKKLEAAEERRKSHEAEVLKQLAEKREHEKEVLQKAIEENNNFSKMAEEKLTHKMEANKENREAQMAAKLERLREKDKHIEEVRKNKESKDPADETEAD

SEQ ID NO: 40572 - protein, 174 aa, Homo sapiens
MASSDIQVKELEKRASGQAFELILSPRSKESVPEFPLSPPKKKDLSLEEIQKKLEAAEERRKSHEAEVLKQLAEKREHEKEVLQKAIEENNNFSKMAEEKLTHKMEANKENREAQMAAKLERLREKMYFWTHGPGAHPAQISAEQSCLHSVPALCPALGLQSALITWSDLSHHH

SEQ ID NO: 40573 - protein, 294 aa, Homo sapiens
MQGPAGNASRGLPGGPPSTVASGAGRCESGALMHSFGIFLQGLLGVVAFSTLMLKRFREPKHERRPWRIWFLDTSKQAIGMLFIHFANVYLADLTEEDPCSLYLINFLLDATVGMLLIYVGVRAVSVLVEWQQWESLRFGEYGDPLQCGAWVGQCALYIVIMIFEKSVVFIVLLILQWKKVALLNPIENPDLKLAIVMLIVPFFVNALMFWVVDNFLMRKGKTKAKLEERGANQDSRNGSKVRYRRAASHEESESEILISADDEMEESDVEEDLRRLTPLKPVKKKKHRFGLPV

SEQ ID NO: 40574 - protein, 396 aa, Homo sapiens
MGANTSRKPPVFDENEDVNFDHFEILRAIGKGSFGKVCIVQKNDTKKMYAMKYMNKQKCVERNEVRNVFKELQIMQGLEHPFLVNLWYSFQDEEDMFMVVDLLLGGDLRYHLQQNVHFKEETVKLFICELVMALDYLQNQRIIHRDMKPDNILLDEHGHVHITDFNIAAMLPRETQITTMAGTKPYMAPEMFSSRKGAGYSFAVDWWSLGVTAYELLRGRRPYHIRSSTSSKEIVHTFETTVVTYPSAWSQEMVSLLKKLLEPNPDQRFSQLSDVQNFPYMNDINWDAVFQKRLIPGFIPNKGRLNCDPTFELEEMILESKPLHKKKKRLAKKEKDMRKCDSSQTCLLQEHLDSVQKEFIIFNREKVNRDFNKRQPNLALEQTKDPQGEDGQNNNL

SEQ ID NO: 40575 - protein, 166 aa, Homo sapiens
MGANTSRKPPVFDENEDVNFDHFEILRAIGKGSFGKVCIVQKNDTKKMYAMKYMNKQKCVERNEVRNVFKELQIMQGLEHPFLVNLWYSFQDEEDMFMVVDLLLGGDLRYHLQQNVHFKEETVKLFICELVMALDYLQNQRIIHRDMKPDNILLDEHDTWLSYKSH

SEQ ID NO: 40576 - protein, 358 aa, Homo sapiens
MGANTSRKPPVFDENEDVNFDHFEILRAIGKGSFGKVCIVQKNDTKKMYAMKYMNKQKCVERNEVRNVFKELQIMQGLEHPFLVNLWYSFQDEEDMFMVVDLLLGGDLRYHLQQNVHFKEETVKLFICELVMALDYLQNQRIIHRDMKPDNILLDEHGHVHITDFNIAAMLPRETQITTMAGTKPYMAPEMFSSRKGAGYSFAVDWWSLGVTAYELLRGRRPYHIRSSTSSKEIVHTFETTVVTYPSAWSQEMVSLLKKLLEPNPDQRFSQLSDVQNFPYMNDINWDAVFQKRLIPGFIPNKGRLNCDPTFELEEMILESKPLHKKKKRLAKKEKDMRKCDSSQVSRSPPNSGSWVSP

SEQ ID NO: 40577 - protein, 314 aa, Homo sapiens
MDQRNYTRVKEFTFLGITQSRELSQVLFTFLFLVYMTTLMGNFLIMVTVTCESHLHTPMYFLLRNLSILDICFSSITAPKVLIDLLSETKTISFSGCVTQMFFFHLLGGADVFSLSVMAFDRYIAISKPLHYMTIMSRGRCTGLIVASWVGGFVHSIAQISLLLPLPFCGPNVLDTFYCDVPQVLKLACTDTFTLELLMISNNGLVSWFVFFFLLISYTVILMMLRSHTGEGRRKAISTCTSHITVVTLHFVPCIYVYARPFTALPTDTAISVTFTVISPLLNPIIYTLRNQEMKLAMRKLKRRLGQSERILIQ

SEQ ID NO: 40578 - protein, 356 aa, Homo sapiens
MDAGVTESGLNVTLTIRLLMHGKEVGSIIGKKGESVKRIREESGARINISEGNCPERIITLTGPTNAIFKAFAMIIDKLEEDINSSMTNSTAASRPPVTLRLVVPATQCGSLIGKGGCKIKEIRESTGAQVQVAGDMLPNSTERAITIAGVPQSVTECVKQICLVMLETLSQSPQGRVMTIPYQPMPASSPVICAGGQDRCSDAAGYPHATHDLEGPPLDAYSIQGQHTISPLDLAKLNQVARQQSHFAMMHGGTGFAGIDSSSPEVKGYWASLDASTQTTHELTIPNNLIGCIIGRQGANINEIRQMSGAQIKIANPVEGSSGRQVTITGSAASISLAQYLINARLSSEKGMGCS

SEQ ID NO: 40579 - protein, 312 aa, Homo sapiens
MEKSNNSTLFILLGFSQNKNIEVLCFVLFLFCYIAIWMGNLLIMISITCTQLIHQPMYFFLNYLSLSDLCYTSTVTPKLMVDLLAERKTISYNNCMIQLFTTHFFGGIEIFILTGMAYDRYVAICKPLHYTIIMSRQKCNTIIIVCCTGGFIHSASQFLLTIFVPFCGPNEIDHYFCDVYPLLKLACSNIHMIGLLVIANSGLIALVTFVVLLLSYVFILYTIRAYSAERRSKALATCSSHVIVVVLFFAPALFIYIRPVTTFSEDKVFALFYTIIAPMFNPLIYTLRNTEMKNAMRKVWCCQILLKRNQLF

SEQ ID NO: 40580 - protein, 314 aa, Homo sapiens
MEFTDRNYTLVTEFILLGFPTRPELQIVLFLMFLTLYAIILIGNIGLMLLIRIDPHLQTPMYFFLSNLSFVDLCYFSDIVPKMLVNFLSENKSISYYGCALQFYFFCTFADTESFILAAMAYDRYVAICNPLLYTVVMSRGICMRLIVLSYLGGNMSSLVHTSFAFILKYCDKNVINHFFCDLPPLLKLSCTDTTINEWLLSTYGSSVEIICFIIIIISYFFILLSVLKIRSFSGRKKTFSTCASHLTSVTIYQGTLLFIYSRPSYLYSPNTDKIISVFYTIFIPVLNPLIYSLRNKDVKDAAEKVLRSKVDSS

SEQ ID NO: 40581 - protein, 312 aa, Homo sapiens
MPNSTTVMEFLLMRFSDVWTLQILHSASFFMLYLVTLMGNILIVTVTTCDSSLHMPMYFFLRNLSILDACYISVTVPTSCVNSLLDSTTISKAGCVAQVFLVVFFVYVELLFLTIMAHDRYVAVCQPLHYPVIVNSRICIQMTLASLLSGLVYAGMHTGSTFQLPFCRSNVIHQFFCDIPSLLKLSCSDTFSNEVMIVVSALGVGGGCFIFIIRSYIHIFSTVLGFPRGADRTKAFSTCIPHILVVSVFLSSCSSVYLRPPAIPAATQDLILSGFYSIMPPLFNPIIYSLRNKQIKVAIKKIMKRIFYSENV

SEQ ID NO: 40582 - protein, 2925 aa, Homo sapiens
MGVLASALCWLLCVWLPWGEQAAESLRVQRLGERVVDSGRSGARGMRNVKGMRNGPAQTRVSSSSSHQEATLAMGDKATVVGGQQAEAPDSVAMSSWERRLHRAKCAPSYLFSCFNGGECVHPAFCDCRRFNATGPRCQMVYNAGPERDSICRAWGQHHVETFDGLYYYLSGKGSYTLVGRHEPEGQSFSIQVHNDPQCGSSPYTCSRAVSLFFVGEQEIHLAKEVTHGGMRVQLPHVMGSARLQQLAGYVIVRHQSAFTLAWDGASAVYIKMSPELLGWTHGLCGNNNADPKDDLVTSSGKLTDDVVEFVHSWQEQAPNQPPGPTTSSLPRPPCLQQNPGTMQGVYEQCEALLRPPFDACHAYVSPLPFTASCTSDLCQSMGDVATWCRALAEYARACAQAGRPLQGWRTQLRQCTVHCKEKAFTYNECIACCPASCHPRASCVDSEIACVDGCYCPNGLIFEDGGCVAPAECPCEFHGTLYPPGSVVKEDCNTCTCTSGKWECSTAVCPAECSVTGDIHFTTFDGRRYTFPATCQYILAKSRSSGTFTVTLQNAPCGLNQDGACVQSVSVILHQDPRRQVTLTQAGDVLLFDQYKIIPPYTDDAFEIRRLSSVFLRVRTNVGVRVLYDREGLRLYLQVDQRWVEDTVGLCGTFNGNTQDDFLSPVGVPESTPQLFGNSWKTLSACSPLVSGSPLDPCDVHLQAASYSVQACSVLTGEMFAPCSAFLSPVPYFEQCRRDACRCGQPCLCATLAHYAHLCRRHGLPVDFRARLPACALSCEASKEYSPCVAPCGRTCQDLASPEACGVDGGDDLSRDECVEGCACPPDTYLDTQADLCVPRNQCSCHFQGVDYPPGDSDIPSLGHCHCKDGVMSCDSRAPAAACPAGQVFVNCSDLHTDLELSRERTCEQQLLNLSVSARGPCLSGCACPQGLLRHGDACFLPEECPCTWKGKEYFPGDQVMSPCHTCVCQRGSFQCTLHPCASTCTAYGDRHYRTFDGLPFDFVGACKVHLVKSTSDVSFSVIVENVNCYSSGMICRKFISINVGNSLIVFDDDSGNPSPESFLDDKQEVHTWRVGFFTLVHFPQEHITLLWDQRTTVHVQAGPQWQGQLAGLCGNFDLKTINEMRTPENLELTNPQEFGSSWAAVECPDTLDPRDMCVLNPLREPFAKKECSILLSEVFEICHPVVDVTWFYSNCLTDTCGCSQGGDCECFCASVSAYAHQCCQHGVAVDWRTPRLCPYDCDFFNKVLGKGPYQLSSLAAGGALVGMKAVGDDIVLVRTEDVAPADIVSFLLTAALYKAKAHDPDVVSLEAADRPNFFLHVTANGSLELAKWQGRDTFQQHASFLLHRGTRQAGLVALESLAKPSSFLYVSGAVLALRLYEHTEVFRRGTLFRLLDAKPSGAAYPICEWRYDACASPCFQTCRDPRAASCRDVPRVEGCVPVCPTPQVLDEVTQRCVYLEDCVEPAVWVPTEALGNETLPPSQGLPTPSDEEPQLSQESPRTPTHRPALTPAAPLTTALNPPVTATEEPVVSPGPTQTTLQQPLELTASQLPAGPTESPASKGVTASLLAIPHTPESSSLPVALQTPTPGMVSGAMETTRVTVIFAGSPNITVSSRSPPAPRFPLMTKAVTVRGHGSLPVRTTPPQPSLTASPSSRPVASPGAISRSPTSSGSHKAVLTPAVTKVISRTGVPQPTQAQSASSPSTPLTVAGTAAEQVPVSPLATRSLEIVLSTEKGEAGHSQPMGSPASPQPHPLPSAPPRPAQHTTMATRSPALPPETPAAASLSTATDGLAATPFMSLESTRPSQLLSGLPPDTSLPLAKVGTSAPVATPGPKASVITTPLQPQATTLPAQTLSPVLPFTPAAMTQAHPPTHIAPPAAGTAPGLLLGATLPTSGVLPVAEGTASMVSVVPRKSTTGKVAILSKQVSLPTSMYGSAEGGPTELTPATSHPLTPLVAEPEGAQAGTALPVPTSYALSRVSARTAPQDSMLVLLPQLAEAHGTSAGPHLAAEPVDEATTEPSGRSAPALSIVEGLAEALATTTEANTSTTCVPIAEQDCVRHICLEGQLIRVNQSQHCPQGAAPPRCGILGLAVRVGGDRCCPLWECACRCSIFPDLSFVTFDGSHVALFKEAIYILSQSPDEMLTVHVLDCKSANLGHLNWPPFCLVMLNMTHLAHQVTIDRFNRKVTVDLQPVWPPVSRYGFRIEDTGHMYMILTPSDIQIQWLHSSGLMIVEASKTSKAQGHGLCGICDGDAANDLTLKDGSVVGGAEDPAPFLDSWQVPSSLTSVGQTRFRPDSCATTDCSPCLRMVSNRTFSACHRFVPPESFCELWIRDTKYVQQPCVALTVYVAMCHKFHVCIEWRRSDYCPFLCSSDSTYQACVTACEPPKTCQDGILGPLDPEHCQVLGEGCVCSEGTILHRRHSALCIPEAKCACTDSMGVPRALGETWNSSLSGCCQHQCQAPDTIVPVDLGCPSPRPESCLRFGEVALLLPTKDPCCLGTVCVCNQTLCEGLAPTCRPGHRLLTHFQEDSCCPSYSCECDPDLCEAELVPSCRQDQILITGRLGDSCCTSYFCACGDCPDSIPECQEGEALTVHRNTTELCCPLYQCVCENFRCPQVQCGLGTALVEVWSPDRCCPYKSCECDCDTIPVPRCHLWEKSQLDEEFMHSVENVCGCAKYECVKAPVCLSRELGVMQPGQTVVELSADGVCHTSRCTTVLDPLTNFYQINTTSVLCDIHCEANQEYEHPRDLAACCGSCRNVSCLFTFPNGTTSLFLPGASWIADCARHHCSSTPLGAVLVRSPISCPPLNETECAKVGGSVVPSLEGCCRTCKEDGRSCKKVTIRMTIRKNECRSSTPVNLVSCDGRCPSASIYNYNINTYARFCKCCREVGLQRRSVQLFCATNATWVPYTVQEPTDCACQWS

SEQ ID NO: 40583 - protein, 1508 aa, Homo sapiens
MFPARGVPLHLEGEGVFPWGPGDVSLPYLSTSDVSFSVIVENVNCYSSGMICRKFISINVGNSLIVFDDDSGNPSPESFLDDKQEVHTWRVGFFTLVHFPQEHITLLWDQRTTVHVQAGPQWQGQLAGLCGNFDLKTINEMRTPENLELTNPQEFGSSWAAVECPDTLDPRDMCVLNPLREPFAKKECSILLSEVFEICHPVVDVTWFYSNCLTDTCGCSQGGDCECFCASVSAYAHQCCQHGVAVDWRTPRLCLLGKGPYQLSSLAAGGALVGMKAVGDDIVLVRTEDVAPADIVSFLLTAALYKAKAHDPDVVSLEAADRPNFFLHVTANGSLELAKWQGRDTFQQHASFLLHRGTRQAGLVALESLAKPSSFLYVSGAVLALRLYEHTEVFRRGTLFRLLDAKPSGAAYPICEWRYDACASPCFQTCRDPRAASCRDVPRVEGCVPVCPTPQVLDEVTQRCVYLEDCVEPAVWVPTEALGNETLPPSQGLPTPSDEEPQLSQESPRTPTHRPALTPAAPLTTALNPPVTATEEPVVSPGPTQTTLQQPLELTASQLPAGPTESPASKGVTASLLAIPHTPESSSLPVALQTPTPGMVSGAMETTRVTVIFAGSPNITVSSRSPPAPRFPLMTKAVTVRGHGSLPVRTTPPQPSLTASPSSRPVASPGAISRSPTSSGSHKAVLTPAVTKVISRTGVPQPTQAQSASSPSTPLTVAGTAAEQVPVSPLATRSLEIVLSTEKGEAGHSQPMGSPASPQPHPLPSAPPRPAQHTTMATRSPALPPETPAAASLSTATDGLAATPFMSLESTRPSQLLSGLPPDTSLPLAKVGTSAPVATPGPKASVITTPLQPQATTLPAQTLSPVLPFTPAAMTQAHPPTHIAPPAAGTAPGLLLGATLPTSGVLPVAEGTASMVSVVPRKSTTGKVAILSKQVSLPTSMYGSAEGGPTELTPATSHPLTPLVAEPEGAQAGTALPVPTSYALSRVSARTAPQDSMLVLLPQLAEAHGTSAGPHLAAEPVDEATTEPSGRSAPALSIVEGLAEALATTTEANTSTTCVPIAEQDCVRHICLEGQLIRVNQSQHCPQGAAPPRCGILGLAVRVGGDRCCPLWECACRCSIFPDLSFVTFDGSHVALFKEAIYILSQSPDEMLTVHVLDCKSANLGHLNWPPFCLVMLNMTHLAHQVTIDRFNRKVTVDLQPVWPPVSRYGFRIEDTGHMYMILTPSDIQIQWLHSSGLMIVEASKTSKAQGHGLCGICDGDAANDLTLKDGSVVGGAEDPAPFLDSWQVPSSLTSVGQTRFRPDSCATTDCSPCLRMVSNRTFSACHRFVPPESFCELWIRDTKYVQQPCVALTVYVAMCHKFHVCIEWRRSDYCPFLCSSDSTYQACVTACEPPKTCQDGILGPLDPEHCQVLGEGCVCSEGTILHRRHSALCIPEAKCACGDCPDSIPECQEGEALTVHRNTTELCCPLYQCVCENFRCPQVQCGLGTALVEVWSPDRCCPYKSCG

SEQ ID NO: 40584 - protein, 311 aa, Homo sapiens
MTGGGNITEITYFILLGFSDFPRIIKVLFTIFLVIYITSLAWNLSLIVLIRMDSHLHTPMYFFLSNLSFIDVCYISSTVPKMLSNLLQEQQTITFVGCIIQYFIFSTMGLSESCLMTAMAYDRYAAICNPLLYSSIMSPTLCVWMVLGAYMTGLTASLFQIGALLQLHFCGSNVIRHFFCDMPQLLILSCTDTFFVQVMTAILTMFFGIASALVIMISYGYIGISIMKITSAKGRSKAFNTCASHLTAVSLFYTSGIFVYLSSSSGGSSSFDRFASVFYTVVIPMLNPLIYSLRNKEIKDALKRLQKRKCC

SEQ ID NO: 40585 - protein, 310 aa, Homo sapiens
MWYNNSAGPFLLTGFLGSEAVHYRISMSFFVIYFSVLFGNGTLLVLIWNDHSLHEPMYYFLAMLADTDLGMTFTTMPTVLGVLLLDQREIAHAACFTQSFIHSLAIVESGILLVLAYDCFIAIRTPLRYNCILTNSRVMNIGLGVLMRGFMSILPIILSLYCYPYCGSRALLHTFCLHQDVIKLACADITFNHIYPIIQTSLTVFLDALIIIFSYILILKTVMGIASGQEEAKSLNTCVSHISCVLVFHITVMGLSFIHRFGKHAPHVVPITMSYVHFLFPPFVNPIIYSIKTKQIQRSIIRLFSGQSRA

SEQ ID NO: 40586 - protein, 308 aa, Homo sapiens [sequence omitted]

SEQ ID NO: 40587 - protein, 575 aa, Homo sapiens
MPPGKVLQPVLKMKVDELFLYWLSEASTQRMLQDCLRRIKAPGRDQPTPGDGEQPGAWPTAPLAAPRPSGLEPPGTPGPGPALPLGAASSPRNAPHVRGTRRSAGTRVVQTRKEEPLPPATSQSIPTFYFPRGRPQDSVNVDAVISKIESTFARFPHERATMDDMGLVAKACGCPLYWKGPLFYGAGGERTGSVSVHKFVAMWRKILQNCHDDAAKFVHLLMSPGCNYLVQEDFVPFLQDVVNTHPGLSFLKEASEFHSRYITTVIQRIFYAVNRSWSGRITCAELRRSSFLQNVALLEEEADINQLTEFFSYEHFYVIYCKFWELDTDHDLLIDADDLARHNDHALSTKMIDRIFSGAVTRGRKVQKEGKISYADFVWFLISEEDKKTPTSIEYWFRCMDLDGDGALSMFELEYFYEEQCRRLDSMAIEALPFQDCLCQMLDLVKPRTEGKITLQDLKRCKLANVFFDTFFNIEKYLDHEQKEQISLLRDGDSGGPELSDWEKYAAEEYDILVAEETAGEPWEDGFEAELSPVEQKLSALRSPLAQRPFFEAPSPLGAVDLYEYACGDEDLEPL

SEQ ID NO: 40588 - protein, 176 aa, Homo sapiens
MDLDGDGALSMFELEYFYEEQCRRLDSMAIEALPFQDCLCQMLDLVKPRTEGKITLQDLKRCKLANVFFDTFFNIEKYLDHEQKEQISLLRDGDSGGPELSDWEKYAAEEYDILVAEETAGEPWEDGFEAELSPVEQKLSALRSPLAQRPFFEAPSPLGAVDLYEYACGDEDLEPL

SEQ ID NO: 40589 - protein, 309 aa, Homo sapiens
MEKKKNVTEFILIGLTQNPIMEKVTFVVFLVLYMITLSGNLLIVVTITTSQALSSPMYFFLTHLSLIDTVYSSSSAPKLIVDSFQEKKIISFNGCMAQAYAEHIFGATEIILLTVMACDCYVAICKPLNYTTIMSHSLCILLVAVAWVGGFLHATIQILFTVWLPFCGPNVIGHFMCDLYPLLKLVCIDTHTLGLFVAVNSGFICLLNFLILVVSYVIILRSLKNNSLEGRCKALSTCISHIIVVVLFFVPCIFVYLRSVTTLPIDKAVAVFYTMVVPMLNPVVYTLRNAEVKSAIRKLWRKKVTSDND

SEQ ID NO: 40590 - protein, 481 aa, Homo sapiens
MQLYSSVCTHYPAGAPGPTAAAPAPPAAATPFKVSLQPPGAAGAAPEPETGECQPAAAAEHREAAAVPAAKMPAFSSCFEVVSGAAAPASAAAGPPGASCKPPLPPHYTSTAQITVRALGADRLLLHGPDPVPGAAGSAAAPRGRCLLLAPAPAAPVPPRRGSSAWLLEELLRPDCPEPAGLDATREGPDRNFRLSEHRQALAAAKHRGPAATPGSPDPGPGPWGEEHLAERGPRGWERGGDRCDAPGGDAARRPDPEAEAPPAGSIEAAPSSAAEPVIVSRSDPRDEKLALYLAEVEKQDKYLRQRNKYRFHIIPDGNCLYRAVSKTVYGDQSLHRELREQTVHYIADHLDHFSPLIEGDVGEFIIAAAQDGAWAGYPELLAMGQMLNVNIHLTTGGRLESPTVSTMIHYLGPEDSLRPSIWLSWLSNGHYDAVFDHSYPNPEYDNWCKQTQVQRKRDEELAKSMAISLSKMYIEQNACS

SEQ ID NO: 40591 - protein, 950 aa, Homo sapiens
MLFSWREDPGAQCLLLSLLLLAASEVGSGQLHYSVSEEAKHGTFVGRIAQDLGLELAELVPRLFRVASKRHGDLLEVNLQNGILFVNSRIDREELCGRSAECSIHLEVIVDRPLQVFHVEVEVKDINDNAPVFPMAVKNLFISESRQPGSRFSLEGASDADIGTNSLLTYSLDSTEYFTLDVKRNDEEIKSLGLVLKKNLNREDTPKHYLLITAIDGGKPELTGTTQLKITVLDVNDNAPAFERTIYKVRLLENAPNGTLVVTVNATDLDEGVNKDIAYSFNTDMSADILSKFHLDPVNGQISVKGNIDFEESKSYEIQVEATDKGNPPMSDHCTVLLEIVDINDNVPELVIQSLSLPVLEDSPLSTVIALISVSDRDSGVNGQVTCSLTPHVPFKLVSTFKNYYSLVLDSPLDRESVSAYELVVTARDGGSPSLWATASVSVEVADVNDNAPAFSQSEYTVFVKENNPPGCHIFTVSARDADAQENALVSYSLVERRVGERALSSYVSVHAESGKVYALQPLDHEELELLQFQVSARDAGVPPLGSNVTLQVFVLDENDNAPALLMPRVGGIGGAVSELVPRSVGAGHVVAKVRAVDADSGYNAWLSYELQPGTGGARIPFRVGLYTGEISTTRALDEVDAPRHRLLVLVKDHGEPSLTATATVLVSLVESGQAPKASSQASAGATGPEAALVDVNVYLIVAICAVSSLLVLTLLLYTALRCSAPPTEGDCGPGKPTLVCSSAVGSWSYSQQRQQRVCSGEGLPKTDLMAFSPSLPPCPISRDREEKQDVDVDLSAKPRQPNPDWRYSASLRAGMHSSVHLEEAGILRAGPGGPDQQWPTVSSATPEPEAGEVSPPVGAGVNSNSWTFKYGPGNPKQSGPGELPDKFIIPGSPAIISIRQEPTNSQIDKSDFITFGKKEETKKKKKKKKGNKTQEKKEKGNSTTDNSDQ

SEQ ID NO: 40592 - protein, 824 aa, Homo sapiens
MLFSWREDPGAQCLLLSLLLLAASEVGSGQLHYSVSEEAKHGTFVGRIAQDLGLELAELVPRLFRVASKRHGDLLEVNLQNGILFVNSRIDREELCGRSAECSIHLEVIVDRPLQVFHVEVEVKDINDNAPVFPMAVKNLFISESRQPGSRFSLEGASDADIGTNSLLTYSLDSTEYFTLDVKRNDEEIKSLGLVLKKNLNREDTPKHYLLITAIDGGKPELTGTTQLKITVLDVNDNAPAFERTIYKVRLLENAPNGTLVVTVNATDLDEGVNKDIAYSFNTDMSADILSKFHLDPVNGQISVKGNIDFEESKSYEIQVEATDKGNPPMSDHCTVLLEIVDINDNVPELVIQSLSLPVLEDSPLSTVIALISVSDRDSGVNGQVTCSLTPHVPFKLVSTFKNYYSLVLDSPLDRESVSAYELVVTARDGGSPSLWATASVSVEVADVNDNAPAFSQSEYTVFVKENNPPGCHIFTVSARDADAQENALVSYSLVERRVGERALSSYVSVHAESGKVYALQPLDHEELELLQFQVSARDAGVPPLGSNVTLQVFVLDENDNAPALLMPRVGGIGGAVSELVPRSVGAGHVVAKVRAVDADSGYNAWLSYELQPGTGGARIPFRVGLYTGEISTTRALDEVDAPRHRLLVLVKDHGEPSLTATATVLVSLVESGQAPKASSQASAGATGPEAALVDVNVYLIVAICAVSSLLVLTLLLYTALRCSAPPTEGDCGPGKPTLVCSSAVGSWSYSQQRQQRVCSGEGLPKTDLMAFSPSLPPCPISRDREEKQDVDVDLSAKVSNFYLFFPKCLCFSFLNVSTPLEIH

SEQ ID NO: 40593 - protein, 313 aa, Homo sapiens
MTLPSNNSTSPVFEFFLICFPSFQSWQHWLSLPLSLLFLLAMGANATLLITIYLEASLHQPLYYLLSLLSLLDIVLCLTVIPKVLAIFWFDLRSISFPACFLQVFIMNSFLTMESCTFMIMAYDRYVAICKPLQYSSIITDQFVARAAIFVVARNGLLTMPIPILSSRLRYCAGHIIKNCICTNVSVSKLSCDDITLNQSYQFVIGWTLLGSDLILIVLSYFFILKTVLRIKGEGDMAKALGTCGSHFILILFFTTVLLVLVITNLARKRIPPDVPILLNILHHLIPPALNPIVYGVRTKEIKQGIQNLLRRL

SEQ ID NO: 40594 - protein, 534 aa, Homo sapiens
MRLRGCGPRAAPASSAGASDARLLAPPGRNPFVHELRLSALQKAQVALMTLTLFPVRLLVAAAMMLLAWPLALVASLGSAEKEPEQPPALWRKVVDFLLKAIMRTMWFAGGFHRVAVKGRQALPTEAAILTLAPHSSYFDAIPVTMTMSSIVMKAESRDIPIWGTLIQYIRPVFVSRSDQDSRRKTVEEIKRRAQSNGKWPQIMIFPEGTCTNRTCLITFKPGAFIPGAPVQPVVLRYPNKLDTITWTWQGPGALEILWLTLCQFHNQVEIEFLPVYSPSEEEKRNPALYASNVRRVMAEALGVSVTDYTFEDCQLALAEGQLRLPADTCLLEFARLVRGLGLKPEKLEKDLDRYSERARMKGGEKIGIAEFAASLEVPVSDLLEDMFSLFDESGSGEVDLRECVVALSVVCRPARTLDTIQLAFKMYGAQEDGSVGEGDLSCILKTALGVAELTVTDLFRAIDQEEKGKITFADFHRFAEMYPAFAEEYLYPDQTHFESCAETSPAPIPNGFCADFSPENSDAGRKPVRKKLD

SEQ ID NO: 40595 - protein, 107 aa, Homo sapiens
MWILSNLMGTSEEGNLLSTVSPTVKALFGKTRVSPIFPFSPRSPFQPLIPRTPGSPWGPVGPASPLGPGFPIGPMGPGKPVGPKGPMLPLGPSGPVGPTSPLFPFCP

SEQ ID NO: 40596 - protein, 681 aa, Homo sapiens
MFRKKKKKRPEISAPQNFQHRVHTSFDPKEGKFVGLPPQWQNILDTLRRPKPVVDPSRITRVQLQPMKTVVRGSAMPVDGYISGLLNDIQKLSVISSNTLRGRSPTSRRRAQSLGLLGDEHWATDPDMYLQSPQSERTDPHGLYLSCNGGTPAGHKQMPWPEPQSPRVLPNGLAAKAQSLGPAEFQGASQRCLQLGACLQSSPPGASPPTGTNRHGMKAAKHGSEEARPQSCLVGSATGRPGGEGSPSPKTRESSLKRRLFRSMFLSTAATAPPSSSKPGPPPQSKPNSSFRPPQKDNPPSLVAKAQSLPSDQPVGTFSPLTTSDTSSPQKSLRTAPATGQLPGRSSPAGSPRTWHAQISTSNLYLPQDPTVAKGALAGEDTGVVTHEQFKAALRMVVDQGDPRLLLDSYVKIGEGSTGIVCLAREKHSGRQVAVKMMDLRKQQRRELLFNEVVIMRDYQHFNVVEMYKSYLVGEELWVLMEFLQGGALTDIVSQVRLNEEQIATVCEAVLQALAYLHAQGVIHRDIKSDSILLTLDGRVKLSDFGFCAQISKDVPKRKSLVGTPYWMAPEVISRSLYATEVDIWSLGIMVIEMVDGEPPYFSDSPVQAMKRLRDSPPPKLKNSHKVSPVLRDFLERMLVRDPQERATAQELLDHPFLLQTGLPECLVPLIQLYRKQTSTC

SEQ ID NO: 40597 - protein, 636 aa, Homo sapiens
MFRKKKKKRPEISAPQNFQHRVHTSFDPKEGKFVGLPPQWQNILDTLRRPKPVVDPSRITRVQLQPMKTVVRGSAMPVDGYISGLLNDIQKLSVISSNTLRGRSPTSRRRAQSLGLLGDEHWATDPDMYLQSPQSERTDPHGLYLSCNGGTPAGHKQMPWPEPQSPRVLPNGLAAKAQSLGPAEFQGASQRCLQLGACLQSSPPGASPPTGTNRHGMKAAKHGSEEARPQSCLVGSATGRPGGEGSPSPKTRESSLKRRLFRSMFLSTAATAPPSSSKPGPPPQSKPNSSFRPPQKDNPPSLVAKAQSLPSDQPVGTFSPLTTSDTSSPQKSLRTAPATGQLPGRSSPAGSPRTWHAQISTSNLYLPQDPTVAKGALAGEDTGVVTHEQFKAALRMVVDQGDPRLLLDSYVKIGEGSTGIVCLAREKHSGRQVAVKMMDLRKQQRRELLFNEVVIMRDYQHFNVVEMYKSYLVGEELWVLMEFLQGGALTDIVSQVRLNEEQIATVCEAVLQALAYLHAQGVIHRDIKSDSILLTLDGRVKLSDFGFCAQISKDVPKRKSLVGTPYWMAPEVISRSLYATEVSPVLRDFLERMLVRDPQERATAQELLDHPFLLQTGLPECLVPLIQLYRKQTSTC

SEQ ID NO: 40598 - protein, 1202 aa, Homo sapiens
MNFEGLDPGLAEYAPAMHSALDPVLDAHLNPSLLQNVELDPEGVALEALPVQESVHIMEGVYSELHSVVAEVGVPVSVSHFDLHEEMLWVGSHGGHATSFFGPALERYSSFQVNGSDDIRQIQSLENGILFLTKNNLKYMARGGLIIFDYLLDENEDMHSLLLTDSSTLLVGGLQNHIIEIDLNTVQETQKYAVETPGVTIMRQTNRFFFCGHTSGKVSLRDLRTFKVEHEFDAFSGSLSDFDVHGNLLAACGFSSRLTGLACDRFLKVYDLRMMRAITPLQVHVDPAFLRFIPTYTSRLAIISQSGQCQFCEPTGLANPADIFHVNPVGPLLMTFDVSASKQALAFGDSEGCVHLWTDSPEPSFNPYSRETEFALPCLVDSLPPLDWSQDLLPLSLIPVPLTTDTLLSDWPAANSAPAPRRAPPVDAEILRTMKKVGFIGYAPNPRTRLRNQIPYRLKESDSEFDSFSQVTESPVGREEEPHLHMVSKKYRKVTIKYSKLGLEDFDFKHYNKTLFAGLEPHIPNAYCNCMIQVLYFLEPVRCLIQNHLCQKEFCLACELGFLFHMLDLSRGDPCQGNNFLRAFRTIPEASALGLILADSDEASGKGNLARLIQRWNRFILTQLHQDMQELEIPQAYRGAGGSSFCSSGDSVIGQLFSCEMENCSLCRCGSETVRASSTLLFTLSYPDGSKSDKTGKNYDFAQVLKRSICLDQNTQAWCDTCEKYQPTIQTRNIRHLPDILVINCEVNSSKEADFWRMQAEVAFKMAVKKHGGEISKNKEFALADWKELGSPEGVLVCPSIEELKNVWLPFSIRMKMTKNKGLDVCNWTDGDEMQWGPARAEEEHGVYVYDLMATVVHILDSRTGGSLVAHIKVGETYHQRKEGVTHQQWYLFNDFLIEPIDKHEAVQFDMNWKVPAILYYVKRNLNSRYNLNIKNPIEASVLLAEASLARKQRKTHTTFIPLMLNEMPQIGDLVGLDAEFVTLNEEEAELRSDGTKSTIKPSQMSVARITCVRGQGPNEGIPFIDDYISTQEQVVDYLTQYSGIKPGDLDAKISSKHLTTLKSTYLKLRFLIDIGVKFVGHGLQKDFRVINLMVPKDQVLDTVYLFHMPRKRMISLRFLAWYFLDLKIQGETHDSIEDARTALQLYRKYLELSKNGTEPESFHKVLKGLYEKGRKMDWKVPEPEGQTSPKNAAVFSSVLAL

SEQ ID NO: 40599 - protein, 1198 aa, Homo sapiens
MNFEGLDPGLAEYAPAMHSALDPVLDAHLNPSLLQNVELDPEGVALEALPVQESVHIMEGVYSELHSVVAEVGVPVSVSHFDLHEEMLWVGSHGGHATSFFGPALERYSSFQVNGSDDIRQIQSLENGILFLTKNNLKYMARGGLIIFDYLLDENEDMHSLLLTDSSTLLVGGLQNHIIEIDLNTVQETQKYAVETPGVTIMRQTNRFFFCGHTSGKVSLRDLRTFKVEHEFDAFSGSLSDFDVHGNLLAACGFSSRLTGLACDRFLKVYDLRMMRAITPLQVHVDPAFLRFIPTYTSRLAIISQSGQCQFCEPTGLANPADIFHVNPVGPLLMTFDVSASKQALAFGDSEGCVHLWTDSPEPSFNPYSRETEFALPCLVDSLPPLDWSQDLLPLSLIPVPLTTDTLLSDWPAANSAPAPRRAPPVDAEILRTMKKVGFIGYAPNPRTRLRNQIPYRLKESDSEFDSFSQVTESPVGREEEPHLHMVSKKYRKVTIKYSKLGLEDFDFKHYNKTLFAGLEPHIPNAYCNCMIQVLYFLEPVRCLIQNHLCQKEFCLACELGFLFHMLDLSRGDPCQGNNFLRAFRTIPEASALGLILADSDEASGKGNLARLIQRWNRFILTQLHQDMQELEIPQAYRGAGGSSFCSSGDSVIGQLFSCEMENCSLCRCGSETVRASSTLLFTLSYPDDKTGKNYDFAQVLKRSICLDQNTQAWCDTCEKYQPTIQTRNIRHLPDILVINCEVNSSKEADFWRMQAEVAFKMAVKKHGGEISKNKEFALADWKELGSPEGVLVCPSIEELKNVWLPFSIRMKMTKNKGLDVCNWTDGDEMQWGPARAEEEHGVYVYDLMATVVHILDSRTGGSLVAHIKVGETYHQRKEGVTHQQWYLFNDFLIEPIDKHEAVQFDMNWKVPAILYYVKRNLNSRYNLNIKNPIEASVLLAEASLARKQRKTHTTFIPLMLNEMPQIGDLVGLDAEFVTLNEEEAELRSDGTKSTIKPSQMSVARITCVRGQGPNEGIPFIDDYISTQEQVVDYLTQYSGIKPGDLDAKISSKHLTTLKSTYLKLRFLIDIGVKFVGHGLQKDFRVINLMVPKDQVLDTVYLFHMPRKRMISLRFLAWYFLDLKIQGETHDSIEDARTALQLYRKYLELSKNGTEPESFHKVLKGLYEKGRKMDWKVPEPEGQTSPKNAAVFSSVLAL

SEQ ID NO: 40600 - protein, 1201 aa, Homo sapiens
MNFEGLDPGLAEYAPAMHSALDPVLDAHLNPSLLQNVELDPEGVALEALPVQESVHIMEGVYSELHSVVAEVGVPVSVSHFDLHEEMLWVGSHGGHATSFFGPALERYSSFQVNGSDDIRQIQSLENGILFLTKNNLKYMARGGLIIFDYLLDENEDMHSLLLTDSSTLLVGGLQNHIIEIDLNTVQETQKYAVETPGVTIMRQTNRFFFCGHTSGKVSLRDLRTFKVEHEFDAFSGSLSDFDVHGNLLAACGFSSRLTGLACDRFLKVYDLRMMRAITPLQVHVDPAFLRFIPTYTSRLAIISQSGQCQFCEPTGLANPADIFHVNPVGPLLMTFDVSASKQALAFGDSEGCVHLWTDSPEPSFNPYSRETEFALPCLVDSLPPLDWSQDLLPLSLIPVPLTTDTLLSDWPAANSAPAPRRAPPVDAEILRTMKKVGFIGYAPNPRTRLRNQIPYRLKESDSEFDSFSQVTESPVGREEEPHLHMVSKKYRKVTIKYSKLGLEDFDFKHYNKTLFAGLEPHIPNAYCNCMIQVLYFLEPVRCLIQNHLCQKEFCLACELGFLFHMLDLSRGDPCQGNNFLRAFRTIPEASALGLILADSDEASGKGNLARLIQRWNRFILTQLHQDMQELEIPQAYRGAGGSFCSSGDSVIGQLFSCEMENCSLCRCGSETVRASSTLLFTLSYPDGSKSDKTGKNYDFAQVLKRSICLDQNTQAWCDTCEKYQPTIQTRNIRHLPDILVINCEVNSSKEADFWRMQAEVAFKMAVKKHGGEISKNKEFALADWKELGSPEGVLVCPSIEELKNVWLPFSIRMKMTKNKGLDVCNWTDGDEMQWGPARAEEEHGVYVYDLMATVVHILDSRTGGSLVAHIKVGETYHQRKEGVTHQQWYLFNDFLIEPIDKHEAVQFDMNWKVPAILYYVKRNLNSRYNLNIKNPIEASVLLAEASLARKQRKTHTTFIPLMLNEMPQIGDLVGLDAEFVTLNEEEAELRSDGTKSTIKPSQMSVARITCVRGQGPNEGIPFIDDYISTQEQVVDYLTQYSGIKPGDLDAKISSKHLTTLKSTYLKLRFLIDIGVKFVGHGLQKDFRVINLMVPKDQVLDTVYLFHMPRKRMISLRFLAWYFLDLKIQGETHDSIEDARTALQLYRKYLELSKNGTEPESFHKVLKGLYEKGRKMDWKVPEPEGQTSPKNAAVFSSVLAL

SEQ ID NO: 40601 - protein, 719 aa, Homo sapiens
MFGKKKKKIEISGPSNFEHRVHTGFDPQEQKFTGLPQQWHSLLADTANRPKPMVDPSCITPIQLAPMKTIVRGNKPCKETSINGLLEDFDNISVTRSNSLRKESPPTPDQGASSHGPGHAEENGFITFSQYSSESDTTADYTTEKYREKSLYGDDLDPYYRGSHAAKQNGHVMKMKHGEAYYSEVKPLKSDFARFSADYHSHLDSLSKPSEYSDLKWEYQRASSSSPLDYSFQFTPSRTAGTSGCSKESLAYSESEWGPSLDDYDRRPKSSYLNQTSPQPTMRQRSRSGSGLQEPMMPFGASAFKTHPQGHSYNSYTYPRLSEPTMCIPKVDYDRAQMVLSPPLSGSDTYPRGPAKLPQSQSKSGYSSSSHQYPSGYHKATLYHHPSLQSSSQYISTASYLSSLSLSSSTYPPPSWGSSSDQQPSRVSHEQFRAALQLVVSPGDPREYLANFIKIGEGSTGIVCIATEKHTGKQVAVKKMDLRKQQRRELLFNEVVIMRDYHHDNVVDMYSSYLVGDELWVVMEFLEGGALTDIVTHTRMNEEQIATVCLSVLRALSYLHNQGVIHRDIKSDSILLTSDGRIKLSDFGFCAQVSKEVPKRKSLVGTPYWMAPEVISRLPYGTEVDIWSLGIMVIEMIDGEPPYFNEPPLQAMRRIRDSLPPRVKDLHKVSSVLRGFLDLMLVREPSQRATAQELLGHPFLKLAGPPSCIVPLMRQYRHH

SEQ ID NO: 40602 - protein, 559 aa, Homo sapiens
MSDGLDNEEKPPAPPLRMNSNNRDSSALNHSSKPLPMAPEEKNKKARLRSIFPGGGDKTNKKKEKERPEISLPSDFEHTIHVGFDAVTGEFTPDLYGSQMCPGKLPEGIPEQWARLLQTSNITKLEQKKNPQAVLDVLKFYDSKETVNNQKYMSFTSGDKSAHGYIAAHPSSTKTASEPPLAPPVSEEEDEEEEEEEDENEPPPVIAPRPEHTKSIYTRSVVESIASPAVPNKEVTPPSAENANSSTLYRNTDRQRKKSKMTDEEILEKLRSIVSVGDPKKKYTRFEKIGQGASGTVYTALDIATGQEVAIKQMNLQQQPKKELIINEILVMRENKNPNIVNYLDSYLVGDELWVVMEYLAGGSLTDVVTETCMDEGQIAAVCRECLQALDFLHSNQVIHRDIKSDNILLGMDGSVKLTDFGFCAQITPEQSKRSTMVGTPYWMAPEVVTRKAYGPKVDIWSLGIMAIEMVEGEPPYLNENPLRALYLIATNGTPELQNPERLSAVFRDFLNRCLEMDVDRRGSAKELLQHPFLKLAKPLSSLTPLIIAAKEAIKNSSR

SEQ ID NO: 40603 - protein, 544 aa, Homo sapiens
MSDGLDNEEKPPAPPLRMNSNNRDSSALNHSSKPLPMAPEEKNKKARLRSIFPGGGDKTNKKKEKERPEISLPSDFEHTIHVGFDAVTGEFTGIPEQWARLLQTSNITKLEQKKNPQAVLDVLKFYDSKETVNNQKYMSFTSGDKSAHGYIAAHPSSTKTASEPPLAPPVSEEEDEEEEEEEDENEPPPVIAPRPEHTKSIYTRSVVESIASPAVPNKEVTPPSAENANSSTLYRNTDRQRKKSKMTDEEILEKLRSIVSVGDPKKKYTRFEKIGQGASGTVYTALDIATGQEVAIKQMNLQQQPKKELIINEILVMRENKNPNIVNYLDSYLVGDELWVVMEYLAGGSLTDVVTETCMDEGQIAAVCRECLQALDFLHSNQVIHRDIKSDNILLGMDGSVKLTDFGFCAQITPEQSKRSTMVGTPYWMAPEVVTRKAYGPKVDIWSLGIMAIEMVEGEPPYLNENPLRALYLIATNGTPELQNPERLSAVFRDFLNRCLEMDVDRRGSAKELLQHPFLKLAKPLSSLTPLIIAAKEAIKNSSR

SEQ ID NO: 40604 - protein, 580 aa, Homo sapiens
MSDGLDNEEKPPAPPLRMNSNNRDSSALNHSSKPLPMAPEEKNKKARLRSIFPGGGDKTNKKKEKERPEISLPSDFEHTIHVGFDAVTGEFTNSPFQTSRPVTVASSQSEGKMPDLYGSQMCPGKLPEGIPEQWARLLQTSNITKLEQKKNPQAVLDVLKFYDSKETVNNQKYMSFTSGDKSAHGYIAAHPSSTKTASEPPLAPPVSEEEDEEEEEEEDENEPPPVIAPRPEHTKSIYTRSVVESIASPAVPNKEVTPPSAENANSSTLYRNTDRQRKKSKMTDEEILEKLRSIVSVGDPKKKYTRFEKIGQGASGTVYTALDIATGQEVAIKQMNLQQQPKKELIINEILVMRENKNPNIVNYLDSYLVGDELWVVMEYLAGGSLTDVVTETCMDEGQIAAVCRECLQALDFLHSNQVIHRDIKSDNILLGMDGSVKLTDFGFCAQITPEQSKRSTMVGTPYWMAPEVVTRKAYGPKVDIWSLGIMAIEMVEGEPPYLNENPLRALYLIATNGTPELQNPERLSAVFRDFLNRCLEMDVDRRGSAKELLQHPFLKLAKPLSSLTPLIIAAKEAIKNSSR

SEQ ID NO: 40605 - protein, 565 aa, Homo sapiens
MSDGLDNEEKPPAPPLRMNSNNRDSSALNHSSKPLPMAPEEKNKKARLRSIFPGGGDKTNKKKEKERPEISLPSDFEHTIHVGFDAVTGEFTNSPFQTSRPVTVASSQSEGKMGIPEQWARLLQTSNITKLEQKKNPQAVLDVLKFYDSKETVNNQKYMSFTSGDKSAHGYIAAHPSSTKTASEPPLAPPVSEEEDEEEEEEEDENEPPPVIAPRPEHTKSIYTRSVVESIASPAVPNKEVTPPSAENANSSTLYRNTDRQRKKSKMTDEEILEKLRSIVSVGDPKKKYTRFEKIGQGASGTVYTALDIATGQEVAIKQMNLQQQPKKELIINEILVMRENKNPNIVNYLDSYLVGDELWVVMEYLAGGSLTDVVTETCMDEGQIAAVCRECLQALDFLHSNQVIHRDIKSDNILLGMDGSVKLTDFGFCAQITPEQSKRSTMVGTPYWMAPEVVTRKAYGPKVDIWSLGIMAIEMVEGEPPYLNENPLRALYLIATNGTPELQNPERLSAVFRDFLNRCLEMDVDRRGSAKELLQHPFLKLAKPLSSLTPLIIAAKEAIKNSSR

SEQ ID NO: 40606 - protein, 887 aa, Homo sapiens
MNSGGGLPPPSAAASPSSSSLAAAVAVVAPPGVGGVPGGAAVGVKLKYCRYYAKDKTCFYGEECQFLHEDPAAGAAPGLGLHSNSVPLALAGAPVAGFPPGAVAGGGAGPPPGPKKPDLGDPGTGAAAGGGGSSGGLDGPRLAIPGMDGGALTDTSLTDSYFSTSFIGVNGFGSPVETKYPLMQRMTNSSSSPSLLNDSAKPYSAHDPLTSPASSLFNDFGALNISQRRKPRKYRLGMLEERLVPMGSKARKAKNPIGCLADRCKSGVPINMVWWNRVTENNLQTPNPTASEFIPKGGSTSRLSNVSQSNMSAFSQVFSHPSMGSPATAGLAPGMSLSAGSSPLHSPKITPHTSPAPRRRSHTPNPASYMVPSSASTSVNNPVSQTPSSGQVIQKETVGGTTYFYTDTTPAPLTGMVFPNYHIYPPTAPHVAYMQPKANAPSFFMADELRQELINRHLITMAQIDQADMPAVPTEVDSYHSLFPLEPLPPPNRIQKSSNFGYITSCYKAVNSKDDLPYCLRRIHGFRLVNTKCMVLVDMWKKIQHSNIVTLREVFTTKAFAEPSLVFAYDFHAGGETMMSRHFNDPNADAYFTKRKWGQHEGPLPRQHAGLLPESLIWAYIVQLSSALRTIHTAGLACRVMDPTKILITGKTRLRVNCVGVFDVLTFDNSQNNNPLALMAQYQQADLISLGKVVLALACNSLAGIQRENLQKAMELVTINYSSDLKNLILYLLTDQNRMRSVNDIMPMIGARFYTQLDAAQMRNDVIEEDLAKEVQNGRLFRLLAKLGTINERPEFQKDPTWSETGDRYLLKLFRDHLFHQVTEAGAPWIDLSHIISCLNKLDAGVPEKISLISRDEKSVLVVTYSDLKRCFENTFQELIAAANGQL

SEQ ID NO: 40607 - protein, 575 aa, Homo sapiens
MKLTDSTKGWIVWAALDSSMRGMSLSAGSSPLHSPKITPHTSPAPRRRSHTPNPASYMVPSSASTSVNNPVSQTPSSGQVIQKETVGGTTYFYTDTTPAPLTGMVFPNYHIYPPTAPHVAYMQPKANAPSFFMADELRQELINRHLITMAQIDQADMPAVPTEVDSYHSLFPLEPLPPPNRIQKSSNFGYITSCYKAVNSKDDLPYCLRRIHGFRLVNTKCMVLVDMWKKIQHSNIVTLREVFTTKAFAEPSLVFAYDFHAGGETMMSRHFNDPNADAYFTKRKWGQHEGPLPRQHAGLLPESLIWAYIVQLSSALRTIHTAGLACRVMDPTKILITGKTRLRVNCVGVFDVLTFDNSQNNNPLALMAQYQQADLISLGKVVLALACNSLAGIQRENLQKAMELVTINYSSDLKNLILYLLTDQNRMRSVNDIMPMIGARFYTQLDAAQMRNDVIEEDLAKEVQNGRLFRLLAKLGTINERPEFQKDPTWSETGDRYLLKLFRDHLFHQVTEAGAPWIDLSHIISCLNKLDAGVPEKISLISRDEKSVLVVTYSDLKRCFENTFQELIAAANGQL

SEQ ID NO: 40608 - protein, 833 aa, Homo sapiens
MNSGGGLPPPSAAASPSSSSLAAAVAVVAPPGVGGVPGGAAVGVKLKYCRYYAKDKTCFYGEECQFLHEDPAAGAAPGLGLHSNSVPLALAGAPVAGFPPGAVAGGGAGPPPGPKKPDLGDPGTGAAAGGGGSSGGLDGPRLAIPGMDGGALTDTSLTDSYFSTSFIGVNGFGSPVETKYPLMQRMTNSSSSPSLLNDSAKPYSAHDPLTSPASSLFNDFGALNISQRRKTPNPTASEFIPKGGSTSRLSNVSQSNMSAFSQVFSHPSMGSPATAGLAPGMSLSAGSSPLHSPKITPHTSPAPRRRSHTPNPASYMVPSSASTSVNNPVSQTPSSGQVIQKETVGGTTYFYTDTTPAPLTGMVFPNYHIYPPTAPHVAYMQPKANAPSFFMADELRQELINRHLITMAQIDQADMPAVPTEVDSYHSLFPLEPLPPPNRIQKSSNFGYITSCYKAVNSKDDLPYCLRRIHGFRLVNTKCMVLVDMWKKIQHSNIVTLREVFTTKAFAEPSLVFAYDFHAGGETMMSRHFNDPNADAYFTKRKWGQHEGPLPRQHAGLLPESLIWAYIVQLSSALRTIHTAGLACRVMDPTKILITGKTRLRVNCVGVFDVLTFDNSQNNNPLALMAQYQQADLISLGKVVLALACNSLAGIQRENLQKAMELVTINYSSDLKNLILYLLTDQNRMRSVNDIMPMIGARFYTQLDAAQMRNDVIEEDLAKEVQNGRLFRLLAKLGTINERPEFQKDPTWSETGDRYLLKLFRDHLFHQVTEAGAPWIDLSHIISCLNKLDAGVPEKISLISRDEKSVLVVTYSDLKRCFENTFQELIAAANGQL

SEQ ID NO: 40609 - protein, 687 aa, Homo sapiens
MNSGGGLPPPSAAASPSSSSLAAAVAVVAPPGVGGVPGGAAVGVKLKYCRYYAKDKTCFYGEECQFLHEDPAAGAAPGLGLHSNSVPLALAGAPVAGFPPGAVAGGGAGPPPGPKKPDLGDPGTGAAAGGGGSSGGLDGPRLAIPGMDGGALTDTSLTDSYFSTSFIGVNGFGSPVETKYPLMQRMTNSSSSPSLLNDSAKPYSAHDPLTSPASSLFNDFGALNISQRRKPRKYRLGMLEERLVPMGSKARKAKNPIGCLADRCKSGVPINMVWWNRVTENNLQTPNPTASEFIPKGGSTSRLSNVSQSNMSAFSQVFSHPSMGSPATAGLAPGMSLSAGSSPLHSPKITPHTSPAPRRRSHTPNPASYMVPSSASTSVNNPVSQTPSSGQVIQKETVGGTTYFYTDTTPAPLTGMVFPNYHIYPPTAPHVAYMQPKANAPSFFMADELRQELINRHLITMAQIDQADMPAVPTEVDSYHSLFPLEPLPPPNRIQKSSNFGYITSCYKAVNSKDDLPYCLRRIHGFRLVNTKCMVLVDMWKKIQHSNIVTLREVFTTKAFAEPSLVFAYDFHAGGETMMSRHFNDPNADAYFTKRKWGQHEGPLPRQHAGLLPESLIWAYIVQLSSALRTIHTAGLACRVMDPTKILITGKTRLRVNCVGVFDVLTFDNSQNNNPLALMAQYQVSKN

SEQ ID NO: 40610 - protein, 105 aa, Homo sapiens
MNPSEMQRKAPPRRRRHCNRAPLTHKMNKMVTSEEEMKLPSTKKAEPLTWAQLKKLTQLATKCLENTKVTQTPESMLLAALMIVSMVSAGVTNSSKETATIENGP

SEQ ID NO: 40611 - protein, 469 aa, Homo sapiens
MDASLEKIADPTLAEMGKNLKEAVKMLEDSQRRTEEENGKKLISRDIPGPLQGSGQDMVSILQLVQNLMHGDEDEEPQSPRIQNIGEQGHVAVLGHSLGAYILTLDEEKLRKLTTRILSDTTLWLCRIFRYENGCAYFHEEEREGLAKICRLAIHSQYEDFVVDGFSGLYNKKPVIYLSAAARPGLGQYLCNQLGLPFPCLCRVPCNTMFGSQHQMDVAFLEKLIKDDIERGRLPLLLVANAGTAAVGHTDKIGRLKELCEQYGIWLHVEGVNLATLALGYVSSSVLAAAKCDSMTMTPGPWLGLPAVPAVTLYKHDPALTLVAGLISNKPTDKLRALPLWLSLQYLGLDGFVERIKHACQLSQWLQESLKKVNYIKILVEDELSSPVVVFRFFQELPGSDPVFKAVPVPNMTPSAVGRERHSCDALNLWLGEQLKQLVPASGLTVMDLEAEGTCLRFSPLMTAAGMIS

SEQ ID NO: 40612 - protein, 1089 aa, Homo sapiens
MGTSHPAFLVLGCLLTGLSLILCQLSLPSILPNENEKVVQLNSSFSLRCFGESEVSWQYPMSEEESSDVEIRNEENNSGLFVTVLEVSSASAAHTGLYTCYYNHTQTEENELEGRHIYIYVPDPDVAFVPLGMTDYLVIVEDDDSAIIPCRTTDPETPVTLHNSEGVVPASYDSRQGFNGTFTVGPYICEATVKGKKFQTIPFNVYALKATSELDLEMEALKTVYKSGETIVVTCAVFNNEVVDLQWTYPGEVKGKGITMLEEIKVPSIKLVYTLTVPEATVKDSGDYECAARQATREVKEMKKVTISVHEKGFIEIKPTFSQLEAVNLHEVKHFVVEVRAYPPPRISWLKNNLTLIENLTEITTDVEKIQEIRYRSKLKLIRAKEEDSGHYTIVAQNEDAVKSYTFELLTQVPSSILDLVDDHHGSTGGQTVRCTAEGTPLPDIEWMICKDIKKCNNETSWTILANNVSNIITEIHSRDRSTVEGRVTFAKVEETIAVRCLAKNLLGAENRELKLVAPTLRSELTVAAAVLVLLVIVIISLIVLVVIWKQKPRYEIRWRVIESISPDGHEYIYVDPMQLPYDSRWEFPRDGLVLGRVLGSGAFGKVVEGTAYGLSRSQPVMKVAVKMLKPTARSSEKQALMSELKIMTHLGPHLNIVNLLGACTKSGPIYIITEYCFYGDLVNYLHKNRDSFLSHHPEKPKKELDIFGLNPADESTRSYVILSFENNGDYMDMKQADTTQYVPMLERKEVSKYSDIQRSLYDRPASYKKKSMLDSEVKNLLSDDNSEGLTLLDLLSFTYQVARGMEFLASKNCVHRDLAARNVLLAQGKIVKICDFGLARDIMHDSNYVSKGSTFLPVKWMAPESIFDNLYTTLSDVWSYGILLWEIFSLGGTPYPGMMVDSTFYNKIKSGYRMAKPDHATSEVYEIMVKCWNSEPEKRPSFYHLSEIVENLLPGQYKKSYEKIHLDFLKSDHPAVARMRVDSDNAYIGVTYKNEEDKLKDWEGGLDEQRLSADSGYIIPLPDIDPVPEEEDLGKRNRHSSQTSEESAIETGSSSSTFIKREDETIEDIDMMDDIGIDSSDLVEDSFL

SEQ ID NO: 40613 - protein, 218 aa, Homo sapiens
MGTSHPAFLVLGCLLTGLSLILCQLSLPSILPNENEKVVQLNSSFSLRCFGESEVSWQYPMSEEESSDVEIRNEENNSGLFVTVLEVSSASAAHTGLYTCYYNHTQTEENELEGRHIYIYVPDPDVAFVPLGMTDYLVIVEDDDSAIIPCRTTDPETPVTLHNSEGVVPASYDSRQGFNGTFTVGPYICEATVKGKKFQTIPFNVYALKGTCIISFLL

SEQ ID NO: 40614 - protein, 743 aa, Homo sapiens
MGTSHPAFLVLGCLLTGLSLILCQLSLPSILPNENEKVVQLNSSFSLRCFGESEVSWQYPMSEEESSDVEIRNEENNSGLFVTVLEVSSASAAHTGLYTCYYNHTQTEENELEGRHIYIYVPDPDVAFVPLGMTDYLVIVEDDDSAIIPCRTTDPETPVTLHNSEGVVPASYDSRQGFNGTFTVGPYICEATVKGKKFQTIPFNVYALKATSELDLEMEALKTVYKSGETIVVTCAVFNNEVVDLQWTYPGEVKGKGITMLEEIKVPSIKLVYTLTVPEATVKDSGDYECAARQATREVKEMKKVTISVHEKGFIEIKPTFSQLEAVNLHEVKHFVVEVRAYPPPRISWLKNNLTLIENLTEITTDVEKIQEIRYRSKLKLIRAKEEDSGHYTIVAQNEDAVKSYTFELLTQVPSSILDLVDDHHGSTGGQTVRCTAEGTPLPDIEWMICKDIKKCNNETSWTILANNVSNIITEIHSRDRSTVEGRVTFAKVEETIAVRCLAKNLLGAENRELKLVAPTLRSELTVAAAVLVLLVIVIISLIVLVVIWKQKPRYEIRWRVIESISPDGHEYIYVDPMQLPYDSRWEFPRDGLVLGRVLGSGAFGKVVEGTAYGLSRSQPVMKVAVKMLKPTARSSEKQALMSELKIMTHLGPHLNIVNLLGACTKSGPIYIITEYCFYGDLVNYLHKNRDSFLSHHPEKPKKELDIFGLNPADESTRSSGQGCLSSGTLQELSVDLQARGPC

SEQ ID NO: 40615 - protein, 110 aa, Homo sapiens
MAKHHPDLIFCRKQAGVAIGRLCEKCDGKCVICDSYVRPCTLVRICDECNYGSYQGRCVICGGPGVSDAYYCKECTIQEKDRDGCPKIVNLGSSKTDLFYERKKYGFKKR

SEQ ID NO: 40616 - protein, 1756 aa, Homo sapiens
MNSLFRKRNKGKYSPTVQTRSISNKELSELIEQLQKNADQVEKNIVDTEAKMQSDLARLQEGRQPEHRDVTLQKVLDSEKLLYVLEADAAIAKHMKHPQGDMIAEDIRQLKERVTNLRGKHKQIYRLAVKEVDPQVNWAALVEEKLDKLNNQSFGTDLPLVDHQVEEHNIFHNEVKAIGPHLAKDGDKEQNSELRAKYQKLLAASQARQQHLSSLQDYMQRCTNELYWLDQQAKGRMQYDWSDRNLDYPSRRRQYENFINRNLEAKEERINKLHSEGDQLLAAEHPGRNSIEAHMEAVHADWKEYLNLLICEESHLKYMEDYHQFHEDVKDAQELLRKVDSDLNQKYGPDFKDRYQIELLLRELDDQEKVLDKYEDVVQGLQKRGQQVVPLKYRRETPLKPIPVEALCDFEGEQGLISRGYSYTLQKNNGESWELMDSAGNKLIAPAVCFVIPPTDPEALALADSLGSQYRSVRQKAAGSKRTLQQRYEVLKTENPGDASDLQGRQLLAGLDKVASDLDRQEKAITGILRPPLEQGRAVQDSAERAKDLKNITNELLRIEPEKTRSTAEGEAFIQALPGSGTTPLLRTRVEDTNRKYEHLLQLLDLAQEKVDVANRLEKSLQQSWELLATHENHLNQDDTVPESSRVLDSKGQELAAMACELQAQKSLLGEVEQNLQAAKQCSSTLASRFQEHCPDLERQEAEVHKLGQRFNNLRQQVERRAQSLQSAKAAYEHFHRGHDHVLQFLVSIPSYEPQETDSLSQMETKLKNQKNLLDEIASREQEVQKICANSQQYQQAVKDYELEAEKLRSLLDLENGRRSHVSKRARLQSPATKVKEEEAALAAKFTEVYAINRQRLQNLEFALNLLRQQPEVEVTHETLQRNRPDSGVEEAWKIRKELDEETERRRQLENEVKSTQEEIWTLRNQGPQESVVRKEVLKKVPDPVLEESFQQLQRTLAEEQHKNQLLQEELEALQLQLRALEQETRDGGQEYVVKEVLRIEPDRAQADEVLQLREELEALRRQKGAREAEVLLLQQRVAALAEEKSRAQEKVTEKEVVKLQNDPQLEAEYQQLQEDHQRQDQLREKQEEELSFLQDKLKRLEKERAMAEGKITVKEVLKVEKDAATEREVSDLTRQYEDEAAKARASQREKTELLRKIWALEEENAKVVVQEKVREIVRPDPKAESEVANLRLELVEQERKYRGAEEQLRSYQSELEALRRRGPQVEVKEVTKEVIKYKTDPEMEKELQRLREEIVDKTRLIERCDLEIYQLKKEIQALKDTKPQVQTKEVVQEILQFQEDPQTKEEVASLRAKLSEEQKKQVDLERERASQEEQIARKEEELSRVKERVVQQEVVRYEEEPGLRAEASAFAESIDVELRQIDKLRAELRRLQRRRTELERQLEELERERQARREAEREVQRLQQRLAALEQEEAEAREKVTHTQKVVLQQDPQQAREHALLRLQLEEEQHRRQLLEGELETLRRKLAALEKAEVKEKVVLSESVQVEKGDTEQEIQRLKSSLEEESRSKRELDVEVSRLEARLSELEFHNSKSSKELDFLREENHKLQLERQNLQLETRRLQSEINMAATETRDLRNMTVADSGTNHDSRLWSLERELDDLKRLSKDKDLEIDELQKRLGSVAVKREQRENHLRRSIVVIHPDTGRELSPEEAHRAGLIDWNMFVKLRSQECDWEEISVKGPNGESSVIHDRKSGKKFSIEEALQSGRLTPAQYDRYVNKDMSIQELAVLVSGQK

SEQ ID NO: 40617 - protein, 559 aa, Homo sapiens
MAASEDGSGCLVSRGRSQSDPSVLTDSSATSSADAGENPDEMDQTPPARPEYLVSGIRTPPVRRNSKLATLGRIFKPWKWRKKKNEKLKQTTSALEKKMAGRQGREELIKKGLLEMMEQDAESKTCNPDGGPRSVQSEPPTPKSETLTSEDAQPGSPLATGTDQVSLDKPLSSAAHLDDAAKMPSASSGEEADAGSLLPTTNELSQALAGADSLDSPPRPLERSVGQLPSPPLLPTPPPKASSKTTKNVTGQATLFQASSMKSADPSLRGQLSTPTGSPHLTTVHRPLPPSRVIEELHRALATKHRQDSFQGRESKGSPKKRLDVRLSRTSSVERGKEREEAWSFDGALENKRTAAKESEENKENLIINSELKDDLLLYQDEEALNDSIISGTLPRKCKKELLAVKLRNRPSKQELEDRNIFPRRTDEERQEIRQQIEMKLSKRLSQRPAVEELERRNILKQRNDQTEQEERREIKQRLTRKLNQRPTVDELRDRKILIRFSDYVEVAKAQDYDRRADKPWTRLSAADKAAIRKELNEYKSNEMEVHASSKHLTRFHRP

SEQ ID NO: 40618 - protein, 518 aa, Homo sapiens
MDQTPPARPEYLVSGIRTPPVRRNSKLATLGRIFKPWKWRKKKNEKLKQTTSALEKKMAGRQGREELIKKGLLEMMEQDAESKTCNPDGGPRSVQSEPPTPKSETLTSEDAQPGSPLATGTDQVSLDKPLSSAAHLDDAAKMPSASSGEEADAGSLLPTTNELSQALAGADSLDSPPRPLERSVGQLPSPPLLPTPPPKASSKTTKNVTGQATLFQASSMKSADPSLRGQLSTPTGSPHLTTVHRPLPPSRVIEELHRALATKHRQDSFQGRESKGSPKKRLDVRLSRTSSVERGKEREEAWSFDGALENKRTAAKESEENKENLIINSELKDDLLLYQDEEALNDSIISGTLPRKCKKELLAVKLRNRPSKQELEDRNIFPRRTDEERQEIRQQIEMKLSKRLSQRPAVEELERRNILKQRNDQTEQEERREIKQRLTRKLNQRPTVDELRDRKILIRFSDYVEVAKAQDYDRRADKPWTRLSAADKAAIRKELNEYKSNEMEVHASSKHLTRFHRP

SEQ ID NO: 40619 - protein, 448 aa, Homo sapiens
MDQTPPARPEYLVSGIRTPPVRRNSKLATLGRIFKPWKWRKKKNEKLKQTTSALEKKMAGRQGREELIKKGLLEMMEQDAESKTCNPDGGPRSVQSEPPTPKSETLTSEDAQPGSPLATGTDQVSLDKPLSSAAHLDDAGQATLFQASSMKSADPSLRGQLSTPTGSPHLTTVHRPLPPSRVIEELHRALATKHRQDSFQGRESKGSPKKRLDVRLSRTSSVERGKEREEAWSFDGALENKRTAAKESEENKENLIINSELKDDLLLYQDEEALNDSIISGTLPRKCKKELLAVKLRNRPSKQELEDRNIFPRRTDEERQEIRQQIEMKLSKRLSQRPAVEELERRNILKQRNDQTEQEERREIKQRLTRKLNQRPTVDELRDRKILIRFSDYVEVAKAQDYDRRADKPWTRLSAADKAAIRKELNEYKSNEMEVHASSKHLTRFHRP

SEQ ID NO: 40620 - protein, 556 aa, Homo sapiens
MRGRGGGRARCPAPLRSLLGAFGARDAAAAARDPAQDEMDQTPPARPEYLVSGIRTPPVRRNSKLATLGRIFKPWKWRKKKNEKLKQTTSALEKKMAGRQGREELIKKGLLEMMEQDAESKTCNPDGGPRSVQSEPPTPKSETLTSEDAQPGSPLATGTDQVSLDKPLSSAAHLDDAAKMPSASSGEEADAGSLLPTTNELSQALAGADSLDSPPRPLERSVGQLPSPPLLPTPPPKASSKTTKNVTGQATLFQASSMKSADPSLRGQLSTPTGSPHLTTVHRPLPPSRVIEELHRALATKHRQDSFQGRESKGSPKKRLDVRLSRTSSVERGKEREEAWSFDGALENKRTAAKESEENKENLIINSELKDDLLLYQDEEALNDSIISGTLPRKCKKELLAVKLRNRPSKQELEDRNIFPRRTDEERQEIRQQIEMKLSKRLSQRPAVEELERRNILKQRNDQTEQEERREIKQRLTRKLNQRPTVDELRDRKILIRFSDYVEVAKAQDYDRRADKPWTRLSAADKAAIRKELNEYKSNEMEVHASSKHLTRFHRP

SEQ ID NO: 40621 - protein, 394 aa, Homo sapiens
MALEVGDMEDGQLSDSDSDMTVAPSDRPLQLPKVLGGDSAMRAFQNTATACAPVSHYRAVESVDSSEESFSDSDDDSCLWKRKRQKCFNPPPKPEPFQFGQSSQKPPVAGGKKINNIWGAVLQEQNQDAVATELGILGMEGTIDRSRQSETYNYLLAKKLRKESQEHTKDLDKELDEYMHGGKKMGSKEEENGQGHLKRKRPVKDRLGNRPEMNYKGRYEITAEDSQEKVADEISFRLQEPKKDLIARVVRIIGNKKAIELLMETAEVEQNGGLFIMNGSRRRTPGGVFLNLLKNTPSISEEQIKDIFYIENQKEYENKKAARKRRTQVLGKKMKQAIKSLNFQEDDDTSRETFASDTNEALASLDESQEGHAEAKLEAEEAIEVDHSHDLDIF

SEQ ID NO: 40622 - protein, 381 aa, Homo sapiens
MKTVKEKKECQRLRKSAKTRRVTQRKPSSGPVCWLCLREPGDPEKLGEFLQKDNISVHYFCLILSSKLPQRGQSNRGFHGFLPEDIKKEAARASRKICFVCKKKGAAINCQKDQCLRNFHLPCGQERGCLSQFFGEYKSFCDKHRPTQNIQHGHVGEESCILCCEDLSQQSVENIQSPCCSQAIYHRKCIQKYAHTSAKHFFKCPQCNNRKEFPQEMLRMGIHIPDRDAAWELEPGAFSDLYQRYQHCDAPICLYEQGRDSFEDEGRWCLILCATCGSHGTHRDCSSLRSNSKKWECEECSPAAATDYIPENSGDIPCCSSTFHPEEHFCRDNTLEENPGLSWTDWPEPSLLEKPESSRGRRSYSWRSKGVRITNSCKKSK

SEQ ID NO: 40623 - protein, 342 aa, Homo sapiens
MKTVKEKKECQRLRKSAKTRRVTQRKPSSGPVCWLCLREPGDPEKLGEFLQKDNISVHYFCLILSSKLPQRGQSNRGFHGFLPEDIKKEAARASRKICFVCKKKGAAINCQKDQCLRNFHLPCGQERGCLSQFFGEYKSFCDKHRPTQNIQHGHVGEESCILCCEDLSQQSVENIQSPCCSQAIYHRKCIQKYAHTSAKHFFKCPQCNNRKEFPQEMLRMGIHIPDRRWCLILCATCGSHGTHRDCSSLRSNSKKWECEECSPAAATDYIPENSGDIPCCSSTFHPEEHFCRDNTLEENPGLSWTDWPEPSLLEKPESSRGRRSYSWRSKGVRITNSCKKSK

SEQ ID NO: 40624 - protein, 365 aa, Homo sapiens
MSSSVEQKKGPTRQRKCGFCKSNRDKECGQLLISENQKVAAHHKCMLFSSALVSSHSDNESLGGFSIEDVQKEIKRGTKLMCSLCHCPGATIGCDVKTCHRTYHYHCALHDKAQIREKPSQGIYMVYCRKHKKTAHNSEADLEESFNEHELEPSSPKSKKKSRKGRPRKTNFKGLSEDTRSTSSHGTDEMESSSYRDRSPHRSSPSDTRPKCGFCHVGEEENEARGKLHIFNAKKAAAHYKCMLFSSGTVQLTTTSRAEFGDFDIKTVLQEIKRGKRMKCTLCSQPGATIGCEIKACVKTYHYHCGVQDKAKYIENMSRGIYKLYCKNHSGNDERDEEDEERESKSRGKVEIDQQQLTQQQLNGN

SEQ ID NO: 40625 - protein, 312 aa, Homo sapiens
MSSSVEQKKGPTRQRKCGFCKSNRDKECGQLLISENQKVAAHHKCMLFSSALVSSHSDNESLGGFSIEDVQKEIKRGTKLMCSLCHCPGATIGCDVKTCHRTYHYHCALHDKAQIREKPSQGIYMVYCRKHKKTAHNSEAADLEESFNEHELEPSSPKSKKKSRKGRPRKTNFKGLSEDTRSTSSHGTDEMESSSYRDRSPHRSSPSDTRPKCGFCHVGEEENEARGKLHIFNAKKAAAHYKCMLFSSGTVQLTTTSRAEFGDFDIKTVLQEIKRGKRMVCSFYICYATLHLICCFKFRVHPKFIQSSENLK

SEQ ID NO: 40626 - protein, 364 aa, Homo sapiens
MSSSVEQKKGPTRQRKCGFCKSNRDKECGQLLISENQKVAAHHKCMLFSSALVSSHSDNESLGGFSIEDVQKEIKRGTKLMCSLCHCPGATIGCDVKTCHRTYHYHCALHDKAQIREKPSQGIYMVYCRKHKKTAHNSEDLEESFNEHELEPSSPKSKKKSRKGRPRKTNFKGLSEDTRSTSSHGTDEMESSSYRDRSPHRSSPSDTRPKCGFCHVGEEENEARGKLHIFNAKKAAAHYKCMLFSSGTVQLTTTSRAEFGDFDIKTVLQEIKRGKRMKCTLCSQPGATIGCEIKACVKTYHYHCGVQDKAKYIENMSRGIYKLYCKNHSGNDERDEEDEERESKSRGKVEIDQQQLTQQQLNGN

SEQ ID NO: 40627 - protein, 310 aa, Homo sapiens
MSSSVEQKKGPTRQRKCGFCKSNRDKECGQLLISENQKVAAHHKCMLFSSALVSSHSDNESLGGFSIEDVQKEIKRGTKLMCSLCHCPGATIGCDVKTCHRTYHYHCALHDKAQIREKPSQGIYMVYCRKHKKTAHNSEDLEESFNEHELEPSSPKSKKKSRKGRPRKTNFKGLSEDTRSTSSHGTDEMESSSYRDRSPHRSSPSDTRPKCGFCHVGEEENEARGKLHIFNAKKAAAHYKCMLFSSGTVQLTTTSRAEFGDFDIKTVLQEIKRGKRMVCSFYICYATLHLICCFKFRVHPKFIQSSENLK

SEQ ID NO: 40628 - protein, 331 aa, Homo sapiens
MSSSVEQKKGPTRQRKCGFCKSNRDKECGQLLISENQKVAAHHKCMMCSLCHCPGATIGCDVKTCHRTYHYHCALHDKAQIREKPSQGIYMVYCRKHKKTAHNSEADLEESFNEHELEPSSPKSKKKSRKGRPRKTNFKGLSEDTRSTSSHGTDEMESSSYRDRSPHRSSPSDTRPKCGFCHVGEEENEARGKLHIFNAKKAAAHYKCMLFSSGTVQLTTTSRAEFGDFDIKTVLQEIKRGKRMKCTLCSQPGATIGCEIKACVKTYHYHCGVQDKAKYIENMSRGIYKLYCKNHSGNDERDEEDEERESKSRGKVEIDQQQLTQQQLNGN

SEQ ID NO: 40629 - protein, 517 aa, Homo sapiens
MDPAGAADPSVPPNPLTHLSLQDRSEMQLQSEADRRSLPGTWTRSSPEHTTILRGGVRRCLQQQCEQTVRILHAKVAQKSYGNEKRFFCPPPCVYLSGPGWRVKPGQDQAHQAGETGPTVCGYMGLDSASGSATETQKLNFEQQPDSREFGCAKTLYISDADKRKHFRLVLRLVLRGGRELGTFHSRLIKVISKPSQKKQSLKNTDLCISSGSKVSLFNRLRSQTVSTRYLSVEDGAFVASARQWAAFTLHLADGHSAQGDFPPREGYVRYGSLVQLVCTVTGITLPPMIIRKVAKQCALLDVDEPISQLHKCAFQFPGSPPGGGGTYLCLATEKVVQFQASPCPKEANRALLNDSSCWTIIGTESVEFSFSTSLACTLEPVTPVPLISTLELSGGGDVATLELHGENFHAGLKVWFGDVEAETMYRSPRSLVCVVPDVAAFCSDWRWLRAPITIPMSLVRADGLFYPSAFSFTYTPEYSVRPGHPGVPEPATDADALLESIHQEFTRTNFHLFIQT

SEQ ID NO: 40630 - protein, 516 aa, Homo sapiens
MDPAGAADPSVPPNPLTHLSLQDRSEMQLQSEADRRSLPGTWTRSSPEHTTILRGGVRRCLQQQCEQTVRILHAKVAQKSYGNEKRFFCPPPCVYLSGPGWRVKPGQDQAHQAGETGPTVCGYMGLDSASGSATETQKLNFEQQPDSREFGCAKTLYISDADKRKHFRLVLRLVLRGGRELGTFHSRLIKVISKPSQKKQSLKNTDLCISSGSKVSLFNRLRSQTVSTRYLSVEDGAFVASARQWAAFTLHLADGHSAQGDFPPREGYVRYGSLVQLVCTVTGITLPPMIIRKVAKQCALLDVDEPISQLHKCAFQFPGSPPGGGGTYLCLATEKVVQFQASPCPKEANRALLNDSSCWTIIGTESVEFSFSTSLACTLEPVTPVPLISTLELSGGGDVATLELHGENFHAGLKVWFGDVEAETMYSPRSLVCVVPDVAAFCSDWRWLRAPITIPMSLVRADGLFYPSAFSFTYTPEYSVRPGHPGVPEPATDADALLESIHQEFTRTNFHLFIQT

SEQ ID NO: 40631 - protein, 299 aa, Homo sapiens
MAQNLKDLAGRLPAGPRGMGTALKLLLGAGAVAYGVRESVFTVEGGHRAIFFNRIGGVQQDTILAEGLHFRIPWFQYPIIYDIRARPRKISSPTGSKDLQMVNISLRVLSRPNAQELPSMYQRLGLDYEERVLPSIVNEVLKSVVAKFNASQLITQRAQVSLLIRRELTERAKDFSLILDDVAITELSFSREYTAAVEAKQVAQQEAQRAQFLVEKAKQEQRQKIVQAEGEAEAAKMLGEALSKNPGYIKLRKIRAAQNISKTIATSQNRIYLTADNLVLNLQDESFTRGSDSLIKGKK

SEQ ID NO: 40632 - protein, 261 aa, Homo sapiens
MAQNLKDLAGRLPAGPRGMGTALKLLLGAGAVAYGVRESVFTVEGGHRAIFFNRIGGVQQDTILAEGLHFRIPWFQYPIIYDIRARPRKISSPTGSKDLQMVNISLRVLSRPNAQELPSMYQRLGLDYEERVLPSIVNEVLKSVVAKFNASQLITQRAQVSLLIRRELTERAKDFSLILDDVAITELSFSREYTAAVEAKQVALSKNPGYIKLRKIRAAQNISKTIATSQNRIYLTADNLVLNLQDESFTRGSDSLIKGKK

SEQ ID NO: 40633 - protein, 980 aa, Homo sapiens
MALAVLRVLEPFPTETPPLAVLLPPGGPWPAAELGLVLALRPAGESPAGPALLVAALEGPDAGTEEQGPGPPQLLVSRALLRLLALGSGAWVRARAVRRPPALGWALLGTSLGPGLGPRVGPLLVRRGETLPVPGPRVLETRPALQGLLGPGTRLAVTELRGRARLCPESGDSSRPPPPPVVSSFAVSGTVRRLQGVLGGTGDSLGVSRSCLRGLGLFQGEWVWVAQARESSNTSQPHLARVQVLEPRWDLSDRLGPGSGPLGEPLADGLALVPATLAFNLGCDPLEMGELRIQRYLEGSIAPEDKGSCSLLPGPPFARELHIEIVSSPHYSTNGNYDGVLYRHFQIPRVVQEGDVLCVPTIGQVEILEGSPEKLPRWREMFFKVKKTVGEAPDGPASAYLADTTHTSLYMVGSTLSPVPWLPSEESTLWSSLSPPGLEALVSELCAVLKPRLQPGGALLTGTSSVLLRGPPGCGKTTVVAAACSHLGLHLLKVPCSSLCAESSGAVETKLQAIFSRARRCRPAVLLLTAVDLLGRDRDGLGEDARVMAVLRHLLLNEDPLNSCPPLMVVATTSRAQDLPADVQTAFPHELEVPALSEGQRLSILRALTAHLPLGQEVNLAQLARRCAGFVVGDLYALLTHSSRAACTRIKNSGLAGGLTEEDEGELCAAGFPLLAEDFGQALEQLQTAHSQAVGAPKIPSVSWHDVGGLQEVKKEILETIQLPLEHPELLSLGLRRSGLLLHGPPGTGKTLLAKAVATECSLTFLSVKGPELINMYVGQSEENVREVFARARAAAPCIIFFDELDSLAPSRGRSGDSGGVMDRVVSQLLAELDGLHSTQDVFVIGATNRPDLLDPALLRPGRFDKLVFVGANEDRASQLRVLSAITRKFKLEPSVSLVNVLDCCPPQLTGADLYSLCSDAMTAALKRRVHDLEEGLEPGSSALMLTMEDLLQAAARLQPSVSEQELLRYKRIQRKFAAC

SEQ ID NO: 40634 - protein, 738 aa, Homo sapiens
MALAVLRVLEPFPTETPPLAVLLPPGGPWPAAELGLVLALRPAGESPAGPALLVAALEGPDAGTEEQGPGPPQLLVSRALLRLLALGSGAWVRARAVRRPPALGWALLGTSLGPGLGPRVGPLLVRRGETLPVPGPRVLETRPALQGLLGPGTRLAVTELRGRARLCPESGDSSRPPPPPVVSSFAVSGTVRRLQGVLGGTGDSLGVSRSCLRGLGLFQGEWVWVAQARESSNTSQPHLARVQVLEPRWDLSDRLGPGSGPLGEPLADGLALVPATLAFNLGCDPLEMGELRIQRYLEGSIAPEDKGSCSLLPGPPFARELHIEIVSSPHYSTNGNYDGVLYRHFQIPRVVQEGDVLCVPTIGQVEILEGSPEKLPRWREMFFKVKKTVGEAPDGPASAYLADTTHTSLYMVGSTLSPVPWLPSEESTLWSSLSPPGLEALVSELCAVLKPRLQPGGALLTGTSSVLLRGPPGCGKTTVVAAACSHLGLHLLKVPCSSLCAESSGAVETKLQAIFSRARRCRPAVLLLTAVDLLGRDRDGLGEDARVMAVLRHLLLNEDPLNSCPPLMVVATTSRAQDLPADVQTAFPHELEVPALSEGQRLSILRALTAHLPLGQEVNLAQLARRCAGFVVGDLYALLTHSSRAACTRIKNSGLAGGLTEEDEGELCAAGFPLLAEDFGQALEQLQTAHSQAVGAPKVETKSLECLPGPGLQLHALSSLMNWTLWPQAGGEVEILEE

SEQ ID NO: 40635 - protein, 892 aa, Homo sapiens
MALAVLRVLEPFPTETPPLAVLLPPGGPWPAAELGLVLALRPAGESPAGPALLVAALEGPDAGTEEQGPGPPQLLVSRALLRLLALGSGAWVRARAVRRPPALGWALLGTSLGPGLGPRVGPLLVRRGETLPVPGPRVLETRPALQGLLGPGTRLAVTELRGRARLCPESGDSSRPPPPPVVSSFAVSGTVRRLQGVLGGTGDSLGRYLEGSIAPEDKGSCSLLPGPPFARELHIEIVSSPHYSTNGNYDGVLYRHFQIPRVVQEGDVLCVPTIGQVEILEGSPEKLPRWREMFFKVKKTVGEAPDGPASAYLADTTHTSLYMVGSTLSPVPWLPSEESTLWSSLSPPGLEALVSELCAVLKPRLQPGGALLTGTSSVLLRGPPGCGKTTVVAAACSHLGLHLLKVPCSSLCAESSGAVETKLQAIFSRARRCRPAVLLLTAVDLLGRDRDGLGEDARVMAVLRHLLLNEDPLNSCPPLMVVATTSRAQDLPADVQTAFPHELEVPALSEGQRLSILRALTAHLPLGQEVNLAQLARRCAGFVVGDLYALLTHSSRAACTRIKNSGLAGGLTEEDEGELCAAGFPLLAEDFGQALEQLQTAHSQAVGAPKIPSVSWHDVGGLQEVKKEILETIQLPLEHPELLSLGLRRSGLLLHGPPGTGKTLLAKAVATECSLTFLSVKGPELINMYVGQSEENVREVFARARAAAPCIIFFDELDSLAPSRGRSGDSGGVMDRVVSQLLAELDGLHSTQDVFVIGATNRPDLLDPALLRPGRFDKLVFVGANEDRASQLRVLSAITRKFKLEPSVSLVNVLDCCPPQLTGADLYSLCSDAMTAALKRRVHDLEEGLEPGSSALMLTMEDLLQAAARLQPSVSEQELLRYKRIQRKFAAC

SEQ ID NO: 40636 - protein, 158 aa, Homo sapiens
MSSAIERKSLDPSEEPVDEVLQIPPSLLTCGGCQQNIGDRYFLKAIDQYWHEDCLSCDLCGCRLGEVGRRLYYKLGRKLCRRDYLRLFGQDGLCASCDKRIRAYEMTMRVKDKVYHLECFKCAACQKHFCVGDRYLLINSDIVCEQDIYEWTKINGMI

SEQ ID NO: 40637 - protein, 227 aa, Homo sapiens
MEGSAVTVLERGGASSPAERRSKRRRRSGGDGGGGGGARAPEGVRAPAAGQPRATKGAPPPPGTPPPSPMSSAIERKSLDPSEEPVDEVLQIPPSLLTCGGCQQNIGDRYFLKAIDQYWHEDCLSCDLCGCRLGEVGRRLYYKLGRKLCRRDYLRLFGQDGLCASCDKRIRAYEMTMRVKDKVYHLECFKCAACQKHFCVGDRYLLINSDIVCEQDIYEWTKINGMI

SEQ ID NO: 40638 - protein, 55 aa, Homo sapiens
MSSAIERKSLDPSESLKGSQVRCPVWPKTISDPRCWSHSGEAVPDAWPSLQGTSG

SEQ ID NO: 40639 - protein, 330 aa, Homo sapiens
MPHSVTLRGPSPWGFRLVGGRDFSAPLTISRVHAGSKAALAALCPGDLIQAINGESTELMTHLEAQNRIKGCHDHLTLSVSRPEGRSWPSAPDDSKAQAHRIHIDPEIQDGSPTTSRRPSGTGTGPEDGRPSLGSPYGQPPRFPVPHNGSSEATLPAQMSTLHVSPPPSADPARGLPRSRDCRVDLGSEVYRMLREPAEPVAAEPKQSGSFRYLQGMLEAGEGGDWPGPGGPRNLKPTASKLGAPLSGLQGLPECTRCGHGIVGTIVKARDKLYHPECFMCSDCGLNLKQRGYFFLDERLYCESHAKARVKPPEGYDVVAVYPNAKVELV

SEQ ID NO: 40640 - protein, 246 aa, Homo sapiens
MPHSVTLRGPSPWGFRLVGGRDFSAPLTISRVHAGSKAALAALCPGDLIQAINGESTELMTHLEAQNRIKGCHDHLTLSVSRPEGRSWPSAPDDSKAQAHRIHIDPEIQDGSPTTSRRPSGTGTGPEDGRPSLGSPYGQPPRFPVPHNGSSEATLPAQMSTLHVSPPPSADPARGLPRSRDCRVDLGSEVYRMLREPAEPVAAEPKQSGSFRYLQGMLEAGEGGAPSSRHGTSSTIPSASCAVTAA

SEQ ID NO: 40641 - protein, 390 aa, Homo sapiens
MKETRGYGGDAPFCTRLNHSYTGMWAPERSAEARGNLTRPPGSGEDCGSVSVAFPITMLLTGFVGNALAMLLVSRSYRRRESKRKKSFLLCIGWLALTDLVGQLLTTPVVIVVYLSKQRWEHIDPSGRLCTFFGLTMTVFGLSSLFIASAMAVERALAIRAPHWYASHMKTRATRAVLLGVWLAVLAFALLPVLGVGQYTVQWPGTWCFISTGRGGNGTSSSHNWGNLFFASAFAFLGLLALTVTFSCNLATIKALVSRCRAKATASQSSAQWGRITTETAIQLMGIMCVLSVCWSPLLIMMLKMIFNQTSVEHCKTHTEKQKECNFFLIAVRLASLNQILDPWVYLLLRKILLRKFCQIRYHTNNYASSSTSLPCQCSSTLMWSDHLER

SEQ ID NO: 40642 - protein, 388 aa, Homo sapiens
MKETRGYGGDAPFCTRLNHSYTGMWAPERSAEARGNLTRPPGSGEDCGSVSVAFPITMLLTGFVGNALAMLLVSRSYRRRESKRKKSFLLCIGWLALTDLVGQLLTTPVVIVVYLSKQRWEHIDPSGRLCTFFGLTMTVFGLSSLFIASAMAVERALAIRAPHWYASHMKTRATRAVLLGVWLAVLAFALLPVLGVGQYTVQWPGTWCFISTGRGGNGTSSSHNWGNLFFASAFAFLGLLALTVTFSCNLATIKALVSRCRAKATASQSSAQWGRITTETAIQLMGIMCVLSVCWSPLLIMMLKMIFNQTSVEHCKTHTEKQKECNFFLIAVRLASLNQILDPWVYLLLRKILLRKFCQVANAVSSCSNDGQKGQPISLSNEIIQTEA

SEQ ID NO: 40643 - protein, 365 aa, Homo sapiens
MKETRGYGGDAPFCTRLNHSYTGMWAPERSAEARGNLTRPPGSGEDCGSVSVAFPITMLLTGFVGNALAMLLVSRSYRRRESKRKKSFLLCIGWLALTDLVGQLLTTPVVIVVYLSKQRWEHIDPSGRLCTFFGLTMTVFGLSSLFIASAMAVERALAIRAPHWYASHMKTRATRAVLLGVWLAVLAFALLPVLGVGQYTVQWPGTWCFISTGRGGNGTSSSHNWGNLFFASAFAFLGLLALTVTFSCNLATIKALVSRCRAKATASQSSAQWGRITTETAIQLMGIMCVLSVCWSPLLIMMLKMIFNQTSVEHCKTHTEKQKECNFFLIAVRLASLNQILDPWVYLLLRKILLRKFCQEEFWGN

SEQ ID NO: 40644 - protein, 374 aa, Homo sapiens
MKETRGYGGDAPFCTRLNHSYTGMWAPERSAEARGNLTRPPGSGEDCGSVSVAFPITMLLTGFVGNALAMLLVSRSYRRRESKRKKSFLLCIGWLALTDLVGQLLTTPVVIVVYLSKQRWEHIDPSGRLCTFFGLTMTVFGLSSLFIASAMAVERALAIRAPHWYASHMKTRATRAVLLGVWLAVLAFALLPVLGVGQYTVQWPGTWCFISTGRGGNGTSSSHNWGNLFFASAFAFLGLLALTVTFSCNLATIKALVSRCRAKATASQSSAQWGRITTETAIQLMGIMCVLSVCWSPLLIMMLKMIFNQTSVEHCKTHTEKQKECNFFLIAVRLASLNQILDPWVYLLLRKILLRKFCQMRKRRLREQEEFWGN

SEQ ID NO: 40645 - protein, 418 aa, Homo sapiens
MKETRGYGGDAPFCTRLNHSYTGMWAPERSAEARGNLTRPPGSGEDCGSVSVAFPITMLLTGFVGNALAMLLVSRSYRRRESKRKKSFLLCIGWLALTDLVGQLLTTPVVIVVYLSKQRWEHIDPSGRLCTFFGLTMTVFGLSSLFIASAMAVERALAIRAPHWYASHMKTRATRAVLLGVWLAVLAFALLPVLGVGQYTVQWPGTWCFISTGRGGNGTSSSHNWGNLFFASAFAFLGLLALTVTFSCNLATIKALVSRCRAKATASQSSAQWGRITTETAIQLMGIMCVLSVCWSPLLIMMLKMIFNQTSVEHCKTHTEKQKECNFFLIAVRLASLNQILDPWVYLLLRKILLRKFCQMRKRRLREQLICSLQNSQIQRATAHCGQVQTYRVLNREEMEVLVSSINVYTRISTVKTE

SEQ ID NO: 40646 - protein, 425 aa, Homo sapiens
MKETRGYGGDAPFCTRLNHSYTGMWAPERSAEARGNLTRPPGSGEDCGSVSVAFPITMLLTGFVGNALAMLLVSRSYRRRESKRKKSFLLCIGWLALTDLVGQLLTTPVVIVVYLSKQRWEHIDPSGRLCTFFGLTMTVFGLSSLFIASAMAVERALAIRAPHWYASHMKTRATRAVLLGVWLAVLAFALLPVLGVGQYTVQWPGTWCFISTGRGGNGTSSSHNWGNLFFASAFAFLGLLALTVTFSCNLATIKALVSRCRAKATASQSSAQWGRITTETAIQLMGIMCVLSVCWSPLLIMMLKMIFNQTSVEHCKTHTEKQKECNFFLIAVRLASLNQILDPWVYLLLRKILLRKFCQMRKRRLREQAPLLPTPTVIDPSRFCAQPFRWFLDLSFPAMSSSHPQLPLTLASFKLLREPCSVQLS

SEQ ID NO: 40647 - protein, 393 aa, Homo sapiens
MKETRGYGGDAPFCTRLNHSYTGMWAPERSAEARGNLTRPPGSGEDCGSVSVAFPITMLLTGFVGNALAMLLVSRSYRRRESKRKKSFLLCIGWLALTDLVGQLLTTPVVIVVYLSKQRWEHIDPSGRLCTFFGLTMTVFGLSSLFIASAMAVERALAIRAPHWYASHMKTRATRAVLLGVWLAVLAFALLPVLGVGQYTVQWPGTWCFISTGRGGNGTSSSHNWGNLFFASAFAFLGLLALTVTFSCNLATIKALVSRCRAKATASQSSAQWGRITTETAIQLMGIMCVLSVCWSPLLIMMLKMIFNQTSVEHCKTHTEKQKECNFFLIAVRLASLNQILDPWVYLLLRKILLRKFCQEMGPDGRCFCHAWRQVPRTWCSSHDREPCSVQLS

SEQ ID NO: 40648 - protein, 394 aa, Homo sapiens
MKETRGYGGDAPFCTRLNHSYTGMWAPERSAEARGNLTRPPGSGEDCGSVSVAFPITMLLTGFVGNALAMLLVSRSYRRRESKRKKSFLLCIGWLALTDLVGQLLTTPVVIVVYLSKQRWEHIDPSGRLCTFFGLTMTVFGLSSLFIASAMAVERALAIRAPHWYASHMKTRATRAVLLGVWLAVLAFALLPVLGVGQYTVQWPGTWCFISTGRGGNGTSSSHNWGNLFFASAFAFLGLLALTVTFSCNLATIKALVSRCRAKATASQSSAQWGRITTETAIQLMGIMCVLSVCWSPLLIMMLKMIFNQTSVEHCKTHTEKQKECNFFLIAVRLASLNQILDPWVYLLLRKILLRKFCQVANAVSSCSNDGQKGQPISLSNEIIQTEAEEFWGN

SEQ ID NO: 40649 - protein, 403 aa, Homo sapiens
MKETRGYGGDAPFCTRLNHSYTGMWAPERSAEARGNLTRPPGSGEDCGSVSVAFPITMLLTGFVGNALAMLLVSRSYRRRESKRKKSFLLCIGWLALTDLVGQLLTTPVVIVVYLSKQRWEHIDPSGRLCTFFGLTMTVFGLSSLFIASAMAVERALAIRAPHWYASHMKTRATRAVLLGVWLAVLAFALLPVLGVGQYTVQWPGTWCFISTGRGGNGTSSSHNWGNLFFASAFAFLGLLALTVTFSCNLATIKALVSRCRAKATASQSSAQWGRITTETAIQLMGIMCVLSVCWSPLLIMMLKMIFNQTSVEHCKTHTEKQKECNFFLIAVRLASLNQILDPWVYLLLRKILLRKFCQVANAVSSCSNDGQKGQPISLSNEIIQTEAMRKRRLREQEEFWGN

SEQ ID NO: 40650 - protein, 431 aa, Homo sapiens
MKETRGYGGDAPFCTRLNHSYTGMWAPERSAEARGNLTRPPGSGEDCGSVSVAFPITMLLTGFVGNALAMLLVSRSYRRRESKRKKSFLLCIGWLALTDLVGQLLTTPVVIVVYLSKQRWEHIDPSGRLCTFFGLTMTVFGLSSLFIASAMAVERALAIRAPHWYASHMKTRATRAVLLGVWLAVLAFALLPVLGVGQYTVQWPGTWCFISTGRGGNGTSSSHNWGNLFFASAFAFLGLLALTVTFSCNLATIKALVSRCRAKATASQSSAQWGRITTETAIQLMGIMCVLSVCWSPLLIMMLKMIFNQTSVEHCKTHTEKQKECNFFLIAVRLASLNQILDPWVYLLLRKILLRKFCQVANAVSSCSNDGQKGQPISLSNEIIQTEAMRKRRLREQEMGPDGRCFCHAWRQVPRTWCSSHDREPCSVQLS

SEQ ID NO: 40651 - protein, 422 aa, Homo sapiens
MKETRGYGGDAPFCTRLNHSYTGMWAPERSAEARGNLTRPPGSGEDCGSVSVAFPITMLLTGFVGNALAMLLVSRSYRRRESKRKKSFLLCIGWLALTDLVGQLLTTPVVIVVYLSKQRWEHIDPSGRLCTFFGLTMTVFGLSSLFIASAMAVERALAIRAPHWYASHMKTRATRAVLLGVWLAVLAFALLPVLGVGQYTVQWPGTWCFISTGRGGNGTSSSHNWGNLFFASAFAFLGLLALTVTFSCNLATIKALVSRCRAKATASQSSAQWGRITTETAIQLMGIMCVLSVCWSPLLIMMLKMIFNQTSVEHCKTHTEKQKECNFFLIAVRLASLNQILDPWVYLLLRKILLRKFCQVANAVSSCSNDGQKGQPISLSNEIIQTEAMRKRRLREQLICSLRTLRYRGQLHIVGKYKPIVC

SEQ ID NO: 40652 - protein, 429 aa, Homo sapiens
MKETRGYGGDAPFCTRLNHSYTGMWAPERSAEARGNLTRPPGSGEDCGSVSVAFPITMLLTGFVGNALAMLLVSRSYRRRESKRKKSFLLCIGWLALTDLVGQLLTTPVVIVVYLSKQRWEHIDPSGRLCTFFGLTMTVFGLSSLFIASAMAVERALAIRAPHWYASHMKTRATRAVLLGVWLAVLAFALLPVLGVGQYTVQWPGTWCFISTGRGGNGTSSSHNWGNLFFASAFAFLGLLALTVTFSCNLATIKALVSRCRAKATASQSSAQWGRITTETAIQLMGIMCVLSVCWSPLLIMMLKMIFNQTSVEHCKTHTEKQKECNFFLIAVRLASLNQILDPWVYLLLRKILLRKFCQMRKRRLREQFWRPASSGSGCQQIRCLMESCSLTQTGVQWSDFRSLQPSPPPLTAIFASWVQVILLPQPPK

SEQ ID NO: 40653 - protein, 815 aa, Homo sapiens
MEVRASLQKVSGSSDSVATMNSEEFVLVPQYADDNSTKHEEKPQLKIVSNGDEQLEKAMEEILRDSEKRPSSLLVDCQSSSEISDHSFGDIPASQTNKPSLQLILDPSNTEISTPRPSSPGGLPEEDSVLFNKLTYLGCMKVSSPRNEVEALRAMATMKSSSQYPFPVTLYVPNVPEGSVRIIDQSSNVEIASFPIYKVLFCARGHDGTTESNCFAFTESSHGSEEFQIHVFSCEIKEAVSRILYSFCTAFKRSSRQVSDVKDSVIPTPDSDVFTFSVSLEVKEDDGKGNFSPVPKDRDKFYFKLKQGIEKKVVITVQQLSNKELAIERCFGMLLSPGRNVKNSDMHLLDMESMGKSYDGRAYVITGMWNPNAPVFLALNEETPKDKQVYMTVAVDMVVTEVVEPVRFLLETVVRVYPANERFWYFSRKTFTETFFMRLKQSEGKGHTNAGDAIYEVVSLQRESDKEEPVTPTSGGGPMSPQDDEAEEESDNELSSGTGDVSKDCPEKILYSWGELLGKWHSNLGARPKGLSTLVKSGVPEALRAEVWQLLAGCHDNQAMLDRYRILITKDSAQESVITRDIHRTFPAHDYFKDTGGDGQESLYKICKAYSVYDEDIGYCQGQSFLAAVLLLHMPEEQAFCVLVKIMYDYGLRDLYRNNFEDLHCKFYQLERLMQEQLPDLHSHFSDLNLEAHMYASQWFLTLFTAKFPLCMVFHIIDLLLCEGLNIIFHVALALLKTSKEDLLQADFEGALKFFRVQLPKRYRAEENARRLMEQACNIKVPTKKLKKYEKEYQTMRESQLQQEDPMDRYKFVYL

SEQ ID NO: 40654 - protein, 605 aa, Homo sapiens
MEVRASLQKIVSNGDEQLEKAMEEILRDSEKRPSSLLVDCQSSSEISDHSFGDIPASQTNKPSLQLILDPSNTEISTPRPSSPGGLPEEDSVLFNKLTYLGCMKVSSPRNEVEALRAMATMKSSSQYPFPVTLYVPNVPEGSVRIIDQSSNVEIASFPIYKVLFCARGHDGTTESNCFAFTESSHGSEEFQIHVFSCEIKEAVSRILYSFCTAFKRSSRQVSDVKDSVIPTPDSDVFTFSVSLEVKEDDGKGNFSPVPKDRDKFYFKLKQGIEKKVVITVQQLSNKELAIERCFGMLLSPGRNVKNSDMHLLDMESMGKSYDGRAYVITGMWNPNAPVFLALNEETPKDKQVYMTVAVDMVVTEVVEPVRFLLETVVRVYPANERFWYFSRKTFTETFFMRLKQSEGKGHTNAGDAIYEVVSLQRESDKEEPVTPTSGGGPMSPQDDEAEEESDNELSSGTGDVSKDCPEKILYSWGELLGKWHSNLGARPKGLSTLVKSGVPEALRAEVWQLLAGCHDNQAMLDRYRILITKQQMKFSLTPRQTIHLVKYEGSMKVSMTPCNQLQFDIRLDVLITYTFCFSSFPEPELYKYVLKHQLIKRLNAC

SEQ ID NO: 40655 - protein, 827 aa, Homo sapiens
MEVRASLQKVSGSSDSVATMNSEEFVLVPQYADDNSTKHEEKPQLKIVSNGDEQLEKAMEEILRDSEKRPSSLLVDCQSSSEISDHSFGDIPASQTNKPSLQLILDPSNTEISTPRPSSPGGLPEEDSVLFNKLTYLGCMKVSSPRNEVEALRAMATMKSSSQYPFPVTLYVPNVPEGSVRIIDQSSNVEIASFPIYKVLFCARGHDGTTESNCFAFTESSHGSEEFQIHVFSCEIKEAVSRILYSFCTAFKRSSRQVSDVKDSVIPTPDSDVFTFSVSLEVKEDDGKGNFRLLVIPIPFEYFSPVPKDRDKFYFKLKQGIEKKVVITVQQLSNKELAIERCFGMLLSPGRNVKNSDMHLLDMESMGKSYDGRAYVITGMWNPNAPVFLALNEETPKDKQVYMTVAVDMVVTEVVEPVRFLLETVVRVYPANERFWYFSRKTFTETFFMRLKQSEGKGHTNAGDAIYEVVSLQRESDKEEPVTPTSGGGPMSPQDDEAEEESDNELSSGTGDVSKDCPEKILYSWGELLGKWHSNLGARPKGLSTLVKSGVPEALRAEVWQLLAGCHDNQAMLDRYRILITKDSAQESVITRDIHRTFPAHDYFKDTGGDGQESLYKICKAYSVYDEDIGYCQGQSFLAAVLLLHMPEEQAFCVLVKIMYDYGLRDLYRNNFEDLHCKFYQLERLMQEQLPDLHSHFSDLNLEAHMYASQWFLTLFTAKFPLCMVFHIIDLLLCEGLNIIFHVALALLKTSKEDLLQADFEGALKFFRVQLPKRYRAEENARRLMEQACNIKVPTKKLKKYEKEYQTMRESQLQQEDPMDRYKFVYL

SEQ ID NO: 40656 - protein, 800 aa, Homo sapiens
MEVRASLQKVSGSSDSVATMNSEEFVLVPQYADDNSTKHEEKPQLKIVSNGDEQLEKAMEEILRDSEKRPSSLLVDCQSSSEISDHSFGDIPASQTNKPSLQLILDPSNTEISTPRPSSPGGLPEEDSVLFNKLTYLGCMKVSSPRNEVEALRAMATMKSSSQYPFPVTLYVPNVPEGSVRIIDQSSNVEIASFPIYKVLFCARGHDGTTESNCFAFTESSHGSEEFQIHVFSCEIKEAVSRILYSFCTAFKRSSRQVSDVKDSVIPTPDSDVFTFSVSLEVKEDDGKGNFSPVPKDRDKFYFKLKQGIEKKVVITVQQLSNKELAIERCFGMLLSPGRNVKNSDMHLLDMESMGKSYDGRAYVITGMWNPNAPVFLALNEETPKDKQVYMTVAVDMVVTEVVEPVRFLLETVVRVYPANERFWYFSRKTFTETFFMRLKQSEGKGHTNAGDAIYEVVSLQRESDKEEPVTPTSGGGELSSGTGDVSKDCPEKILYSWGELLGKWHSNLGARPKGLSTLVKSGVPEALRAEVWQLLAGCHDNQAMLDRYRILITKDSAQESVITRDIHRTFPAHDYFKDTGGDGQESLYKICKAYSVYDEDIGYCQGQSFLAAVLLLHMPEEQAFCVLVKIMYDYGLRDLYRNNFEDLHCKFYQLERLMQEQLPDLHSHFSDLNLEAHMYASQWFLTLFTAKFPLCMVFHIIDLLLCEGLNIIFHVALALLKTSKEDLLQADFEGALKFFRVQLPKRYRAEENARRLMEQACNIKVPTKKLKKYEKEYQTMRESQLQQEDPMDRYKFVYL

SEQ ID NO: 40657 - protein, 378 aa, Homo sapiens
MKEQLPDLHSHFSDLNLEAHMYASQWFLTLFTAKFPLCMVFHIIDLLLCEGLNIIFHVALALLKTSKEDLLQADFEGALKFFRVQLPKRYRAEENARRLMEQACNIKVPTKKLKKYEKEYQTMRESQLQQEDPMDRYKRENRRLQEASMRLEQENDDLAHELVTSKIALRNDLDQAEDKADVLNKELLLTKQRLVETEEEKRKQEEETAQLKEVFRKQLEKAEYEIKKTTAIIAEYKQICSQLSTRLEKQQAASKEELEVVKGKMMACKHCSDIFSKEGALKLAATGREDQGIETDDEKDSLKKQLREMELELAQTKLQLVEAKCKIQELEHQRGALMNEIQAAKNSWFSKTLNSIKTATGTQPLQPAPVTQPPKEST

SEQ ID NO: 40658 - protein, 377 aa, Homo sapiens
MEQLPDLHSHFSDLNLEAHMYASQWFLTLFTAKFPLCMVFHIIDLLLCEGLNIIFHVALALLKTSKEDLLQADFEGALKFFRVQLPKRYRAEENARRLMEQACNIKVPTKKLKKYEKEYQTMRESQLQQEDPMDRYKRENRRLQEASMRLEQENDDLAHELVTSKIALRNDLDQAEDKADVLNKELLLTKQRLVETEEEKRKQEEETAQLKEVFRKQLEKAEYEIKKTTAIIAEYKQICSQLSTRLEKQQAASKEELEVVKGKMMACKHCSDIFSKEGALKLAATGREDQGIETDDEKDSLKKQLREMELELAQTKLQLVEAKCKIQELEHQRGALMNEIQAAKNSWFSKTLNSIKTATGTQPLQPAPVTQPPKEST

SEQ ID NO: 40659 - protein, 358 aa, Homo sapiens
MYASQWFLTLFTAKFPLCMVFHIIDLLLCEGLNIIFHVALALLKTSKEDLLQADFEGALKFFRVQLPKRYRAEENARRLMEQACNIKVPTKKLKKYEKEYQTMRESQLQQEDPMDRYKRENRRLQEASMRLEQENDDLAHELVTSKIALRNDLDQAEDKADVLNKELLLTKQRLVETEEEKRKQEEETAQLKEVFRKQLEKAEYEIKKTTAIIAEYKQICSQLSTRLEKQQAASKEELEVVKGKMMACKHCSDIFSKEGALKLAATGREDQGIETDDEKDSLKKQLREMELELAQTKLQLVEAKCKIQELEHQRGALMNEIQAAKNSWFSKTLNSIKTATGTQPLQPAPVTQPPKEST

SEQ ID NO: 40660 - protein, 370 aa, Homo sapiens
MEEGVPCPAPAAKLTPPVKKSQDMHDERSKLVNEYACRVLELLGMGHRLFVPRLLATSKEDLLQADFEGALKFFRVQLPKRYRAEENARRLMEQACNIKVPTKKLKKYEKEYQTMRESQLQQEDPMDRYKRENRRLQEASMRLEQENDDLAHELVTSKIALRNDLDQAEDKADVLNKELLLTKQRLVETEEEKRKQEEETAQLKEVFRKQLEKAEYEIKKTTAIIAEYKQICSQLSTRLEKQQAASKEELEVVKGKMMACKHCSDIFSKEGALKLAATGREDQGIETDDEKDSLKKQLREMELELAQTKLQLVEAKCKIQELEHQRGALMNEIQAAKNSWFSKTLNSIKTATGTQPLQPAPVTQPPKEST

SEQ ID NO: 40661 - protein, 72 aa, Homo sapiens
MMEEISIMVAYDAHVFSQLHDEDFLTSLVAISKPRSMVPTKKLKKYEKEYQTMRESQLQQEDPMDRYKFVYL

SEQ ID NO: 40662 - protein, 680 aa, Homo sapiens
MELQTLQEALKVEIQVHQKLVAQMKQDPQNADLKKQLHELQAKITALSEKQKRVVEQLRKNLIVKQEQPDKFQIQPLPQSENKLQTAQQQPLQQLQQQQQYHHHHAQQSAAASPNLTASQKTVTTASMITTKTLPLVLKAATATMPASVVGQRPTIAMVTAINSQKAVLSTDVQNTPVNLQTSSKVTGPGAEAVQIVAKNTVTLVQATPPQPIKVPQFIPPPRLTPRPNFLPQVRPKPVAQNNIPIAPAPPPMLAAPQLIQRPVMLTKFTPTTLPTSQNSIHPVRVVNGQTATIAKTFPMAQLTSIVIATPGTRLAGPQTVQLSKPSLEKQTVKSHTETDEKQTESRTITPPAAPKPKREENPQKLAFMVSLGLVTHDHLEEIQSKRQERKRRTTANPVYSGAVFEPERKKSAVTYLNSTMHPGTRKRGRPPKYNAVLGFGALTPTSPQSSHPDSPENEKTETTFTFPAPVQPVSLPSPTSTDGDIHEDFCSVCRKSGQLLMCDTCSRVYHLDCLDPPLKTIPKGMWICPRCQDQMLKKEEAIPWPGTLAIVHSYIAYKAAKEEEKQKLLKWSSDLKQEREQLEQKVKQLSNSISKCMEMKNTILARQKEMHSSLEKVKQLIRLIHGIDLSKPVDSEATVGAISNGPDCTPPANAATSTPAPSPSSQSCTANCNQGEETK

SEQ ID NO: 40663 - protein, 634 aa, Homo sapiens
MELQTLQEALKVEIQVHQKLVAQMKQDPQNADLKKQLHELQAKITALSEKQKRVVEQLRKNLIVKQEQPDKFQIQPLPQSENKLQTAQQQPLQQLQQQQQYHHHHAQQSAAASPNLTASQKTVTTASMITTKTLPLVLKAATATMPASVVGQRPTIAMVTAINSQKAVLSTDVQNTPVNLQTSSKVTGPGAEAVQIVAKNTVTLQVQATPPQPIKVPQFIPPPRLTPRPNFLPQVRPKPVAQNNIPIAPAPPPMLAAPQLIQRPVMLTKFTPTTLPTSQNSIHPVRVVNGQTATIAKTFPMAQLTSIVIATPGTRLAGPQTVQLSKPSLEKQTVKSHTETDEKQTESRTITPPAAPKPKREENPQKLAFMVSLGLVTHDHLEEIQSKRQERKRRTTANPVYSGAVFEPERKKSAVTYLNSTMHPGTRKRANEEHWPKGDIHEDFCSVCRKSGQLLMCDTCSRVYHLDCLDPPLKTIPKGMWICPRCQDQMLKKEEAIPWPGTLAIVHSYIAYKAAKEEEKQKLLKWSSDLKQEREQLEQKVKQLSNSISKCMEMKNTILARQKEMHSSLEKVKQLIRLIHGIDLSKPVDSEATVGAISNGPDCTPPANAATSTPAPSPSSQSCTANCNQGEETK

SEQ ID NO: 40664 - protein, 681 aa, Homo sapiens
MELQTLQEALKVEIQVHQKLVAQMKQDPQNADLKKQLHELQAKITALSEKQKRVVEQLRKNLIVKQEQPDKFQIQPLPQSENKLQTAQQQPLQQLQQQQQYHHHHAQQSAAASPNLTASQKTVTTASMITTKTLPLVLKAATATMPASVVGQRPTIAMVTAINSQKAVLSTDVQNTPVNLQTSSKVTGPGAEAVQIVAKNTVTLQVQATPPQPIKVPQFIPPPRLTPRPNFLPQVRPKPVAQNNIPIAPAPPPMLAAPQLIQRPVMLTKFTPTTLPTSQNSIHPVRVVNGQTATIAKTFPMAQLTSIVIATPGTRLAGPQTVQLSKPSLEKQTVKSHTETDEKQTESRTITPPAAPKPKREENPQKLAFMVSLGLVTHDHLEEIQSKRQERKRRTTANPVYSGAVFEPERKKSAVTYLNSTMHPGTRKRGRPPKYNAVLGFGALTPTSPQSSHPDSPENEKTETTFTFPAPVQPVSLPSPTSTDGDIHEDFCSVCRKSGQLLMCDTCSRVYHLDCLDPPLKTIPKGMWICPRCQDQMLKKEEAIPWPGTLAIVHSYIAYKAAKEEEKQKLLKWSSDLKQEREQLEQKVKQLSNSISKCMEMKNTILARQKEMHSSLEKVKQLIRLIHGIDLSKPVDSEATVGAISNGPDCTPPANAATSTPAPSPSSQSCTANCNQGEETK

SEQ ID NO: 40665 - protein, 1037 aa, Homo sapiens
MSPPLCPLLLLAVGLRLAGTLNPSDPNTCSFWESFTTTTKESHSRPFSLLPSEPCERPWEGPHTCPQPTVVYRTVYRQVVKTDHRQRLQCCHGFYESRGFCVPLCAQECVHGRCVAPNQCQCVPGWRGDDCSSECAPGMWGPQCDKPCSCGNNSSCDPKSGVCSCPSGLQPPNCLQPCTPGYYGPACQFRCQCHGAPCDPQTGACFCPAERTGPSCDVSCSQGTSGFFCPSTHSCQNGGVFQTPQGSCSCPPGWMGTICSLPCPEGFHGPNCSQECRCHNGGLCDRFTGQCRCAPGYTGDRCREECPVGRFGQDCAETCDCAPDARCFPANGACLCEHGFTGDRCTDRLCPDGFYGLSCQAPCTCDREHSLSCHPMNGECSCLPGWAGLHCNESCPQDTHGPGCQEHCLCLHGGVCQATSGLCQCAPGYTGPHCASLCPPDTYGVNCSARCSCENAIACSPIDGECVCKEGWQRGNCSVPCPPGTWGFSCNASCQCAHEAVCSPQTGACTCTPGWHGAHCQLPCPKGQFGEGCASRCDCDHSDGCDPVHGRCQCQAGWMGARCHLSCPEGLWGVNCSNTCTCKNGGTCLPENGNCVCAPGFRGPSCQRSCQPGRYGKRCVPCKCANHSFCHPSNGTCYCLAGWTGPDCSQPCPPGHWGENCAQTCQCHHGGTCHPQDGSCICPLGWTGHHCLEGCPLGTFGANCSQPCQCGPGEKCHPETGACVCPPGHSGAPCRIGIQEPFTVMPTTPVAYNSLGAVIGIAVLGSLVVALVALFIGYRHWQKGKEHHHLAVAYSSGRLDGSEYVMPDVPPSYSHYYSNPSYHTLSQCSPNPPPPNKVPGPLFASLQNPERPGGAQGHDNHTTLPADWKHRREPPPGPLDRGSSRLDRSYSYSYSNGPGPFYNKGLISEEELGASVASLSSENPYATIRDLPSLPGGPRESSYMEMKGPPSGSPPRQPPQFWDSQRRRQPQPQRDSGTYEQPSPLIHDRDSVGSQPPLPPGLPPGHYDSPKNSHIPGHYDLPPVRHPPSPPLRRQDR

SEQ ID NO: 40666 - protein, 150 aa, Homo sapiens
MSAKDERAREILRGFKLNWMNLRDAETGKILWQGTEDLSVPGVEHEARVPKKILKCKAVSRELNFSSTEQMEKFRLEQKVYFKGQCLEEWFFEFGFVIPNSTNTWQSLIEAAPESQMMPASVLTGNVIIETKFFDDDLLVSTSRVRLFYV

SEQ ID NO: 40667 - protein, 436 aa, Homo sapiens
MRLARLLRGAALAGPGPGLRAAGFSRSFSSDSGSSPASERGVPGQVDFYARFSPSPLSMKQFLDFGSVNACEKTSFMFLRQELPVRLANIMKEISLLPDNLLRTPSVQLVQSWYIQSLQELLDFKDKSAEDAKAIYDFTDTVIRIRNRHNDVIPTMAQGVIEYKESFGVDPVTSQNVQYFLDRFYMSRISIRMLLNQHSLLFGGKGKGSPSHRKHIGSINPNCNVLEVIKDGYENARRLCDLYYINSPELELEELNAKSPGQPIQVVYVPSHLYHMVFELFKNAMRATMEHHANRGVYPPIQVHVTLGNEDLTVKMSDRGGGVPLRKIDRLFNYMYSTAPRPRVETSRAVPLAGFGYGLPISRLYAQYFQGDLKLYSLEGYGTDAVIYIKALSTDSIERLPVYNKAAWKHYNTNHEADDWCVPSREPKDMTTFRSA

SEQ ID NO: 40668 - protein, 456 aa, Homo sapiens
MRLARLLRGAALAGPGPGLRAAGFSRSFSSDSGSSPASERGVPGQVDFYARFSPSPLSMKQFLDFGSVNACEKTSFMFLRQELPVRLANIMKEISLLPDNLLRTPSVQLVQSWYIQSLQELLDFKDKSAEDAKAIYERPRRTWLQVSSLCCMACKMIFTDTVIRIRNRHNDVIPTMAQGVIEYKESFGVDPVTSQNVQYFLDRFYMSRISIRMLLNQHSLLFGGKGKGSPSHRKHIGSINPNCNVLEVIKDGYENARRLCDLYYINSPELELEELNAKSPGQPIQVVYVPSHLYHMVFELFKNAMRATMEHHANRGVYPPIQVHVTLGNEDLTVKMSDRGGGVPLRKIDRLFNYMYSTAPRPRVETSRAVPLAGFGYGLPISRLYAQYFQGDLKLYSLEGYGTDAVIYIKALSTDSIERLPVYNKAAWKHYNTNHEADDWCVPSREPKDMTTFRSA

SEQ ID NO: 40669 - protein, 407 aa, Homo sapiens
MRWVWALLKNASLAGAPKYIEHFSKFSPSPLSMKQFLDFGSSNACEKTSFTFLRQELPVRLANIMKEINLLPDRVLSTPSVQLVQSWYVQSLLDIMEFLDKDPEDHRTLSQFTDALVTIRNRHNDVVPTMAQGVLEYKDTYGDDPVSNQNIQYFLDRFYLSRISIRMLINQHTLIFDGSTNPAHPKHIGSIDPNCNVSEVVKDAYDMAKLLCDKYYMASPDLEIQEINAANSKQPIHMVYVPSHLYHMLFELFKNAMRATVESHESSLILPPIKVMVALGEEDLSIKMSDRGGGVPLRKIERLFSYMYSTAPTPQPGTGGTPLAGFGYGLPISRLYAKYFQGDLQLFSMEGFGTDAVIYLKALSTDSVERLPVYNKSAWRHYQTIQEAGDWCVPSTEPKNTSTYRVS

SEQ ID NO: 40670 - protein, 343 aa, Homo sapiens
MKEINLLPDRVLSTPSVQLVQSWYVQSLLDIMEFLDKDPEDHRTLSQFTDALVTIRNRHNDVVPTMAQGVLEYKDTYGDDPVSNQNIQYFLDRFYLSRISIRMLINQHTLIFDGSTNPAHPKHIGSIDPNCNVSEVVKDAYDMAKLLCDKYYMASPDLEIQEINAANSKQPIHMVYVPSHLYHMLFELFKNAMRATVESHESSLILPPIKVMVALGEEDLSIKMSDRGGGVPLRKIERLFSYMYSTAPTPQPGTGGTPLAGFGYGLPISRLYAKYFQGDLQLFSMEGFGTDAVIYLKALSTDSVERLPVYNKSAWRHYQTIQEAGDWCVPSTEPKNTSTYRVS

SEQ ID NO: 40671 - protein, 194 aa, Homo sapiens
MKIWTSEHVFDHPWETVTTAAMQKYPNPMNPSVVGVDVLDRHIDPSGKLHSHRLLSTEWGLPSIVKSLIGAARTKTYVQEHSVVDPVEKTMELKSTNISFTNMVSVDERLIYKPHPQDPEKTVLTQEAIITVKGVSLSSYLEGLMASTISSNASKGREAMEWVIHKLNAEIEELTASARGTIRTPMAAAAFAEK

SEQ ID NO: 40672 - protein, 164 aa, Homo sapiens
MKIWTSEHVFDHPWETVTTAAMQKYPNPMNPSVVGVDVLDRHIDPSGKLHSHRLLSTEWGLPSIVKSISFTNMVSVDERLIYKPHPQDPEKTVLTQEAIITVKGVSLSSYLEGLMASTISSNASKGREAMEWVIHKLNAEIEELTASARGTIRTPMAAAAFAEK

SEQ ID NO: 40673 - protein, 207 aa, Homo sapiens
MAKTYDYLFKLLLIGDSGVGKTCLLFRFSEDAFNTTFISTIGIDFKIRTIELDGKKIKLQIWDTAGQERFRTITTAYYRGAMGIMLVYDITNEKSFDNIKNWIRNIEEHASSDVERMILGNKCDMNDKRQVSKERGEKLAIDYGIKFLETSAKSSANVEEAFFTLARDIMTKLNRKMNDSNSAGAGGPVKITENRSKKTSFFRCSLL

SEQ ID NO: 40674 - protein, 134 aa, Homo sapiens
MWGRRRKLRRLNDVTISTCHVSAKVGTRLVFDHDGKIIQKTPYPHPRGTTVSVKQLFSTLPVRHKEFQRNIKKKRACFPFAFCRDCQFLEGSPAMLPVQPAKLTPRSTPPHPCSLEDNVITVFSSVKNGPGSSR

SEQ ID NO: 40675 - protein, 297 aa, Homo sapiens
MGESSRKPPTPTPEGPTVSVKQLFSTLPVRHKEFQRNIKKKRACFPFAFCRDCQFLEGSPAMLPVQPAKLTEPAKAIKPIDRKSVHQICSGPVVLSLSTAVKKIVGNSLDAGATNIDLKLKDYGMDLIEVSGNGCGVEEENFEGLSLSALKHHTSKIREFADLTRVETFGFQGKALSSLCALSDVTISTCHVSAKVGTRLVFDHDGKIIKKTPYPHPRGTTVSVKQLFSTLPVRHKEFQRNIKKKRACFPFAFCRDCQFLEGSPAMLPVQPAKLTVTGELRACRSWKTREGITEAVG

SEQ ID NO: 40676 - protein, 502 aa, Homo sapiens
MFGTLLLYCFFLATVPALAETGGERQLSPEKSEIWGPGLKADVVLPARYFYIQAVDTSGNKFTSSPGEKVFQVKVSAPEEQFTRVGVQVLDRKDGSFIVRYRMYASYKNLKVEIKFQGQHVAKSPYILKGPVYHENCDCPLQDSAAWLREMNCPETIAQIQRDLAHFPAVDPEKIAVEIPKRFGQRQSLCHYTLKDNKVYIKTHGEHVGFRIFMDAILLSLTRKVKMPDVELFVNLGDWPLEKKKSNSNIHPIFSWCGSTDSKDIVMPTYDLTDSVLETMGRVSLDMMSVQANTGPPWESKNSTAVWRGRDSRKERLELVKLSRKHPELIDAAFTNFFFFKHDENLYGPIVKHISFFDFFKHKYQINIDGTVAAYRLPYLLVGDSVVLKQDSIYYEHFYNELQPWKHYIPVKSNLSDLLEKLKWAKDHDEEAKKIAKAGQEFARNNLMGDDIFCYYFKLFQEYANLQVSEPQIREGMKRVEPQTEDDLFPCTCHRKKTKDEL

SEQ ID NO: 40677 - protein, 96 aa, Homo sapiens
MEHKEVVLLLLLFLKSGQGEPLDDYVNAQGASLFSVTKKQLGAGSREECAAKCEEDKEFTCRAFQYHSKEQQCVIMAENKKSSIIIRMRDVVLFEK

SEQ ID NO: 40678 - protein, 254 aa, Homo sapiens
MDGGDDGNLIIKKRFVSEAELDERRKRRQEEWEKVRKPEDPEECPEEVYDPRSLYERLQEQKDRKQQEYEEQFKFKNMVRGLDEDETNFLDEVSRQQELIEKQRREEELKELKEYRNNLKKVGISQENKKEVEKKLTVKPIETKNKFSQAKLLAGAVKHKSSESGNSVKRLKPDPEPDDKNQEPSSCKSLGNTSLSGPSIHCPSAAVCIGILPGLGAYSGSSDSESSSDSEGTINATGKIVSSIFRTNTFLEAP

SEQ ID NO: 40679 - protein, 512 aa, Homo sapiens
MAESGLAMWPSLLLLLLLPGPPPVAGLEDAAFPHLGESLQPLPRACPLRCSCPRVDTVDCDGLDLRVFPDNITRAAQHLSLQNNQLQELPYNELSRLSGLRTLNLHNNLISSEGLPDEAFESLTQLQHLCVAHNKLSVAPQFLPRSLRVADLAANQVMEIFPLTFGEKPALRSVYLHNNQLSNAGLPPDAFRGSEAIATLSLSNNQLSYLPPSLPPSLERLHLQNNLISKVPRGALSRQTQLRELYLQHNQLTDSGLDATTFSKLHSLEYLDLSHNQLTTVPAGLPRTLAILHLGRNRIRQVEAARLHGARGLRYLLLQHNQLGSSGLPAGALRPLRGLHTLHLYGNGLDRVPPALPRRLRALVLPHNHVAALGARDLVATPGLTELNLAYNRLASARVHHRAFRRLRALRSLDLAGNQLTRLPMGLPTGLRTLQLQRNQLRMLEPEPLAGLDQLRELSLAHNRLRVGDIGPGTWHELQALQVRHRLVSHTVPRAPPSPCLPCHVPNILVSW

SEQ ID NO: 40680 - protein, 421 aa, Homo sapiens
MGRPTQWPSLLLLLLLPGPPPVAGLEDAAFPHLGESLQPLPRACPLRCSCPRVDTVDCDGLDLRVFPDNITRAAQHLSLQNNQLQELPYNELSRLSGLRTLNLHNNLISSEGLPDEAFESLTQLQHLCVAHNKNNLISKVPRGALSRQTQLRELYLQHNQLTDSGLDATTFSKLHSLEYLDLSHNQLTTVPAGLPRTLAILHLGRNRIRQVEAARLHGARGLRYLLLQHNQLGSSGLPAGALRPLRGLHTLHLYGNGLDRVPPALPRRLRALVLPHNHVAALGARDLVATPGLTELNLAYNRLASARVHHRAFRRLRALRSLDLAGNQLTRLPMGLPTGLRTLQLQRNQLRMLEPEPLAGLDQLRELSLAHNRLRVGDIGPGTWHELQALQVRHRLVSHTVPRAPPSPCLPCHVPNILVSW

SEQ ID NO: 40681 - protein, 510 aa, Homo sapiens
MGRPTQWPSLLLLLLLPGPPPVAGLEDAAFPHLGESLQPLPRACPLRCSCPRVDTVDCDGLDLRVFPDNITRAAQHLSLQNNQLQELPYNELSRLSGLRTLNLHNNLISSEGLPDEAFESLTQLQHLCVAHNKLSVAPQFLPRSLRVADLAANQVMEIFPLTFGEKPALRSVYLHNNQLSNAGLPPDAFRGSEAIATLSLSNNQLSYLPPSLPPSLERLHLQNNLISKVPRGALSRQTQLRELYLQHNQLTDSGLDATTFSKLHSLEYLDLSHNQLTTVPAGLPRTLAILHLGRNRIRQVEAARLHGARGLRYLLLQHNQLGSSGLPAGALRPLRGLHTLHLYGNGLDRVPPALPRRLRALVLPHNHVAALGARDLVATPGLTELNLAYNRLASARVHHRAFRRLRALRSLDLAGNQLTRLPMGLPTGLRTLQLQRNQLRMLEPEPLAGLDQLRELSLAHNRLRVGDIGPGTWHELQALQVRHRLVSHTVPRAPPSPCLPCHVPNILVSW

SEQ ID NO: 40682 - protein, 1265 aa, Homo sapiens
MSTTVNVDSLAEYEKSQIKRALELGTVMTVFSFRKSTPERRTVQVIMETRQVAWSKTADKIEGFLDIMEIKEIRPGKNSKDFERAKAVRQKEDCCFTILYGTQFVLSTLSLAADSKEDAVNWLSGLKILHQEAMNASTPTIIESWLRKQIYSVDQTRRNSISLRELKTILPLINFKVSSAKFLKDKFVEIGAHKDELSFEQFHLFYKKLMFEQQKSILDEFKKDSSVFILGNTDRPDASAVYLHDFQRFLIHEQQEHWAQDLNKVRERMTKFIDDTMRETAEPFLFVDEFLTYLFSRENSIWDEKYDAVDMQDMNNPLSHYWISSSHNTYLTGDQLRSESSPEAYIRCLRMGCRCIELDCWDGPDGKPVIYHGWTRTTKIKFDDVVQAIKDHAFVTSSFPVILSIEEHCSVEQQRHMAKAFKEVFGDLLLTKPTEASADQLPSPSQLREKIIIKHKKLGPRGDVDVNMEDKKDEHKQQGELYMWDSIDQKWTRHYCAIADAKLSFSDDIEQTMEEEVPQDIPPTELHFGEKWFHKKVEKRTSAEKLLQEYCMETGGKDGTFLVRESETFPNDYTLSFWRSGRVQHCRIRSTMEGGTLKYYLTDNLTFSSIYALIQHYRETHLRCAEFELRLTDPVPNPNPHESKPWYYDSLSRGEAEDMLMRIPRDGAFLIRKREGSDSYAITFRARGKVKHCRINRDGRHFVLGTSAYFESLVELVSYYEKHSLYRKMRLRYPVTPELLERYNMERDINSLYDVSRMYVDPSEINPSMPQRTVKALYDYKAKRSDELSFCRGALIHNVSKEPGGWWKGDYGTRIQQYFPSNYVEDISTADFEELEKQIIEDNPLGSLCRGILDLNTYNVVKAPQGKNQKSFVFILEPKQQGDPPVEFATDRVEELFEWFQSIREITWKIDTKENNMKYWEKNQSIAIELSDLVVYCKPTSKTKDNLENPDFREIRSFVETKADSIIRQKPVDLLKYNQKGLTRVYPKGQRVDSSNYDPFRLWLCGSQMVALNFQTADKYMQMNHALFSLNGRTGYVLQPESMRTEKYDPMPPESQRKILMTLTVKVLGARHLPKLGRSIACPFVEVEICGAEYDNNKFKTTVVNDNGLSPIWAPTQEKVTFEIYDPNLAFLRFVVYEEDMFSDPNFLAHATYPIKAVKSGFRSVPLKNGYSEDIELASLLVFCEMRPVLESEEELYSSCRQLRRRQEELNNQLFLYDTHQNLRNANRDALVKEFSVNENQLQLYQEKCNKRLREKRVSNSKFYS

SEQ ID NO: 40683 - protein, 1127 aa, Homo sapiens
MAECGRGGAAGGALPTSPGPALGAKGALKAGVGEGGGGGGRLGHGRARYDSGGVSNGDCSLGVSGDEARASPTRGPRGVALAPTPSAVVCTLPRESKPGGLPRRSSIIKDGTKQKRERKKTVSFSSMPTEKKISSASDCINSMVEGSELKKVRSNSRIYHRYFLLDADMQSLRWEPSKKDSEKAKIDIKSIKEVRTGKNTDIFRSNGISDQISEDCAFSVIYGENYESLDLVANSADVANIWVTGLRYLISYGKHTLDMLESSQDNMRTSWVSQMFSEIDVDNLGHITLCNAVQCIRNLNPGLKTSKIELKFKELHKSKDKAGTEVTKEEFIEVFHELCTRPEIYFLLVQFSSNKEFLDTKDLMMFLEAEQGVAHINEEISLEIIHKYEPSKEGQEKGWLSIDGFTNYLMSPDCYIFDPEHKKVCQDMKQPLSHYFINSSHNTYLIEDQFRGPSDITGYIRALKMGCRSVELDVWDGPDNEPVIYTGHTMTSQIVFRSVIDIINKYAFFASEYPLILCLENHCSIKQQKVMVQHMKKLLGDKLYTTSPNVEESYLPSPDVLKGKILIKAKKLSSNCSGVEGDVTDEDEGAEMSQRMGKENMEQPNNVPVKRFQLCKELSELVSICKSVQFKEFQVSFQVQKYWEVCSFNEVLASKYANENPGDFVNYNKRFLARVFPSPMRIDSSNMNPQDFWKCGCQIVAMNFQTPGLMMDLNIGWFRQNGNCGYVLRPAIMREEVSFFSANTKDSVPGVSPQLLHIKIISGQNFPKPKGSGAKGDVVDPYVYVEIHGIPADCAEQRTKTVHQNGDAPIFDESFEFQINLPELAMVRFVVLDDDYIGDEFIGQYTIPFECLQTGYRHVPLQSLTGEVLAHASLFVHVAITNRRGGGKPHKRGLSVRKGKKSREYASLRTLWIKTVDEVFKNAQPPIRDATDLRENMQNAVVSFKELCGLSSVANLMQCMLAVSPRFLGPDNTPLVVLNLSEQYPTMELQGIVPEVLKKIVTTYDMMIQSLKALIENADAVYEKIVHCQKAAMEFHEHLHSIGTKEGLKERKLQKAVESFTWNITILKGQADLLKYAKNETLENLKQIHFAAVSCGLNKPGTENADVQKPRRSLEVIPEKANDETGE

SEQ ID NO: 40684 - protein, 960 aa, Homo sapiens
MPTEKKISSASDCINSMVEGSELKKVRSNSRIYHRYFLLDADMQSLRWEPSKKDSEKAKIDIKSIKEVRTGKNTDIFRSNGISDQISEDCAFSVIYGENYESLDLVANSADVANIWVTGLRYLISYGKHTLDMLESSQDNMRTSWVSQMFSEIDVDNLGHITLCNAVQCIRNLNPGLKTSKIELKFKELHKSKDKAGTEVTKEEFIEVFHELCTRPEIYFLLVQFSSNKEFLDTKDLMMFLEAEQGVAHINEEISLEIIHKYEPSKEGQEKGWLSIDGFTNYLMSPDCYIFDPEHKKVCQDMKQPLSHYFINSSHNTYLIEDQFRGPSDITGYIRALKMGCRSVELDVWDGPDNEPVIYTGHTMTSQIVFRSVIDIINKYAFFASEYPLILCLENHCSIKQQKVMVQHMKKLLGDKLYTTSPNVEESYLPSPDVLKGKILIKAKKLSSNCSGVEGDVTDEDEGAEMSQRMGKENMEQPNNVPVKRFQLCKELSELVSICKSVQFKEFQVSFQVQKYWEVCSFNEVLASKYANENPGDFVNYNKRFLARVFPSPMRIDSSNMNPQDFWKCGCQIVAMNFQTPGLMMDLNIGWFRQNGNCGYVLRPAIMREEVSFFSANTKDSVPGVSPQLLHIKIISGQNFPKPKGSGAKGDVVDPYVYVEIHGIPADCAEQRTKTVHQNGDAPIFDESFEFQINLPELAMVRFVVLDDDYIGDEFIGQYTIPFECLQTGYRHVPLQSLTGEVLAHASLFVHVAITNRRGGGKPHKRGLSVRKGKKSREYASLRTLWIKTVDEVFKNAQPPIRDATDLRENMQNAVVSFKELCGLSSVANLMQCMLAVSPRFLGPDNTPLVVLNLSEQYPTMELQGIVPEVLKKIVTTYDMMIQSLKALIENADAVYEKIVHCQKAAMEFHEHLHSIGTKEGLKERKLQKAVESFTWNITILKIRKTGRRSIFVPQTPIMV

SEQ ID NO: 40685 - protein, 1001 aa, Homo sapiens
MPTEKKISSASDCINSMVEGSELKKVRSNSRIYHRYFLLDADMQSLRWEPSKKDSEKAKIDIKSIKEVRTGKNTDIFRSNGISDQISEDCAFSVIYGENYESLDLVANSADVANIWVTGLRYLISYGKHTLDMLESSQDNMRTSWVSQMFSEIDVDNLGHITLCNAVQCIRNLNPGLKTSKIELKFKELHKSKDKAGTEVTKEEFIEVFHELCTRPEIYFLLVQFSSNKEFLDTKDLMMFLEAEQGVAHINEEISLEIIHKYEPSKEGQEKGWLSIDGFTNYLMSPDCYIFDPEHKKVCQDMKQPLSHYFINSSHNTYLIEDQFRGPSDITGYIRALKMGCRSVELDVWDGPDNEPVIYTGHTMTSQIVFRSVIDIINKYAFFASEYPLILCLENHCSIKQQKVMVQHMKKLLGDKLYTTSPNVEESYLPSPDVLKGKILIKAKKLSSNCSGVEGDVTDEDEGAEMSQRMGKENMEQPNNVPVKRFQLCKELSELVSICKSVQFKEFQVSFQVQKYWEVCSFNEVLASKYANENPGDFVNYNKRFLARVFPSPMRIDSSNMNPQDFWKCGCQIVAMNFQTPGLMMDLNIGWFRQNGNCGYVLRPAIMREEVSFFSANTKDSVPGVSPQLLHIKIISGQNFPKPKGSGAKGDVVDPYVYVEIHGIPADCAEQRTKTVHQNGDAPIFDESFEFQINLPELAMVRFVVLDDDYIGDEFIGQYTIPFECLQTGYRHVPLQSLTGEVLAHASLFVHVAITNRRGGGKPHKRGLSVRKGKKSREYASLRTLWIKTVDEVFKNAQPPIRDATDLRENMQNAVVSFKELCGLSSVANLMQCMLAVSPRFLGPDNTPLVVLNLSEQYPTMELQGIVPEVLKKIVTTYDMMIQSLKALIENADAVYEKIVHCQKAAMEFHEHLHSIGTKEGLKERKLQKAVESFTWNITILKGQADLLKYAKNETLENLKQIHFAAVSCGLNKPGTENADVQKPRRSLEVIPEKANDETGE

SEQ ID NO: 40686 - protein, 580 aa, Homo sapiens
MHLSAVFNALLVSVLAAVLWKHVRLREHAATLEEELALSRQATEPAPALRIDYPKALQILMEGGTHMVCTGRTHTDRICRFKWLCYSNEAEEFIFFHGNTSVMLPNLGSRRFQPALLDLSTVEDHNTQYFNFVELPAAALRFMPKPVFVPDVALIANRFNPDNLMHVFHDDLLPLFYTLRQFPGLAHEARLFFMEGWGEGAHFDLYKLLSPKQPLLRAQLKTLGRLLCFSHAFVGLSKITTWYQYGFVQPQGPKANILVSGNEIRQFARFMTEKLNVSHTGVPLGEEYILVFSRTQNRLILNEAELLLALAQEFQMKTVTVSLEDHTFADVVRLVSNASMLVSMHGAQLVTTLFLPRGATVVELFPYAVNPDHYTPYKTLAMLPGMDLQYVAWRNMMPENTVTHPERPWDQGGITHLDRAEQARILQSREVPRHLCCRNPEWLFRIYQDTKVDIPSLIQTIRRVVKGRPGPRKQKWTVGLYPGKVREARCQASVHGASEARLTVSWQIPWNLKYLKVREVKYEVWLQEQGENTYVPYILALQNHTFTENIKPFTTYLVWVRCIFNKILLGPFADVLVCNT

SEQ ID NO: 40687 - protein, 882 aa, Homo sapiens
MEPAPARSPRPQQDPARPQEPTMPPPETPSEGRQPSPSPSPTERAPASEEEFQFLRCQQCQAEAKCPKLLPCLHTLCSGCLEASGMQCPICQAPWPLGADTPALDNVFFESLQRRLSVYRQIVDAQAVCTRCKESADFWCFECEQLLCAKCFEAHQWFLKHEARPLAELRNQSVREFLDGTRKTNNIFCSNPNHRTPTLTSIYCRGCSKPLCCSCALLDSSHSELKCDISAEIQQRQEELDAMTQALQEQDSAFGAVHAQMHAAVGQLGRARAETEELIRERVRQVVAHVRAQERELLEAVDARYQRDYEEMASRLGRLDAVLQRIRTGSALVQRMKCYASDQEVLDMHGFLRQALCRLRQEEPQSLQAAVRTDGFDEFKVRLQDLSSCITQGKDAAVSKKASPEAASTPRDPIDVDLPEEAERVKAQVQALGLAEAQPMAVVQSVPGAHPVPVYAFSIKGPSYGEDVSNTTTAQKRKCSQTQCPRKVIKMESEEGKEARLARSSPEQPRPSTSKAVSPPHLDGPPSPRSPVIGSEVFLPNSNHVASGAGEAEERVVVISSSEDSDAENSSSRELDDSSSESSDLQLEGPSTLRVLDENLADPQAEDRPLVFFDLKIDNETQKISQLAAVNRESKFRVVIQPEAFFSIYSKAVSLEVGLQHFLSFLSSMRRPILACYKLWGPGLPNFFRALEDINRLWEFQEAISGFLAALPLIRERVPGASSFKLKNLAQTYLARNMSERSAMAAVLAMRDLCRLLEVSPGPQLAQHVYPFSSLQCFASLQPLVQAAVLPRAEARLLALHNVSFMELLSAHRRDRQGGLKKYSRYLSLQTTTLPPAQPAFNLQALGTYFEGLLEGPALARAEGVSTPLAGRGLAERASQQS

SEQ ID NO: 40688 - protein, 829 aa, Homo sapiens
MEPAPARSPRPQQDPARPQEPTMPPPETPSEGRQPSPSPSPTERAPASEEEFQFLRCQQCQAEAKCPKLLPCLHTLCSGCLEASGMQCPICQAPWPLGADTPALDNVFFESLQRRLSVYRQIVDAQAVCTRCKESADFWCFECEQLLCAKCFEAHQWFLKHEARPLAELRNQSVREFLDGTRKTNNIFCSNPNHRTPTLTSIYCRGCSKPLCCSCALLDSSHSELKCDISAEIQQRQEELDAMTQALQEQDSAFGAVHAQMHAAVGQLGRARAETEELIRERVRQVVAHVRAQERELLEAVDARYQRDYEEMASRLGRLDAVLQRIRTGSALVQRMKCYASDQEVLDMHGFLRQALCRLRQEEPQSLQAAVRTDGFDEFKVRLQDLSSCITQGKDAAVSKKASPEAASTPRDPIDVDLPEEAERVKAQVQALGLAEAQPMAVVQSVPGAHPVPVYAFSIKGPSYGEDVSNTTTAQKRKCSQTQCPRKVIKMESEEGKEARLARSSPEQPRPSTSKAVSPPHLDGPPSPRSPVIGSEVFLPNSNHVASGAGEAEERVVVISSSEDSDAENSCMEPMETAEPQSSPAHSSPAHSSPAHSSPVQSLLRAQGASSLPCGTYHPPAWPPHQPAEQAATPDAEPHSEPPDHQERPAVHRGIRYLLYRAQRAIRLRHALRLHPQLHRAPIRTWSPHVVQASTPAITGPLNHPANAQEHPAQLQRGISPPHRIRGAVRSRSRSLRGSSHLSQWLNNFFALPFSSMASQLDMSSVVGAGESRAQTLGAGVPPGDSVRGSMEASQVQVPLEASPITFPPPCAPERPPISPVPGARQAGL

SEQ ID NO: 40689 - protein, 641 aa, Homo sapiens
MEPAPARSPRPQQDPARPQEPTMPPPETPSEGRQPSPSPSPTERAPASEEEFQFLRCQQCQAEAKCPKLLPCLHTLCSGCLEASGMQCPICQAPWPLGADTPALDNVFFESLQRRLSVYRQIVDAQAVCTRCKESADFWCFECEQLLCAKCFEAHQWFLKHEARPLAELRNQSVREFLDGTRKTNNIFCSNPNHRTPTLTSIYCRGCSKPLCCSCALLDSSHSELKCDISAEIQQRQEELDAMTQALQEQDSAFGAVHAQMHAAVGQLGRARAETEELIRERVRQVVAHVRAQERELLEAVDARYQRDYEEMASRLGRLDAVLQRIRTGSALVQRMKCYASDQEVLDMHGFLRQALCRLRQEEPQSLQAAVRTDGFDEFKVRLQDLSSCITQGKDAAVSKKASPEAASTPRDPIDVDLPEEAERVKAQVQALGLAEAQPMAVVQSVPGAHPVPVYAFSIKGPSYGEDVSNTTTAQKRKCSQTQCPRKVIKMESEEGKEARLARSSPEQPRPSTSKAVSPPHLDGPPSPRSPVIGSEVFLPNSNHVASGAGEAEERVVVISSSEDSDAENSVSSSPQSEVLYWKVHGAHGDRRATVLASPLLASPLLASPLLASPVSAESTRSLQPALWHIPPPSLASPPAR

SEQ ID NO: 40690 - protein, 633 aa, Homo sapiens
MEPAPARSPRPQQDPARPQEPTMPPPETPSEGRQPSPSPSPTERAPASEEEFQFLRCQQCQAEAKCPKLLPCLHTLCSGCLEASGMQCPICQAPWPLGADTPALDNVFFESLQRRLSVYRQIVDAQAVCTRCKESADFWCFECEQLLCAKCFEAHQWFLKHEARPLAELRNQSVREFLDGTRKTNNIFCSNPNHRTPTLTSIYCRGCSKPLCCSCALLDSSHSELKCDISAEIQQRQEELDAMTQALQEQDSAFGAVHAQMHAAVGQLGRARAETEELIRERVRQVVAHVRAQERELLEAVDARYQRDYEEMASRLGRLDAVLQRIRTGSALVQRMKCYASDQEVLDMHGFLRQALCRLRQEEPQSLQAAVRTDGFDEFKVRLQDLSSCITQGKDAAVSKKASPEAASTPRDPIDVDLPEEAERVKAQVQALGLAEAQPMAVVQSVPGAHPVPVYAFSIKGPSYGEDVSNTTTAQKRKCSQTQCPRKVIKMESEEGKEARLARSSPEQPRPSTSKAVSPPHLDGPPSPRSPVIGSEVFLPNSNHVASGAGEAEERVVVISSSEDSDAENSSSRELDDSSSESSDLQLEGPSTLRVLDENLADPQAEDRPLVFFDLKIDNESGFSWGYPHPFLI

SEQ ID NO: 40691 - protein, 611 aa, Homo sapiens
MEPAPARSPRPQQDPARPQEPTMPPPETPSEGRQPSPSPSPTERAPASEEEFQFLRCQQCQAEAKCPKLLPCLHTLCSGCLEASGMQCPICQAPWPLGADTPALDNVFFESLQRRLSVYRQIVDAQAVCTRCKESADFWCFECEQLLCAKCFEAHQWFLKHEARPLAELRNQSVREFLDGTRKTNNIFCSNPNHRTPTLTSIYCRGCSKPLCCSCALLDSSHSELKCDISAEIQQRQEELDAMTQALQEQDSAFGAVHAQMHAAVGQLGRARAETEELIRERVRQVVAHVRAQERELLEAVDARYQRDYEEMASRLGRLDAVLQRIRTGSALVQRMKCYASDQEVLDMHGFLRQALCRLRQEEPQSLQAAVRTDGFDEFKVRLQDLSSCITQGKDAAVSKKASPEAASTPRDPIDVDLPEEAERVKAQVQALGLAEAQPMAVVQSVPGAHPVPVYAFSIKGPSYGEDVSNTTTAQKRKCSQTQCPRKVIKMESEEGKEARLARSSPEQPRPSTSKAVSPPHLDGPPSPRSPVIGSEVFLPNSNHVASGAGEAEERVVVISSSEDSDAENSVSGPEVQPRTPASPHFRSQGAQPQQVTLRLALRLGNFPVRH

SEQ ID NO: 40692 - protein, 560 aa, Homo sapiens
MEPAPARSPRPQQDPARPQEPTMPPPETPSEGRQPSPSPSPTERAPASEEEFQFLRCQQCQAEAKCPKLLPCLHTLCSGCLEASGMQCPICQAPWPLGADTPALDNVFFESLQRRLSVYRQIVDAQAVCTRCKESADFWCFECEQLLCAKCFEAHQWFLKHEARPLAELRNQSVREFLDGTRKTNNIFCSNPNHRTPTLTSIYCRGCSKPLCCSCALLDSSHSELKCDISAEIQQRQEELDAMTQALQEQDSAFGAVHAQMHAAVGQLGRARAETEELIRERVRQVVAHVRAQERELLEAVDARYQRDYEEMASRLGRLDAVLQRIRTGSALVQRMKCYASDQEVLDMHGFLRQALCRLRQEEPQSLQAAVRTDGFDEFKVRLQDLSSCITQGKDAAVSKKASPEAASTPRDPIDVDLPEEAERVKAQVQALGLAEAQPMAVVQSVPGAHPVPVYAFSIKGPSYGEDVSNTTTAQKRKCSQTQCPRKVIKMESEEGKEARLARSSPEQPRPSTSKAVSPPHLDGPPSPRSPVIGSEVFLPNSNHVASGAGEAGRERNALW

SEQ ID NO: 40693 - protein, 435 aa, Homo sapiens
MEPAPARSPRPQQDPARPQEPTMPPPETPSEGRQPSPSPSPTERAPASEEEFQFLRCQQCQAEAKCPKLLPCLHTLCSGCLEASGMQCPICQAPWPLGADTPALDNVFFESLQRRLSVYRQIVDAQAVCTRCKESADFWCFECEQLLCAKCFEAHQWFLKHEARPLAELRNQSVREFLDGTRKTNNIFCSNPNHRTPTLTSIYCRGCSKPLCCSCALLDSSHSELKCDISAEIQQRQEELDAMTQALQEQDSAFGAVHAQMHAAVGQLGRARAETEELIRERVRQVVAHVRAQERELLEAVDARYQRDYEEMASRLGRLDAVLQRIRTGSALVQRMKCYASDQEVLDMHGFLRQALCRLRQEEPQSLQAAVRTDGFDEFKVRLQDLSSCITQGKDAAVSKKASPEAASTPRDPIDVDLLPPPAHALTGPAQSSTH

SEQ ID NO: 40694 - protein, 824 aa, Homo sapiens
MEPAPARSPRPQQDPARPQEPTMPPPETPSEGRQPSPSPSPTERAPASEEEFQFLRCQQCQAEAKCPKLLPCLHTLCSGCLEASGMQCPICQAPWPLGADTPALDNVFFESLQRRLSVYRQIVDAQAVCTRCKESADFWCFECEQLLCAKCFEAHQWFLKHEARPLAELRNQSVREFLDGTRKTNNIFCSNPNHRTPTLTSIYCRGCSKPLCCSCALLDSSHSELKCDISAEIQQRQEELDAMTQALQEQDSAFGAVHAQMHAAVGQLGRARAETEELIRERVRQVVAHVRAQERELLEAVDARYQRDYEEMASRLGRLDAVLQRIRTGSALVQRMKCYASDQEVLDMHGFLRQALCRLRQEEPQSLQAAVRTDGFDEFKVRLQDLSSCITQGKDAAVSKKASPEAASTPRDPIDVDLPEEAERVKAQVQALGLAEAQPMAVVQSVPGAHPVPVYAFSIKGPSYGEDVSNTTTAQKRKCSQTQCPRKVIKMESEEGKEARLARSSPEQPRPSTSKAVSPPHLDGPPSPRSPVIGSEVFLPNSNHVASGAGEAEERVVVISSSEDSDAENSCMEPMETAEPQSSPAHSSPAHSSPVQSLLRAQGASSLPCGTYHPPAWPPHQPAEQAATPDAEPHSEPPDHQERPAVHRGIRYLLYRAQRAIRLRHALRLHPQLHRAPIRTWSPHVVQASTPAITGPLNHPANAQEHPAQLQRGISPPHRIRGAVRSRSRSLRGSSHLSQWLNNFFALPFSSMASQLDMSSVVGAGESRAQTLGAGVPPGDSVRGSMEASQVQVPLEASPITFPPPCAPERPPISPVPGARQAGL

SEQ ID NO: 40695 - protein, 834 aa, Homo sapiens
MEPAPARSPRPQQDPARPQEPTMPPPETPSEGRQPSPSPSPTERAPASEEEFQFLRCQQCQAEAKCPKLLPCLHTLCSGCLEASGMQCPICQAPWPLGADTPALDNVFFESLQRRLSVYRQIVDAQAVCTRCKESADFWCFECEQLLCAKCFEAHQWFLKHEARPLAELRNQSVREFLDGTRKTNNIFCSNPNHRTPTLTSIYCRGCSKPLCCSCALLDSSHSELKCDISAEIQQRQEELDAMTQALQEQDSAFGAVHAQMHAAVGQLGRARAETEELIRERVRQVVAHVRAQERELLEAVDARYQRDYEEMASRLGRLDAVLQRIRTGSALVQRMKCYASDQEVLDMHGFLRQALCRLRQEEPQSLQAAVRTDGFDEFKVRLQDLSSCITQGKDAAVSKKASPEAASTPRDPIDVDLDVSNTTTAQKRKCSQTQCPRKVIKMESEEGKEARLARSSPEQPRPSTSKAVSPPHLDGPPSPRSPVIGSEVFLPNSNHVASGAGEAEERVVVISSSEDSDAENSSSRELDDSSSESSDLQLEGPSTLRVLDENLADPQAEDRPLVFFDLKIDNETQKISQLAAVNRESKFRVVIQPEAFFSIYSKAVSLEVGLQHFLSFLSSMRRPILACYKLWGPGLPNFFRALEDINRLWEFQEAISGFLAALPLIRERVPGASSFKLKNLAQTYLARNMSERSAMAAVLAMRDLCRLLEVSPGPQLAQHVYPFSSLQCFASLQPLVQAAVLPRAEARLLALHNVSFMELLSAHRRDRQGGLKKYSRYLSLQTTTLPPAQPAFNLQALGTYFEGLLEGPALARAEGVSTPLAGRGLAERASQQS

SEQ ID NO: 40696 - protein, 585 aa, Homo sapiens
MEPAPARSPRPQQDPARPQEPTMPPPETPSEGRQPSPSPSPTERAPASEEEFQFLRCQQCQAEAKCPKLLPCLHTLCSGCLEASGMQCPICQAPWPLGADTPALDNVFFESLQRRLSVYRQIVDAQAVCTRCKESADFWCFECEQLLCAKCFEAHQWFLKHEARPLAELRNQSVREFLDGTRKTNNIFCSNPNHRTPTLTSIYCRGCSKPLCCSCALLDSSHSELKCDISAEIQQRQEELDAMTQALQEQDSAFGAVHAQMHAAVGQLGRARAETEELIRERVRQVVAHVRAQERELLEAVDARYQRDYEEMASRLGRLDAVLQRIRTGSALVQRMKCYASDQEVLDMHGFLRQALCRLRQEEPQSLQAAVRTDGFDEFKVRLQDLSSCITQGKDAAVSKKASPEAASTPRDPIDVDLDVSNTTTAQKRKCSQTQCPRKVIKMESEEGKEARLARSSPEQPRPSTSKAVSPPHLDGPPSPRSPVIGSEVFLPNSNHVASGAGEAEERVVVISSSEDSDAENSSSRELDDSSSESSDLQLEGPSTLRVLDENLADPQAEDRPLVFFDLKIDNESGFSWGYPHPFLI

SEQ ID NO: 40697 - protein, 781 aa, Homo sapiens
MEPAPARSPRPQQDPARPQEPTMPPPETPSEGRQPSPSPSPTERAPASEEEFQFLRCQQCQAEAKCPKLLPCLHTLCSGCLEASGMQCPICQAPWPLGADTPALDNVFFESLQRRLSVYRQIVDAQAVCTRCKESADFWCFECEQLLCAKCFEAHQWFLKHEARPLAELRNQSVREFLDGTRKTNNIFCSNPNHRTPTLTSIYCRGCSKPLCCSCALLDSSHSELKCDISAEIQQRQEELDAMTQALQEQDSAFGAVHAQMHAAVGQLGRARAETEELIRERVRQVVAHVRAQERELLEAVDARYQRDYEEMASRLGRLDAVLQRIRTGSALVQRMKCYASDQEVLDMHGFLRQALCRLRQEEPQSLQAAVRTDGFDEFKVRLQDLSSCITQGKDAAVSKKASPEAASTPRDPIDVDLDVSNTTTAQKRKCSQTQCPRKVIKMESEEGKEARLARSSPEQPRPSTSKAVSPPHLDGPPSPRSPVIGSEVFLPNSNHVASGAGEAEERVVVISSSEDSDAENSCMEPMETAEPQSSPAHSSPAHSSPAHSSPVQSLLRAQGASSLPCGTYHPPAWPPHQPAEQAATPDAEPHSEPPDHQERPAVHRGIRYLLYRAQRAIRLRHALRLHPQLHRAPIRTWSPHVVQASTPAITGPLNHPANAQEHPAQLQRGISPPHRIRGAVRSRSRSLRGSSHLSQWLNNFFALPFSSMASQLDMSSVVGAGESRAQTLGAGVPPGDSVRGSMEASQVQVPLEASPITFPPPCAPERPPISPVPGARQAGL

SEQ ID NO: 40698 - protein, 423 aa, Homo sapiens
MEPAPARSPRPQQDPARPQEPTMPPPETPSEGRQPSPSPSPTERAPASEEEFQFLRCQQCQAEAKCPKLLPCLHTLCSGCLEASGMQCPICQAPWPLGADTPALDNVFFESLQRRLSVYRQIVDAQAVCTRCKESADFWCFECEQLLCAKCFEAHQWFLKHEARPLAELRNQSVREFLDGTRKTNNIFCSNPNHRTPTLTSIYCRGCSKPLCCSCALLDSSHSELKCDISAEIQQRQEELDAMTQALQEQDSAFGAVHAQMHAAVGQLGRARAETEELIRERVRQVVAHVRAQERELLEAVDARYQRDYEEMASRLGRLDAVLQRIRTGSALVQRMKCYASDQEVLDMHGFLRQALCRLRQEEPQSLQAAVRTDGFDEFKVRLQDLSSCITQGKDAAVSKKASPEAASTPRDPIDVDLRNALW

SEQ ID NO: 40699 - protein, 477 aa, Homo sapiens
MGRTVVVLGGGISGLAASYHLSRAPCPPKVVLVESSERLGGWIRSVRGPNGAIFELGPRGIRPAGALGARTLLLVSELGLDSEVLPVRGDHPAAQNRFLYVGGALHALPTGLRGLLRPSPPFSKPLFWAGLRELTKPRGKEPDETVHSFAQRRLGPEVASLAMDSLCRGVFAGNSRELSIRSCFPSLFQAEQTHRSILLGLLLGAGRTPQPDSALIRQALAERWSQWSLRGGLEMLPQALETHLTSRGVSVLRGQPVCGLSLQAEGRWKVSLRDSSLEADHVISAIPASVLSELLPAEAAPLARALSAITAVSVAVVNLQYQGAHLPVQGFGHLVPSSEDPGVLGIVYDSVAFPEQDGSPPGLRVTVMLGGSWLQTLEASGCVLSQELFQQRAQEAAATQLGLKEMPSHCLVHLHKNCIPQYTLGHWQKLESARQFLTAHRLPLTLAGASYEGVAVNDCIESGRQAAVSVLGTEPNS

SEQ ID NO: 40700 - protein, 2335 aa, Homo sapiens
MAGVFPYRGPGNPVPGPLAPLPDYMSEEKLQEKARKWQQLQAKRYAEKRKFGFVDAQKEDMPPEHVRKIIRDHGDMTNRKFRHDKRVYLGALKYMPHAVLKLLENMPMPWEQIRDVPVLYHITGAISFVNEIPWVIEPVYISQWGSMWIMMRREKRDRRHFKRMRFPPFDDEEPPLDYADNILDVEPLEAIQLELDPEEDAPVLDWFYDHQPLRDSRKYVNGSTYQRWQFTLPMMSTLYRLANQLLTDLVDDNYFYLFDLKAFFTSKALNMAIPGGPKFEPLVRDINLQDEDWNEFNDINKIIIRQPIRTEYKIAFPYLYNNLPHHVHLTWYHTPNVVFIKTEDPDLPAFYFDPLINPISHRHSVKSQEPLPDDDEEFELPEFVEPFLKDTPLYTDNTANGIALLWAPRPFNLRSGRTRRALDIPLVKNWYREHCPAGQPVKVRVSYQKLLKYYVLNALKHRPPKAQKKRYLFRSFKATKFFQSTKLDWVEVGLQVCRQGYNMLNLLIHRKNLNYLHLDYNFNLKPVKTLTTKERKKSRFGNAFHLCREVLRLTKLVVDSHVQYRLGNVDAFQLADGLQYIFAHVGQLTGMYRYKYKLMRQIRMCKDLKHLIYYRFNTGPVGKGPGCGFWAAGWRVWLFFMRGITPLLERWLGNLLARQFEGRHSKGVAKTVTKQRVESHFDLELRAAVMHDILDMMPEGIKQNKARTILQHLSEAWRCWKANIPWKVPGLPTPIENMILRYVKAKADWWTNTAHYNRERIRRGATVDKTVCKKNLGRLTRLYLKAEQERQHNYLKDGPYITAEEAVAVYTTTVHWLESRRFSPIPFPPLSYKHDTKLLILALERLKEAYSVKSRLNQSQREELGLIEQAYDNPHEALSRIKRHLLTQRAFKEVGIEFMDLYSHLVPVYDVEPLEKITDAYLDQYLWYEADKRRLFPPWIKPADTEPPPLLVYKWCQGINNLQDVWETSEGECNVMLESRFEKMYEKIDLTLLNRLLRLIVDHNIADYMTAKNNVVINYKDMNHTNSYGIIRGLQFASFIVQYYGLVMDLLVLGLHRASEMAGPPQMPNDFLSFQDIATEAAHPIRLFCRYIDRIHIFFRFTADEARDLIQRYLTEHPDPNNENIVGYNNKKCWPRDARMRLMKHDVNLGRAVFWDIKNRLPRSVTTVQWENSFVSVYSKDNPNLLFNMCGFECRILPKCRTSYEEFTHKDGVWNLQNEVTKERTAQCFLRVDDESMQRFHNRVRQILMASGSTTFTKIVNKWNTALIGLMTYFREAVVNTQELLDLLVKCENKIQTRIKIGLNSKMPSRFPPVVFYTPKELGGLGMLSMGHVLIPQSDLRWSKQTDVGITHFRSGMSHEEDQLIPNLYRYIQPWESEFIDSQRVWAEYALKRQEAIAQNRRLTLEDLEDSWDRGIPRINTLFQKDRHTLAYDKGWRVRTDFKQYQVLKQNPFWWTHQRHDGKLWNLNNYRTDMIQALGGVEGILEHTLFKGTYFPTWEGLFWEKASGFEESMKWKKLTNAQRSGLNQIPNRRFTLWWSPTINRANVYVGFQVQLDLTGIFMHGKIPTLKISLIQIFRAHLWQKIHESIVMDLCQVFDQELDALEIETVQKETIHPRKSYKMNSSCADILLFASYKWNVSRPSLLADSKDVMDSTTTQKYWIDIQLRWGDYDSHDIERYARAKFLDYTTDNMSIYPSPTGVLIAIDLAYNLHSAYGNWFPGSKPLIQQAMAKIMKANPALYVLRERIRKGLQLYSSEPTEPYLSSQNYGELFSNQIIWFVDDTNVYRVTIHKTFEGNLTTKPINGAIFIFNPRTGQLFLKIIHTSVWAGQKRLGQLAKWKTAEEVAALIRSLPVEEQPKQIIVTRKGMLDPLEVHLLDFPNIVIKGSELQLPFQACLKVEKFGDLILKATEPQMVLFNLYDDWLKTISSYTAFSRLILILRALHVNNDRAKVILKPDKTTITEPHHIWPTLTDEEWIKVEVQLKDLILADYGKKNNVNVASLTQSEIRDIILGMEISAPSQQRQQIAEIEKQTKEQSQLTATQTRTVNKHGDEIITSTTSNYETQTFSSKTEWRVRAISAANLHLRTNHIYVSSDDIKETGYTYILPKNVLKKFICISDLRAQIAGYLYGVSPPDNPQVKEIRCIVMVPQWGTHQTVHLPGQLPQHEYLKEMEPLGWIHTQPNESPQLSPQDVTTHAKIMADNPSWDGEKTIIITCSFTPGSCTLTAYKLTPSGYEWGRQNTDKGNNPKGYLPSHYERVQMLLSDRFLGFFMVPAQSSWNYNFMGVRHDPNMKYELQLANPKEFYHEVHRPSHFLNFALLQEGEVYSADREDLYA

SEQ ID NO: 40701 - protein, 941 aa, Homo sapiens
MNKKKKPFLGMPAPLGYVPGLGRGATGFTTRSDIGPARDANDPVDDRHAPPGKRTVGDQMKKNQAADDDDEDLNDTNYDEFNGYAGSLFSSGPYEKDDEEADAIYAALDKRMDERRKERREQREKEEIEKYRMERPKIQQQFSDLKRKLAEVTEEEWLSIPEVGDARNKRQRNPRYEKLTPVPDSFFAKHLQTGENHTSVDPRQTQFGGLNTPYPGGLNTPYPGGMTPGLMTPGTGELDMRKIGQARNTLMDMRLSQVSDSVSGQTVVDPKGYLTDLNSMIPTHGGDINDIKKARLLLKSVRETNPHHPPAWIASARLEEVTGKLQVARNLIMKGTEMCPKSEDVWLEAARLQPGDTAKAVVAQAVRHLPQSVRIYIRAAELETDIRAKKRVLRKALEHVPNSVRLWKAAVELEEPEDARIMLSRAVECCPTSVELWLALARLETYENARKVLNKARENIPTDRHIWITAAKLEEANGNTQMVEKIIDRAITSLRANGVEINREQWIQDAEECDRAGSVATCQAVMRAVIGIGIEEEDRKHTWMEDADSCVAHNALECARAIYAYALQVFPSKKSVWLRAAYFEKNHGTRESLEALLQRAVAHCPKAEVLWLMGAKSKWLAGDVPAARSILALAFQANPNSEEIWLAAVKLESENDEYERARRLLAKARSSAPTARVFMKSVKLEWVQDNIRAAQDLCEEALRHYEDFPKLWMMKGQIEEQKEMMEKAREAYNQGLKKCPHSTPLWLLLSRLEEKIGQLTRARAILEKSRLKNPKNPGLWLESVRLEYRAGLKNIANTLMAKALQECPNSGILWSEAIFLEARPQRRTKSVDALKKCEHDPHVLLAVAKLFWSQRKITKAREWFHRTVKIDSDLGDAWAFFYKFELQHGTEEQQEEVRKRCESAEPRHGELWCAVSKDIANWQKKIGDILRLVAGRIKNTF

SEQ ID NO: 40702 - protein, 901 aa, Homo sapiens
MNKKKKPFLGMPAPLGYVPGLGRGATGFTTRSDIGPARDANDPVDDRHAPPGKRTVGDQMKKNQAADDDDEDLNDTNYDEFNGYAGSLFSSGPYEKDDEEADAIYAALDKRMDERRKERREQREKEEIEKYRMERPKIQQQFSDLKRKLAEVTEEEWLSIPEVGDARNKRQRNPRYEKLTPVPDSFFAKHLQTGENHTSVDPRQTQFGGLNTPYPGGLNTPYPGGMTPGLMTPGTGELDMRKIGQARNTLMDMRLSQVSDSVSGQTVVDPKGYLTDLNSMIPTHGGDINDIKKARLLLKSVRETNPHHPPAWIASARLEEVTGKLQVARNLIMKGTEMCPKSEDVWLEAARLQPGDTAKAVVAQAVRHLPQSVRIYIRAAELETDIRAKKRVLRKALEHVPNSVRLWKAAVELEEPEDARIMLSRAVECCPTSVELWLALARLETYENARKVLNKARENIPTDRHIWITAAKLEEANGNTQMVEKIIDRAITSLRANGVEINREQWIQDAEECDRAGSVATCQAVMRAVIGIGIEEEDRKHTWMEDADSCVAHNALECARAIYAYALQVFPSKKSVWLRAAYFEKNHGTRESLEALLQRAVAHCPKAEVLWLMGAKSKWLAGDVPAARSILALAFQVFMKSVKLEWVQDNIRAAQDLCEEALRHYEDFPKLWMMKGQIEEQKEMMEKAREAYNQGLKKCPHSTPLWLLLSRLEEKIGQLTRARAILEKSRLKNPKNPGLWLESVRLEYRAGLKNIANTLMAKALQECPNSGILWSEAIFLEARPQRRTKSVDALKKCEHDPHVLLAVAKLFWSQRKITKAREWFHRTVKIDSDLGDAWAFFYKFELQHGTEEQQEEVRKRCESAEPRHGELWCAVSKDIANWQKKIGDILRLVAGRIKNTF

SEQ ID NO: 40703 - protein, 298 aa, Homo sapiens
MACIENVLGGHAPSPLVVSVDKNGNQELHHDMPLQCLSSKPEDDAEPWGQPQVPLRPSVNVLTDLDSKQLEWPSERTGSCIPLHSLRAHRHPYGPPPAVAEESLATAEVNSSDALAGWRQEGQDAINVSWEVSGGPPALIVGGTKVNNGGTERGSNNARLHVALPQGKGFFPPRGPQVRGPSHIPTLRSGIVMEVPPGNTRIACRGKLAHVSFPLRGPCHPMHNWPRPIPLSSSTPGLPSCSTVHCFIPPRPPIFNPFLTMPLPFAPPPIFGPPLPSYFAHFHSGGMPAPASPNREHS

SEQ ID NO: 40704 - protein, 865 aa, Homo sapiens
MALVLGSLLLLGLCGNSFSGGQPSSTDAPKAWNYELPATNYETQDSHKAGPIGILFELVHIFLYVVQPRDFPEDTLRKFLQKAYESKIDYDKPETVILGLKIVYYEAGIILCCVLGLLFIILMPLVGYFFCMCRCCNKCGGEMHQRQKENGPFLRKCFAISLLVICIIISIGIFYGFVANHQVRTRIKRSRKLADSNFKDLRTLLNETPEQIKYILAQYNTTKDKAFTDLNSINSVLGGGILDRLRPNIIPVLDEIKSMATAIKETKEALENMNSTLKSLHQQSTQLSSSLTSVKTSLRSSLNDPLCLVHPSSETCNSIRLSLSQLNSNPELRQLPPVDAELDNVNNVLRTDLDGLVQQGYQSLNDIPDRVQRQTTTVVAGIKRVLNSIGSDIDNVTQRLPIQDILSAFSVYVNNTESYIHRNLPTLEEYDSYWWLGGLVICSLLTLIVIFYYLGLLCGVCGYDRHATPTTRGCVSNTGGVFLMVGVGLSFLFCWILMIIVVLTFVFGANVEKLICEPYTSKELFRVLDTPYLLNEDWEYYLSGKLFNKSKMKLTFEQVYSDCKKNRGTYGTLHLQNSFNISEHLNINEHTGSISSELESLKVNLNIFLLGAAGRKNLQDFAACGIDRMNYDSYLAQTGKSPAGVNLLSFAYDLEAKANSLPPGNLRNSLKRDAQTIKTIHQQRVLPIEQSLSTLYQSVKILQRTGNGLLERVTRILASLDFAQNFITNNTSSVIIEETKKYGRTIIGYFEHYLQWIEFSISEKVASCKPVATALDTAVDVFLCSYIIDPLNLFWFGIGKATVFLLPALIFAVKLAKYYRRMDSEDVYDDVETIPMKNMENGNNGYHKDHVYGIHNPVMTSPSQH

SEQ ID NO: 40705 - protein, 856 aa, Homo sapiens
MALVLGSLLLLGLCGNSFSGGQPSSTDAPKAWNYELPATNYETQDSHKAGPIGILFELVHIFLYVVQPRDFPEDTLRKFLQKAYESKIDYDKIVYYEAGIILCCVLGLLFIILMPLVGYFFCMCRCCNKCGGEMHQRQKENGPFLRKCFAISLLVICIIISIGIFYGFVANHQVRTRIKRSRKLADSNFKDLRTLLNETPEQIKYILAQYNTTKDKAFTDLNSINSVLGGGILDRLRPNIIPVLDEIKSMATAIKETKEALENMNSTLKSLHQQSTQLSSSLTSVKTSLRSSLNDPLCLVHPSSETCNSIRLSLSQLNSNPELRQLPPVDAELDNVNNVLRTDLDGLVQQGYQSLNDIPDRVQRQTTTVVAGIKRVLNSIGSDIDNVTQRLPIQDILSAFSVYVNNTESYIHRNLPTLEEYDSYWWLGGLVICSLLTLIVIFYYLGLLCGVCGYDRHATPTTRGCVSNTGGVFLMVGVGLSFLFCWILMIIVVLTFVFGANVEKLICEPYTSKELFRVLDTPYLLNEDWEYYLSGKLFNKSKMKLTFEQVYSDCKKNRGTYGTLHLQNSFNISEHLNINEHTGSISSELESLKVNLNIFLLGAAGRKNLQDFAACGIDRMNYDSYLAQTGKSPAGVNLLSFAYDLEAKANSLPPGNLRNSLKRDAQTIKTIHQQRVLPIEQSLSTLYQSVKILQRTGNGLLERVTRILASLDFAQNFITNNTSSVIIEETKKYGRTIIGYFEHYLQWIEFSISEKVASCKPVATALDTAVDVFLCSYIIDPLNLFWFGIGKATVFLLPALIFAVKLAKYYRRMDSEDVYDDVETIPMKNMENGNNGYHKDHVYGIHNPVMTSPSQH

SEQ ID NO: 40706 - protein, 830 aa, Homo sapiens
MALVLGSLLLLGLCGNSFSGGQPSSTDAPKAWNYELPATNYETQDSHKAGPIGILFELVHIFLYVVQPRDFPEDTLRKFLQKAYESKIDYDKIVYYEAGIILCCVLGLLFIILMPLVGYFFCMCRCCNKCGGEMHQRQKENGPFLRKCFAISLLVICIIISIGIFYGFVANHQVRTRIKRSRKLADSNFKDLRTLLNETPEQIKYILAQYNTTKDKAFTDLNSINSVLGGGILDRLRPNIIPVLDEIKSMATAIKETKEALENMNSTLKSLHQQSTQLSSSLTSVKTSLRSSLNDPLCLVHPSSETCNSIRLSLSQLNSNPELRQLPPVDAELDNVNNVLRTDLDGLVQQGYQSLNDIPDRVQRQTTTVVAGIKRVLNSIGSDIDNVTQRLPIQDILSAFSVYVNNTESYIHRNLPTLEEYDSYWWLGGLVICSLLTLIVIFYYLGLLCGVCGYDRHATPTTRGCVSNTGGVFLMVGVGLSFLFCWILMIIVVLTFVFGANVEKLICEPYTSKELFRVLDTPYLLNEDWEYYLSGKLFNKSKMKLTFEQVYSDCKKNRGTYGTLHLQNSFNISEHLNINEHTGSISSELESLKVNLNIFLLGAAGRKNLQDFAACGIDRMNYDSYLAQTGKSPAGVNLLSFAYDLEAKANSLPPGNLRNSLKRDAQTIKTIHQQRVLPIEQSLSTLYQSVKILQRTGNGLLERVTRILASLDFAQNFITNNTSSVIIEETKKYGRTIIGYFEHYLQWIEFSISEKVASCKPVATALDTAVDVFLCSYIIDPLNLFWFGIGKATVFLLPALIFAVKLAKYYRRMDSEDVYDDSSWVTSVQC

SEQ ID NO: 40707 - protein, 833 aa, Homo sapiens
MALVLGSLLLLGLCGNSFSGGQPSSTDAPKAWNYELPATNYETQDSHKAGPIGILFELVHIFLYVVQPRDFPEDTLRKFLQKAYESKIDYDKIVYYEAGIILCCVLGLLFIILMPLVGYFFCMCRCCNKCGGEMHQRQKENGPFLRKCFAISLLVICIIISIGIFYGFVANHQVRTRIKRSRKLADSNFKDLRTLLNETPEQIKYILAQYNTTKDKAFTDLNSINSVLGGGILDRLRPNIIPVLDEIKSMATAIKETKEALENMNSTLKSLHQQSTQLSSSLTSVKTSLRSSLNDPLCLVHPSSETCNSIRLSLSQLNSNPELRQLPPVDAELDNVNNVLRTDLDGLVQQGYQSLNDIPDRVQRQTTTVVAGIKRVLNSIGSDIDNVTQRLPIQDILSAFSVYVNNTESYIHRNLPTLEEYDSYWWLGGLVICSLLTLIVIFYYLGLLCGVCGYDRHATPTTRGCVSNTGGVFLMVGVGLSFLFCWILMIIVVLTFVFGANVEKLICEPYTSKELFRVLDTPYLLNEDWEYYLSGKLFNKSKMKLTFEQVYSDCKKNRGTYGTLHLQNSFNISEHLNINEHTGSISSELESLKVNLNIFLLGAAGRKNLQDFAACGIDRMNYDSYLAQTGKSPAGVNLLSFAYDLEAKANSLPPGNLRNSLKRDAQTIKTIHQQRVLPIEQSLSTLYQSVKILQRTGNGLLERVTRILASLDFAQNFITNNTSSVIIEETKKYGRTIIGYFEHYLQWIEFSISEKVASCKPVATALDTAVDVFLCSYIIDPLNLFWFGIGKATVFLLPALIFAVKLAKYYRRMDSEDVYDDVETIPMKNPSQH

SEQ ID NO: 40708 - protein, 825 aa, Homo sapiens
MALVLGSLLLLGLCGNSFSGGQPSSTDAPKAWNYELPATNYETQDSHKAGPIGILFELVHIFLYVVQPRDFPEDTLRKFLQKAYESKIDYDKIVYYEAGIILCCVLGLLFIILMPLVGYFFCMCRCCNKCGGEMHQRQKENGPFLRKCFAISLLVICIIISIGIFYGFVANHQVRTRIKRSRKLADSNFKDLRTLLNETPEQIKYILAQYNTTKDKAFTDLNSINSVLGGGILDRLRPNIIPVLDEIKSMATAIKETKEALENMNSTLKSLHQQSTQLSSSLTSVKTSLRSSLNDPLCLVHPSSETCNSIRLSLSQLNSNPELRQLPPVDAELDNVNNVLRTDLDGLVQQGYQSLNDIPDRVQRQTTTVVAGIKRVLNSIGSDIDNVTQRLPIQDILSAFSVYVNNTESYIHRNLPTLEEYDSYWWLGGLVICSLLTLIVIFYYLGLLCGVCGYDRHATPTTRGCVSNTGGVFLMVGVGLSFLFCWILMIIVVLTFVFGANVEKLICEPYTSKELFRVLDTPYLLNEDWEYYLSGKLFNKSKMKLTFEQVYSDCKKNRGTYGTLHLQNSFNISEHLNINEHTGSISSELESLKVNLNIFLLGAAGRKNLQDFAACGIDRMNYDSYLAQTGKSPAGVNLLSFAYDLEAKANSLPPGNLRNSLKRDAQTIKTIHQQRVLPIEQSLSTLYQSVKILQRTGNGLLERVTRILASLDFAQNFITNNTSSVIIEETKKYGRTIIGYFEHYLQWIEFSISEKVASCKPVATALDTAVDVFLCSYIIDPLNLFWFGIGKATVFLLPALIFAVKLAKYYRRMDSEDVYDDPSQH

SEQ ID NO: 40709 - protein, 834 aa, Homo sapiens
MALVLGSLLLLGLCGNSFSGGQPSSTDAPKAWNYELPATNYETQDSHKAGPIGILFELVHIFLYVVQPRDFPEDTLRKFLQKAYESKIDYDKPETVILGLKIVYYEAGIILCCVLGLLFIILMPLVGYFFCMCRCCNKCGGEMHQRQKENGPFLRKCFAISLLVICIIISIGIFYGFVANHQVRTRIKRSRKLADSNFKDLRTLLNETPEQIKYILAQYNTTKDKAFTDLNSINSVLGGGILDRLRPNIIPVLDEIKSMATAIKETKEALENMNSTLKSLHQQSTQLSSSLTSVKTSLRSSLNDPLCLVHPSSETCNSIRLSLSQLNSNPELRQLPPVDAELDNVNNVLRTDLDGLVQQGYQSLNDIPDRVQRQTTTVVAGIKRVLNSIGSDIDNVTQRLPIQDILSAFSVYVNNTESYIHRNLPTLEEYDSYWWLGGLVICSLLTLIVIFYYLGLLCGVCGYDRHATPTTRGCVSNTGGVFLMVGVGLSFLFCWILMIIVVLTFVFGANVEKLICEPYTSKELFRVLDTPYLLNEDWEYYLSGKLFNKSKMKLTFEQVYSDCKKNRGTYGTLHLQNSFNISEHLNINEHTGSISSELESLKVNLNIFLLGAAGRKNLQDFAACGIDRMNYDSYLAQTGKSPAGVNLLSFAYDLEAKANSLPPGNLRNSLKRDAQTIKTIHQQRVLPIEQSLSTLYQSVKILQRTGNGLLERVTRILASLDFAQNFITNNTSSVIIEETKKYGRTIIGYFEHYLQWIEFSISEKVASCKPVATALDTAVDVFLCSYIIDPLNLFWFGIGKATVFLLPALIFAVKLAKYYRRMDSEDVYDDPSQH

SEQ ID NO: 40710 - protein, 842 aa, Homo sapiens
MALVLGSLLLLGLCGNSFSGGQPSSTDAPKAWNYELPATNYETQDSHKAGPIGILFELVHIFLYVVQPRDFPEDTLRKFLQKAYESKIDYDKPETVILGLKIVYYEAGIILCCVLGLLFIILMPLVGYFFCMCRCCNKCGGEMHQRQKENGPFLRKCFAISLLVICIIISIGIFYGFVANHQVRTRIKRSRKLADSNFKDLRTLLNETPEQIKYILAQYNTTKDKAFTDLNSINSVLGGGILDRLRPNIIPVLDEIKSMATAIKETKEALENMNSTLKSLHQQSTQLSSSLTSVKTSLRSSLNDPLCLVHPSSETCNSIRLSLSQLNSNPELRQLPPVDAELDNVNNVLRTDLDGLVQQGYQSLNDIPDRVQRQTTTVVAGIKRVLNSIGSDIDNVTQRLPIQDILSAFSVYVNNTESYIHRNLPTLEEYDSYWWLGGLVICSLLTLIVIFYYLGLLCGVCGYDRHATPTTRGCVSNTGGVFLMVGVGLSFLFCWILMIIVVLTFVFGANVEKLICEPYTSKELFRVLDTPYLLNEDWEYYLSGKLFNKSKMKLTFEQVYSDCKKNRGTYGTLHLQNSFNISEHLNINEHTGSISSELESLKVNLNIFLLGAAGRKNLQDFAACGIDRMNYDSYLAQTGKSPAGVNLLSFAYDLEAKANSLPPGNLRNSLKRDAQTIKTIHQQRVLPIEQSLSTLYQSVKILQRTGNGLLERVTRILASLDFAQNFITNNTSSVIIEETKKYGRTIIGYFEHYLQWIEFSISEKVASCKPVATALDTAVDVFLCSYIIDPLNLFWFGIGKATVFLLPALIFAVKLAKYYRRMDSEDVYDDVETIPMKNPSQH

SEQ ID NO: 40711 - protein, 844 aa, Homo sapiens
MVTVMPLEMEKTISKLMFDFQRNSTSDDDSGCALEEYAWVPPGLKPEQVHQYYSCLPEEKVPYVNSPGEKLRIKQLLHQLPPHDNEVRYCNSLDEEEKRELKLFSSQRKRENLGRGNVRPFPVTMTGAICEQCGGQINGGDIAVFASRAGHGVCWHPPCFVCTVCNELLVDLIYFYQDGKIYCGRHHAECLKPRCAACDEIIFADECTEAEGRHWHMKHFCCFECETVLGGQRYIMKEGRPYCCHCFESLYAEYCDTCAQHIGIDQGQMTYDGQHWHATETCFCCAHCKKSLLGRPFLPKQGQIFCSRACSAGEDPNGSDSSDSAFQNARAKESRRSAKIGKNKGKTEEPMLNQHSQLQVSSNRLSADVDPLSLQMDMLSLSSQTPSLNRDPIWRSREEPYHYGNKMEQNQTQSPLQLLSQCNIRTSYSPGGQGAGAQPEMWGKHFSNPKRSSSLAMTGHAGSFIKECREDYYPGRLRSQESYSDMSSQSFSETRGSIQVPKYEEEEEEEGGLSTQQCRTRHPISSLKYTEDMTPTEQTPRGSMESLALSNATGLSADGGAKRQEHLSRFSMPDLSKDSGMNVSEKLSNMGTLNSSMQFRSAESVRSLLSAQQYQEMEGNLHQLSNPIGYRDLQSHGRMHQSFDFDGGMAGSKLPGQEGVRIQPMSERTRRRATSRDDNRRFRPHRSRRSRRSRSDNALHLASEREAISRLKDRPPLRAREDYDQFMRQRSFQESMGHGSRRDLYGQCPRTVSDLALQNAFGDRWGPYFAEYDWCSTCSSSSESDNEGYFLGEPIPQPARLRYVTSDELLHKYSSYGLPKSSTLGGRGQLHSRKRQKSKNCIIS

SEQ ID NO: 40712 - protein, 139 aa, Homo sapiens
MSSLPVPYTLPVSLPVGSCVIITGTPILTFVKDPQLEVNFYTGMDEDSDIAFQFRLHFGHPAIMNSCVFGIWRYEEKCYYLPFEDGKPFELCIYVRHKEYKVMVNGQRIYNFAHRFPPASVKMLQVFRDISLTRVLISD

SEQ ID NO: 40713 - protein, 168 aa, Homo sapiens
MSLTHRLHLCKYWGCAVSNVCRFWEGRPLPLMIVVPYTLPVSLPVGSCVIITGTPILTFVKDPQLEVNFYTGMDEDSDIAFQFRLHFGHPAIMNSCVFGIWRYEEKCYYLPFEDGKPFELCIYVRHKEYKVMVNGQRIYNFAHRFPPASVKMLQVFRDISLTRVLISD

SEQ ID NO: 40714 - protein, 140 aa, Homo sapiens
MAGWQSYVDNLMCDGCCQEAAIVGYCDAKYVWAATAGGVFQSITPIEIDMIVGKDREGFFTNGLTLGAKKCSVIRDSLYVDGDCTMDIRTKSQGGEPTYNVAVGRAGRVLVFVMGKEGVHGGGLNKKAYSMAKYLRDSGF

SEQ ID NO: 40715 - protein, 140 aa, Homo sapiens
MAGWQSYVDNLMCDGCCQEAAIVGYCDAKYVWAATAGGVFQSITPIEIDMIVGKDREGFFTNGLTLGAKKCSVIRDSLYVDGDCTMDIRTKSQGGEPTYNVAVGRAGRALVIVMGKEGVHGGTLNKKAYELALYLRRSDV

SEQ ID NO: 40716 - protein, 178 aa, Homo sapiens [sequence omitted]

SEQ ID NO: 40717 - protein, 177 aa, Homo sapiens
MADQGEKENPMRELRIRKLCLNICVGESGDRLTRAAKVLEQLTGQTPVFSKARYTVRSFGIRRNEKIAVHCTVRGAKAEEILEKGLKVREYELRKNNFSDTGNFGFGIQEHIDLGIKYDPSIGIYGLDFYVVLGRPGFSIADKKRRTGCIGAKHRISKEEAMRWFQQKYDGIILPGK

SEQ ID NO: 40718 - protein, 182 aa, Homo sapiens
MMRRSPSGLKSPRVSQGRKPRDPESLLFLRCCLGSEPHNLSSLLSPEAGQEPLPKLLPQPLAGHAAWGIHGVPTSLLLAGECWGQGMAVPADPPPASPYRTSPRPPPGPLPRYRPQQHLLLPLGRLHALCPGCPLQQSLQFERGTLSAPRLWSWMKLETIILSKLSQGQKTKHRMFSLISES

SEQ ID NO: 40719 - protein, 340 aa, Homo sapiens
MAASSSEISEMKGVEESPKVPGEGPGHSEAETGPPQVLAGVPDQPEAPQPGPNTTAAPVDSGPKAGLAPETTETPAGASETAQATDLSLSPGGESKANCSPEDPCQETVSKPEVSKEATADQGSRLESAAPPEPAPEPAPQPDPRPDSQPTPKPALQPELPTQEDPTPEILSESVGEKQENGAVVPLQAGDGEEGPAPEPHSPPSKKSPPANGAPPRVLQQLVEEDRMRRAHSGHPGSPRGSLSRHPSSQLAGPGVEGGEGTQKPRDYIILAILSCFCPMWPVNIVAFAYAVMSRNSLQQGDVDGAQRLGRVAKLLSIVALVGGVLIIIASCVINLGVYK

SEQ ID NO: 40720 - protein, 394 aa, Homo sapiens
MAASSSEISEMKGVEESPKVPGEGPGHSEAETGPPQVLAGVPDQPEAPQPGPNTTAAPVDSGPKAGLAPETTETPAGASETAQATDLSLSPGGESKANCSPEDPCQETVSKPEVSKEATADQGSRLESAAPPEPAPEPAPQPDPRPDSQPTPKPALQPELPTQEDPTPEILSESVGEKQENGAVVPLQAGDGEEGPAPEPHSPPSKKSPPANGAPPRVLQQLVEEDRMRRAHSGHPGSPRGSLSRHPSSQLAGPGVEGGEGTQKPRDYIILAILSCFCPMWPVNIVAFAYAVMSRNSLQQGDVDGAQRLGRVAKLLSIVALVGGVLIIIASCVINLGGEWGLGTGRGGMEGLARAALLTPAPALSCLSSLPLLCLSLSPPPPVCPSLSSPTVYK

SEQ ID NO: 40721 - protein, 299 aa, Homo sapiens
MAASSSEISEMKGVEESPKVPGEGPGHSEAETGPPQVLAGVPDQPEAPQPGPNTTAAPVDSGPKAGLAPETTETPAGASETAQATDLSLSPGGESKANCSPEDPCQETVSKPEVSKEATADQGSRLESAAPPEPAPEPAPQPDPRPDSQPTPKPALQPELPTQEDPTPEILSESVGEKQENGAVVPLQAGDGEEGPAPEPHSPPSKKSPPANGAPPRVLQQLVEEDRMRRAHSGHPGSPRGSLSRHPSSQLAGPGVEGGEGTQKPRDYIILAILSCFCPMWPVNIVAFAYAVMVSPMGP

SEQ ID NO: 40722 - protein, 981 aa, Homo sapiens
MASSPWGCVCGLLLLLLPLLGTGPALGRGFPRPLENSEIPMIPGAHPKGSVGSEPQAFDVFPENPRADSHRNSDVRHAPAEEMPEKPVASPLGPALYGPKAAQGAQRERLPVTDDLQMAQGPSSHGWTGPLDSQELLQQEAVAPHPVGHPHLTFIPTTPRRQLRVATVPPSLQHEGQEGQWPPRDEGLKAKTKSRVPPTSPSDHQGPPHTLVSHSGTVKRPVLEGQGGFEEHLQEAAQGPHFTQQDPAAPDVGSVPPVEVVYSQEPGAQPDLALARSLPPAEELPVETPKRAGAEVSWEVSSPGPPPKQADLPDAKDSPGPQPTDPPASEAPDRPSKPERAAMNGADPISPQRVRGAVEAPGTPKSLIPGPSDPGPAVNRTESPMGALQPDEAEEWPGRPQSHPPAPPVQAPSTSRRGLIRVTTQRALGQPPPPEPTASSMASAPASSPPANATAPPLRWGPLRRVLSFSWELHVYGVGVLFLLPALLALAALAAAPAGPRLALVAAVLVLVASALRSAYMLTDPYGSQARLGVRGGLVLYNLPFPLLLTALAALTLLGLGAGLPPPLQNPLLLGAVALVHGVGLLATDLLSTWSVLNLLTQGLSCAWGAAVALGTLCLCRRRLLDGPRGWDASPGPRLLAVAGALGLLASGLQLAAALWLYPGPGRVGRFSWAWWGVHFWLRLLELTWALALALAAVAAARPRPPTEHACWAKLMRLACPAPSGKSEVPERPNNCYAGPSNVGAGSLDISKSLIRNPAESGQLATPSSGAWGSAASLGRGPQGGPGLSRNGVGPAPSLSELDLRPPSPINLSRSIDAALFREHLVRDSVFQRCGLRGLASPPPGGALRPRRGSHPKAELDDAGSSLLRGRCRSLSDVRVRGPVPQHVVEAPDGAAAAASGSSLDSFSRGSLKISWNPWRHGLSSVDSLPLDELPSTVQLLPAPTPAPDSTAARQGDGQGEVQPRGKPGESRSASSDTIEL

SEQ ID NO: 40723 - protein, 597 aa, Homo sapiens
MGALQPDEAEEWPGRPQSHPPAPPVQAPSTSRRGLIRVTTQRALGQPPPPEPTASSMASAPASSPPANATAPPLRWGPLRRVLSFSWELHVYGVGVLFLLPALLALAALAAAPAGPRLALVAAVLVLVASALRSAYMLTDPYGSQARLGVRGGLVLYNLPFPLLLTALAALTLLGLGAGLPPPLQNPLLLGAVALVHGVGLLATDLLSTWSVLNLLTQGLSCAWGAAVALGTLCLCRRRLLDGPRGWDASPGPRLLAVAGALGLLASGLQLAAALWLYPGPGRVGRFSWAWWGVHFWLRLLELTWALALALAAVAAARPRPPTEHACWAKLMRLACPAPSGKSEVPERPNNCYAGPSNVGAGSLDISKSLIRNPAESGQLATPSSGAWGSAASLGRGPQGGPGLSRNGVGPAPSLSELDLRPPSPINLSRSIDAALFREHLVRDSVFQRCGLRGLASPPPGGALRPRRGSHPKAELDDAGSSLLRGRCRSLSDVRVRGPVPQHVVEAPDGAAAAASGSSLDSFSRGSLKISWNPWRHGLSSVDSLPLDELPSTVQLLPAPTPAPDSTAARQGDGQGEVQPRGKPGESRSASSDTIEL

SEQ ID NO: 40724 - protein, 421 aa, Homo sapiens
MASSPWGCVCGLLLLLLPLLGTGPALGRGFPRPLENSEIPMIPGAHPKGSVGSEPQAFDVFPENPRADSHRNSDVRHAPAEEMPEKPVASPLGPALYGPKAAQGAQRERLPVTDDLQMAQGPSSHGWTGPLDSQELLQQEAVAPHPVGHPHLTFIPTTPRRQLRVATVPPSLQHEGQEGQWPPRDEGLKAKTKSRVPPTSPSDHQGPPHTLVSHSGTVKRPVLEGQGGFEEHLQEAAQGPHFTQQDPAAPDVGSVPPVEVVYSQEPGAQPDLALARSLPPAEELPVETPKRAGAEVSWEVSSPGPPPKQADLPDAKDSPGPQPTDPPASEAPDRPSKPERAAMNGADPISPQRVRGAVEAPGTPKSLIPGPSDPGPAVNRTESPMGALQPGESMAGVWGEGVLCLVTENLCWGCMGAEGGE

SEQ ID NO: 40725 - protein, 260 aa, Homo sapiens
MTRHWPWEVSLRMENEHVCGGALIDPSWVVTAAHCIQGTKEYSVVLGTSKLQPMNFSRALWVPVRDIIMHPKYWGRAFIMGDVALVHLQTPVTFSEYVQPICLPEPNFNLKVGTQCWVTGWSQVKQRFSANSMLTPELQEAEVFIMDNKRCDRHYKKSFFPPVVPLVLGDMICATNYGENLCYGDSGGPLACEVEGRWILAGVLSWEKACVKAQNPGVYTRITKYTKWIKKQMSNGAFSGPCASACLLFLCWLLQPQMGS

SEQ ID NO: 40726 - protein, 228 aa, Homo sapiens
MTRHWPWEVSLRMENEHVCGGALIDPSWVVTAAHCIQGTKEYSVVLGTSKLQPMNFSRALWVPVRDIIMHPKYWGRAFIMGDVALVHLQTPVTFSSTANSMLTPELQEAEVFIMDNKRCDRHYKKSFFPPVVPLVLGDMICATNYGENLCYGDSGGPLACEVEGRWILAGVLSWEKACVKAQNPGVYTRITKYTKWIKKQMSNGAFSGPCASACLLFLCWLLQPQMGS

SEQ ID NO: 40727 - protein, 439 aa, Homo sapiens
MNLLPNIESPVTRQEKMATVWDEAEQDGIGEEVLKMSTEEIIQRTRLLDSEIKIMKSEVLRVTHELQAMKDKIKENSEKIKVNKTLPYLVSNVIELLDVDPNDQEEDGANIDLDSQRKGKCAVIKTSTRQTYFLPVIGLVDAEKLKPGDLVGVNKDSYLILETLPTEYDSRVKAMEVDERPTEQYSDIGGLDKQIQELVEAIVLPMNHKEKFENLGIQPPKGVLMYGPPGTGKTLLARACAAQTKATFLKLAGPQLVQMFIGDGAKLVRDAFALAKEKAPSIIFIDELDAIGTKRFDSEKAGDREVQRTMLELLNQLDGFQPNTQVKVIAATNRVDILDPALLRSGRLDRKIEFPMPNEEARARIMQIHSRKMNVSPDVNYEELARCTDDFNGAQCKAVCVEAGMIALRRGATELTHEDYMEGILEVQAKKKANLQYYA

SEQ ID NO: 40728 - protein, 425 aa, Homo sapiens
MMGKLPLGVVSPYVKMSSGGYTDPLKFYATSYCTAYGREDFKPRVGSHVGTGYKSNFQPVVSCQASLEALDNPARGEQAQDHFQSVASQSYRPLEVPDGKHPLPWSMRQTSSGYGREKPSAGPPTKEVRKVHFDTQEHGPQAITGLEPREVPLLHQQQGQDPLERENFRHGPRFMTSEYNSKYLRDPLDQPDFLQKKSIGAKEGSGFTKQSHQSPIVFQPPSQALPGDPALLPGQSVTKSDFLPKTHLHGDEFLPVLARGSKRETAFSRGNERILNPRVPPPCPEPSSVSHQQFQPLHRMQQTNVALLGRETVGKKEPTGFSLNNPMYVRSPCDPDRDQRYLTTYNQGYFENIPKGLDQEGWTRGGIQPQMPGGYALSQPVSCMEATPNPMESLRHLHPHVGRTLTSADPFYQNTPHSSRCVAHS

SEQ ID NO: 40729 - protein, 405 aa, Homo sapiens
MMGKLPLGVVSPYVKMSSGGYTDPLKFYATSYCTAYGREDFKPRVGSHVGTGYKSNFQPVVSCQASLEALDNPARGEQAQDHFQSVASQSYRPLEVPDGKHPLPWSMRQTSSGYGREKPSAGPPTKEVRKVHFDTQEHGPQAITGLEPREVPLLHQQQGQDPLERENFRHGPRFMTSEYNSKYLRDPLDQPDFLQKKSIGAKEGSGFTKQSHQSPIVFQPPSQALPGDPGDEFLPVLARGSKRETAFSRGNERILNPRVPPPCPEPSSVSHQQFQPLHRMQQTNVALLGRETVGKKEPTGFSLNNPMYVRSPCDPDRDQRYLTTYNQGYFENIPKGLDQEGWTRGGIQPQMPGGYALSQPVSCMEATPNPMESLRHLHPHVGRTLTSADPFYQNTPHSSRCVAHS

SEQ ID NO: 40730 - protein, 4128 aa, Homo sapiens [sequence omitted]

SEQ ID NO: 40731 - protein, 4097 aa, Homo sapiens
MAGSGAGVRCSLLRLQETLSAADRCGAALAGHQLIRGLGQECVLSSSPAVLALQTSLVFSRDFGLLVFVRKSLNSIEFRECREEILKFLCIFLEKMGQKIAPYSVEIKNTCTSVYTKDRAAKCKIPALDLLIKLLQTFRSSRLMDEFKIGELFSKFYGELALKKKIPDTVLEKVYELLGLLGEVHPSEMINNAENLFRAFLGELKTQMTSAVREPKLPVLAGCLKGLSSLLCNFTKSMEEDPQTSREIFNFVLKAIRPQIDLKRYAVPSAGLRLFALHASQFSTCLLDNYVSLFEVLLKWCAHTNVELKKAALSALESFLKQVSNMVAKNAEMHKNKLQYFMEQFYGIIRNVDSNNKELSIAIRGYGLFAGPCKVINAKDVDFMYVELIQRCKQMFLTQTDTGDDRVYQMPSFLQSVASVLLYLDTVPEVYTPVLEHLVVMQIDSFPQYSPKMQLVCCRAIVKVFLALAAKGPVLRNCISTVVHQGLIRICSKPVVLPKGPESESEDHRASGEVRTGKWKVPTYKDYVDLFRHLLSSDQMMDSILADEAFFSVNSSSESLNHLLYDEFVKSVLKIVEKLDLTLEIQTVGEQENGDEAPGVWMIPTSDPAANLHPAKPKDFSAFINLVEFCREILPEKQAEFFEPWVYSFSYELILQSTRLPLISGFYKLLSITVRNAKKIKYFEGVSPKSLKHSPEDPEKYSCFALFVKFGKEVAVKMKQYKDELLASCLTFLLSLPHNIIELDVRAYVPALQMAFKLGLSYTPLAEVGLNALEEWSIYIDRHVMQPYYKDILPCLDGYLKTSALSDETKNNWEVSALSRAAQKGFNKVVLKHLKKTKNLSSNEAISLEEIRIRVVQMLGSLGGQINKNLLTVTSSDEMMKSYVAWDREKRLSFAVPFREMKPVIFLDVFLPRVTELALTASDRQTKVAACELLHSMVMFMLGKATQMPEGGQGAPPMYQLYKRTFPVLLRLACDVDQVTRQLYEPLVMQLIHWFTNNKKFESQDTVALLEAILDGIVDPVDSTLRDFCGRCIREFLKWSIKQITPQQQEKSPVNTKSLFKRLYSLALHPNAFKRLGASLAFNNIYREFREEESLVEQFVFEALVIYMESLALAHADEKSLGTIQQCCDAIDHLCRIIEKKHVSLNKAKKRRLPRGFPPSASLCLLDLVKWLLAHCGRPQTECRHKSIELFYKFVPLLPGNRSPNLWLKDVLKEEGVSFLINTFEGGGCGQPSGILAQPTLLYLRGPFSLQATLCWLDLLLAALECYNTFIGERTVGALQVLGTEAQSSLLKAVAFFLESIAMHDIIAAEKCFGTGAAGNRTSPQEGERYNYSKCTVVVRIMEFTTTLLNTSPEGWKLLKKDLCNTHLMRVLVQTLCEPASIGFNIGDVQVMAHLPDVCVNLMKALKMSPYKDILETHLREKITAQSIEELCAVNLYGPDAQVDRSRLAAVVSACKQLHRAGLLHNILPSQSTDLHHSVGTELLSLVYKGIAPGDERQCLPSLDLSCKQLASGLLELAFAFGGLCERLVSLLLNPAVLSTASLGSSQGSVIHFSHGEYFYSLFSETINTELLKNLDLAVLELMQSSVDNTKMVSAVLNGMLDQSFRERANQKHQGLKLATTILQHWKKCDSWWAKDSPLETKMAVLALLAKILQIDSSVSFNTSHGSFPEVFTTYISLLADTKLDLHLKGQAVTLLPFFTSLTGGSLEELRRVLEQLIVAHFPMQSREFPPGTPRFNNYVDCMKKFLDALELSQSPMLLELMTEVLCREQQHVMEELFQSSFRRIARRGSCVTQVGLLESVYEMFRKDDPRLSFTRQSFVDRSLLTLLWHCSLDALREFFSTIVVDAIDVLKSRFTKLNESTFDTQITKKMGYYKILDVMYSRLPKDDVHAKESKINQVFHGSCITEGNELTKTLIKLCYDAFTENMAGENQLLERRRLYHCAAYNCAISVICCVFNELKFYQGFLFSEKPEKNLLIFENLIDLKRRYNFPVEVEVPMERKKKYIEIRKEAREAANGDSDGPSYMSSLSYLADSTLSEEMSQFDFSTGVQSYSYSSQDPRPATGRFRRREQRDPTVHDDVLELEMDELNRHECMAPLTALVKHMHRSLGPPQGEEDSVPRDLPSWMKFLHGKLGNPIVPLNIRLFLAKLVINTEEVFRPYAKHWLSPLLQLAASENNGGEGIHYMVVEIVATILSWTGLATPTGVPKDEVLANRLLNFLMKHVFHPKRAVFRHNLEIIKTLVECWKDCLSIPYRLIFEKFSGKDPNSKDNSVGIQLLGIVMANDLPPYDPQCGIQSSEYFQALVNNMSFVRYKEVYAAAAEVLGLILRYVMERKNILEESLCELVAKQLKQHQNTMEDKFIVCLNKVTKSFPPLADRFMNAVFFLLPKFHGVLKTLCLEVVLCRVEGMTELYFQLKSKDFVQVMRHRDDERQKVCLDIIYKMMPKLKPVELRELLNPVVEFVSHPSTTCREQMYNILMWIHDNYRDPESETDNDSQEIFKLAKDVLIQGLIDENPGLQLIIRNFWSHETRLPSNTLDRLLALNSLYSPKIEVHFLSLATNFLLEMTSMSPDYPNPMFEHPLSECEFQEYTIDSDWRFRSTVLTPMFVETQASQGTLQTRTQEGSLSARWPVAGQIRATQQQHDFTLTQTADGRSSFDWLTGSSTDPLVDHTSPSSDSLLFAHKRSERLQRAPLKSVGPDFGKKRLGLPGDEVDNKVKGAAGRTDLLRLRRRFMRDQEKLSLMYARKGVAEQKREKEIKSELKMKQDAQVVLYRSYRHGDLPDIQIKHSSLITPLQAVAQRDPIIAKQLFSSLFSGILKEMDKFKTLSEKNNITQKLLQDFNRFLNTTFSFFPPFVSCIQDISCQHAALLSLDPAAVSAGCLASLQQPVGIRLLEEALLRLLPAELPAKRVRGKARLPPDVLRWVELAKLYRSIGEYDVLRGIFTSEIGTKQITQSALLAEARSDYSEAAKQYDEALNKQDWVDGEPTEAEKDFWELASLDCYNHLAEWKSLEYCSTASIDSENPPDLNKIWSEPFYQETYLPYMIRSKLKLLLQGEADQSLLTFIDKAMHGELQKAILELHYSQELSLLYLLQDDVDRAKYYIQNGIQSFMQNYSSIDVLLHQSRLTKLQSVQALTEIQEFISFISKQGNLSSQVPLKRLLNTWTNRYPDAKMDPMNIWDDIITNRCFFLSKIEEKLTPLPEDNSMNVDQDGDPSDRMEVQEQEEDISSLIRSCKFSMKMKMIDSARKQNNFSLAMKLLKELHKESKTRDDWLVSWVQSYCRLSHCRSRSQGCSEQVLTVLKTVSLLDENNVSSYLSKNILAFRDQNILLGTTYRIIANALSSEPACLAEIEEDKARRILELSGSSSEDSEKVIAGLYQRAFQHLSEAVQAAEEEAQPPSWSCGPAAGVIDAYMTLADFCDQQLRKEEENASVIDSAELQAYPALVVEKMLKALKLNSNEARLKFPRLLQIIERYPEETLSLMTKEISSVPCWQFISWISHMVALLDKDQAVAVQHSVEEITDNYPQAIVYPFIISSESYSFKDTSTGHKNKEFVARIKSKLDQGGVIQDFINALDQLSNPELLFKDWSNDVRAELAKTPVNKKNIEKMYERMYAALGDPKAPGLGAFRRKFIQTFGKEFDKHFGKGGSKLLRMKLSDFNDITNMLLLKMNKDSKPPGNLKECSPWMSDFKVEFLRNELEIPGQYDGRGKPLPEYHVRIAGFDERVTVMASLRRPKRIIIRGHDEREHPFLVKGGEDLRQDQRVEQLFQVMNGILAQDSACSQRALQLRTYSVVPMTSSDPRAPPCEYKDWLTKMSGKHDVGAYMLMYKGANRTETVTSFRKRESKVPADLLKRAFVRMSTSPEAFLALRSHFASSHALICISHWILGIGDRHLNNFMVAMETGGVIGIDFGHAFGSATQFLPVPELMPFRLTRQFINLMLPMKETGLMYSIMVHALRAFRSDPGLLTNTMDVFVKEPSFDWKNFEQKMLKKGGSWIQEINVAEKNWYPRQKICYAKRKLAGANPAVITCDELLLGHEKAPAFRDYVAVARGSKDHNIRAQEPESGLSEETQVKCLMDQATDPNILGRTWEGWEPWM

SEQ ID NO: 40732 - protein, 1070 aa, Homo sapiens
MGAARGSPARPRRLPLLSVLLLPLLGGTQTAIVFIKQPSSQDALQGRRALLRCEVEAPGPVHVYWLLDGAPVQDTERRFAQGSSLSFAAVDRLQDSGTFQCVARDDVTGEEARSANASFNIKWIEAGPVVLKHPASEAEIQPQTQVTLRCHIDGHPRPTYQWFRDGTPLSDGQSNHTVSSKERNLTLRPAGPEHSGLYSCCAHSAFGQACSSQNFTLSIADESFARVVLAPQDVVVARYEEAMFHCQFSAQPPPSLQWLFEDETPITNRSRPPHLRRATVFANGSLLLTQVRPRNAGIYRCIGQGQRGPPIILEATLHLAEIEDMPLFEPRVFTAGSEERVTCLPPKGLPEPSVWWEHAGVRLPTHGRVYQKGHELVLANIAESDAGVYTCHAANLAGQRRQDVNITVATVPSWLKKPQDSQLEEGKPGYLDCLTQATPKPTVVWYRNQMLISEDSRFEVFKNGTLRINSVEVYDGTWYRCMSSTPAGSIEAQARVQVLEKLKFTPPPQPQQCMEFDKEATVPCSATGREKPTIKWERADGSSLPEWVTDNAGTLHFARVTRDDAGNYTCIASNGPQGQIRAHVQLTVAVFITFKVEPERTTVYQGHTALLQCEAQGDPKPLIQWKGKDRILDPTKLGPRMHIFQNGSLVIHDVAPEDSGRYTCIAGNSCNIKHTEAPLYVVDKPVPEESEGPGSPPPYKMIQTIGLSVGAAVAYIIAVLGLMFYCKKRCKAKRLQKQPEGEEPEMECLNGGPLQNGQPSAEIQEEVALTSLGSGPAATNKRHSTSDKMHFPRSSLQPITTLGKSEFGEVFLAKAQGLEEGVAETLVLVKSLQSKDEQQQLDFRRELEMFGKLNHANVVRLLGLCREAEPHYMVLEYVDLGDLKQFLRISKSKDEKLKSQPLSTKQKVALCTQVALGMEHLSNNRFVHKDLAARNCLVSAQRQVKVSALGLSKDVYNSEYYHFRQAWVPLRWMSPEAILEGDFSTKSDVWAFGVLMWEVFTHGEMPHGGQADDEVLADLQAGKARLPQPEGCPSKLYRLMQRCWALSPKDRPSFSEIASALGDSTVDSKP

SEQ ID NO: 40733 - protein, 1030 aa, Homo sapiens
MGAARGSPARPRRLPLLSVLLLPLLGGTQTAIVFIKQPSSQDALQGRRALLRCEVEAPGPVHVYWLLDGAPVQDTERRFAQGSSLSFAAVDRLQDSGTFQCVARDDVTGEEARSANASFNIKWIEAGPVVLKHPASEAEIQPQTQVTLRCHIDGHPRPTYQWFRDGTPLSDGQSNHTVSSKERNLTLRPAGPEHSGLYSCCAHSAFGQACSSQNFTLSIADESFARVVLAPQDVVVARYEEAMFHCQFSAQPPPSLQWLFEDETPITNRSRPPHLRRATVFANGSLLLTQVRPRNAGIYRCIGQGQRGPPIILEATLHLAEIEDMPLFEPRVFTAGSEERVTCLPPKGLPEPSVWWEHAGVRLPTHGRVYQKGHELVLANIAESDAGVYTCHAANLAGQRRQDVNITVATVPSWLKKPQDSQLEEGKPGYLDCLTQATPKPTVVWYRNQMLISEDSRFEVFKNGTLRINSVEVYDGTWYRCMSSTPAGSIEAQARVQVLDGSSLPEWVTDNAGTLHFARVTRDDAGNYTCIASNGPQGQIRAHVQLTVAVFITFKVEPERTTVYQGHTALLQCEAQGDPKPLIQWKGKDRILDPTKLGPRMHIFQNGSLVIHDVAPEDSGRYTCIAGNSCNIKHTEAPLYVVDKPVPEESEGPGSPPPYKMIQTIGLSVGAAVAYIIAVLGLMFYCKKRCKAKRLQKQPEGEEPEMECLNGGPLQNGQPSAEIQEEVALTSLGSGPAATNKRHSTSDKMHFPRSSLQPITTLGKSEFGEVFLAKAQGLEEGVAETLVLVKSLQSKDEQQQLDFRRELEMFGKLNHANVVRLLGLCREAEPHYMVLEYVDLGDLKQFLRISKSKDEKLKSQPLSTKQKVALCTQVALGMEHLSNNRFVHKDLAARNCLVSAQRQVKVSALGLSKDVYNSEYYHFRQAWVPLRWMSPEAILEGDFSTKSDVWAFGVLMWEVFTHGEMPHGGQADDEVLADLQAGKARLPQPEGCPSKLYRLMQRCWALSPKDRPSFSEIASALGDSTVDSKP

SEQ ID NO: 40734 - protein, 940 aa, Homo sapiens
MGAARGSPARPRRLPLLSVLLLPLLGGTQTAIVFIKQPSSQDALQGRRALLRCEVEAPGPVHVYWLLDGAPVQDTERRFAQGSSLSFAAVDRLQDSGTFQCVARDDVTGEEARSANASFNIKWIEAGPVVLKHPASEAEIQPQTQVTLRCHIDGHPRPTYQWFRDGTPLSDGQSNHTVSSKERNLTLRPAGPEHSGLYSCCAHSAFGQACSSQNFTLSIADESFARVVLAPQDVVVARYEEAMFHCQFSAQPPPSLQWLFEDETPITNRSRPPHLRRATVFANGSLLLTQVRPRNAGIYRCIGQGQRGPPIILEATLHLAEIEDMPLFEPRVFTAGSEERVTCLPPKGLPEPSVWWEHAGVRLPTHGRVYQKGHELVLANIAESDAGVYTCHAANLAGQRRQDVNITVANGSSLPEWVTDNAGTLHFARVTRDDAGNYTCIASNGPQGQIRAHVQLTVAVFITFKVEPERTTVYQGHTALLQCEAQGDPKPLIQWKGKDRILDPTKLGPRMHIFQNGSLVIHDVAPEDSGRYTCIAGNSCNIKHTEAPLYVVDKPVPEESEGPGSPPPYKMIQTIGLSVGAAVAYIIAVLGLMFYCKKRCKAKRLQKQPEGEEPEMECLNGGPLQNGQPSAEIQEEVALTSLGSGPAATNKRHSTSDKMHFPRSSLQPITTLGKSEFGEVFLAKAQGLEEGVAETLVLVKSLQSKDEQQQLDFRRELEMFGKLNHANVVRLLGLCREAEPHYMVLEYVDLGDLKQFLRISKSKDEKLKSQPLSTKQKVALCTQVALGMEHLSNNRFVHKDLAARNCLVSAQRQVKVSALGLSKDVYNSEYYHFRQAWVPLRWMSPEAILEGDFSTKSDVWAFGVLMWEVFTHGEMPHGGQADDEVLADLQAGKARLPQPEGCPSKLYRLMQRCWALSPKDRPSFSEIASALGDSTVDSKP

SEQ ID NO: 40735 - protein, 1014 aa, Homo sapiens
MGAARGSPARPRRLPLLSVLLLPLLGGTQTAIVFIKQPSSQDALQGRRALLRCEVEAPGPVHVYWLLDGAPVQDTERRFAQGSSLSFAAVDRLQDSGTFQCVARDDVTGEEARSANASFNIKWIEAGPVVLKHPASEAEIQPQTQVTLRCHIDGHPRPTYQWFRDGTPLSDGQSNHTVSSKERNLTLRPAGPEHSGLYSCCAHSAFGQACSSQNFTLSIADESFARVVLAPQDVVVARYEEAMFHCQFSAQPPPSLQWLFEDETPITNRSRPPHLRRATVFANGSLLLTQVRPRNAGIYRCIGQGQRGPPIILEATLHLAEIEDMPLFEPRVFTAGSEERVTCLPPKGLPEPSVWWEHAGVRLPTHGRVYQKGHELVLANIAESDAGVYTCHAANLAGQRRQDVNITVATVPSWLKKPQDSQLEEGKPGYLDCLTQATPKPTVVWYRNQMLISEDSRFEVFKNGTLRINSVEVYDGTWYRCMSSTPAGSIEAQARVQVLEKLKFTPPPQPQQCMEFDKEATVPCSATGREKPTIKWERADGSSLPEWVTDNAGTLHFARVTRDDAGNYTCIASNGPQGQIRAHVQLTVAVFITFKVEPERTTVYQGHTALLQCEAQGDPKPLIQWKDKPVPEESEGPGSPPPYKMIQTIGLSVGAAVAYIIAVLGLMFYCKKRCKAKRLQKQPEGEEPEMECLNGGPLQNGQPSAEIQEEVALTSLGSGPAATNKRHSTSDKMHFPRSSLQPITTLGKSEFGEVFLAKAQGLEEGVAETLVLVKSLQSKDEQQQLDFRRELEMFGKLNHANVVRLLGLCREAEPHYMVLEYVDLGDLKQFLRISKSKDEKLKSQPLSTKQKVALCTQVALGMEHLSNNRFVHKDLAARNCLVSAQRQVKVSALGLSKDVYNSEYYHFRQAWVPLRWMSPEAILEGDFSTKSDVWAFGVLMWEVFTHGEMPHGGQADDEVLADLQAGKARLPQPEGCPSKLYRLMQRCWALSPKDRPSFSEIASALGDSTVDSKP

SEQ ID NO: 40736 - protein, 816 aa, Homo sapiens
MGAARGSPARPRRLPLLSVLLLPLLGGTQTAIVFIKQPSSQDALQGRRALLRCEVEAPGPVHVYWLLDGAPVQDTERRFAQGSSLSFAAVDRLQDSGTFQCVARDDVTGEEARSANASFNIKWIEAGPVVLKHPASEAEIQPQTQVTLRCHIDGHPRPTYQWFRDGTPLSDGQSNHTVSSKERNLTLRPAGPEHSGLYSCCAHSAFGQACSSQNFTLSIADESFARVVLAPQDVVVARYEEAMFHCQFSAQPPPSLQWLFEDETPITNRSRPPHLRRATVFANGSLLLTQVRPRNAGIYRCIGQGQRGPPIILEATLHLAEIEDMPLFEPRVFTAGSEERVTCLPPKGLPEPSVWWEHAGVRLPTHGRVYQKGHELVLANIAESDAGVYTCHAANLAGQRRQDVNITVATVPSWLKKPQDSQLEEGKPGYLDCLTQATPKPTVVWYRNQMLISEDSRFEVFKNGTLRINSVEVYDGTWYRCMSSTPAGSIEAQARVQVLEKLKFTPPPQPQQCMEFDKEATVPCSATGREKPTIKWERADGSSLPEWVTDNAGTLHFARVTRDDAGNYTCIASNGPQGQIRAHVQLTVAVFITFKVEPERTTVYQGHTALLQCEAQGDPKPLIQWKGKDRILDPTKLGPRMHIFQNGSLVIHDVAPEDSGRYTCIAGNSCNIKHTEAPLYVVDKPVPEESEGPGSPPPYKMIQTIGLSVGAAVAYIIAVLGLMFYCKKRCKAKRLQKQPEGEEPEMECLNGGPLQNGQPSAEIQEEVALTSLGSGPAATNKRHSTSDKMHFPRSSLQPITTLGRPQAVPEDFQEQG

SEQ ID NO: 40737 - protein, 1078 aa, Homo sapiens
MGSFLSGEKRPSAPTVGSAMEKKEFPTPPGRVGPGTQTAIVFIKQPSSQDALQGRRALLRCEVEAPGPVHVYWLLDGAPVQDTERRFAQGSSLSFAAVDRLQDSGTFQCVARDDVTGEEARSANASFNIKWIEAGPVVLKHPASEAEIQPQTQVTLRCHIDGHPRPTYQWFRDGTPLSDGQSNHTVSSKERNLTLRPAGPEHSGLYSCCAHSAFGQACSSQNFTLSIADESFARVVLAPQDVVVARYEEAMFHCQFSAQPPPSLQWLFEDETPITNRSRPPHLRRATVFANGSLLLTQVRPRNAGIYRCIGQGQRGPPIILEATLHLAEIEDMPLFEPRVFTAGSEERVTCLPPKGLPEPSVWWEHAGVRLPTHGRVYQKGHELVLANIAESDAGVYTCHAANLAGQRRQDVNITVATVPSWLKKPQDSQLEEGKPGYLDCLTQATPKPTVVWYRNQMLISEDSRFEVFKNGTLRINSVEVYDGTWYRCMSSTPAGSIEAQARVQVLEKLKFTPPPQPQQCMEFDKEATVPCSATGREKPTIKWERADGSSLPEWVTDNAGTLHFARVTRDDAGNYTCIASNGPQGQIRAHVQLTVAVFITFKVEPERTTVYQGHTALLQCEAQGDPKPLIQWKGKDRILDPTKLGPRMHIFQNGSLVIHDVAPEDSGRYTCIAGNSCNIKHTEAPLYVVDKPVPEESEGPGSPPPYKMIQTIGLSVGAAVAYIIAVLGLMFYCKKRCKAKRLQKQPEGEEPEMECLNGGPLQNGQPSAEIQEEVALTSLGSGPAATNKRHSTSDKMHFPRSSLQPITTLGKSEFGEVFLAKAQGLEEGVAETLVLVKSLQSKDEQQQLDFRRELEMFGKLNHANVVRLLGLCREAEPHYMVLEYVDLGDLKQFLRISKSKDEKLKSQPLSTKQKVALCTQVALGMEHLSNNRFVHKDLAARNCLVSAQRQVKVSALGLSKDVYNSEYYHFRQAWVPLRWMSPEAILEGDFSTKSDVWAFGVLMWEVFTHGEMPHGGQADDEVLADLQAGKARLPQPEGCPSKLYRLMQRCWALSPKDRPSFSEIASALGDSTVDSKP

SEQ ID NO: 40738 - protein, 177 aa, Homo sapiens
MQRRLVQQWSVAVFLLSYAVPSCGRSVEGLSRRLKRAVSEHQLLHDKGKSIQDLRRRFFLHHLIAEIHTAEIRATSEVSPNSKPSPNTKNHPVRFGSDDEGRYLTQETNKVETYKEQPLKTPGKKKKGKPGKRKEQEKKKRRTRSAWLDSGVTGSGLEGDHLSDTSTTSLELDSRRH

SEQ ID NO: 40739 - protein, 175 aa, Homo sapiens
MQRRLVQQWSVAVFLLSYAVPSCGRSVEGLSRRLKRAVSEHQLLHDKGKSIQDLRRRFFLHHLIAEIHTAEIRATSEVSPNSKPSPNTKNHPVRFGSDDEGRYLTQETNKVETYKEQPLKTPGKKKKGKPGKRKEQEKKKRRTRSAWLDSGVTGSGLEGDHLSDTSTTSLELDSR

SEQ ID NO: 40740 - protein, 209 aa, Homo sapiens
MQRRLVQQWSVAVFLLSYAVPSCGRSVEGLSRRLKRAVSEHQLLHDKGKSIQDLRRRFFLHHLIAEIHTAEIRATSEVSPNSKPSPNTKNHPVRFGSDDEGRYLTQETNKVETYKEQPLKTPGKKKKGKPGKRKEQEKKKRRTRSAWLDSGVTGSGLEGDHLSDTSTTSLELDSRTALLWGLKKKKENNRRTHHMQLMISLFKSPLLLL

SEQ ID NO: 40741 - protein, 451 aa, Homo sapiens
MVSRDQAHLGPKYVGLWDFKSRTDEELSFRAGDVFHVARKEEQWWWATLLDEAGGAVAQGYVPHNYLAERETVESEPWFFGCISRSEAVRRLQAEGNATGAFLIRVSEKPSADYVLSVRDTQAVRHYKIWRRAGGRLHLNEAVSFLSLPELVNYHRAQSLSHGLRLAAPCRKHEPEPLPHWDDWERPREEFTLCRKLGSGYFGEVFEGLWKDRVQVAIKVISRDNLLHQQMLQSEIQAMKKLRHKHILALYAVVSVGDPVYIITELMAKGSLLELLRDSDEKVLPVSELLDIAWQVAEGMCYLESQNYIHRDLAARNILVGENTLCKVGDFGLARLIKEDVYLSHDHNIPYKWTAPEALSRGHYSTKSDVWSFGILLHEMFSRGQVPYPGMSNHEAFLRVDAGYRMPCPLECPPSVHKLMLTCWCRDPEQRPCFKALRERLSSFTSYENPT

SEQ ID NO: 40742 - protein, 134 aa, Homo sapiens
MVSRDQAHLGPKYVGLWDFKSRTDEELSFRAGDVFHVARKEEQWWWATLLDEAGGAVAQGYVPHNYLAERETVESEPAGHAGCAALQDLAACRGPAAPERGGVLPQPARACELPQGPEPVPRPAAGRALPEARA

SEQ ID NO: 40743 - protein, 45 aa, Homo sapiens
MVSSAQLDFNLQALLGQLSQDDLCKFKSLIRTVSLGNELQKIPQT

SEQ ID NO: 40744 - protein, 843 aa, Homo sapiens
MAKPLTDSEKRKQISVRGLAGLGDVAEVRKSFNRHLHFTLVKDRNVATPRDYFFALAHTVRDHLVGRWIRTQQHYYERDPKRIYYLSLEFYMGRTLQNTMVNLGLQNACDEAIYQLGLDLEELEEIEEDAGLGNGGLGRLAACFLDSMATLGLAAYGYGIRYEFGIFNQKIVNGWQVEEADDWLRYGNPWEKARPEYMLPVHFYGRVEHTPDGVKWLDTQVVLAMPYDTPVPGYKNNTVNTMRLWSAKAPNDFKLQDFNVGDYIEAVLDRNLAENISRVLYPNDNFFEGKELRLKQEYFVVAATLQDIIRRFKSSKFGCRDPVRTCFETFPDKVAIQLNDTHPALSIPELMRILVDVEKVDWDKAWEITKKTCAYTNHTVLPEALERWPVSMFEKLLPRHLEIIYAINQRHLDHVAALFPGDVDRLRRMSVIEEGDCKRINMAHLCVIGSHAVNGVARIHSEIVKQSVFKDFYELEPEKFQNKTNGITPRRWLLLCNPGLADTIVEKIGEEFLTDLSQLKKLLPLVSDEVFIRDVAKVKQENKLKFSAFLEKEYKVKINPSSMFDVHVKRIHEYKRQLLNCLHVVTLYNRIKRDPAKAFVPRTVMIGGKAAPGYHMAKLIIKLVTSIGDVVNHDPVVGDRLKVIFLENYRVSLAEKVIPAADLSQQISTAGTEASGTGNMKFMLNGALTIGTMDGANVEMAEEAGAENLFIFGLRVEDVEALDRKGYNAREYYDHLPELKQAVDQISSGFFSPKEPDCFKDIVNMLMHHDRFKVFADYEAYMQCQAQVDQLYRNPKEWTKKVIRNIACSGKFSSDRTITEYAREIWGVEPSDLQIPPPNIPRD

SEQ ID NO: 40745 - protein, 341 aa, Homo sapiens
MVGEMETKEKPKPTPDYLMQLMNDKKLMSSLPNFCGIFNHLERLLDEEISRVRKDMYNDTLNGSTEKRSAELPDAVGPIVQLQEKLYVPVKEYPDFNFVGRILGPRGLTAKQLEAETGCKIMVRGKGSMRDKKKEEQNRGKPNWEHLNEDLHVLITVEDAQNRAEIKLKRAVEEVKKLLVPAAEGEDSLKKMQLMELAILNGTYRDANIKSPALAFSLAATAQAAPRIITGPAPVLPPAALRTPTPAGPTIMPLIRQIQTAVMPNGTPHPTAAIVPPGPEAGLIYTPYEYPYTLAPATSILEYPIEPSGVLGAVATKVRRHDMRVHPYQRIVTADRAATGN

SEQ ID NO: 40746 - protein, 333 aa, Homo sapiens
MVGEMETKEKPKPTPDYLMQLMNDKKLMSSLPNFCGIFNHLERLLDEEISRVRKDMYNDTLNGSTEKRSAELPDAVGPIVQLQEKLYVPVKEYPDFNFVGRILGPRGLTAKQLEAETGCKIMVRGKGSMRDKKKEEQNRGKPNWEHLNEDLHVLITVEDAQNRAEIKLKRAVEEVKKLLVPAAEGEDSLKKMQLMELAILNGTYRDANIKSPTAQAAPRIITGPAPVLPPAALRTPTPAGPTIMPLIRQIQTAVMPNGTPHPTAAIVPPGPEAGLIYTPYEYPYTLAPATSILEYPIEPSGVLGAVATKVRRHDMRVHPYQRIVTADRAATGN

SEQ ID NO: 40747 - protein, 317 aa, Homo sapiens
MVGEMETKEKPKPTPDYLMQLMNDKKLMSSLPNFCGIFNHLERLLDEEISRVRKDMYNDTLNGSTEKRSAELPDAVGPIVQLQEKLYVPVKEYPDFNFVGRILGPRGLTAKQLEAETGCKIMVRGKGSMRDKKKEEQNRGKPNWEHLNEDLHVLITVEDAQNRAEIKLKRAVEEVKKLLVPAAEGEDSLKKMQLMELAILNGTYRDANIKSPTAQAAPRIITGPAPVLPPAALRTPTPAGPTIMPLIRQIQTAVMPNGTPHPTAAIVPPGPEAGLIYTPYEYPYTLAPATSILEYPIEPSGVLEWIEMPVMPDISAH

SEQ ID NO: 40748 - protein, 325 aa, Homo sapiens
MVGEMETKEKPKPTPDYLMQLMNDKKLMSSLPNFCGIFNHLERLLDEEISRVRKDMYNDTLNGSTEKRSAELPDAVGPIVQLQEKLYVPVKEYPDFNFVGRILGPRGLTAKQLEAETGCKIMVRGKGSMRDKKKEEQNRGKPNWEHLNEDLHVLITVEDAQNRAEIKLKRAVEEVKKLLVPAAEGEDSLKKMQLMELAILNGTYRDANIKSPALAFSLAATAQAAPRIITGPAPVLPPAALRTPTPAGPTIMPLIRQIQTAVMPNGTPHPTAAIVPPGPEAGLIYTPYEYPYTLAPATSILEYPIEPSGVLEWIEMPVMPDISAH

SEQ ID NO: 40749 - protein, 319 aa, Homo sapiens
MVGEMETKEKPKPTPDYLMQLMNDKKLMSSLPNFCGIFNHLERLLDEEISRVRKDMYNDTLNGSTEKRSAELPDAVGPIVQLQEKLYVPVKEYPDFNFVGRILGPRGLTAKQLEAETGCKIMVRGKGSMRDKKKEEQNRGKPNWEHLNEDLHVLITVEDAQNRAEIKLKRAVEEVKKLLVPAAEGEDSLKKMQLMELAILNGTYRDANIKSPALAFSLAATAQAAPRIITGPAPVLPPAALRTPTPAGPTIMPLIRQIQTAVMPNGTPHPTAAIVPPGPEAGLIYTPYEYPYTLAPATSILEYPIEPSGVLGKFFSPWG

SEQ ID NO: 40750 - protein, 319 aa, Homo sapiens
MVGEMETKEKPKPTPDYLMQLMNDKKLMSSLPNFCGIFNHLERLLDEEISRVRKDMYNDTLNGSTEKRSAELPDAVGPIVQLQEKLYVPVKEYPDFNFVGRILGPRGLTAKQLEAETGCKIMVRGKGSMRDKKKEEQNRGKPNWEHLNEDLHVLITVEDAQNRAEIKLKRAVEEVKKLLVPAAEGEDSLKKMQLMELAILNGTYRDANIKSPALAFSLAATAQAAPRIITGPAPVLPPAALRTPTPAGPTIMPLIRQIQTAVMPNGTPHPTAAIVPPGPEAGLIYTPYEYPYTLAPATSILEYPIEPSGVLGMAFPTKG

SEQ ID NO: 40751 - protein, 317 aa, Homo sapiens [sequence omitted]

SEQ ID NO: 40752 - protein, 527 aa, Homo sapiens
MSLQMVTVSNNIALIQPGFSLMNFDGQVFFFGQKGWPKRSCPTGVFHLDVKHNHVKLKPTIFSKDSCYLPPLRYPATCTFKGSLESEKHQYIIHGGKTPNNEVSDKIYVMSIVCKNNKKVTFRCTEKDLVGDVPEARYGHSINVVYSRGKSMGVLFGGRSYMPSTHRTTEKWNSVADCLPCVFLVDFEFGCATSYILPELQDGLSFHVSIAKNDTIYILGGHSLANNIRPANLYRIRVDLPLGSPAVNCTVLPGGISVSSAILTQTNNDEFVIVGGYQLENQKRMICNIISLEDNKIEIREMETPDWTPDIKHSKIWFGSNMGNGTVFLGIPGDNKQVVSEGFYFYMLKCAEDDTNEEQTTFTNSQTSTEDPGDSTPFEDSEEFCFSAEANSFDGDDEFDTYNEDDEEDESETGYWITCCPTCDVDINTWVPFYSTELNKPAMIYCSHGDGHWVHAQCMDLAERTLIHLSAGSNKYYCNEHVEIARALHTPQRVLPLKKPPMKSLRKKGSGKILTPAKKSFLRRLFD

SEQ ID NO: 40753 - protein, 238 aa, Homo sapiens
MSSGYSSLEEDAEDFFFTARTSFFRRAPQGKPRSGQQDVEKEKETHSYLSKEEIKEKVHKYNLAVTDKLKMTLNSNGIYTGFIKVQMELCKPPQTSPNSGKLSPSSNGCMNTLHISSTNTVGEVIEALLKKFLVTESPAKFALYKRCHREDQVYACKLSDREHPLYLRLVAGPRTDTLSFVLREHEIGEWEAFSLPELQNFLRILDKEEDEQLQNLKRRYTAYRQKLEEALREVWKPD

SEQ ID NO: 40754 - protein, 90 aa, Homo sapiens
MSSGYSSLEEDAEDFFFTARTSFFRRAPQGKPRSGQQDVEKEKETHSYLSKEEIKEKVHKYNLAVTDKLKMTLSTPASSQTGNIHSTCVW

SEQ ID NO: 40755 - protein, 256 aa, Homo sapiens
MSRKKTPKSKGASTPAASTLPTANGARPARSGTALSGPDAPPNGPLQPGRPSLGGGVDFYDVAFKVMLVGDSGVGKTCLLVRFKDGAFLAGTFISTVGIDFRNKVLDVDGVKVKLQMWDTAGQERFRSVTHAYYRDAHALLLLYDVTNKASFDNIQAWLTEIHEYAQHDVALMLLGNKVDSAHERVVKREDGEKLAKEYGLPFMETSAKTGLNVDLAFTAIAKELKQRSMKAPSEPRFRLHDYVKREGRGASCCRP

SEQ ID NO: 40756 - protein, 190 aa, Homo sapiens
MLVGDSGVGKTCLLVRFKDGAFLAGTFISTVGIDFRNKVLDVDGVKVKLQMWDTAGQERFRSVTHAYYRDAHALLLLYDVTNKASFDNIQAWLTEIHEYAQHDVALMLLGNKVDSAHERVVKREDGEKLAKEYGLPFMETSAKTGLNVDLAFTAIAKELKQRSMKAPSEPRFRLHDYVKREGRGASCCRP

SEQ ID NO: 40757 - protein, 192 aa, Homo sapiens
MQAIKCVVVGDGAVGKTCLLISYTTNAFPGEYIPTVFDNYSANVMVDSKPVNLGLWDTAGQEDYDRLRPLSYPQTDVFLICFSLVSPASYENVRAKWFPEVRHHCPSTPIILVGTKLDLRDDKDTIEKLKEKKLAPITYPQGLALAKEIDSVKYLECSALTQRGLKTVFDEAIRAVLCPQPTRQQKRACSLL

SEQ ID NO: 40758 - protein, 204 aa, Homo sapiens [sequence omitted]

SEQ ID NO: 40759 - protein, 145 aa, Homo sapiens
MGAYKYIQELWRKKQSDVMRFLLRVRCWQYRQLSALHRAPRPTRPDKARRLGYKAKQGYVIYRIRVRRGGRKRPVPKGATYGKPVHHGVNQLKFARSLQSVAEERAGRHCGALRVLNSYWMESHSHSGGSAVGQSRLTATSVSRV

SEQ ID NO: 40760 - protein, 617 aa, Homo sapiens
MSSLPTSDGFNHPARSSGQSPDVGNPMSLARSVSASVCPIKPSDSDRIEPKAVKALKASAEFQLNSEKKEHLSLQDLSDHASSADHAPTDQSPAMPMQNSSEEITVAGNLEKSAERSTQGLKFHLHTRQEASLSVTSTRMHEPQMFLGEKDWHPENQNLSQVSDPQQHEEPGNEQYEVAQQKASHDQEYLCNIGDLELPEERQQNQHKIVDLEATMKGNGLPQNVDPPSAKKSIPSSECSGCSNSETFMEIDTAQQSLVTLLNSTGRQNANVKNIGALDLTLDNPLMEVETSKCNPSSEILNDSISTQDLQPPETNVEIPGTNKEYGHYSSPSLCGSCQPSVESAEESCPSITAALKELHELLVVSSKPASENTSEEVICQSETIAEGQTSIKDLSERWTQNEHLTQNEQCPQVSFHQAISVSVETEKLTGTSSDTGREAVENVNFRSLGDGLSTDKEGVPKSRESINKNRSVTVTSAKTSNQLHCTLGVEISPKLLAGEEDALNQTSEQTKSLSSNFILVKDLGQGIQNSVTDRPETRENVCPDASRPLLEYEPPTSHPSSSPAILPPLIFPATDIDRILRAGFTLQEALGALHRVGGNADLALLVLLAKNIVVPT

SEQ ID NO: 40761 - protein, 153 aa, Homo sapiens
MARNVVYPLYRLGGPQLRVFRTNFFIQLVRPGVAQPEDTVQFRIPMEMTRVDLRNYLEGIYNVPVAAVRTRVQHGSNKRRDHRNVRIKKPDYKVAYVQLAHGQTFTFPDLFPEKDESPEGSAADDLYSMLEEERQQRQSSDPRRGGVPSWFGL

SEQ ID NO: 40762 - protein, 147 aa, Homo sapiens
MALQRTHSLLLLLLLTLLGLGLVQPSYGQDGMYQRFLRQHVHPEETGGSDRYCNLMMQRRKMTLYHCKRFNTFIHEDIWNIRSICSTTNIQCKNGKMNCHEGVVKVTDCRDTGSSRAPNCRYRAIASTRRVVIACEGNPQVPVHFDG

SEQ ID NO: 40763 - protein, 1067 aa, Homo sapiens
MMEADRPEKLFIGGLNLKTDEKALKAEFGKYGHIIKVFLMKDRKTNKSRGFAFVTFESPADAKAAARDMNGKYLDGKAIMVAQTIKPAFKSSRWVPPTPGSGSRSRFSHRTRGGGSSPQRPPSQGRPDDGRGYAGYFDLWPYRAPMPRKRGPPPRHWASPPHKRATPSSLAHSVGCGMRGKAPTVSGQDGYSGLQPRRWAGPPHKRAVPRSSLARIGGSGMPGKAPAVWGQDGYSGPRVREPLPPCRDPGDFVPALRDYSRRYYGHSSVPDYRPLRGDGNQNGYRGRDHEYTDHPSKGSYREPLKSYGGPCGAAPVWGTPPSYGGGCRYEEYQGNSPDACSEGRSSEALPVVLPDAYSRDHSPKAYSGGRSSSSNGYSRSDRYGEEGCYEEYRGRSPDAHSGGRNSSSNSYGQSHHYGGEGRYEEYRGRSHEARSGGRSTDAHSRGRSDDAYSGGHDSSSWSDCCGGGGRYEEYQGRSLDANSGGCSPEAYSGGHDNSSWSDRYGVGGHYEENRGHSLDANSGGRSPDTHSGGHSSSSNSYGQSHRYGGEGRYEYRGRSHDAHSGGCSADAYSGGHDSSSQSNRYGGGGCYEEYRGRSLDANSGGRSPNAYSGGHDSSSWSHRYGGGGRYEEYRGRSLDANSGGRSPDAYSGGHDSSGQSNCYGGGGRYEEYRGRLLDANSGGRSPDAYSGGHDSSSQSNRYGGGGRYEEYRGHSLDANSGGRSPDTYSRGHDSSSQSDHYGGGGRSLDANSSGRLPDAYSGGHDSSSRSHRYGGGGRYEEYRGRSLDANSGGRSPNAYSGGHNSSSRNDPCRGGGRYEENRGHSLDANSGGHSPNAYSGGRDSSSNSYDRSHRYGGGGHYEEYRGRSHDTHSRGRSPDAHSGDHYTEAYSRGRDSFSNSYGRSDHYGRGGCYEEYQGRSPNAYGGGRGLNSSNNSHGRSHRYGGGGRYEEYRGPSPDAHSGGRDSSIKSYGLSDRYGGGGHYEEYQGSLPDAYSGDHDRSSNSYGRSDRYSRGRDRVGRPDRGLPLPMETGSPPLHDSYSRSGCRVPRGGGRQGGRFERGEGRSRY

SEQ ID NO: 40764 - protein, 267 aa, Homo sapiens [sequence omitted]

SEQ ID NO: 40765 - protein, 206 aa, Homo sapiens [sequence omitted]

SEQ ID NO: 40766 - protein, 212 aa, Homo sapiens [sequence omitted]

SEQ ID NO: 40767 - protein, 194 aa, Homo sapiens
MGLSSCRKTSSGLPLILHYGGILLSISRPYKTKPTHGIGKYKHLIKAEEPKKKKGKVEVRAINLGTDYEYGVLNIHLTAYDMTLAESYAQYVHNLCNSLSIKVEESYAMPTKTIEVLQLQDQGSKMLLDSVLTTHERVVQISGLSATFAEIFLEIIQSSLPEGVRLSVKEHTEEDFKGRFKARPELEELLAKLK

SEQ ID NO: 40768 - protein, 492 aa, Homo sapiens
MKLLLLHPAFQSCLLLTLLGLWRTTPEAHASSLGAPAISAASFLQDLIHRYGEGDSLTLQQLKALLNHLDVGVGRGNVTQHVQGHRNLSTCFSSGDLFTAHNFSEQSRIGSSELQEFCPTILQQLDSRACTSENQENEENEQTEEGRPSAVEVWGYGLLCVTVISLCSLLGASVVPFMKKTFYKRLLLYFIALAIGTLYSNALFQLIPEAFGFNPLEDYYVSKSAVVFGGFYLFFFTEKILKILLKQKNEHHHGHSHYASESLPSKKDQEEGVMEKLQNGDLDHMIPQHCSSELDGKAPMVDEKVIVGSLSVQDLQASQSACYWLKGVRYSDIGTLAWMITLSDGLHNFIDGLAIGASFTVSVFQGISTSVAILCEEFPHELGDFVILLNAGMSIQQALFFNFLSACCCYLGLAFGILAGSHFSANWIFALAGGMFLYISLADMFPEMNEVCQEDERKGSILIPFIIQNLGLLTGFTIMVVLTMYSGQIQIG

SEQ ID NO: 40769 - protein, 481 aa, Homo sapiens
MKLLLLHPAFQSCLLLTLLGLWRTTPEAHASSLGAPAISAASFLQDLIHRYGEGDSLTLQQLKALLNHLDVGVGRGNVTQHVQGHRNLSTCFSSGDLFTAHNFSEQSRIGSSELQEFCPTILQQLDSRACTSENQENEENEQTEEGRPSAVEVWGYGLLCVTVISLCSLLGASVVPFMKKTFYKRLLLYFIALAIGTLYSNALFQLIPEAFGFNPLEDYYVSKSAVVFGGFYLFFFTEKILKILLKQKNEHHHGHSHYASESLPSKKDQEEGVMEKLQNGDLDHMIPQHCSSELDGKAPMVDEKVIVGSLSVQDLQASQSACYWLKGVRYSDIGTLAWMITLSDGLHNFIDGLAIGASFTVSVFQGISTSVAILCEEFPHELGDFVILLNAGMSIQQALFFNFLSACCCYLGLAFGILAGSHFSANWIFALAGGMFLYISLADMMEFCSVAQAGVQWCHLSSLQPLPLGLKRLSCLSLPSN

SEQ ID NO: 40770 - protein, 492 aa, Homo sapiens
MKLLLLHPAFQSCLLLTLLGLWRTTPEAHASSLGAPAISAASFLQDLIHRYGEGDSLTLQQLKALLNHLDVGVGRGNVTQHVQGHRNLSTCFSSGDLFTAHNFSEQSRIGSSELQEFCPTILQQLDSRACTSENQENEENEQTEEGRPSAVEVWGFGFLSVSLINLASLLGVLVLPCTEKAFFSRVLTYFIALSIGTLLSNALFQLIPEAFGFNPLEDYYVSKSAVVFGGFYLFFFTEKILKILLKQKNEHHHGHSHYASESLPSKKDQEEGVMEKLQNGDLDHMIPQHCSSELDGKAPMVDEKVIVGSLSVQDLQASQSACYWLKGVRYSDIGTLAWMITLSDGLHNFIDGLAIGASFTVSVFQGISTSVAILCEEFPHELGDFVILLNAGMSIQQALFFNFLSACCCYLGLAFGILAGSHFSANWIFALAGGMFLYISLADMFPEMNEVCQEDERKGSILIPFIIQNLGLLTGFTIMVVLTMYSGQIQIG

SEQ ID NO: 40771 - protein, 619 aa, Homo sapiens
MLLSWLTVLGAGMVVLHFLQKLLFPYFWDDFWFVLKVVLIIIRLKKYEKRGELVTVLDKFLSHAKRQPRKPFIIYEGDIYTYQDVDKRSSRVAHVFLNHSSLKKGDTVALLMSNEPDFVHVWFGLAKLGCVVAFLNTNIRSNSLLNCIRACGPRALVVGADLLGTVEEILPSLSENISVWGMKDSVPQGVISLKEKLSTSPDEPVPRSHHVVSLLKSTCLYIFTSGTTGLPKAAVISQLQVLRGSAVLWAFGCTAHDIVYITLPLYHSSAAILGISGCVELGATCVLKKKFSASQFWSDCKKYDVTVFQYIGELCRYLCKQSKREGEKDHKVRLAIGNGIRSDVWREFLDRFGNIKVCELYAATESSISFMNYTGRIGAIGRTNLFYKLLSTFDLIKYDFQKDEPMRNEQGWCIHVKKGEPGLLISRVNAKNPFFGYAGPYKHTKDKLLCDVFKKGDVYLNTGDLIVQDQDNFLYFWDRTGDTFRWKGENVATTEVADVIGMLDFIQEANVYGVAISGYEGRAGMASIILKPNTSLDLEKVYEQVVTFLPAYACPRFLRIQEKMEATGTFKLLKHQLVEDGFNPLKISEPLYFMDNLKKSYVLLTRELYDQIMLGEIKL

SEQ ID NO: 40772 - protein, 708 aa, Homo sapiens
MAAAGPSTRASSAAAAAALSRRGRRGRCDETAAAKTGAPGPASGPSLLVLSPPLLQPPLPPRPEESGCAGCLEPPGEAAALPCGHSLCRGCAQRAADAAGPGCPRCRARGPGWARRRARDDGQADSEVLGECARRSQPERCRPRRDGGAAAAGPRPEQEPRAAPAEPDFIFRAPIKLSKPGELREEYESLRKLREEKLQEEKPSEDQIHKLLPEDTETGKRKMDEQKKRDEPLVLKTNLERCPARLSDSENEEPSRGQMTQTHRSAFVSKNNSYSLAFLAGKLNSKVERSQSCSDTAQERAKSRVRAVPGNKAKVTTMTPASNPIIGVLLSTQNNRCVSAPDLTIEKRLPFSSLSSLASLHKPERSVSPESNDSISEELNHFKPIVCSPCTPPKRLPDGRVLSPLIIKSTPRNLNRSLQKQTSYEASPRILKKWEQIFQERQIKKTLSKATLTSLAPEMGEELLGSEGIHSSKEKPLVAVNTRLSGGQVLSEYTGPTSADLDHFPSVSQTKAEQDSDNKSSTEIPLETCCSSELKGGGSGTSLEREQFEGLGSTPDAKLDKTCISRAMKITTVNSVLPQNSVLGGVLKTKQQLKTLNHFDLTNGVLVESLSEEPLPSLRRGRKRHCKTKHLEQNGSLKKLRQTSGEVGLAPTDPVLREMEQKLQQEEEDRQLALQLQRMFDNERRTVSRRKGSVDQYLLRSSNMAGAK

SEQ ID NO: 40773 - protein, 164 aa, Homo sapiens
MESGDEAAIERHRVHLRSATLRDAVPATLHLLPCEVAVDGPAPVGRFFTPAIRQGPEGLEVSFRGRCLRGEEVAVPPGLVGYVMVTEEKKVSMGKPDPLRDSGTDDQEEEPLERDFDRFIGATANFSRFTLWGLETIPGPDAKVRGALTWPSLAAAIHAQVPED

SEQ ID NO: 40774 - protein, 312 aa, Homo sapiens
MAAGVDCGDGVGARQHVFLVSEYLKDASKKMKNGLMFVKLVNPCSGEGAIYLFNMCLQQLFEVKVFKEKHHSWFINQSVQSGGLLHFATPVDPLFLLLHYLIKADKEGKFQPLDQVVVDNVFPNCILLLKLPGLEKLLHHVTEEKGNPEIDNKKYYKYSKEKTLKWLEKKVNQTVAALKTNNVNVSSRVQSTAFFSGDQASTDKEEDYIRYAHGLISDYIPKELSDDLSKYLKLPEPSASLPNPPSKKIKLSDEPVEAKEDYTKFNTKDLKTEKKNSKMTAAQKALAKVDKSGMKSIDTFFGVKNKKKIGKV

SEQ ID NO: 40775 - protein, 257 aa, Homo sapiens
MAAGVDCGDGVGARQHVFLVSEYLKDASKKMKNGLMFVKLVNPCSGEGAIYLFNMCLQQLFEVKVFKEKHHSWFINQSVQSGGLLHFATPVDPLFLLLHYLIKADKEGKFQPLDQVVVDNVFPNCILLLKLPGLEKLLHHVTEEKGNPEIDNKKYYKYSKEKTLKWLEKKVNQTVAALKTNNVNVSSRVQSTAFFSGDQASTDKEEDYIRYAHGLISDYIPKELSDDLSKYLKLPEPSASLPNPPSKMAAQRQKRGK

SEQ ID NO: 40776 - protein, 235 aa, Homo sapiens
MALPAGPAEAACALCQRAPREPVRADCGHRFCRACVVRFWAEEDGPFPCPECADDCWQRAVEPGRPPLSRRLLALEEAAAAPARDGPASEAALQLLCRADAGPLCAACRMAAGPEPPEWEPRWRKALRGKENKGSVEIMRKDLNDARDLHGQAESAAAVWKGHVMDRRKKALTDYKKLRAFFVEEEEHFLQEAEKEEGLPEDELADPTERFRSLLQAVSELEKKHRNLGLSMLLQ

SEQ ID NO: 40777 - protein, 220 aa, Homo sapiens
MSEGESKDSSGSECPVCYEKFRDLEGASRTLSCGHVFCHDCLVKYLLSTRVDGQVQRTLVCPICRYVTFLSKKSSRWPSMLDKSSQTLAVPVGLPSVPPLDSLGHTNPLAASSPAWRPPPGQARPPGSPGQSAQLPLDLLPSLPRESQIFVISRHGMPLGEQDSVLPRRSLAELSEASLAPRSARAFCCRSRALLLITLIAVVAVVAAILPWVLLVRKQA

SEQ ID NO: 40778 - protein, 194 aa, Homo sapiens [sequence omitted]

SEQ ID NO: 40779 - protein, 580 aa, Homo sapiens
MAGGGSDLSTRGLNGGVSQVANEMNHLPAHSQSLQRLFTEDQDVDEGLVYDTVFKHFKRHKLEISNAIKKTFPFLEGLRDRELITNKMFEDSEDSCRNLVPVQRVVYNVLSELEKTFNLSVLEALFSEVNMQEYPDLIHIYKSFKNAIQDKLSFQESDRKEREERPDIKLSLKQGEVPESPEARKESDQACGKMDTVDIANNSTLGKPKRKRRKKKGHGWSRMGTRTQKNNQQNDNSKADGQLVSSEKKANMNLKDLSKIRGRKRGKPGTHFTQSDRAPQKRVRSRASRKHKDETVDFQAPLLPVTCGGVKGILHKEKLEQGTLAKCIQTEDGKWFTPMEFEIKGGYARSKNWRLSVRCGGWPLRRLMEEGSLPNPPRIYYRNKKRILKSQNNSSVDPCMRNLDECEVCRDGGELFCCDTCSRVFHEDCHIPPVESEKTPWNCIFCRMKESPGSQQCCQESEVLERQMCPEEQLKCEFLLLKVYCCSESSFFAKIPYYYYIREACQGLKEPMWLDKIKKRLNEHGYPQVEGFVQDMRLIFQNHRASYKYKDFGQMGLRLEAEFEKDFKEVFAIQETNGNS

SEQ ID NO: 40780 - protein, 438 aa, Homo sapiens
MAGGGSDLSTRGLNGGVSQVANEMNHLPAHSQSLQRLFTEDQDVDEGLVYDTVFKHFKRHKLEISNAIKKTFPFLEGLRDRELITNKMFEDSEDSCRNLVPVQRVVYNVLSELEKTFNLSVLEALFSEVNMQEYPDLIHIYKSFKNAIQDKLSFQESDRKEREERPDIKLSLKQGEVPESPEARKESDQACGKMDTVDIANNSTLGKPKRKRRKKKGHGWSRMGTRTQKNNQQNDNSKADGQLVSSEKKANMNLKDLSKIRGRKRGKPGTHFTQSDRAPQKRVRSRASRKHKDETVDFQAPLLPVTCGGVKGILHKEKLEQGTLAKCIQTEDGKWFTPMEFEIKGGYARSKNWRLSVRCGGWPLRRLMEEGSLPNPPRIYYRNKKRILKSQNNSSVDPCMRNLDECEVCRDGGELFCCDTCSRVFHEDCHIPPVESEK

SEQ ID NO: 40781 - protein, 545 aa, Homo sapiens
MAGGGSDLSTRGLNGGVSQVANEMNHLPAHSQSLQRLFTEDQDVDEGLVYDTVFKHFKRHKLEISNAIKKTFPFLEGLRDRELITNKMFEDSEDSCRNLVPVQRVVYNVLSELEKTFNLSVLEALFSEVNMQEYPDLIHIYKSFKNAIQDKLSFQESDRKEREERPDIKLSLKQGEVPESPEARKESDQACGKMDTVDIANNSTLGKPKRKRRKKKGHGWSRMGTRTQKNNQQNDNSKADGQLVSSEKKANMNLKDLSKIRGRKRGKPGTHFTQSDRAPQKRVRSRGTLAKCIQTEDGKWFTPMEFEIKGGYARSKNWRLSVRCGGWPLRRLMEEGSLPNPPRIYYRNKKRILKSQNNSSVDPCMRNLDECEVCRDGGELFCCDTCSRVFHEDCHIPPVESEKTPWNCIFCRMKESPGSQQCCQESEVLERQMCPEEQLKCEFLLLKVYCCSESSFFAKIPYYYYIREACQGLKEPMWLDKIKKRLNEHGYPQVEGFVQDMRLIFQNHRASYKYKDFGQMGLRLEAEFEKDFKEVFAIQETNGNS

SEQ ID NO: 40782 - protein, 129 aa, Homo sapiens
MFEDSEDSCRNLVPVQRVVYNVLSELEKTFNLSVLEALFSEVNMQEYPDLIHIYKSFKNAIQDKLSFQESDRKEREERPDIKLSLKQGEVPESPEARKESDQACGKMDTVDIANNSTLGKPKRKRSKNK

SEQ ID NO: 40783 - protein, 434 aa, Homo sapiens
MLPARCARLLTPHLLLVLVQLSPARGHRTTGPRFLISDRDPQCNLHCSRTQPKPICASDGRSYESMCEYQRAKCRDPTLGVVHRGRCKDAGQSKCRLERAQALEQAKKPQEAVFVPECGEDGSFTQVQCHTYTGYCWCVTPDGKPISGSSVQNKTPVCSGSVTDKPLSQGNSGRKDDGSKPTPTMETQPVFDGDEITAPTLWIKHLVIKDSKLNNTNIRNSEKVYSCDQERQSALEEAQQNPREGIVIPECAPGGLYKPVQCHQSTGYCWCVLVDTGRPLPGTSTRYVMPSCESDARAKTTEADDPFKDRELPGCPEGKKMEFITSLLDALTTDMVQAINSAAPTGGGRFSEPDPSHTLEERVVHWYFSQLDSNSSNDINKREMKPFKRYVKKKAKPKKCARRFTDYCDLNKDKVISLPELKGCLGVSKEGRLV

SEQ ID NO: 40784 - protein, 435 aa, Homo sapiens
MLPARCARLLTPHLLLVLVQLSPARGHRTTGPRFLISDRDPQCNLHCSRTQPKPICASDGRSYESMCEYQRAKCRDPTLGVVHRGRCKDAGQSKCRLERAQALEQAKKPQEAVFVPECGEDGSFTQVQCHTYTGYCWCVTPDGKPISGSSVQNKTPVCSGSVTDKPLSQGNSGRKDDGSKPTPTMETQPVFDGDEITAPTLWIKHLVIKDSKLNNTNIRNSEKVYSCDQERQSALEEAQQNPREGIVIPECAPGGLYKPVQCHQSTGYCWCVLVDTGRPLPGTSTRYVMPSCESDARAKTTEADDPFKDRELPGCPEGKKMEFITSLLDALTTDMVQAINSAAPTGGGRFSEPDPSHTLEERVVHWYFSQLDSNSSNDINKREMKPFKRYVKKKAKPKKCARRFTDYCDLNKDKVISLPELKGCLGVSKEVGRLV

SEQ ID NO: 40785 - protein, 197 aa, Homo sapiens
MPIPASPLHPPLPSLLLYLLLELAGVTHVFHVQQTEMSQTVSTGESIILSCSVPNTLPNGPVLWFKGTGPNRKLIYNFKQGNFPRVKEIGDTTKPGNTDFSTRIREISLADAGTYYCVKFIKGRAIKEYQSGRGTQVFVTEQNPRPPKNRPAGRAGSRAHHDAHTCLSALPERNSTNYFVQPCCCLRLLGLTGLLSK

SEQ ID NO: 40786 - protein, 879 aa, Homo sapiens
MAGGGGDLSTRRLNECISPVANEMNHLPAHSHDLQRMFTEDQGVDDRLLYDIVFKHFKRNKVEISNAIKKTFPFLEGLRDRDLITNKMFEDSQDSCRNLVPVQRVVYNVLSELEKTFNLPVLEALFSDVNMQEYPDLIHIYKGFENVIHDKLPLQESEEEEREERSGLQLSLEQGTGENSFRSLTWPPSGSPSHAGTTPPENGLSEHPCETEQINAKRKDTTSDKDDSLGSQQTNEQCAQKAEPTESCEQIAVQVNNGDAGREMPCPLPCDEESPEAELHNHGIQINSCSVRLVDIKKEKPFSNSKVECQAQARTHHNQASDIIVISSEDSEGSTDVDEPLEVFISAPRSEPVINNDNPLESNDEKEGQEATCSRPQIVPEPMDFRKLSTFRESFKKRVIGQDHDFSESSEEEAPAEASSGALRSKHGEKAPMTSRSTSTWRIPSRKRRFSSSDFSDLSNGEELQETCSSSLRRGSGSQPQEPENKKCSCVMCFPKGVPRSQEARTESSQASDMMDTMDVENNSTLEKHSGKRRKKRRHRSKVNGLQRGRKKDRPRKHLTLNNKVQKKRWQQRGRKANTRPLKRRRKRGPRIPKDENINFKQSELPVTCGEVKGTLYKERFKQGTSKKCIQSEDKKWFTPREFEIEGDRGASKNWKLSIRCGGYTLKVLMENKFLPEPPSTRKKRILESHNNTLVDPCEEHKKKNPDASVKFSEFLKKCSETWKTIFAKEKGKFEDMAKADKAHYEREMKTYIPPKGEKKKKFKDPNAPKRPPLAFFLFCSEYRPKIKGEHPGLSIDDVVKKLAGMWNNTAAADKQFYEKKAAKLKEKYKKDIAAYRAKGKPNSAKKRVVKAEKSKKKKEEEEDEEDEQEEENEEDDDK

SEQ ID NO: 40787 - protein, 480 aa, Homo sapiens
MAGGGGDLSTRRLNECISPVANEMNHLPAHSHDLQRMFTEDQGVDDRLLYDIVFKHFKRNKVEISNAIKKTFPFLEGLRDRDLITNKMFEDSQDSCRNLVPVQRVVYNVLSELEKTFNLPVLEALFSDVNMQEYPDLIHIYKGFENVIHDKLPLQESEEEEREERSGLQLSLEQGTGENSFRSLTWPPSGSPSHAGTTPPENGLSEHPCETEQINAKRKDTTSDKDDSLGSQQTNEQCAQKAEPTESCEQIAVQVNNGDAGREMPCPLPCDEESPEAELHNHGIQINSCSVRLVDIKKEKPFSNSKVECQAQARTHHNQASDIIVISSEDSEGSTDVDEPLEVFISAPRSEPVINNDNPLESNDEKEGQEATCSRPQIVPEPMDFRKLSTFRESFKKRVIGQDHDFSESSEEEAPAEASSGALRSKHGEKAPMTSRSTSTWRIPSRKRRFSSSDFSDLSNGEELQETCSSSLRRGSGKED

SEQ ID NO: 40788 - protein, 688 aa, Homo sapiens
MAGGGGDLSTRRLNECISPVANEMNHLPAHSHDLQRMFTEDQGVDDRLLYDIVFKHFKRNKVEISNAIKKTFPFLEGLRDRDLITNKMFEDSQDSCRNLVPVQRVVYNVLSELEKTFNLPVLEALFSDVNMQEYPDLIHIYKGFENVIHDKLPLQESEEEEREERSGLQLSLEQGTGENSFRSLTWPPSGSPSHAGTTPPENGLSEHPCETEQINAKRKDTTSDKDDSLGSQQTNEQCAQKAEPTESCEQIAVQVNNGDAGREMPCPLPCDEESPEAELHNHGIQINSCSVRLVDIKKEKPFSNSKVECQAQARTHHNQASDIIVISSEDSEGSTDVDEPLEVFISAPRSEPVINNDNPLESNDEKEGQEATCSRPQIVPEPMDFRKLSTFRESFKKRVIGQDHDFSESSEEEAPAEASSGALRSKHGEKAPMTSRSTSTWRIPSRKRRFSSSDFSDLSNGEELQETCSSSLRRGSGSQPQEPENKKCSCVMCFPKGVPRSQEARTESSQASDMMDTMDVENNSTLEKHSGKRRKKRRHRSKVNGLQRGRKKDRPRKHLTLNNKVQKKRWQQRGRKANTRPLKRRRKRGPRIPKDENINFKQSELPVTCGEVKGTLYKERFKQGTSKKCIQSEDKKWFTPREFEIEGDRGASKNWKLSIRCGGYTLKVLMENKFLPEPPSTRKKVMIK

SEQ ID NO: 40789 - protein, 885 aa, Homo sapiens
MAGGGGDLSTRRLNECISPVANEMNHLPAHSHDLQRMFTEDQGVDDRLLYDIVFKHFKRNKVEISNAIKKTFPFLEGLRDRDLITNKMFEDSQDSCRNLVPVQRVVYNVLSELEKTFNLPVLEALFSDVNMQEYPDLIHIYKGFENVIHDKLPLQESEEEEREERSGLQLSLEQGTGENSFRSLTWPPSGSPSHAGTTPPENGLSEHPCETEQINAKRKDTTSDKDDSLGSQQTNEQCAQKAEPTESCEQIAVQVNNGDAGREMPCPLPCDEESPEAELHNHGIQINSCSVRLVDIKKEKPFSNSKVECQAQARTHHNQASDIIVISSEDSEGSTDVDEPLEVFISAPRSEPVINNDNPLESNDEKEGQEATCSRPQIVPEPMDFRKLSTFRESFKKRVIGQDHDFSESSEEEAPAEASSGALRSKHGEKAPMTSRSTSTWRIPSRKRRFSSSDFSDLSNGEELQETCSSSLRRGSGSQPQEPENKKCSCVMCFPKGVPRSQEARTESSQASDMMDTMDVENNSTLEKHSGKRRKKRRHRSKVNGLQRGRKKDRPRKHLTLNNKVQKKRWQQRGRKANTRPLKRRRKRGPRIPKDENINFKQSELPVTCGEVKGTLYKERFKQGTSKKCIQSEDKKWFTPREFEIEGDRGASKNWKLSIRCGGYTLKVLMENKFLPEPPSTRKKRILESHNNTLVDPCPENSNICEVCNKWGRLFCCDTCPRSFHEHCHIPSVEANKNPWSCIFCRIKTIQERCPESQSGHQESEVLMRQMLPEEQLKCEFLLLKVYCDSKSCFFASEPYYNREGSQGPQKPMWLNKVKTSLNEQMYTRVEGFVQDMRLIFHNHKEFYREDKFTRLGIQVQDIFEKNFRNIFAIQETSKNIIMFI

SEQ ID NO: 40790 - protein, 472 aa, Homo sapiens
MAGGGGDLSTRRLNECISPVANEMNHLPAHSHDLQRMFTEDQGVDDRLLYDIVFKHFKRNKVEISNAIKKTFPFLEGLRDRDLITNKMFEDSQDSCRNLVPVQRVVYNVLSELEKTFNLPVLEALFSDVNMQEYPDLIHIYKGFENVIHDKLPLQESEEEEREERSGLQLSLEQGTGENSFRSLTWPPSGSPSHAGTTPPENGLSEHPCETEQINAKRKDTTSDKDDSLGSQQTNEQCAQKAEPTESCEQIAVQVNNGDAGREMPCPLPCDEESPEAELHNHGIQINSCSVRLVDIKKEKPFSNSKVECQAQARTHHNQASDIIVISSEDSEGSTDVDEPLEVFISAPRSEPVINNDNPLESNDEKEGQEATCSRPQIVPEPMDFRKLSTFRESFKKRVIGQDHDFSESSEEEAPAEASSGALRSKHGEKAPMTSRSTSTWRIPSRKRLKKKKKKKQCHPQPQPQRGLLEQS

SEQ ID NO: 40791 - protein, 452 aa, Homo sapiens
MAGGGGDLSTRMFTEDQGVDDRLLYDIVFKHFKRNKVEISNAIKKTFPFLEGLRDRDLITNKMFEDSQDSCRNLVPVQRVVYNVLSELEKTFNLPVLEALFSDVNMQEYPDLIHIYKGFENVIHDKLPLQESEEEEREERSGLQLSLEQGTGENSFRSLTWPPSGSPSHAGTTPPENGLSEHPCETEQINAKRKDTTSDKDDSLGSQQTNEQCAQKAEPTESCEQIAVQVNNGDAGREMPCPLPCDEESPEAELHNHGIQINSCSVRLVDIKKEKPFSNSKVECQAQARTHHNQASDIIVISSEDSEGSTDVDEPLEVFISAPRSEPVINNDNPLESNDEKEGQEATCSRPQIVPEPMDFRKLSTFRESFKKRVIGQDHDFSESSEEEAPAEASSGALRSKHAPMTSRSTSTWRIPSRKRRFSSSDFSDLSNGEELQETCSSSLRRGSGKED

SEQ ID NO: 40792 - protein, 445 aa, Homo sapiens
MMFTEDQGVDDRLLYDIVFKHFKRNKVEISNAIKKTFPFLEGLRDRDLITNKMFEDSQDSCRNLVPVQRVVYNVLSELEKTFNLPVLEALFSDVNMQEYPDLIHIYKGFENVIHDKLPLQESEEEEREERSGLQLSLEQGTGENSFRSLTWPPSGSPSHAGTTPPENGLSEHPCETEQINAKRKDTTSDKDDSLGSQQTNEQCAQKAEPTESCEQIAVQVNNGDAGREMPCPLPCDEESPEAELHNHGIQINSCSVRLVDIKKEKPFSNSKVECQAQARTHHNQASDIIVISSEDSEGSTDVDEPLEVFISAPRSEPVINNDNPLESNDEKEGQEATCSRPQIVPEPMDFRKLSTFRESFKKRVIGQDHDFSESSEEEAPAEASSGALRSKHGEKAPMTSRSTSTWRIPSRKRRFSSSDFSDLSNGEELQETCSSSLRRGSGKED

SEQ ID NO: 40793 - protein, 440 aa, Homo sapiens
MKMHFCIPVSQQRSDALGGRYVLYSVHLDGFLFCRVRYSQLHGWNEQLRRVFGNCLPPFPPKYYLAMTTAMADERRDQLEQYLQNVTMDPNVLRSDVFVEFLKLAQLNTFDIATKKAYLDIFLPNEQSIRIEIITSDTAERVLEVVSHKIGLCRELLGYFGLFLIRFGKEGKLSVVKKLADFELPYVSLGSSEVENCKVGLRKWYMAPSLDSVLMDCRVAVDLLYMQAIQDIEKGWAKPTQAQRQKLEAFQKEDSQTKFLELAREVRHYGYLQLDPCTCDYPESGSGAVLSVGNNEISCCITLPDSQTQDIVFQMSRVKCWQVTFLGTLLDTDGPQRTLNQNLELRFQYSEDSCWQWFVIYTKQAFLLSSCLKKMISEKMVKLAAENTEMQIEVPEQSKSKKYHIQQSQQKDYSSFLSRKSKIKIAKDDCVFGNIKEEDL

SEQ ID NO: 40794 - protein, 341 aa, Homo sapiens
MLGNTENWNTFDIATKKAYLDIFLPNEQSIRIEIITSDTAERVLEVVSHKIGLCRELLGYFGLFLIRFGKEGKLSVVKKLADFELPYVSLGSSEVENCKVGLRKWYMAPSLDSVLMDCRVAVDLLYMQAIQDIEKGWAKPTQAQRQKLEAFQKEDSQTKFLELAREVRHYGYLQLDPCTCDYPESGSGAVLSVGNNEISCCITLPDSQTQDIVFQMSRVKCWQVTFLGTLLDTDGPQRTLNQNLELRFQYSEDSCWQWFVIYTKQAFLLSSCLKKMISEKMVKLAAENTEMQIEVPEQSKSKKYHIQQSQQKDYSSFLSRKSKIKIAKDDCVFGNIKEEDL

SEQ ID NO: 40795 - protein, 689 aa, Homo sapiens
MFTMTRAMEEALFQHFMHQKLGIAYAIHKPFPFFEGLLDNSIITKRMYMESLEACRNLIPVSRVVHNILTQLERTFNLSLLVTLFSQINLREYPNLVTIYRSFKRVGASYEWQSRDTPILLEAPTGLAEGSSLHTPLALPPPQPPQPSCSPCAPRVSEPGTSSQQSDEILSESPSPSDPVLPLPALIQEGRSTSVTNDKLTSKMNAEEDSEEMPSLLTSTVQVASDNLIPQIRDKEDPQEMPHSPLGSMPEIRDNSPEPNDPEEPQEVSSTPSDKKGKKRKRCIWSTPKRRHKKKSLPGGTASSRHGIQKKLKRVDQVPQKKDDSTCNSTVETRAQKARTECARKSRSEEIIDGTSEMNEGKRSQKTPSTPRRVTQGAASPGHGIQEKLQVVDKVTQRKDDSTWNSEVMMRVQKARTKCARKSRLKEKKKEKDICSSSKRRFQKNIHRRGKPKSDTVDFHCSKLPVTCGEAKGILYKKKMKHGSSVKCIRNEDGTWLTPNEFEVEGKGRNAKNWKRNIRCEGMTLGELLKRKNSDECEVCCQGGQLLCCGTCPRVFHEDCHIPPVEAKRMLWSCTFCRMKRSSGSQQCHHVSKTLERQMQPQDQLIRDYGEPFQEAMWLDLVKERLITEMYTVAWFVRDMRLMFRNHKTFYKASDFGQVGLDLEAEFEKDLKDVLGFHEANDGGFWTLP

SEQ ID NO: 40796 - protein, 408 aa, Homo sapiens
MNAEEDSEEMPSLLTSTVQVASDNLIPQIRDKEDPQEMPHSPLGSMPEIRDNSPEPNDPEEPQEVSSTPSDKKGKKRKRCIWSTPKRRHKKKSLPGGTASSRHGIQKKLKRVDQVPQKKDDSTCNSTVETRAQKARTECARKSRSEEIIDGTSEMNEGKRSQKTPSTPRRVTQGAASPGHGIQEKLQVVDKVTQRKDDSTWNSEVMMRVQKARTKCARKSRLKEKKKEKDICSSSKRRFQKNIHRRGKPKSDTVDFHCSKLPVTCGEAKGILYKKKMKHGSSVKCIRNEDGTWLTPNEFEVEGKGRNAKNWKRNIRCEGMTLGELLKRKNSDECEVCCQGGQLLCCGTCPRVFHEDCHIPPVEAKRMLWSCTFCRMKRSSGSQQCHHVSKTLERQMQPQDQLNVSSSS

SEQ ID NO: 40797 - protein, 549 aa, Homo sapiens
MFTMTRAMEEALFQHFMHQKLGIAYAIHKPFPFFEGLLDNSIITKRMYMESLEACRNLIPVSRVVHNILTQLERTFNLSLLVTLFSQINLREYPNLVTIYRSFKRVGASYEWQSRDTPILLEAPTGLAEGSSLHTPLALPPPQPPQPSCSPCAPRVSEPGTSSQQSDEILSESPSPSDPVLPLPALIQEGRSTSVTNDKLTSKMNAEEDSEEMPSLLTSTVQVASDNLIPQIRDKEDPQEMPHSPLGSMPEIRDNSPEPNDPEEPQEVSSTPSDKKGKKRKRCIWSTPKRRHKKKSLPGGTASSRHGIQKKLKRVDQVPQKKDDSTCNSTVETRAQKARTECARKSRSEEIIDGTSEMNEGKRSQKTPSTPRRVTQGAASPGHGIQEKLQVVDKVTQRKDDSTWNSEVMMRVQKARTKCARKSRLKEKKKEKDICSSSKRRFQKNIHRRGKPKSDTVDFHCSKLPVTCGEAKGILYKKKMKHGSSVKCIRNEDGTWLTPNEFEVEGKGRNAKNWKRNIRCEGMTLGELLKSGLLLCPPRINLKRELNSK

SEQ ID NO: 40798 - protein, 248 aa, Homo sapiens
MASSGVKNTPRWRRKAPHGRERKEKGKKRKRCIWSTPKRRHKKKSLPGEIIDGTSEMNEGKRSQKTPSTPRRVTQGAASPGHGIQEKLQVVDKVTQRKDDSTWNSEVMMRVQKARTKCARKSRLKEKKKEKDICSSSKRRFQKNIHRRGKPKSDTVDFHCSKLPVTCGEAKGILYKKKMKHGSSVKCIRNEDGTWLTPNEFEVEGKGRNAKNWKRNIRCEGMTLGELLKSGLLLCPPRINLKRELNSK

SEQ ID NO: 40799 - protein, 547 aa, Homo sapiens
MFTMTRAMEEALFQHFMHQKLGIAYAIHKPFPFFEGLLDNSIITKRMYMESLEACRNLIPVSRVVHNILTQLERTFNLSLLVTLFSQINLREYPNLVTIYRSFKRVGASYEWQSRDTPILLEAPTGLAEGSSLHTPLALPPPQPPQPSCSPCAPRVSEPGTSSQQSDEILSESPSPSDPVLPLPALIQEGRSTSVTNDKLTSKMNAEEDSEEMPSLLTSTVQVASDNLIPQIRDKEDPQEMPHSPLGSMPEIRDNSPEPNDPEEPQEVSSTPSDKKGKKRKRCIWSTPKRRHKKKSLPGALSRHGIQKKLKRVDQVPQKKDDSTCNSTVETRAQKARTECARKSRSEEIIDGTSEMNEGKRSQKTPSTPRRVTQGAASPGHGIQEKLQVVDKVTQRKDDSTWNSEVMMRVQKARTKCARKSRLKEKKKEKDICSSSKRRFQKNIHRRGKPKSDTVDFHCSKLPVTCGEAKGILYKKKMKHGSSVKCIRNEDGTWLTPNEFEVEGKGRNAKNWKRNIRCEGMTLGELLKSGLLLCPPRINLKRELNSK

SEQ ID NO: 40800 - protein, 713 aa, Homo sapiens
MFTMTRAMEEALFQHFMHQKLGIAYAIHKPFPFFEGLLDNSIITKRMYMESLEACRNLIPVSRVVHNILTQLERTFNLSLLVTLFSQINLREYPNLVTIYRSFKRVGASYEWQSRDTPILLEAPTGLAEGSSLHTPLALPPPQPPQPSCSPCAPRVSEPGTSSQQSDEILSESPSPSDPVLPLPALIQEGRSTSVTNDKLTSKMNAEEDSEEMPSLLTSTVQVASDNLIPQIRDKEDPQEMPHSPLGSMPEIRDNSPEPNDPEEPQEVSSTPSDKKGKKRKRCIWSTPKRRHKKKSLPGGTASSRHGIQKKLKRVDQVPQKKDDSTCNSTVETRAQKARTECARKSRSEEIIDGTSEMNEGKRSQKTPSTPRRVTQGAASPGHGIQEKLQVVDKVTQRKDDSTWNSEVMMRVQKARTKCARKSRLKEKKKEKDICSSSKRRFQKNIHRRGKPKSDTVDFHCSKLPVTCGEAKGILYKKKMKHGSSVKCIRNEDGTWLTPNEFEVEGKGRNAKNWKRNIRCEGMTLGELLKRKNSDECEVCCQGGQLLCCGTCPRVFHEDCHIPPVEAKRMLWSCTFCRMKRSSGSQQCHHVSKTLERQMQPQDQLKCEFLLLKAYCHPQSSFFTGIPFNIRDYGEPFQEAMWLDLVKERLITEMYTVAWFVRDMRLMFRNHKTFYKASDFGQVGLDLEAEFEKDLKDVLGFHEANDGGFWTLP

SEQ ID NO: 40801 - protein, 555 aa, Homo sapiens
MGRGFRMFTMTRAMEEALFQHFMHQKLGIAYAIHKPFPFFEGLLDNSIITKRMYMESLEACRNLIPVSRVVHNILTQLERTFNLSLLVTLFSQINLREYPNLVTIYRSFKRVGASYEWQSRDTPILLEAPTGLAEGSSLHTPLALPPPQPPQPSCSPCAPRVSEPGTSSQQSDEILSESPSPSDPVLPLPALIQEGRSTSVTNDKLTSKMNAEEDSEEMPSLLTSTVQVASDNLIPQIRDKEDPQEMPHSPLGSMPEIRDNSPEPNDPEEPQEVSSTPSDKKGKKRKRCIWSTPKRRHKKKSLPGGTASSRHGIQKKLKRVDQVPQKKDDSTCNSTVETRAQKARTECARKSRSEEIIDGTSEMNEGKRSQKTPSTPRRVTQGAASPGHGIQEKLQVVDKVTQRKDDSTWNSEVMMRVQKARTKCARKSRLKEKKKEKDICSSSKRRFQKNIHRRGKPKSDTVDFHCSKLPVTCGEAKGILYKKKMKHGSSVKCIRNEDGTWLTPNEFEVEGKGRNAKNWKRNIRCEGMTLGELLKSGLLLCPPRINLKRELNSK

SEQ ID NO: 40802 - protein, 781 aa, Homo sapiens
MSSSSPTGQIASAADIKQENGMESASEGQEAHREVAGGAAVGLSPPAPAPFPLEPGDAATAAARVSGEEGAVAAAAAGAAADQVQLHSELLGRHHHAAAAAAQTPLAFSPDHVACVCEALQQGGNLDRLARFLWSLPQSDLLRGNESLLKARALVAFHQGIYPELYSILESHSFESANHPLLQQLWYKARYTEAERARGRPLGAVDKYRLRRKFPLPRTIWDGEETVYCFKEKSRNALKELYKQNRYPSPAEKRHLAKITGLSLTQVSNWFKNRRQRDRNPSETQSKSESDGNPSTEDESSKGHEDLSPHPLSSSSDGITNLSLSSHMEPVYMQQIGNAKISLSSSGVLLNGSLVPASTSPVFLNGNSFIQGPSGVILNGLNVGNTQAVALNPPKMSSNIVSNGISMTDILGSTSQDVKEFKVLQSSANSATTTSYSPSVPVSFPGLIPSTEVKREGIQTVASQDGGSVVTFTTPVQINQYGIVQIPNSGANSQFLNGSIGFSPLQLPPVSVAASQGNISVSSSTSDGSTFTSESTTVQQGKVFLSSLAPSAVVYTVPNTGQTIGSVKQEGLERSLVFSQLMPVNQNAQVNANLSSENISGSGLHPLASSLVNVSPTHNFSLSPSTLLNPTELNRDIADSQPMSAPVASKSTVTSVSNTNYATLQNCSLITGQDLLSVPMTQAALGEIVPTAEDQVGHPSPAVHQDFVQEHRLVLQSVANMKENFLSNSESKATSSLMMLDSKSKYVLDGMVDTVCEDLETDKKELAKLQTVQLDEDMQDL

SEQ ID NO: 40803 - protein, 449 aa, Homo sapiens
MRECISIHVGQAGVQIGNACWELYCLEHGIQPDGQMPSDKTIGGGDDSFNTFFSETGAGKHVPRAVFVDLEPTVIDEVRTGTYRQLFHPEQLITGKEDAANNYARGHYTIGKEIIDLVLDRIRKLADQCTGLQGFLVFHSFGGGTGSGFTSLLMERLSVDYGKKSKLEFSIYPAPQVSTAVVEPYNSILTTHTTLEHSDCAFMVDNEAIYDICRRNLDIERPTYTNLNRLISQIVSSITASLRFDGALNVDLTEFQTNLVPYPRIHFPLATYAPVISAEKAYHEQLTVAEITNACFEPANQMVKCDPRHGKYMACCLLYRGDVVPKDVNAAIATIKTKRTIQFVDWCPTGFKVGINYQPPTVVPGGDLAKVQRAVCMLSNTTAVAEAWARLDHKFDLMYAKRAFVHWYVGEGMEEGEFSEAREDMAALEKDYEEVGADSADGEDEGEEY

SEQ ID NO: 40804 - protein, 198 aa, Homo sapiens; identical to SEQ ID NO: 265

SEQ ID NO: 40805 - protein, 910 aa, Homo sapiens
MASSAQSGGSSGGPAVPTVQRGIIKMVLSGCAIIVRGQPRGGPPPERQINLSNIRAGNLARRAAATQPDAKDTPDEPWAFPAREFLRKKLIGKEVCFTIENKTPQGREYGMIYLGKDTNGENIAESLVAEGLATRREGMRANNPEQNRLSECEEQAKAAKKGMWSEGNGSHTIRDLKYTIENPRHFVDSHHQKPVNAIIEHVRDGSVVRALLLPDYYLVTVMLSGIKCPTFRREADGSETPEPFAAEAKFFTESRLLQRDVQIILESCHNQNILGTILHPNGNITELLLKEGFARCVDWSIAVYTRGAEKLRAAERFAKERRLRIWRDYVAPTANLDQKDKQFVAKVMQVLNADAIVVKLNSGDYKTIHLSSIRPPRLEGENTQDKNKKLRPLYDIPYMFEAREFLRKKLIGKKVNVTVDYIRPASPATETVPAFSERTCATVTIGGINIAEALVSKGLATVIRYRQDDDQRSSHYDELLAAEARAIKNGKGLHSKKEVPIHRVADISGDTQKAKQFLPFLQRAGRSEAVVEYVFSGSRLKLYLPKETCLITFLLAGIECPRGARNLPGLVQEGEPFSEEATLFTKELVLQREVEVEVESMDKAGNFIGWLHIDGANLSVLLVEHALSKVHFTAERSSYYKSLLSAEEAAKQKKEKVWAHYEEQPVEEVMPVLEEKERSASYKPVFVTEITDDLHFYVQDVETGTQLEKLMENMRNDIASHPPVEGSYAPRRGEFCIAKFVDGEWYRARVEKVESPAKIHVFYIDYGNREVLPSTRLGTLSPAFSTRVLPAQATEYAFAFIQVPQDDDARTDAVDSVVRDIQNTQCLLNVEHLSAGCPHVTLQFADSKGDVGLGLVKEGLVMVEVRKEKQFQKVITEYLNAQESAKSARLNLWRYGDFRADDADEFGYSR

SEQ ID NO: 40806 - protein, 318 aa, Homo sapiens
MAAAAAAAAEQQSSNGPVKKSMREKAVERRSVNKEHNSNFKAGYIPIDEDRLHKTGLRGRKGNLAICVIILLFILAVINLIITLVIWAVIRIGPNGCDSMEFHESGLLRFKQVSDMGVIHPLYKSTVGGRRNENLVITGNNQPIVFQQGTTKLSVENNKTSITSDIGMQFFDPRTQNILFSTDYETHEFHLPSGVKSLNVQKASTERITSNATSDLNIKVDGRAIVRGNEGVFIMGKTIEFHMGGNMELKAENSIILNGSVMVSTTRLPSSSSGDQLGSGDWVRYKLCMCADGTLFKVQVTSQNMGCQISDNPCGNTH

SEQ ID NO: 40807 - protein, 248 aa, Homo sapiens
MAAAAAAAAEQITLVIWAVIRIGPNGCDSMEFHESGLLRFKQVSDMGVIHPLYKSTVGGRRNENLVITGNNQPIVFQQGTTKLSVENNKTSITSDIGMQFFDPRTQNILFSTDYETHEFHLPSGVKSLNVQKASTERITSNATSDLNIKVDGRAIVRGNEGVFIMGKTIEFHMGGNMELKAENSIILNGSVMVSTTRLPSSSSGDQLGSGDWVRYKLCMCADGTLFKVQVTSQNMGCQISDNPCGNTH

SEQ ID NO: 40808 - protein, 841 aa, Homo sapiens
MKLWIHLFYSSLLACISLHSQTPVLSSRGSCDSLCNCEEKDGTMLINCEAKGIKMVSEISVPPSRPFQLSLLNNGLTMLHTNDFSGLTNAISIHLGFNNIADIEIGAFNGLGLLKQLHINHNSLEILKEDTFHGLENLEFLQADNNFITVIEPSAFSKLNRLKVLILNDNAIESLPPNIFRFVPLTHLDLRGNQLQTLPYVGFLEHIGRILDLQLEDNKWACNCDLLQLKTWLENMPPQSIIGDVVCNSPPFFKGSILSRLKKESICPTPPVYEEHEDPSGSLHLAATSSINDSRMSTKTTSILKLPTKAPGLIPYITKPSTQLPGPYCPIPCNCKVLSPSGLLIHCQERNIESLSDLRPPPQNPRKLILAGNIIHSLMKSDLVEYFTLEMLHLGNNRIEVLEEGSFMNLTRLQKLYLNGNHLTKLSKGMFLGLHNLEYLYLEYNAIKEILPGTFNPMPKLKVLYLNNNLLQVLPPHIFSGVPLTKVNLKTNQFTHLPVSNILDDLDLLTQIDLEDNPWDCSCDLVGLQQWIQKLSKNTVTDDILCTSPGHLDKKELKALNSEILCPGLVNNPSMPTQTSYLMVTTPATTTNTADTILRSLTDAVPLSVLILGLLIMFITIVFCAAGIVVLVLHRRRRYKKKQVDEQMRDNSPVHLQYSMYGHKTTHHTTERPSASLYEQHMVSPMVHVYRSPSFGPKHLEEEEERNEKEGSDAKHLQRSLLEQENHSPLTGSNMKYKTTNQSTEFLSFQDASSLYRNILEKERELQQLGITEYLRKNIAQLQPDMEAHYPGAHEELKLMETLMYSRPRKVLVEQTKNEYFELKANLHAEPDYLEVLEQQT

SEQ ID NO: 40809 - protein, 488 aa, Homo sapiens
MPKVKALQCALALEISSVTCPGVVLKDKEDIYLSICVFGQYKKTQCVPATFPLVFNARMVFEKVFPDAVDPGDVVTQLEYDTAVFELIQLVPPVGETLSTYDENTRDFMFPGPNQMSGHHDSNRQVTMRRISGLRGNAPRLEFSTTSVITECLISSRKCHTQDKFIYHLAPVEKSHGRLQNRTSRSQKKKSKSPERSKYCINAKNYEQPTISSKSHSPSPYTKRRMCELSEDTRRRLAHLNLGPYEFKKETDKPPFVIRHVDPPSPRADTLLGSSGRDCERDGWSRVHNDHSHLGCCRPKDYKVIRTPHGRDFDDSLEKCEEYLSPRSCSKPRHSARTLLVHSAPSTMPKHSPSPVLNRASLRERFHSDWCSPSNCDEIHDRVKNVLKSHQAHQRHLYDERDLEKDDELELKRSLLCRDSAYDSDPEYSSCQQPRGTFHLDDGEYWSNRAASYKGKSHRPIFENSMDKMYRNLYKKACSSASHTQESF

SEQ ID NO: 40810 - protein, 472 aa, Homo sapiens
MPKVKALQCALALEISSVTCPGVVLKDKEDIYLSICVFGQYKKTQCVPATFPLVFNARMVFEKVFPDAVDPGDVVTQLEYDTAVFELIQLVPPVGETLSTYDENTRDFMFPGPNQMSGHHDSNRQVTMRRISGLRGNAPRLEFSTTSVITECLISSRKCHTQDKFIYHLAPVEKSHGRLQNRTSRSQKKKSKSPERSKYCINAKNYEQPTISSKSHSPSPYTKRRMCELSEDTRRRLAHLNLGPYEFKKETDKPPFVIRHVDPPSPRADTLLGSSGRDCERDGWSRVHNDHSHLGCCRPKDYKVIRTPHGRDFDDSLEKCEEYLSPRSCSKPRHSARTLLVHSAPSTMPKHSPSPVLNRASLRERFHSDWCSPSNCDEIHDRDERDLEKDDELELKRSLLCRDSAYDSDPEYSSCQQPRGTFHLDDGEYWSNRAASYKGKSHRPIFENSMDKMYRNLYKKACSSASHTQESF

SEQ ID NO: 40811 - protein, 316 aa, Homo sapiens
MAAPEAPPLDRVFRTTWLSTECDSHPLPPSYRKFLFETQAADLAGGTTVAAGNLLNESEKDCGQDRRAPGVQPCRLVTMTSVVKTVYSLQPPSALSGGQPADTQTRATSKSLLPVRSKEVDVSKQLHSGGPENDVTKITKLRRENGQMKATDTATRRNVRKGYKPLSKQKSEEELKDKNQLLEAVNKQLHQKLTETQGELKDLTQKVELLEKFRDNCLAILESKGLDPALGSETLASRQESTTDHMDSMLLLETLQEELKLFNETAKKQMEELQALKVKLEMKEERVRFLEQQTLCNNQVNDLTTALKEMEQLLEM

SEQ ID NO: 40812 - protein, 286 aa, Homo sapiens
MAAPEAPPLDRVFRTTWLSTECDSHPLPPSYRKFLFETQAADLAGGTTVAAGNLLNESEKDCGQDRRAPGVQPCRLVTMTSVVKTVYSLQPPSALSGGQPADTQTRATSKSLLPVRSKEVDVSKQLHSGGPENDVTKITKLRRENGQMKATDTATRRNVRKGYKPLSKQKSEEELKDKNQLLEAVNKQLHQKLTETQGELKDLTQKVELLEKFRDNCLAILESKGLDPALGSETLASRQESTTDHMDSMLLLETLQEELKLFNETAKKQMEELQIAWMNHGILHQM

SEQ ID NO: 40813 - protein, 241 aa, Homo sapiens
MAAPEAPPLDRVFRTTWLSTECDSHPLPPSYRKFLFETQAADLAGGTTVAAGNLLNESEKDCGQDRRAPGVQPCRLVTMTSVVKTVYSLQPPSALSGGQPADTQTRATSKSLLPVRSKEVDVSKQLHSGGPENDVTKITKLRRENGQMKATDTATRRNVRKGYKPLSKQKSEEELKDKNQLLEAVNKQLHQKLTETQGELKDLTQKVELLEKFRDNCLAILESKGLDPVAVRNFARGAEAF

SEQ ID NO: 40814 - protein, 340 aa, Homo sapiens
MAKWLRDYLSFGGRRPPPQPPTPDYTESDILRAYRAQKNLDFEDPYEDAESRLEPDPAGPGDSKNPGDAKYGSPKHRLIKVEAADMARAKALLGGPGEELEADTEYLDPFDAQPHPAPPDDGYMEPYDAQWVMSELPGRGVQLYDTPYEEQDPETADGPPSGQKPRQSRMPQEDERPADEYDQPWEWKKDHISRAFAVQFDSPEWERTPGSAKELRRPPPRSPQPAERVDPALPLEKQPWFHGPLNRADAESLLSLCKEGSYLVRLSETNPQDCSLSLRSSQGFLHLKFARTRENQVVLGQHSGPFPSVPELVLHYSSRPLPVQGAEHLALLYPVVTQTP

SEQ ID NO: 40815 - protein, 616 aa, Homo sapiens
MYSQEDHIFQLCSTDLCASYVPVINQSVLVTHIVNYEDYLQIQASPLQTSQPTPPEELHTVGYVFTNDGQQTRSDEVNQVATGHQSKQKRSRESKRHSSSKRRKSMSRWLNKQEDAAVTHIVCEEKINNDQPAPDNVLSTAPPWLRDMAAAGISSTSTRDLYATVTHNVCDERMENDQLQLNNVLLTFPPERVNMAVADFSAMSPRDLYATINHNVYEVRMENNQPQFNNVLSTVKPGHINMAAAGIPAMSAKDAVVNLNVHGEKINKGQPAPDNFLSSVTPGLINVSGDGATVTHNAYEEKMENGQQAADNILSAVPPGLINTSEAGIPAMSTNDLYATITHDVSEKKIKNSQPATDNFLCTVTPGLINLAEAGILATSTRDLYDTATHNVHEEKMKNKHLITPCQQFHWDLLICQELLNFFIWIPDATVIHNIQEEEMENGQMPPDGFLSNSAPLELINMTEDCMPLNALDSFSYDFTSLSREELLYKHDSNEFAVGTKNYSVSAGDPPVTAMSSVETPQISPAMAKKINQDIKCQLMKEVQRFGQNYKRIFILLEELQGSMKVKRQFVEFTIREAVRFKKVALIQQLEKVLKEIDSHCHLRKVKHMRKKIIVI

SEQ ID NO: 40816 - protein, 359 aa, Homo sapiens
MPNPSSTSSPYPLPEEIRNLLADVETFVADILKGENLSKKAKEKRESLIKKIKDVKSIYLQEFQDKGDAEDGEEYDDPFAGPPDTISLASERYDKDDEAPSDGAQFPPIAAQDLPFVLKAGYLEKRRKDHSFLGFEWQKRWCALSKTVFYYYGSDKDKQQKGEFAIDGYSVRMNNTLRKDGKKDCCFEISAPDKRIYQFTAASPKDAEEWVQQLKFVLQDMESDIIPEDYDERGELYDDVDHPLPISNPLTSSQPIDDEIYEELPEEEEDSAPVKVEEQRKMSQDSVHHTSGDKSTDYANFYQGLWDCTGAFSDELSFKRGDVIYILSKEYNRYGWWVGEMKGAIGLVPKAYIMEMYDI

SEQ ID NO: 40817 - protein, 214 aa, Homo sapiens
MNNETTTLISLKEAMKRVDHKLQALETQFKELDFTKDNLMQKFEHHSKALASQAAQDEMWTAVRALQLTSMELNILYSYVIEVLICLHTRVLEKLPDLVRGLPTLASVLRRKVKNKRVRVVWESILEECGLQEGDITALCTFFIARGNKAEHYTAKVRQMYIRDVTFLITNMVKNQALQDSLLRAVQVIEKGKAVRTPEKQKSSLEELIPSVKN

SEQ ID NO: 40818 - protein, 265 aa, Homo sapiens; identical to SEQ ID NO: 4138

SEQ ID NO: 40819 - protein, 242 aa, Homo sapiens
MAAATRGCRPWGSLLGLLGLVSAAAAAWDLASLRCTLGAFCECDFRPDLPGLECDLAQHLAGQHLAKALVVKALKAFVRDPAPTKPLVLSLHGWTGTGKSYVSSLLAHYLFQGGLRSPRVHHFSPVLHFPHPSHIERYKKDLKSWVQGNLTACGRSLFLFDEMDKMPPGLMEVLRPFLGSSWVVYGTNYRKAIFIFIRWLLKLGHHGRAPPRRSGALPPAPAAPRPALRAQRAGPAGPGAKG

SEQ ID NO: 40820 - protein, 261 aa, Homo sapiens
MSRYTRPPNTSLFIRNVADATRPEDLRREFGRYGPIVDVYIPLDFYTRRPRGFAYVQFEDVRDAEDALYNLNRKWVCGRQIEIQFAQGDRKTPGQMKSKERHPCSPSDHRRSRSPSQRRTRSRSSSWGRNRRRSDSLKESRHRRFSYSQSKSRSKSLPRRSTSARQSRTPRRNFGSRGRSRSKSLQKRSKSIGKSQSSSPQKQTSSGTKSRSHGRHSDSIARSPCKSPKGYTNSETKVQTAKHSHFRSHSRSRSYRHKNSW

SEQ ID NO: 40821 - protein, 302 aa, Homo sapiens
MSEDEEKVKLRRLEPAIQKFIKIVIPTDLERLRKHQINIEKYQRCRIWDKLHEEHINAGRTVQQLRSNIREIEKLCLKVRKDDLVLLKRMIDPVKEEASAATAEFLQLHLESVEELKKQFNDEETLLQPPLTRSMTVGGAFHTTEAEASSQSLTQIYALPEIPQDQNAAESWETLEADLIELSQLVTDFSLLVNSQQEKIDSIADHVNSAAVNVEEGTKNLGKAAKYKLAALPVAGALIGGMVGGPIGLLAGFKVAGIAAALGGGVLGFTGGKLIQRKKQKMMEKLTSSCPDLPSQTDKKCS

SEQ ID NO: 40822 - protein, 366 aa, Homo sapiens
MAAARHSTLDFMLGAKADGETILKGLQSIFQEQGMAESVHTWQDHGYLATYTNKNGSFANLRIYPHGLVLLDLQSYDGDAQGKEEIDSILNKVEERMKELSQDSTGRVKRLPPIVRGGAIDRYWPTADGRLVEYDIDEVVYDEDSPYQNIKILHSKQFGNILILSGDVNLAESDLAYTRAIMGSGKEDYTGKDVLILGGGDGGILCEIVKLKPKMVTMVEIDQMVIDGCKKYMRKTCGDVLDNLKGDCYQVLIEDCIPVLKRYAKEGREFDYVINDLTAVPISTSPEEDSTWEFLRLILDLSMKVLKQDGKYFTQGNCVNLTEALSLYEEQLGRLYCPVEFSKEIVCVPSYLELWVFYTVWKKAKP

SEQ ID NO: 40823 - protein, 313 aa, Homo sapiens
MAAARHSTLDFMLGAKADGETILKGLQSIFQEQGMAESVHTWQDHGYLATYTNKNGRLPPIVRGGAIDRYWPTADGRLVEYDIDEVVYDEDSPYQNIKILHSKQFGNILILSGDVNLAESDLAYTRAIMGSGKEDYTGKDVLILGGGDGGILCEIVKLKPKMVTMVEIDQMVIDGCKKYMRKTCGDVLDNLKGDCYQVLIEDCIPVLKRYAKEGREFDYVINDLTAVPISTSPEEDSTWEFLRLILDLSMKVLKQDGKYFTQGNCVNLTEALSLYEEQLGRLYCPVEFSKEIVCVPSYLELWVFYTVWKKAKP

SEQ ID NO: 40824 - protein, 299 aa, Homo sapiens
MELLSALSLGELALSFSRVPLFPVFDLSYFIVSILYLKYEPGAVELSRRHPIASWLCAMLHCFGSYILADLLLGEPLIDYFSNNSSILLASAVWYLIFFCPLDLFYKCVCFLPVKLIFVAMKEVVRVRKIAVGIHHAHHHYHHGWFVMIATGWVKGSGVALMSNFEQLLRGVWKPETNEILHMSFPTKASLYGAILFTLQQTRWLPVSKASLIFIFTLFMVSCKVFLTATHSHSSPFDALEGYICPVLFGSACGGDHHHDNHGGSHSGGGPGAQHSAMPAKSKEELSEGSRKKKAKKAD

SEQ ID NO: 40825 - protein, 221 aa, Homo sapiens
MSYGRPPPDVEGMTSLKVDNLTYRTSPDTLRRVFEKYGRVGDVYIPRDRYTKESRGFAFVRFHDKRDAEDAMDAMDGAVLDGRELRVQMARYGRPPDSHHSRRGPPPRRYGGGGYGRRSRSPRRRRRSRSRSRSRSRSRSRSRYSRSKSRSRTRSRSRSTSKSRSARRSKSKSSSVSRSRSRSRSRSRSRSPPPVSKRESKSRSRSKSPPKSPEEEGAVSS

SEQ ID NO: 40826 - protein, 209 aa, Homo sapiens
MSYGRPPPDVEGMTSLKVDNLTYRTSPDTLRRVFEKYGRVGDVYIPRDRYTKESRGFAFVRFHDKRDAEDAMDAMDGAVLDGRELRVQMARYGRPPDSHHSRRGPPPRSPRRRRRSRSRSRSRSRSRSRSRYSRSKSRSRTRSRSRSTSKSRSARRSKSKSSSVSRSRSRSRSRSRSRSPPPVSKRESKSRSRSKSPPKSPEEEGAVSS

SEQ ID NO: 40827 - protein, 272 aa, Homo sapiens
MSGCRVFIGRLNPAAREKDVERFFKGYGRIRDIDLKRGFGFVEFEDPRDADDAVYELDGKELCSERVTIEHARARSRGGRGRGRYSDRFSSRRPRNDRRNAPPVRTENRLIVENLSSRVSWQDLKDFMRQAGEVTFADAHRPKLNEGVVEFASYGDLKNAIEKLSGKEINGRKIKLIEGSKRHSRSRSRSRSRTRSSSRSRSRSRSRSRKSYSRSRSRSRSRSRSKSRSVSRSPVPEKSQKRGSSSRSKSPASVDRQRSRSRSRSRSVDSGN

SEQ ID NO: 40828 - protein, 107 aa, Homo sapiens
MSGCRVFIGRLNPAAREKDVERFFKGYGRIRDIDLKRGFGFVEFEDPRDADDAVYELDGKELCSERVTIEHARARSRGGRGRGRYSDRFSSRRPRNDRRYVKGGWLH

SEQ ID NO: 40829 - protein, 269 aa, Homo sapiens
MSGCRVFIGRLNPAAREKDVERFFKGYGRIRDIDLKRGFGFVDPRDADDAVYELDGKELCSERVTIEHARARSRGGRGRGRYSDRFSSRRPRNDRRNAPPVRTENRLIVENLSSRVSWQDLKDFMRQAGEVTFADAHRPKLNEGVVEFASYGDLKNAIEKLSGKEINGRKIKLIEGSKRHSRSRSRSRSRTRSSSRSRSRSRSRSRKSYSRSRSRSRSRSRSKSRSVSRSPVPEKSQKRGSSSRSKSPASVDRQRSRSRSRSRSVDSGN

SEQ ID NO: 40830 - protein, 240 aa, Homo sapiens
MDPRKVNELRAFVKMCKKDPSILHTQEMRFLREWVESMGGTATQKAKSEENTKEEKPDSKVEEDLKADEPSSEESDLEIDKEGVIEPDTDAPQEMGDENAEITEEVMDQANDKKVAAIEALNDGELQKAIDLFTDAIKLNPRLAILYAKRASVFVKLQKPNAAIRDCDRAIEINPDSAQPYKRRGKAHRLLGHWEEAAHDLALACKFDYDEDASAMLKEVQPRAQKIAEHQRKYERKREE

SEQ ID NO: 40831 - protein, 494 aa, Homo sapiens
MPRVYIGRLSYQARERDVERFFKGYGKILEVDLKNGYGFVEFDDLRDADDAVYELNGKDLCGERVIVEHARGPRRDGSYGSGRSGYGYRRSGRDKYGPPTRTEYRLIVENLSSRCSWQDLKDYMRQAGEVTYADAHKGRKNEGVIEFVSYSDMKRALEKLDGTEVNGRKIRLVEDKPGSRRRRSYSRSRSHSRSRSRSRHSRKSRSRSGSSKSSHSKSRSRSRSGSRSRSKSRSRSQSRSRSKKEKSRSPSKEKSRSRSHSAGKSRSKSKDQAEEKIQNNDNVGKPKSRSPSRHKSKSKSRSRSQERRVEEEKRGSVSRGRSQEKSLRQSRSRSRSKGGSRSRSRSRSKSKDKRKGRKRSREESRSRSRSRSKSERSRKRGSKRDSKAGSSKKKKKEDTDRSQSRSPSRSVSKEREHAKSESSQREGRGESENAGTNQETRSRSRSNSKSKPNLPSESRSRSKSASKTRSRSKSRSRSASRSPSRSRSRSHSRS

SEQ ID NO: 40832 - protein, 344 aa, Homo sapiens
MPRVYIGRLSYNVREKDIQRFFSGYGRLLEVDLKNGYGFVEFEDSRDADDAVYELNGKELCGERVIVEHARGPRRDRDGYSYGSRSGGGGYSSRRTSGRDKYGPPVRTEYRLIVENLSSRCSWQDLKDFMRQAGEVTYADAHKERTNEGVIEFRSYSDMKRALDKLDGTEINGRNIRLIEDKPRTSHRRSYSGSRSRSRSRRRSRSRSRRSSRSRSRSISKSRSRSRSRSKGRSRSRSKGRKSRSKSKSKPKSDRGSHSHSRSRSKDEYEKSRSRSRSRSPKENGKGDIKSKSRSRSQSRSNSPLPVPPSKARSVSPPPKRATSRSRSRSRSKSRSRSRSSSRD

SEQ ID NO: 40833 - protein, 135 aa, Homo sapiens
MPRVYIGRLSYNVREKDIQRFFSGYGRLLEVDLKNGYGFVEFEDSRDADDAVYELNGKELCGERVIVEHARGPRRDRDGYSYGSRMTNGAEAVSTEAKMTAFPDWPWLFHTLCDPCPMTLWLTLPEAMTTAAFCH

SEQ ID NO: 40834 - protein, 335 aa, Homo sapiens
MPRVYIGRLSYNVREKDIQRFFSGYGRLLEVDLKNGYGFVEFEDSRDADDAVYELNGKELCGERVIVEHARGPRRDRDGYSYGSRSGGGGYSSRRTSGRDKYGPPVRTEYRLIVENLSSRCSWQDLKDFMRQAGEVTYADAHKERTNEGVIEFRSYSDMKRALDKLDGTEINGRNIRLIEDKPRTSHRRSYSGSRSRSRSRRRSRSRSRRSSRSRSRSISKSRSRSRSRSKGRSRSRSKGRKSRSKSKSKPKSDRGSHSHSRSRSKDEYEKSRSRSRSRSPKENGKGDIKSKSRSRSQSRSNSPLPVPPSKALKLGARFMSQQGTESLYSLASSC

SEQ ID NO: 40835 - protein, 221 aa, Homo sapiens
MSGWADERGGEGDGRIYVGNLPTDVREKDLEDLFYKYGRIREIELKNRHGLVPFAFVRFEDPRDAEDAIYGRNGYDYGQCRLRVEFPRTYGGRGGWPRGGRNGPPTRRSDFRVLVSGLPPSGSWQDLKDHMREAGDVCYADVQKDGVGMVEYLRKEDMEYALRKLDDTKFRSHEGETSYIRVYPERSTSYGYSRSRSGSRGRDSPYQSRGSPHYFSPFRPY

SEQ ID NO: 40836 - protein, 294 aa, Homo sapiens
MNSELDYYEKFEEVHGILMYKDFVKYWDNVEAFQARPDDLVIATYPKSGTTWVSEIVYMIYKEGDVEKCKEDVIFNRIPFLECRKENLMNGVKQLDEMNSPRIVKTHLPPELLPASFWEKDCKIIYLCRNAKDVAVSFYYFFLMVAGHPNPGSFPEFVEKFMQGQVPYGSWYKHVKSWWEKGKSPRVLFLFYEDLKEDIRKEVIKLIHFLERKPSEELVDRIIHHTSFQEMKNNPSTNYTTLPDEIMNQKLSPFMRKGITGDWKNHFTVALNEKFDKHYEQQMKESTLKFRTEI

SEQ ID NO: 40837 - protein, 356 aa, Homo sapiens
MTLVLSMNRFCEPIVSEGAAEIAGYQTLWEADSYGGPSPPGPAQAPLQGDRGAGPPLAGSHYRGISNPITTSKITYFKRKYVEEEDFHPPLSSCSHKTISIFEERAHILYMSLEKLKFIDDPEVYLRRSVLINNLMKRIHGEIIMQNNWCFPACSFNGTSAQEWFMAQDCPYRKRPRMAKEECEKFHACCFYQECGGHYLNLPLSVNANVGSASTAASSPSASSSSSSSSSSPPLPLPSCSRQVDFDVGSASIYKSDGQIPANEIFVTNVRSLGVQEKAKLNDEKANDDTNRDGGPLSHEPVGNDLAFECKGQFYDYFETGYNERNNVNESWKKSLRKKEASPPSNKLCCSKGSKI
